United States Patent Application Publication US 2008/0066199 A1 - sequence listing, part 4

SEQ ID NO: 21103 - DNA, 240 bp, Glycine max
  Clone ID: 700954472H1
gttcatcgaaaactgtggatctacctctgcctccagagtggggattggcaccaagtagctattatgttcctttcttccccatcattggaataccttgatcatgggctcaagacttcaagtgatttgtaatcacttgattaataatacttgtaggggataatagactgttatactgtcttatatgtgacatatgattattatagatatgtgtcatgtgtagtgtgaaagaatgatgccact

SEQ ID NO: 21104 - DNA, 244 bp, Glycine max
  Clone ID: 700954473H1
gagcatgacctctttgaatctttcttccaacaatcttcagggcgcaattccaatagaactgtcgcggattggcaatttggatacattggatatttcaaacaataacttagttggttccatcccttcttcccttggtgacttggaacatcttctgaagttgaatctaagcagaaacaatttaacaggaattattccagcagaatttggaaatcttagaagtgttatggaaattgatctttcaaat

SEQ ID NO: 21105 - DNA, 244 bp, Glycine max
  Clone ID: 700954474H1
cggctcgagacctcactttgttttttttctctgcagtaatagaaaaaaaagaaagaaagaagaagaagaagaagaagaagaagaagatgttgagggttgcagctagaaggctctcttctctctcctcctcctctccgtggcggcccaaccacgccgcttccgcttatgtctctcgaaacgcagtcgttgatgaccgcagatccgatccttcctcccatcccctttttcccttcagaggttttgc

SEQ ID NO: 21106 - DNA, 241 bp, Glycine max
  Clone ID: 700954476H1
gctaagccaagattaaagaaattatctgatttaatccttttattcttattgttcagtggttatctgggaagttcattgaatgtcttttctgaatttcttattttgaaattgaattgcaactgatatctggactagaagcatttgtattgatatcttataatgatattatccttttattcttatttttcagtggtttatctgggaagttcattaaatgtcttttctgaatctggttgaattt

SEQ ID NO: 21107 - DNA, 244 bp, Glycine max
  Clone ID: 700954477H1
gattgactgaggcgccagtacctttcacatccactgatgcctagtgggtctgatccaatccgaaaacccactcgcctttgttgcccgaaaaacctttctttctgcttctcccatccatccatggcttctggaatctcctcatagttctttcagctgcctataccctcgctctttgcctctcacacactaaaagaaaccatgaaggttcggtcatctgtgaagaagatgtgtgaattttgtcaga

SEQ ID NO: 21108 - DNA, 245 bp, Glycine max
  Clone ID: 700954478H1
gtttcttctctgcaccctttgggatctcttgcatagaccaaccccagaagaaggaaaaaaataaaaaataaataaaaatcaacccttttttgtaaatccccaccttttgttctgctaaagaatttatttttcctttttagttcctgcaatttatctttctggatcctaattgggtttgatctttctctttcaatttggtgattatgttgaaaattcttgaatttttatggtggttgaattttttt

SEQ ID NO: 21109 - DNA, 246 bp, Glycine max
  Clone ID: 700954479H1
gtgagttgcaggcagtgtcatctctcctttgacgacaagatgagcatcccaattccccatcggcagttattcatagacggagactggaaagtccccgtcctcaagaatcggattcccatcatcaacccttccacccaacacatcatccgggatatcccagcagctactaaggaagacgttgatctcgctgtcgctgccgccaaagctgccctctcccgcaacaagggcgccgattgggcctccgct

SEQ ID NO: 21110 - DNA, 241 bp, Glycine max
  Clone ID: 700954480H1
gcaggataacccaaaccggaacagaagcagaagcgaagatgggtggttccgttttcactcacttcctcgttctcccttcctcttcttctctctcttttcccactctcttcccatccaaattccccaccaaacccatcaatgaatccgttcccttcacgcttatctgcaaccaattccctttcaaactcactacttcgcggccttcccaattctcagctcctcctcgttactcatgctctgt

SEQ ID NO: 21111 - DNA, 242 bp, Glycine max
  Clone ID: 700954482H1
tgaaaacactgatgaggtgttactactgaatacttcttgaatatgattctattcttatttcagttcaatttaataaagaaacgtatgctattttttcacagtttgatgtccatctcatgcttgtttctcttgaccaactaagtacaccaagtttgcagcaaccttacctttgctgtcgaccaactttgtctgtcaagcacctttatgaacacgttgctcgtcagacacctttgccggttgaa

SEQ ID NO: 21112 - DNA, 184 bp, Glycine max
  Clone ID: 700954483H1
ctcaaacactagcaaagggaaggaaaagtaccttccccaataacccttctctccgatttggcttctctcatcggagggaaacaatcaatacaagaaaaccaaaacccacaaaaagattgtaacaaagcaagtatgaaaggataagtactaggttccgcggttcctctcaacctcacggtgggtg

SEQ ID NO: 21113 - DNA, 240 bp, Glycine max
  Clone ID: 700954484H1
gagaagcgtgagatatatgatcagtatggtgaagatgcgcttaaggaaggaatgggtggtggcggtggccatgatccgtttgatatcttttcatctttctttggaggtggaagtagtcgaggtaggaggcagaggcgcggagaagatgtggttcaccctctcaaggtctctctggaggacctttatctcgggacttctaagaagctctccctctccagaaatgtcatatgctccaagtgc

SEQ ID NO: 21114 - DNA, 241 bp, Glycine max
  Clone ID: 700954485H1
gctgcccactggacaggagacaatgctgctacatggaatgatttggcatactcaatccctgcgatattaaattctggaatctttggaattccaatggttggagcagatatatgtggtttcggaggaaatacaactgaagaactttgccggcgctggatccagttgggggctttttaccccttcgcaagagatcattcagacaagaactccaataggcaagagctttatctttgggactccg

SEQ ID NO: 21115 - DNA, 225 bp, Glycine max
  Clone ID: 700954486H1
cgaagacccctttttctggttattaacagagtcataaaaaaccaaagttttctattctctgtagctcacatggtgggctaagaatatctgactttggggtggaaagtatggtatggcaaggagagtttgagaactgaggtcttcaacttgagctttgagaagcttatgatggttcactctggcggagatactgggaaacgcgataccattgaagctggcgggatc

SEQ ID NO: 21116 - DNA, 240 bp, Glycine max
  Clone ID: 700954487H1
ttccttctacgtcttcaactcgactaccactgttaattggaggtttatggcctatatagattattgagaatgagattggtctgagaagaactctaaaattatgttatctattggtaacactgggatgttaatttccccggcagcaacatttttgcgtttcctttgagaagtgagcattggtgatagtagtctcaatcagttgaatctcttgtgtctatctcaagataatttgctagagct

SEQ ID NO: 21117 - DNA, 240 bp, Glycine max
  Clone ID: 700954489H1
tcaaaacaaaaccaaaacacagaaaaaaaaaaaaaaaagagtgtgggggaaacaaaagagacgagattgtcgaacttggggtccttttttgcaacctgcgaggctgcgactgcgagcgagcgaaagagagagagaatcgaaggcgacacacagcttgcatccgattccgagaagaagacggggcttctctttcgaatacaatctttctgctacatgatgttgaacaaatgatccagaatt

SEQ ID NO: 21118 - DNA, 245 bp, Glycine max
  Clone ID: 700954457H1
gagtttttgaagtacctcgaccagttcgggaagactaaggtacacatcttggggtgcccgtacttcggacaccccaacccacctgccccttgtgcctgtcctcttaaacaggcttggggcagtctggacgccctaattggacgactcagggcggccttcgaagaaaatggaggccgtccagagtctaatccatttgcaactagggctgtccgaatttacctcagagagataagagaaggtcaggc

SEQ ID NO: 21119 - DNA, 91 bp, Glycine max
  Clone ID: 700954423H1
catttctaaagcacaatgtgatagtggctgttttgaccgctaatgacaactatggtattgcaacatgttcaatgaaacacaattaattttt

SEQ ID NO: 21120 - DNA, 247 bp, Glycine max
  Clone ID: 700954424H1
caaacggacaaaggaagtgaaagggtttagggtgtgacctgagatcaacatgttgcggaggcttctctattctcacctcaaaaccctagccgccaccgcttcttcttccactccccgatctgcttccgccgccgccagattcgccgctctctctcgctcctcccgctacttctcaacccagtccgaggatgctactgccatcaaaaagaaggttgaggatgtaatgccaatcgctactggtcacgag

SEQ ID NO: 21121 - DNA, 247 bp, Glycine max
  Clone ID: 700954425H1
atcatgcatggatccccattgtctgatgattcatctcatcattctgattcaggaattctgaatgatggtttcagcaatggagtggttaaccacactggaccaaagcccttggacaatgcattgtattcgcaatgtgtacttgctatgtgtactttagcaaaggatccttctccacgcattgcaaatcttggtcgccgggtactgtccataataggtattgaacaagtggttgcaaaaccattgaagt

SEQ ID NO: 21122 - DNA, 245 bp, Glycine max
  Clone ID: 700954426H1
ggtttagagaaggtgggaagcactggacggatgcagttcccattgggaacggacgcttgggagccatggtctgcggccacgtccattccgaaaccatacacctcaatgaggacacgctctggactgggacacccgcagactacactaattccaaggctccaccagcactttctcacgttagaaacctcgttcaccgacaacactatccccaagccactgctgcttcttctgccttaacaggaaat

SEQ ID NO: 21123 - DNA, 247 bp, Glycine max
  Clone ID: 700954428H1
aaaatctcttgttcaactcttaaggccatgtaaattattcttgaaaaattcaatgctcttatatgtttatcaaaattgttagaaaaagataaatttaattcaagcctatttttttcttcatagtaaatcttctgattttgtttttttgacttctattacatcaggaaatgaggagtcaatgaatcaataaagatcaacttcaactactgcaagatgttagtggtgcttttagaccaggaattttgac

SEQ ID NO: 21124 - DNA, 249 bp, Glycine max; identical to SEQ ID NO: 1156
  Clone ID: 700954430H1

SEQ ID NO: 21125 - DNA, 255 bp, Glycine max
  Clone ID: 700954433H1
caacaatataaagtaaaagtgttattattccaatataataataataataataataataataataataataaagttcattcaccacactatttaatattatcttaacacgggaagaacttgatttggcacaacatattattctctctcccgaagcaagcatgagggattaattctgatctgatttcgtttccaaacgcggggcctaatttccacctaagtttgataacttcgatttgtgttagaccaaacttttcg

SEQ ID NO: 21126 - DNA, 195 bp, Glycine max
  Clone ID: 700954434H1
gcccaaggtcttgtacatttgggaaagggcttattaacacttaatccatatcattctgatcgcttcttactgtcaccgacagcacttgctggattaattaccatgttgcacgcatgcctagacatgaaagctattgtgttgggaaaatatcactatgttctctacttcctcgttttggcaatgcagccagggatg

SEQ ID NO: 21127 - DNA, 249 bp, Glycine max
  Clone ID: 700954435H1
ccaagatctcttttggtgctaaggatgttgatgtgacggaatggaaaggggacattctggcagtgggtgttacggaaaaagatttggctagagatgcaaactcgaagtttgagaatgtgattttgagcaagattgactcaaagttgggtggtttattagctgaagcctcttctgaagaggatttctctggcaaagttggtcagtcaactgttcttagaattacaggacttggatcaaaaagggttggat

SEQ ID NO: 21128 - DNA, 247 bp, Glycine max
  Clone ID: 700954436H1
gcattggcttactcatgcctaaattagagaccatcgctccttcttggctactgtccttgttagtaggttcccatggtttgcccacagaagtgtagcttcaattttgaataatgctccttctaagataccaaggaactatcactcgagagagtttgtctttcattggaattacttgtatttcaacatctaatccttttaggaggatagtatatttgagctttacagttttagtcatggaattagacca

SEQ ID NO: 21129 - DNA, 246 bp, Glycine max
  Clone ID: 700954438H1
gtttatttgaaattaacaagtagcaaagatgtttggaatcatcggaggaaacaagggtcacaagataaaggggaacttggtgattatgcgaaagaatgtgttggatatcaacagcattaccagtgttaagggtgtcatcggaaccggcattaacatcattggaggagtcgtcgacaccgttactgctttggcgtcccacatctccatccagctcattagtgccaccaaggctgatggacatgggaa

SEQ ID NO: 21130 - DNA, 244 bp, Glycine max
  Clone ID: 700954439H1
gaagagccataatgcgacttttggaggacagcatggctgagaagatgcttgccagagagatcaaggagggcgactctgttatagtggatgttgattctgatggtaatgtgattgtgctcaatggtagcagcggagcccccgaatccttgccagagacgcttcctgtataatgcggttaatttgctaatactatgtacttaatttgtttaaaccatagtcatagtatgtcttacttgtcaatgta

SEQ ID NO: 21131 - DNA, 246 bp, Glycine max
  Clone ID: 700954440H1
atccaaaaggcatttggcacagcaggatcacagtatgttcaatgggctgcaaaaatggcggtgggccttaacacaggcgttccatgggttatgtgcaagcaaactgatgctcctgatcctgtgatcaacacatgcaacggcatgagatgcggagaaacttttactggaccaaattcccccaataaacctgccttgtggactgagaactggacatctttctatcacagtgtatggtggactgccata

SEQ ID NO: 21132 - DNA, 247 bp, Glycine max
  Clone ID: 700954442H1
aaaataatcaaagctttgtgtgatatggctaaagataatgcacatgttcctatgctttcccgcactcatggacagccagcttcaccaactactttgggaaaggaaatggcgatctttgctgcaagattaagcagagaaaggaaggatctgtctcaggttgagatagtggggaaatttgctggtgcggttggaaattacaatgcacatattgttgcatatcctgatgttaactggcctcacattgcag

SEQ ID NO: 21133 - DNA, 245 bp, Glycine max
  Clone ID: 700954443H1
gggttttggttttttttcattatcttcctcagtaagcaatgtcttctcccgcggagttttatcactctcttccgccaataacgaaggcatatggcaccgtttgcctgttggctaccgcaacttaccatcttggattatatcatccagcttacattgcactattctacgataaagtgttctacggttttcaggtttggaggttgttcacaaacttatttttccttggaccattctctatcaatttt

SEQ ID NO: 21134 - DNA, 242 bp, Glycine max
  Clone ID: 700954445H1
gcattagtgaacctcgtcttgtagccagaaagttcttggccagacctcagcatgagggtgttggagccgttgttagaagaagcatagggagatttgaactcaagtactttgatcctttccttgtcttggatgaattctcagtgactgctcctgctgggtttcctgatcatccacatagaggatttgagacggtcacatacatgttgcagggagctgtaacgcacgaagattttgaaggacat

SEQ ID NO: 21135 - DNA, 244 bp, Glycine max
  Clone ID: 700954446H1
gtggtgccggagagaaacccattccacttggtgagaacgttctgcagaagcatgctgcattctttgacttgaataaagatggtgtcatctacccatgtgagacttttaaagggttgcgtgaaatcgggactggggttttgctgtccgttggaggtgctattttcatcaatgtgtttctcagtcagagtactcgtcccggaaagtttccatctatactttttccaattgaaattaaaaatatcca

SEQ ID NO: 21136 - DNA, 244 bp, Glycine max
  Clone ID: 700954447H1
caagcctaaagaggaccaagaagtgaattcaaaacaggttgacttgtgtttgaatctatttgtctgtgtctgtcttcaaatggatgccatatttgctcattttcatgttgggttacctttggtagtttggtttgacatattacatttatgatttggtaggcacagttggggaaatgagaagacatttgttgtatacctaaatgtgcttctttaatattctttcaacacaagcctgagaattgtg

SEQ ID NO: 21137 - DNA, 247 bp, Glycine max
  Clone ID: 700954448H1
cgccgctttgtctgcagaggtccaagtgcccgaaactttcgacgacacggaggaggacgacggtgctgatggctccaccgccaccaacaccgtccccaccaccaagcctaagaaaggcaaggccgcattgcctctcaagagggacaggacgagatctaagaggttcttggaaattcaacaattgagggagcgtaagaaagagtatgacttgaagacagcaatatctttggttaaagaaacagctaaa

SEQ ID NO: 21138 - DNA, 122 bp, Glycine max
  Clone ID: 700954449H1
ggcacctgagctgctattgagcaaggggtatgatggagcagctgctgatgtttggtcatgtggggtgatcctttttgaattacttgcaggctatttaccatttaacgaccggaacttgatga

SEQ ID NO: 21139 - DNA, 251 bp, Glycine max
  Clone ID: 700954450H1
ttcagccacaacaaaaaagtaactccctttgatttcacactttgctcattttcgttttctgattttcccacataaataaatctctcccttcttcttctcttacactcttctgtttcagcaatcaatcaatttccccactattagggtttttcatttgaaatgtggagagccaataatggagccccttgaatccgaatcggttagttcctccgccaaggacccgctattgggtgaaccatcttcctctgttc

SEQ ID NO: 21140 - DNA, 249 bp, Glycine max
  Clone ID: 700954451H1
agaggaagaagaagaagaagagtatgggaacgacggtggcgggtctagcgccgggtctgtcacggaagctgaagaaggttctagaatctcggatcgatacgccagacctcttgtcttcgctcaacacgctctcttccttctacgatgacaacactcctcaggcgcgtcgcaacctccgatccaccatcgagaagcgcgccctctccatcaaccgcgaattcctcgacgcttcccacgccgcgcagtggg

SEQ ID NO: 21141 - DNA, 244 bp, Glycine max
  Clone ID: 700954452H1
ctagaaacagtgtgatgaaaatgaaggtccttgttttcttcgttgctacaattttggtagcatggcaatgccatgcgtacgatatgttccctctccgaatgaacactggctatggtgcccgtactccggaggtgaaatgcgcaagttggaggcttgctgtggaagcacacaacatctttggctttgagaccattcctgaagagtgcgttgaagcaacaaaggaatacatccatggcgaacaata

SEQ ID NO: 21142 - DNA, 245 bp, Glycine max
  Clone ID: 700954453H1
ctcgagccgcaccaattcattctcatacattccttcttcttcttcttcttcttcttcttctttcacaatcacaatggcgcgagtggatctggatggtaaccccatcatgccacttacgatctgcatgatcggcgctggcgggatcatcgggtcgcacctctgcgagaagctcatgtccgaaacccctcacaccgtcctcggcctcgacgtctacagcgacaagatcaaacacctcctggatcccg

SEQ ID NO: 21143 - DNA, 223 bp, Glycine max
  Clone ID: 700954454H1
gctaactccagcaacaacaacaatagaagaggaagaactaggaattccttttgttgttgttgttgttgttgttgtccttgcccctctcctcttctttgatgggttccgaggtctccaaacaggttgatagacgaaaggcgatccacacagagggaaaaactctgtctgatcttagaaactctggggaagattaccctggctcagattatcatccctcagacag

SEQ ID NO: 21144 - DNA, 246 bp, Glycine max
  Clone ID: 700954422H1
caaatatgttcgttgattttctccaaaacttagaggttgatacggatcctaataaaggcttagtgagtcacactatccataatgattttcagtatcatagccccaggctcacaacactagataggaactctgatagcacagaatctgagccaagggaaactggcaacagggttgtcaatgtgtccaggatacttgtgaccgaagtggatcttctgcagcctgacaggatccataatgggattgtgt

SEQ ID NO: 21145 - DNA, 72 bp, Glycine max
  Clone ID: 700954455H1
catttctaaagcacaatgtgatagtggctgttttgaccgctaatgacaactatggtattgcaacatgttcaa

SEQ ID NO: 21146 - DNA, 99 bp, Glycine max
  Clone ID: 700954456H1
gctgctaagcatctatatcctagtctgttttcatggcaaaaacaacatcacataggctatcgtctcaagtcctaggttctcggaccacctaagtgtcca

SEQ ID NO: 21147 - DNA, 261 bp, Glycine max
  Clone ID: 700954391H1
ctctcaatacatttctcaagcagctctctgttactaaccctcctctcactcgtgcctaagcttcttctctcctttcgttcaacgttgtggcgtcgctgtgaaaaccctcaaagaagtgtcgtgaattttagagcaatgtgattgcctctggtggccttggcggggaggttttgatatgggatatcgaagctgcactagcttcagctacaaaatgcaatgatccaatggatgatgatgataattcaaatgatatcaatgttt

SEQ ID NO: 21148 - DNA, 254 bp, Glycine max
  Clone ID: 700954392H1
aattcttttgaagagttggagccagaatatgccaagggttacaaaaaagcaagaaatggaagagtttggtgcattggtcctgtttcactcagcaacaaggatgaactagacaaggctgagagagggaacaaggcttcaattgatgagcatttttgcttgaagtggcttgattcgcagaaaccgaaaggtgtgatctatgtgtgccttggaagcatgtgtaacataacatcacttcagttaatagagcttggttt

SEQ ID NO: 21149 - DNA, 208 bp, Glycine max
  Clone ID: 700954393H1
ggacacacgctcatggaggttggacccgacggtgttgccgtcatcaccatcgtcaaccctcccgttaattcactttcctttgatgtgttgcgcagtttaaaggagagttttgatcaggcgatacagagagatgatgtcaaggcaattgttgttacaggtgcaaagggaaaattttctggaggttttgatatttctgcatttggtggta

SEQ ID NO: 21150 - DNA, 193 bp, Glycine max
  Clone ID: 700954394H1
atggaaatagagaggctaagaagaaatgcagaggcgctggttgagaagaccatgaaagggaacgatgcttctcatgatgctgctcatgtttggagagttcgtgatcttgctctctcccttgccaaagaggaaggcctctcttccaatccccactccatggaaattgttgagctggctgcgcttctccatgaca

SEQ ID NO: 21151 - DNA, 241 bp, Glycine max
  Clone ID: 700954395H1
gttgaagatgatagcagcaccaaggaccttggttgggatgaacactggatcttctgggtgggaccattcatcggtgcagctcttgcagcactctaccaccaggtcgtaatcagggccattcccttcaagtccaagtgattcaatcaaacggttcatgcttaatcaagttgggaacaacaacaacaacaagaatcaagccaatgtttgtggggtttggtttcatttcgatgagatgatctgt

SEQ ID NO: 21152 - DNA, 277 bp, Glycine max
  Clone ID: 700954396H1
ctcgaggggaaccaaaaactgtgaaattctgaagccactaggccttttaaaaaccaaactaaggaagacggtttagacagagagtacttcaagctaagaaaatggaaagtggggttgtggctgtgaacaacaacatcaacaactatgaatccaaggcaacttccaccatcaccattaagggcattctcagccttctaatggaaagcattgatgatgagaattgtgatggtggtggaagcaagaagagagttatttctcttggtatgggtgaccaact

SEQ ID NO: 21153 - DNA, 249 bp, Glycine max
  Clone ID: 700954401H1
cagttgaggagcaacgattatgaatccatgtgagactatgtgggctaggagctttgagtagtagaatatgcaggaaaagttgcggattggatagctgaggagcttcaacatttgcttccagagaacgttgaagccaatttggacaaactggttctatcaggtcacagtaggggtgggaaaactgtatttgctgtggctcttggtcatgcaaaaactaatctcaagttttcagcacttgtaggcacatct

SEQ ID NO: 21154 - DNA, 250 bp, Glycine max
  Clone ID: 700954402H1
gtaagaaagcccgctagttattttagtgcagttgaacctccatacagactatatggttgtcagagcaatgtaatgtactcacggcctcaatcgtttgatggagttcctccgttactctctcggcgaatacttgaaactcttacctatcttgctcgccatcatccatttgtggcaaaaattttgcttcagtttaggctgcatcctcctgcattaagagatccagataatggctggtgttgcacctggcaaa

SEQ ID NO: 21155 - DNA, 254 bp, Glycine max
  Clone ID: 700954403H1
agcaaatgcagcatagcctgcctcgtcacaaaatactgaacgccgcagctctgtggttgatcgacgcattcttcacttcagtcccacaatgtctataacgcacagcctcaccacttcactctcttcttcttcctctgctttcttagctccctcttccttcaattccagaggacaggtttcgttgcctgtgaagagcgtgagcatttgcaaatgcgttgccacacccgaagctgagaccgcctacaagacagggg

SEQ ID NO: 21156 - DNA, 251 bp, Glycine max
  Clone ID: 700954404H1
tttcacaattttatcctcgaccagggacacctgctgcaaggatgaaaaaggttccaagtaatgtggttaagagaagaagccgtgaactgacaaatgtctttgaatccttcacaccatactctgggatggaaggcaaagtggaaagaatttggattactgatattgcatctgatggagttcacttggttggtcatacaaaaggatatatacaagttcttgtacttgctccagacaatatgctgggaacttca

SEQ ID NO: 21157 - DNA, 248 bp, Glycine max
  Clone ID: 700954405H1
gaaccatccaatgctgtaaattactcccttggtactgtatctgggccccaggatacagggataactccagagaaccgaacatgcaatcctaagagatgtagattttttggctgtacgaaaggagctcgaggtgcttcggggctttgtatcgggcatggtggtggacagagatgtcagaaacctggatgcaacaaaggtgctgagagccgaactgcttattgtaaggcccatggtggatggaagaggtg

SEQ ID NO: 21158 - DNA, 248 bp, Glycine max
  Clone ID: 700954407H1
atcagtgccaattttgtttcacccttgtgggagctacttttttgtctcagaagccggagccgtgtgtgtgggtagctcagctgctatgattatggtgattcacggtacgcttgctgctagctctccagctagtggtattgacgaccatctgccatatgcggatcatgtctattgcgggtctgctcctacttcgatgcagtgaaactgcatgcaccagagccttcctgagtcgagctatgcagcgtggc

SEQ ID NO: 21159 - DNA, 247 bp, Glycine max
  Clone ID: 700954408H1
gacgaaacttacatgcactttcttaagtgcacttctctgataattggaggtttatggcctataaagattattgaaatgaaattggtctgagaagaactctaaaattatgttatctattggtaacactgggatgttaatttccccggcagcaacatttttgcgtttcctttgagaagtgagcattggtgatagtagtctcaatcagttgaatctcttgtgtctatctcaagataatttgctagagctg

SEQ ID NO: 21160 - DNA, 251 bp, Glycine max
  Clone ID: 700954409H1
agcagaactgcttcaccttcttctcttctctccgcctccaccaccactccctcactctccactccctcaattcacaatcctcacgttgcctcgttcacatgaaactcctctcgccctccgtgttctcgctctctctctgaatcactcatccttataataaataaataatttctcgaagaaggagaaagaggttttcattgttgtggttgttgtagaagaagaagaagctgaagaagaatggagtccacaga

SEQ ID NO: 21161 - DNA, 248 bp, Glycine max
  Clone ID: 700954410H1
ctgtctcattctctttcctctttcctttttccttagaagaatcgaaaacgtcttcaaaaaaccaagccattattaatggctgtcgattccttcttccagaaagaacatcaaattcgggagtttgtggacgggaatggaaacgtagctgtcggtttgaagttgcataataaaccaagtaatgatggccttaaccgacagtttcctctagagattccgccgattctatttgaagagacttcacttccagc

SEQ ID NO: 21162 - DNA, 245 bp, Glycine max
  Clone ID: 700954411H1
aaaaaaggacattcattcatctatggctacccttattgctcccagcaaccactctccccaagaagatgctgaagctctcagaaaggcttttgaaggatggggaactgatgagaacactgtcatagtaattttgggtcatagaactgtgtatcagaggcagcaaatcagaagagtttatgaggaaatttaccaggaggatcttgtgaagcgcctagagtctgagatcaaaggagactttgagaaag

SEQ ID NO: 21163 - DNA, 244 bp, Glycine max
  Clone ID: 700954412H1
gtcaatatacaatttctgatctctgcgttccaatctaattgatcaatatgccttcaaacgatggtgtagttatcgtggtcatgggtgtcagcggtgctggaaaaaccacaataggtcggaagctggaaaaagagtcgaaatataagtatcttgatgctgatgattttcactcagaatcaaacaaagaaaagatgcgtatgggaatcccacttacagatgaagatcggatgccatggtttgaatc

SEQ ID NO: 21164 - DNA, 248 bp, Glycine max
  Clone ID: 700954413H1
cggactgatagcgccgtttagaaccgtcatagttgctttcttcctcattttccgattccgcaatgcaaagggtgtcccaaacctccaaaatctggaggaccgtagcctccaaagctagaataaacgtgttttccatcaacgacccttttgcttcgcgctccttctctgcggttcccgtcgtggcagcaaccaccagaaaattgcatcaaccggagattccgagcagtttccagaaatggggttcggtt

SEQ ID NO: 21165 - DNA, 250 bp, Glycine max
  Clone ID: 700954415H1
ttccctacctctcccttcaagatgcagatcttcgtcaagaccctcaccggcaagaccatcacccttgaggtggaaagctctgacaccatcgacaacgtcaaggccaagatccaggacaaggaaggaatccccccggaccagcaacgtctcattttcgccggaaagcaacttgaggacggccgtacccttgctgactacaacattcagaaggagagtactcttcacctcgtcctccgtctccgtggtggca

SEQ ID NO: 21166 - DNA, 250 bp, Glycine max
  Clone ID: 700954416H1
tatatgcagagtctcttgcacgctttcaaggagggtcacttacatatatcctttgtatggtttaggagagcttccccaggcatttgcacggcttagtgctgtttatggtgggacatatatgttgaataagcctgagtgcaaggtagaatttgatgaggaaggaaaggttgttggtgtcacatctgaaggggaaactgcaaagtgcaaaaaagttgtttgtgatccatcatatttgcccggcaaggtgagg

SEQ ID NO: 21167 - DNA, 254 bp, Glycine max
  Clone ID: 700954417H1
caaatatccttcagtagagtccttgattgagaaggatttgagtgtggacaaattagagatctcgagaagattgacacatccacatccacatcctcatgaagatggcaacaggagaaagattttagaaagacttgattctgattctcagaagttgacaaaccttgaaattaccgtgcaagatttgatgagcacgatagaaattacagagagcacaaagggaaaagatagtgagtatgataccgtgaaaggacagc

SEQ ID NO: 21168 - DNA, 250 bp, Glycine max
  Clone ID: 700954418H1
gttggcagcgaaagggtgagacaagaggcttcacctgtaatcagacaattgtggtcaatgcgagagtcataccattacaatgcaagtaaatgaaggacacaacagaccttgctcagacccatttttacagtggagtaaatggcagttgcttgattctcttttacctactggtggatttgctcattcttttggcctcgaagcaacagttcagtcccacttagtgtctaattccaatgaccttaagacattg

SEQ ID NO: 21169 - DNA, 250 bp, Glycine max
  Clone ID: 700954419H1
cgagaaagagaggaaattggcgtggcgtggcgtgatcggggcacagtctgaatctgaaatccatcttcaaaatctcaattcgatataggagggagctgtgccctgccctgacgttaaaaaaatgtcgctgaatatgaaaaccctaacccaagcattggcgaagaccgcggcggtgatcgagaagacagtgcatacgacggtgcaggatgtgacaggcccgaaggcacttcaggactgagagctgctcgac

SEQ ID NO: 21170 - DNA, 194 bp, Glycine max
  Clone ID: 700954420H1
agaatagctagttgaatttatttcaacctttaccaaatccaacataattgggtcatattggtaaataataaagttagtttttaatatgacccaatatatgttgggtttggtaaaggttgagataaagaatagctagttgaatttataagtaagaagaaaaaggggggaggacacaaaatgattgggtttgacag

SEQ ID NO: 21171 - DNA, 248 bp, Glycine max
  Clone ID: 700954421H1
ggtgtcttagctcaaacctcacctcaataatctttcgtgctagctagcttaatcatattccaattccaacagaaccaaattctgctagctagctagtacgtcaaaggaaataaaataatatggcattcagcgggacccaacagaaatgcaaggcttgcgacaaaactgttcacttggtcgaaggtttatctgtcgatggggctgcttatcacaagaattgcttcagatgcagccattgcaatggcctt

SEQ ID NO: 21172 - DNA, 255 bp, Glycine max
  Clone ID: 700954390H1
ttacaatatttcttagttcgcaccattgcaacacgcaatgttgttgctgattcagttcgatccagtcttgtctctttatctctgcagaacctaaagggtggttttttccgggcaccaaaatttgtggggttcatcacagttcgctcctttctgcaaaataaatttggcccaaaagtataatcaatactttgtatttcattttggataatgattgtggaggacgaaaattgtggtgttggttctgggggaggagga

SEQ ID NO: 21173 - DNA, 83 bp, Glycine max
  Clone ID: 700954360H1
caggtggcattattgagcaatcatttctgcttgggcaatttgctgtggaaatgccttcggaagtttaaaagggttgggttttc

SEQ ID NO: 21174 - DNA, 268 bp, Glycine max
  Clone ID: 700954361H1
cagaaacgtatgtcggttcgcgatcttgccagcaaatttgagaagggtttggcagctgctgctaagttgtctgaagaggctagactcagagaagcagcttctctggaaaagcatgttcttttgaagaagcttcgagatgcactgcaatccttaaaagggagagtggcaggaagaaacaaggatgatgtagcggaagctattgctatggttgaagctctagcagttcaattgactcaaagggaaggggaattaatacaagagaagtctg

SEQ ID NO: 21175 - DNA, 211 bp, Glycine max
  Clone ID: 700954362H1
ccaatcttccaccgttcaattcgctgcctcacggcaaagggtccttgaatttagaccccttggttgcttctcagttttgcgaattccatagatcaaggtcagccccgtcaaaatccctcagagaacagcgtctcgggggaaaaggtcaccgaaggaaaattttgggaaactttgtgagttatctgtctcacgagttctcttcattggtcac

SEQ ID NO: 21176 - DNA, 275 bp, Glycine max
  Clone ID: 700954363H1
gcaagggccatacaatggggttggactctgcacaccgacctcaaacttgtgtccgaacagagacctttacgcgttttgggatccattccatccatcagagaaagctagtcgaatcatagtccaacagatcctcagaggcaccactgagtacatgcaccccatgaatctcagcactatcatggccatcgattccaagacttgatcaatgcatcatctacaataaccttccttcgtattctatctatgtgtgtgccccctaattaagtttatttcat

SEQ ID NO: 21177 - DNA, 253 bp, Glycine max
  Clone ID: 700954364H1
tttcaatctagggttttattgaactctaattccatattctaactctgctttcattcgattcagggggaattaaattgtttctatattttgttttcagtttttcacaaattagaagtcgataaagaagatggtgagggtgttgagaagctgcattcaatcgacattgaagctggtaaactcggtaattgggatggccgggctagccatgattctatactccgcatggatgattagggtagcacaaaggaagatg

SEQ ID NO: 21178 - DNA, 262 bp, Glycine max
  Clone ID: 700954367H1
ctctgttctgtaatttaattagcaaacattgacatagcctctgaactattacaggatatgttgaatattgttgtatttcacaaaaaaaaagacaaaaaaaaaaaaaaaaaaaaaaaaaaaagggcggccccccattttttgccccggcccccccgggatttaatccgggcccggtccctgcgggggtacgattttcccctaaggggggccgttttgggctttggggtattcagggccatgattgttcccggggagaaatttt

SEQ ID NO: 21179 - DNA, 262 bp, Glycine max
  Clone ID: 700954368H1
gcgccgtattccttaaaagggggaactctaacaccggaattttcctcacaaacacaataatcgattcgaacgttcttgaagttgaaagtcattaactatgggaatgatagtggaggttgaaaacgaaaacggagacctaaacgacgccgttcttgttccaccccctaacttctccatggtcgaggactgcattttccgatccggcctccccaacccttccaatttcccctttctccaaaccctaaaccttcgttccatcata

SEQ ID NO: 21180 - DNA, 260 bp, Glycine max
  Clone ID: 700954369H1
cctaaactagaagagaaaaagagaaagtgcaacatcataacatcaaattcgtatgtgcttttgcttaccctaaaatctccatccctacaaaaagaagaagaaaaacaagaagaagtttaacatgtcagctgccgtggccgcttccgctgccgccgctaccatgtcgggttaccaccacaactcctcctcgagacaacaacaacacatagaccatgaattggccttaacaccacaacgagtgtgtgtctctccacctctga

SEQ ID NO: 21181 - DNA, 259 bp, Glycine max
  Clone ID: 700954371H1
gtctgttctctgtggaaaagttgttgtgtgaagagaagcgaatggtaggattgaatgtgtctcagccatttttgtcaccgatttgcaagacggcaccttacccacttgatctcatagccaccgccgcgtgcctccacttcggccaccttctccgccgccgcgccacccaccatccccgccttggggttcttcttcactcctgtttcaagattgaaggattagtggtgtcagagatgccttcaactcaatgggttgaact

SEQ ID NO: 21182 - DNA, 251 bp, Glycine max
  Clone ID: 700954372H1
attgactatctggaattaatagtatatgagagttaattaagacagcttgattggaaacaacaaagaaaagttttgatcggctaaaggggtagacattctgatgtatttttgtattaccaagaaggcaaagagttatgaattttcagatctcagttgcacacattaaagtttgttctgtttctgagttctgtttcaaagatcatagattaactcagactgtttctgggtgttttttatttttttttgataaa

SEQ ID NO: 21183 - DNA, 248 bp, Glycine max
  Clone ID: 700954373H1
caaacattagctatccctacaatactcctggtgatattcatatgggtggtacaaccaaagcaacgtcatgggaagattgcaccaggtcccaaggcgttgccaattattggtaacctccacatgctagggaaactcccgcaccgcacccttcaaacctttgcaagaagatatggacccataatgtccttgaagctagggcaagtccaagccatagtggtttcctcccctgaaaccgctgaactattcct

SEQ ID NO: 21184 - DNA, 150 bp, Glycine max
  Clone ID: 700954375H1
ctctgttctgtaatttaattagcaaacaatgacatagcctctgaactaatacaggatatgttgaatattggtgtatttcacaaaaaaaaagaaaaaaaaagaaaaaaaagaagaaaaaaaaggggggccccccaaaaattgaccccccaa

SEQ ID NO: 21185 - DNA, 246 bp, Glycine max
  Clone ID: 700954376H1
gcgccgtattccttaaaagggggaactctaacaccggaattttcctcacaaacacaataatcgattcgaacgttcttgaagttgaaagtcattaactatgggaatgatagtggaggttgaaaacgaaaacggagacctaaacgacgccgttcttgttccaccccctaacttctccatggtcgaggactgcattttccgatccggcttccccaacccttccaatttcccctttctccaaaccctaaa

SEQ ID NO: 21186 - DNA, 258 bp, Glycine max
  Clone ID: 700954377H1
cctaaactagaagagaaaaagagaaagtgcaacatcataacatcaaattcgtatgtgcttttgcttaaccctaaaatctccatccctacaaaaagaagaagaaaaacaagaagaagtttaacatgtcagctgccgtggccgcttccgctgccgccgctaccatgtcgggttaccaccacaactcctcctcgagacaacaacaacacatagaccatgaattggccttaacaccacaacgagtgtgtgtctctccactct

SEQ ID NO: 21187 - DNA, 272 bp, Glycine max
  Clone ID: 700954379H1
gtctgttctctgtggaaaagttgttgtgtgaagagaagcgaatggtaggattgaatgtgtctcagccatttttgtcaccgatttgcaagacggcaccttacccacttgatctcatagccaccgccgcgtgcctccacttcggccaccttctccgccgccgcgccacccaccatccccgccttggggttcttcttcactcctgtttcaagattgaaggattagtggtgtcagagatgccttcaactcaatgggttgaactatcttcaactatc

SEQ ID NO: 21188 - DNA, 224 bp, Glycine max
  Clone ID: 700954380H1
attgactatctggaattaatagtatatgagagttaattaagacagcttgattggaaacaacaaagaacagttatgatcggctaaaggggtagacattctgatgtatttttgtactaccaagaaggcaaagagttatgaatttccagatctcagttgcacacattagaggttgttctgtttctgagtgctgtatcagagatcatagattgactcagactgtttct

SEQ ID NO: 21189 - DNA, 265 bp, Glycine max
  Clone ID: 700954381H1
ctctggccctgttgttgccatgatctgggatggcaagaatgttgttacaactggccgaaagattatgggagccacaaacccagctcaatctgagcctggaactatccgtggtgactttgccattgacattggaaggaatgttatccatggaagtgatgcagttgaaagtgctaacaacgaaattgcattgtggttccctgagggccctgctaactggcaaagctcccaacactcttggatctatgagtaaatcatatgcctcaag

SEQ ID NO: 21190 - DNA, 261 bp, Glycine max
  Clone ID: 700954382H1
gattgaactggtgcatgctcaattcaaaagagccaaagctcaaacagaatttgctgatatacaactagacctagatatggcagtggcgcaaaaagaaaaggaccctgatcctgctgtactgaagagactttctgagaagttgcatctaaggacaataaatgacctaacgaaagagtctagtgaattacctgaattgttgatcacaagtggtggagaactacgcgactcttttgaaatgatcacatcccttctcagcaaact

SEQ ID NO: 21191 - DNA, 203 bp, Glycine max
  Clone ID: 700954383H1
gcataattgaatcgaattgaggagaatgacgatgaccaccatacaatcgacgccaggaagctcagggtatttggatttgtttcctgagcgcaaaatgtcatttttcaagagtccttatattctgggactcagtgctgtggctggcattggaggcatgctttttggctacgacacaggtgtgatatcaggagcacttctatata

SEQ ID NO: 21192 - DNA, 242 bp, Glycine max
  Clone ID: 700954384H1
gtgatctcggaattcggatctggtgtcaccgtcttgttttctgttttagaggaattggtgcctttaatgcttaattttctaatgaagcatgcaatattgttttgaattagtcaccttcaagtcgaggaacatacatatacacatatgtgttgtgatcaccacaccagattccacttctttgctgagtgtgtggatgtgtgtacatagattttgttgtgtatatatttgggttctcaccttca

SEQ ID NO: 21193 - DNA, 248 bp, Glycine max
  Clone ID: 700954385H1
attacaattaagaaaatcttggataatgaaataggcgaattatatgaggttcttcttaaaattgagtctttttgttttgaggttaattttttcctccacggtcaagccaaggcgattagttacgatagccacttatatttttgtctccgatgtaattgcaatctttaatcgtcgtccttcgtagtgggaatatatgtacagataatgtcttggcataatatattcagaaatgttaagacgttcttcca

SEQ ID NO: 21194 - DNA, 257 bp, Glycine max
  Clone ID: 700954386H1
aaattatccataaaaaactggttaaagccagtttcacttacccttggtgatgcagctctagccctacattatgcaaatatgattgtattgattgagaggatgttgtcgtcacctcacctggttgatcttgcagcaagagatgatctgtacaatatgcttccaactactgtaacaactgctttaagggctaagcttaagtgccatgcgaaaagtaaatcatcctccaatgctcatgatgcaaaccctgctgctgaatg

SEQ ID NO: 21195 - DNA, 235 bp, Glycine max
  Clone ID: 700954387H1
ggtaaaagcgggaccagagagaaaacagggggatttgtttctctctgcagttgcactcttgcaggcaggtgcagctgtttcccgttctgctcctctcccaacccctctgtttctttggagtgagaaagttttatactttagaaccagctagcgagcaagtgagccagtgtcatacatatatataaatagcgtgcgagaaatgcagcagcacctgatgaagatgcagcctatcatg

SEQ ID NO: 21196 - DNA, 256 bp, Glycine max
  Clone ID: 700954388H1
gccaaggtaggttaaacactcttcttcatcgtcgtcgcaatgggacgtgtgatccgtgcgcagcgtaagggagcaggctcggtcttcaagtcccacacgcaccaccgcaagggccctgcccgcttccggagcctggatttcggagagcgcaacggctacctgaagggtgtcgtcactgacgtcatccacgatcctggccgtggcgcgcctctcgctaaggtcgccttccgccacccgttccgctacaagaagcaga

SEQ ID NO: 21197 - DNA, 182 bp, Glycine max
  Clone ID: 700954389H1
cgaacaaccaaacatgtctccttcatcattgtgctctcttcaaacgttcccgccaatatctcacgcattgcttaaccgccaccacaaaccggcgcacgatagcaccgccggcgtacggagaagaacgccttacgtagtttgcgctgaaaaaggcagcagagcttcgacgcgaagccagatga

SEQ ID NO: 21198 - DNA, 265 bp, Glycine max
  Clone ID: 700954359H1
atttttgtgtacctaatcccaatccgtttcttttcaatcttctcttcgaccccatttcctagatctgcttgtttcttccatcatcaactaatcatggttcttcacagagaactcgatcatctcttttcatcccctttcgttgaccctcccaaagatgatgcgaaatccagtggcatgtcaattgaaaagaagattgagttcctcgagagtttgactggaaaggtcacaaatcggaggtctcggaggtggttaaatgatcgtctct

SEQ ID NO: 21199 - DNA, 266 bp, Glycine max
  Clone ID: 700954326H1
cggaatctgtctaaccaccctaaagatccggcggcgagccccaaaaccaaacccttcttaaaggagaatccaaaattcaattccaacacataaaatttcaagtccgaggttgcctataaaaaccactttggacccccttcgctcattgcagcctcaagaatccacacaaactcagggtagggcagagagagagagagagagagagagagagagagagaatgggagtgtgggctatcgcggtgcatggtggcgctggtgtcgaccct

SEQ ID NO: 21200 - DNA, 270 bp, Glycine max
  Clone ID: 700954327H1
cccagcctctcaattacggtgccatgggaactcttttggctcaacagcaattcttggcaacaatggctaatttccaacaccttagtaatgtcaacatgcaagatgatggtgttgctcaaatggccggacctaatggaagatcacctttgccagacatatttcaaccaaattttcaaactcaaactcctagctcaatgatcaacacttcaaggaaagaagaaactaaagcatttgactttatctcggaccatatgtcatctgctcgtgatt

SEQ ID NO: 21201 - DNA, 158 bp, Glycine max
  Clone ID: 700954328H1
acaacaccaccaccaccaccaacacctatacagggtgcacgcccattccctttatcatctccatatccatcggactcgttgttcgatgtttggttcacacacccgtacaagtcacccccgaggactggcagctactctggatattcctctcaccatcg

SEQ ID NO: 21202 - DNA, 273 bp, Glycine max
  Clone ID: 700954329H1
ccgctttcatcttctcatctcttctcttttccctgctaatcatggcaaccttgtcaactgtgaaggtttccccccattgcatgtttcaaacagcaagcaaaaatccatccactgttgccaccacaatgaagtgcccttcttcttttgggtctgtgaagagcatttccagatcttttggcttgaagtcatcctcttcatttagagtcactgccatggcttcttacaaggttaagctgattggcccagatggaacagagaacgagtttgaagcca

SEQ ID NO: 21203 - DNA, 275 bp, Glycine max
  Clone ID: 700954330H1
gaacaagacaagaaaactacaaagctatgggcaccatcatcgactcccatttcttggccttcactgcccttgtcactattgcctatcagtttttgtttttcgtcgtcactgcgctcctcaaattcgacaaagtcactgattttgctggaagtacgaattccattataattgctgcattgaccctggtcatcaaaggctcctggtattttcgacagataatcctcactttgtttgttgggatatcgggaattcgcctcggccttttcctcctattc

SEQ ID NO: 21204 - DNA, 193 bp, Glycine max
  Clone ID: 700954331H1
attcgcttgattacgtttggcgtatccagtttcgatccagctggattgtccttgtaactaggaagatccagctggatcgaaagtggattcgcttgattacgtttggcgtatcatcttgatgtttggtgcagtcccggctgctcttacctactattggcgaatgagaatgccagagacggctcgctacacggcc

SEQ ID NO: 21205 - DNA, 206 bp, Glycine max
  Clone ID: 700954333H1
ggcttgaatcccttcgcaccttattgcatcgccaatcactcccttttcctttgcctttcctctcgctaaattacaattccctttcttgttcctctccaacttctccttctccgtttctgcggacatgtaaattcggaggacaccgtctttggttcggtctatttttttgggggttactttacttcggttacgcgtcgtcgttttgc

SEQ ID NO: 21206 - DNA, 249 bp, Glycine max
  Clone ID: 700954334H1
gccctcgtttactgcaccgctggcatctcagggggacacataaacccggcggtgacatttgggctgtttttggcgaggaagttgtcgttgcccagggcgattttctacatcgtgatgcaatgcttgggtgctatttgtggcgctggcgtggtgaagggtttcgaggggaaaacaaaatacggtgcgttgaatcgtggtgccactttgttgcccctggttacaccaagggtgatggtcttggtgctgaga

SEQ ID NO: 21207 - DNA, 263 bp, Glycine max
  Clone ID: 700954335H1
aataaatgcaaataccacaaagacttatgctacaagaaccatatttttcttgaaaaatgatggaactttgacgccattggccattgagttaagtaagccacatcctcagggtgaagcatatggtcctgttagtgaagtctacgtgccttcgagtgaaggagttgaagcttacatttggttactggaaaaggcttacgttgtggtgaatgatgcttgctaccatcaaatcattagccattggctaaacactcatgcggttgtgg

SEQ ID NO: 21208 - DNA, 268 bp, Glycine max
  Clone ID: 700954336H1
cttttgcgtacacagcctcaacaaccctaacgcgtgcagagcagagagagacgcagccatggggcgaagacccgcgaggtgttataggcaaattaagaacaaaccataccccaagtcacggttttgccgtggtgttcctgatcccaagatcaggatttacgatgttggtatgaagaagaagggtgttgatgagtttcctttctgtgtccatctggttagttgggagaaggaaaacgtttctagtgaggccctggaagctgctcgtatt

SEQ ID NO: 21209 - DNA, 267 bp, Glycine max
  Clone ID: 700954338H1
gaaaacagcatcgaacccgtcgtagcagaaaaacttgtcaccatggtttcttccgacaaggatccacgagaggatgtccttcaagcctggtacatggatgatagtgatgaagatcaaagactcccccaccacaaagaacccaaggagtttgtctcgttggaccaacttgctgaacttggagtccttagctggaaactagatgctgataaccatgaaaatgatccagagctgaagaagattcgtgaagagcgtggttacacctacatg

SEQ ID NO: 21210 - DNA, 262 bp, Glycine max
  Clone ID: 700954339H1
gtggctatgtgcctaatcgtccaccactgatgagaaggttaataccagaagagggtgatccagaatatgcaagtttccatgctgaccctcagaagtattttctgaatgcattgcctagcttgctgcaagccacaaagttcatggctgtggttgacacactctccactcactcacctgatgaggagtacttgggggagaggcaacaaccttcaatttggtctggagacgccgagatcgtcgaggcgttctacgatttctccgc

SEQ ID NO: 21211 - DNA, 264 bp, Glycine max
  Clone ID: 700954340H1
tgggtccctcactaacactcatactacataccctgactccgtctggaatgcctctgttttgttctgtcagagtttcactccgataaggaacatagataagcattgtgaaagagagagagagaggaatagcaagagtcctttttccactttgcatataccaatcattcgttttacggttccctttgttttctttttttctctgctagttgagcaaaaatggaggaagcgagtcctaaaattttcattccaaacacgatccaggga

SEQ ID NO: 21212 - DNA, 66 bp, Glycine max
  Clone ID: 700954341H1
taccaatcaaataacagagcaagatctcttctttctctctctctctctccgagtctgttctgtagt

SEQ ID NO: 21213 - DNA, 263 bp, Glycine max
  Clone ID: 700954342H1
cacagttatccattcacatttcacagttagcacttagcagactctgctgcagtgaggtgaggggaggtttgtttgttgtttcgtttttcctttcctttccgccagaatccgttgagaatggcgttgccggtagtcgtcgatgcagagtacctcaaggaggtcgacaaggctcgccgcgatctccgcgcactcatcgctaacaggaactgcgctcctctcatgctccgattagcctggcacgatgccggaacttacgatgctaa

SEQ ID NO: 21214 - DNA, 262 bp, Glycine max
  Clone ID: 700954343H1
ctgactatctaacactatttataggtttcatcattgccataaaggaaacctataaaaagttggctggtatgtttgaatttgttcagcaactaataaaagaaaaaggaactgactatctaacactatttttgttgtcattatgaccgtgtactgtgtttgtagtctgtgttccaccttttgtgtgattcatagttttgtatctaccattatttaatttcaagatcaacatgacagagatagagagggatgatctccttctcga

SEQ ID NO: 21215 - DNA, 264 bp, Glycine max
  Clone ID: 700954344H1
attcctttgtaaaccttagggagtacagacaggaggttctccgtctccttgttaaagtatttcagaagcttccttcaccagattatctgagcatttgccaatgtcttatgttcttggatgagtcagagggtgttgcaagcatactagagaagcttttacattctggaaacaaagatgatgcacttttggcatttcagatagcttttgatctggtagagaatgatcaccaagcttttcttctaaatgtcagagatcgccttgcac

SEQ ID NO: 21216 - DNA, 238 bp, Glycine max
  Clone ID: 700954346H1
ggaggatacaactgaagtggctgtgtggtgttacagttgagttgagcgatctcttctcttttcttgtcttgtcttttgcaatggctaatgcaattataatgccgggttttctgcttcgacccactacccagacgacgccgtttcggttgcccaatcacactcactccttccattcccctcgctgctccctttccctcacaccccaatcggctaaagcttttgaagttccaaggaggaa

SEQ ID NO: 21217 - DNA, 265 bp, Glycine max
  Clone ID: 700954347H1
cacaagatcttggctggcctcttggatcaacatacttttgctggaaaccctcaagctctaaaaatggtaacatggatggttgattacttctacaacagagtgcagaatgtaataacaaagtacactgtaaatagacactatcaatcaatgaatgaagaaactggaggaatgaatgatgtcctttatagattatacagcataacgggagattctaagcacctagtgttggctcacctttttgacaagccatgctttttagggttgc

SEQ ID NO: 21218 - DNA, 271 bp, Glycine max
  Clone ID: 700954349H1
ggaagatcttccggcaagtgttctggtgcttagtggtgttccttttcatcgtgctggtcacaattcttttgatatgggcaatccttagacccaccaaacccaccttcacgctccaagacgtcaccgtctacgccttcaacgccaccgtggcgaacttcctcacttcgagttttcaggtcacgctcatctcgcgtaacccgaacgaccgcatcggtgtttactatgatcgcctcgaaaccttcgtgacctaccggagccagcaggtcacgta

SEQ ID NO: 21219 - DNA, 268 bp, Glycine max
  Clone ID: 700954350H1
agagaatgatgatgaagtctgctatgtgtgcagtggtggttgtagcacttcttcttctggcggaggtggggcccatggctgaggctgtgacatgcaccccaacagagttgagtccgtgtcttccagcaatcacttccggtgctaaaccttccaatgcttgttgcacgaagctgaagcagcaaaaaccatgcttatgtggctacctcaaaaacgctagcttgaagcagtatgttaactctcctaatgcccgaaaaaccgttgcttcttg

SEQ ID NO: 21220 - DNA, 265 bp, Glycine max
  Clone ID: 700954352H1
caacctcgtattccagacctacctcgattgccgcaaacccgacaccgccctcgaacactacaagcagttcctcaacgacgcccccatgaacccttcccccaccacctaccgcgtcctcatcaaagggttaatcgataacagcaaactcgaacgtgcaatggatattaaaaccgaaatggattccaaagggtttgcccctgatcctcttgtttaccattacttgatgttggggcatgctagggtttccgatggtgatgcctatttg

SEQ ID NO: 21221 - DNA, 199 bp, Glycine max
  Clone ID: 700954353H1
cttgtttacacactgacacactccttcatccaactccaacagagcaagaaaacatagtacacaccacacagtgaaaaagagagaaactccatcttctttctttctttctcactcaccacagaacacaaaaaagctttccaaaattccgggttggggaatcacgcgaacccattcaaagggggggggaaggttttagggg

SEQ ID NO: 21222 - DNA, 262 bp, Glycine max
  Clone ID: 700954355H1
agatagtccacctgggaagccatatgtagctcgagcaagagcgcctccattaccttttcttttgtcaacccttctccaatcaagaccgcaattaaagttgccagaggagcagtttggtgatgaggacagtcttgatgatgaccttgatgaatcatcagagtctgatgatgaaaatgaacatgacgacttgccgccatttaaacctttaactaaggcccaggtggaaaagctgtctaaagctcataagaaagcatattttgat

SEQ ID NO: 21223 - DNA, 261 bp, Glycine max
  Clone ID: 700954357H1
gttggttgaataaaaataaaagtacttgtagtgatggtagtgccaataatgaatcttcttcaagtggaatagttggagaaagggataatcatcttgatcatgaaattgcacagctcacaaaacttaggtcaagtcctcatgagcttttgggtcgtgttgttcctggtaagatgaggttacctgcatctactgtgagaatgctggttggtagagaaggtaattattctggaagagggagattttcatcagcagatgggtgtc

SEQ ID NO: 21224 - DNA, 267 bp, Glycine max
  Clone ID: 700954325H1
ccacggagagagagagagaggttttgacgcaacacactttcactgagaaaggatctctatctaccaaggagcagaataaaacccttctctctggtaagtgaataagagaatggcttcagatcggaaacttcacactttcgaggaggtggcaaagcacgaccagaccaaggattgctggctcatcatttctggcaaggtgtatgatgtcacccctttcatggaggatcatcccggacgtgatgaggttttgttatctgcaacagggaa

SEQ ID NO: 21225 - DNA, 242 bp, Glycine max
  Clone ID: 700954295H1
cggctcgagcggctcgagagtccatgagaggtactgcttcacgataccaaaatcctatgcattggcttcagcagctcctttgctttgtgctggaattacagtttattcaccgatggtgcgccacaagatgaatcaacctggtaaatctcttggagtgattggtcttggtggcctcggatctatggcagtgaaatttggaaaggcatttggtttgagtgtgacagttttcagcactagcatat

SEQ ID NO: 21226 - DNA, 241 bp, Glycine max
  Clone ID: 700954296H1
caaatattctcactcgtcgtcttcgtctgcgccctaaccagattcaattcaaactcttctcatcaaaatccaaggctcgttcttgaaaccctaattcgatatcctcctcctcagaagaagaaggatcgatgtgggcagcttcttgcctggcgtcatgctgcgcggcctgcgcatgcgacgcctgcaggaccgtcgtatcgggaatcatccgccgttccgccaggatcgcctactgcggcct

SEQ ID NO: 21227 - DNA, 275 bp, Glycine max
  Clone ID: 700954301H1
gtcgcactccactccactccaatcagtcagatactagcgatggggaggaagcgaaaggtagcaccgaaatctactgtataagccgagcccccgttgaagcaaaactaaccataacccgaaaatgccgctcaggaatacgaagaagaggtcgaagaggaagttgaggaataagaggtagaggaagaggtcgaagaggaagaagaagaagaggaggacgaagaggacgaggaagaagaagaagaagaccataaagaccaataccagcaccaacaaca

SEQ ID NO: 21228 - DNA, 245 bp, Glycine max
  Clone ID: 700954302H1
atccaggtggagtattagtacaacaagtatttcacacggaaggtggcatattgtaacaatgtcaattgatgctgatttaggtgaagcaacatgttacttggatggtgcatatgatggctaccagagtggattaccattgtgtgtgggtagcgccattttggagcaggggacagaagtgtgggctggtcttagtccgccaacagatattgatgcatttggtacgccagatagtgacagggttgaat

SEQ ID NO: 21229 - DNA, 276 bp, Glycine max
  Clone ID: 700954303H1
ctctcacacacccaaacccaacattattaatactcttccttctctttaccttttacttttcgaagcaaaaacaccataacaaaacacccagaatttgtgggttccattcccaaaacaaagaacaagaaggagagagagagagagagaatgcaacgggagaaacaaaaaacagaagtatttctgtgattgattctctgcaaccgaatcatcatcagccacttcttctcccagtttcagctctcgcctctctcttcttttgctcggctctggttcggt

SEQ ID NO: 21230 - DNA, 275 bp, Glycine max
  Clone ID: 700954304H1
tagcaagtacgtcgtatatgtggttgatcttttgctggttgtttgttttgttccttccaattgtcagatctgaatcaccggactcactcttcacactcactcacactgaatggcttctgaaggcgaccatcaccaccaccaccaccaccatcaagatcacgatcatcatcatcatgatcatgatcaccatcatcatcacgatggagacggagagaccaactcatgggtaggtaaggatgggaaggtgtaccatagccacgatcgtctggcgcgca

SEQ ID NO: 21231 - DNA, 260 bp, Glycine max
  Clone ID: 700954305H1
gccggaataatcgttccttctcatgcttccgaaatcagttccctcagcggtaccccaacccaaaacacctgcttccaaaatcaccctaacttcttccctcacctccctcctccaaccccaaaaccctcgcacatggatcctcttcaccgtcctcttcatccagatcctcctcctctgcaacctccatagcttcccttcctcaattccacctccctctctcccatctcgccgccaccgacacgacaccgacaccggcacat

SEQ ID NO: 21232 - DNA, 255 bp, Glycine max
  Clone ID: 700954306H1
ggaacaattaaggcattgcaggaattagttctcagcatcagtaagacgggcagagcggcgatgcttgatgagattgttgactatgtgaagttcctaacgctccaggttaaggtcctgagcatgactagactgggacgagctggtgcagttgctcagcttgtagctgatgttccccattctgcagtggagggggatcaggacatagaacgtgtatccaatgagcaagcctgggacgagtggtccaatgatggcaca

SEQ ID NO: 21233 - DNA, 270 bp, Glycine max
  Clone ID: 700954307H1
gtcaaagttcaacgagattaactcgataacggtggttttaacggcgaaggacgttgccgttgagggcttctgcatgagccgctgtggcacccacggctctacccggaacgttaaaagtaatgcccgaaccgcatatatctgggttggaaactccgaaacacagtgccccgggcaatgcgcgtggccattccaccaaccgatttacgggccccagacgccgccgttagtttctcctaacggcgacgccggggttgacggaatggttattaa

SEQ ID NO: 21234 - DNA, 264 bp, Glycine max
  Clone ID: 700954308H1
gagagaacaaagcacttagtgctattcaataattacgaaaaaccaacagcgagtgttgtttttgtttggtccaggctggaccagggaatgaatagagatgagaggctttcggttgaagagaactgagttaagcggcgaagcagacgcagaatcggcggcagaaattgccaccggaagcacgtcgaagacgggtgaaccaaacacaaaattccatccaccacttctcttttcaatccccaactcaaatctgtgaagaaaatctca

SEQ ID NO: 21235 - DNA, 262 bp, Glycine max
  Clone ID: 700954310H1
ggcgaggcgtgaacgaggctcaacgtgcttatcctcggatttttggccatgaagcatctgggattgtggagagtgtaggggaaggagtgagtgaagttgaggaaggggacatagtagtgccaatattcaatggggagtgtggagagtgttcgatgtgcaagtgtgagaagaccaacttgtgtgagaggtttggggtggatgccacgaagaaggtgatggaacgagatggcacaacaagattctccactgttaatgggaaacc

SEQ ID NO: 21236 - DNA, 266 bp, Glycine max
  Clone ID: 700954311H1
gtgtgagtgagtgtatcaatcggccacacagaaatgggcagtgcttctctgattccagtttcctggttgccttggcggccactttctcctttcaagggaacggtgaaaaccttggtcgcaaaaccatggctgaagaagattcagcaagcaagacccctcatttccgtggttaacaaggctgcctctctatcttcccccgtgacagcacccagcgtcggcgttcggtttcggctggacaatttggggccgcaaccgggttcgaggaa

SEQ ID NO: 21237 - DNA, 252 bp, Glycine max
  Clone ID: 700954312H1
ctctgaacaatggcgtctctctctcacctcaacaaactcctctgcatgccgccgctcaactcttcaccctctacttcgccaccgcgcacagcgtcggagtttcgaccaaatctgtcggaaggccgaggatggtcgccgatttcgcgaggccggtggggcgtgtccgagcggtgacgagcgacgacgagtggggcccggagaacgacgaggaggcatacggcggacgagtcgcggttgaggagaaacccgacg

SEQ ID NO: 21238 - DNA, 202 bp, Glycine max
  Clone ID: 700954313H1
gttttgttctcattctgtgactctgtgcttagttaacgttaacagtgacttaagatggcggattctgcagatgtcacccacgatgttgtgtccctcctctcttctcctcaaagggactttcttcttcgaaacaacggcgatcaggttaaaattgacagcttgaagggtaagaacttggtttgtagttttcggcatcctgtgt

SEQ ID NO: 21239 - DNA, 281 bp, Glycine max
  Clone ID: 700954314H1
ctgaaacaaagaagtgaaaataacagcaaaaagtaggagctgcagcagctcccccgaagcttatctcagcggcagactctgaaagctgtttgagtagcctcaacccggagaatagcaccaatgggagaggaggaaaacaaaccagaggaacccatggcaaaggagaaaaacccagaggaagaagcaacccaagagaaaaaaccggagcaagagtccaaagaggaagttgctgctgctgctgctgctccgccaccgccaccgccaccgccaccgcccgagat

SEQ ID NO: 21240 - DNA, 281 bp, Glycine max
  Clone ID: 700954315H1
ggagttttagacccacgatcaggtcggggtcgttcaagtaaagttttccatggcattgtggaacccatattcaagcttgctgggtttagattggaggtagtcaaacaacatctgctggtcatgcgagagatcttgcatcaagtgtagacatcagctcttgccctgatggaataacctgtgttggtggtgatgggatatccattgaggttctaattgtcctcctagttagggacaatcaaaaggaaggattatctataccaattggaattataccggctggt

SEQ ID NO: 21241 - DNA, 288 bp, Glycine max
  Clone ID: 700954316H1
aaatgatgctcagaatcaagagggttcccactgtcgtttccaactaccaaaaagacgacgctgcagactctcctcgtcccgtcggaggttgtggtcggaattgcctcaaagcttgttgccttccagatgcaaagctgcctttgtatgctttcaagaaggctaatggaaaggatttggccctgcatgcatgcgccggggagcctcccctcacattcctcgactcgattcttcttggagagtgggaagatcgcatgcagagaggactttttcgctatgatgttaccgcct

SEQ ID NO: 21242 - DNA, 142 bp, Glycine max
  Clone ID: 700954317H1
ctcatctcttctgctctctcattacgctctttcctccgatctcaggtgttgtttaagcttcctgtgttggcttggtatccttgcaagttcttctgtagcagattccaaggtgaaggtgtcacgttaaagtttctttcatgtc

SEQ ID NO: 21243 - DNA, 254 bp, Glycine max
  Clone ID: 700954319H1
gctatctgcttcctcgtagtacttcattgagagagacatggacactgtactaagtactacgctgctactcatgttggcatgctccatcgtccatgttcttcgttcactacaagcaagaatgagaagaaaatcaaactacaatcttccaccaggaccctctcttctcaccatcattagaacctctaaacaactctataaaaagccacagcagacaatggccaggcttgccaaaacctatggccccataatgcgtt

SEQ ID NO: 21244 - DNA, 217 bp, Glycine max
  Clone ID: 700954320H1
gttatattgatattgctatttgttaagctcttatttcctcggccatggctaataatgaacgtgatctcttctcggcggagattgtgaatcgtggaattgaaccgtcgggacccaacgctggctcgttgacattctctgtgagggtgaggaggcgcttacgggattttctgcaatcggtgaaccttaagtacgtgaaattgggttaccattatctcat

SEQ ID NO: 21245 - DNA, 262 bp, Glycine max
  Clone ID: 700954321H1
aacaagaacataagggaaccacagcggcggtaacagaagaacaagcagagaatgggtcgagtgagaacgaagacggtgaagaaatcctctcggcaggtgatagagcgtcactactcgcgcatgaccctggacttccacacgaacaagaagcttctggaggaagtggcgataatcccgtcgaagaggctaaggaacaagatcgcggggttctcgacgcacctgatgaagcgcatccagaagggcctgtgcgcggctctccctc

SEQ ID NO: 21246 - DNA, 261 bp, Glycine max
  Clone ID: 700954322H1
cgttgctaaagcacaccgacatccaggacagtcactcaccgcagcatgcacgcgacaaacttgaaacgggctttctttcacccgtacgcaaccttctactaaatcctcgttctcttcaatctctttccttttccttctgcttccactttccaccgaatgcaagtcaagtctacaatttccaataagcttaagaaaaggaaacaaaaccacctcttagatctaatccaaaacgataccctatctataaagtcaaaacctaag

SEQ ID NO: 21247 - DNA, 266 bp, Glycine max
  Clone ID: 700954323H1
tgaagaagcattatttccacttgacttgggtgtctccgcctttctcttctcaaatcaaatcaatgagcatggcgtctctccccaattcccccgctctttcattctcctcatctctctccaccaccgccaatctcctcccatgtcgccgcttcaccgcattcccccgccgccgcgcctcttcattctccgtgcaagctaagatccgcgaaatcttcatgcccgcactcagctccaccatgaccgagggcaaaatcgtctcctggatc

SEQ ID NO: 21248 - DNA, 261 bp, Glycine max
  Clone ID: 700954324H1
cctcttttttcctcttcctcagtagtgcgattttcgattctcttctctgcaactatgcctaaccctaaggtcttcttcgacatgaccatcggcggtcaacctgccggccgcatcgtgatggagctctacgccgacgtgactccgagcaccgccgagaacttccgcgcgctctgcaccggcgagaagggcgccgggcggacggcaagcccctccactacaaaggctcgtccttccaccgcgtgatcccgaacttcatgtgcc

SEQ ID NO: 21249 - DNA, 172 bp, Glycine max
  Clone ID: 700954294H1
cttttggtaaaataaataagtggagtttttcttttatattatttcacataatgatcatgctagtggaattttttaaaaaaaattaatgtttacaataagaaacccaagctagttcagctgggtggtttttgcagcaaggaaaagaacaattttgttctagttatgcacaagt

SEQ ID NO: 21250 - DNA, 255 bp, Glycine max
  Clone ID: 700954249H1
gaaaaatcgcagcttgacgaagctttcgagtccgcagaaaccaccgaggaaatgctcaaagtcttcagcaacatggaaggggttttcgacgagagagaacttggtttggcttctttaaaaattggccttaaacttgaccatgaaggtgaggaccctgagaaagctctttcctttgctaacagagctttgaaagctttggaaaaagataacaacaacaacaacttcccttcttctttgcctgttgccatgtgtttg

SEQ ID NO: 21251 - DNA, 254 bp, Glycine max
  Clone ID: 700954250H1
aaggaaacaaacaccaacaccaacacctcatacacttgtctgtcatagggtgatctcctttagtgagaattgagaagccaagccactcaattcatcaccttctccctctccttttccaaggaaaaaagaaaaaaaaaatcatcaattccaatggaggtttcatgcaaaattttgagaagatcaattcacagttttcttcaaaactaccactatttcacctcaactgcagcttttctagcccttcctttctcagc

SEQ ID NO: 21252 - DNA, 251 bp, Glycine max
  Clone ID: 700954253H1
gccacagttggaaaaaaaaaaaaagttgttcgagatggcacgtacgaagcaaactgctcgtaagtccacaggaggaaaggcacctaggaagcagctcgcaaccaaggctgcacgtaagtctgcaccaactactggtggtgtgaagaagccacatcgttatcgtcctggtaccgttgctcttcgtgagattaggaaataccagaagagtaccgagcttttgatcaggaagctccccttccagaggctggttg

SEQ ID NO: 21253 - DNA, 250 bp, Glycine max
  Clone ID: 700954254H1
ccttgcaacacacattgtcttgtcggcaaaatcttccaccaacaacacacagtaatggcaggctcaaacattctttctcactctccttcccttcccaaaacctacagccactccttaaaccaaaacgcgttatcccaaaagcttttttttctgcccctcaaattcaaagccaccacaaaaccacgtgctctcagagcggttctctcgcagaacgctgtcaaaacctcggtggaggacacaaagaacgctc

SEQ ID NO: 21254 - DNA, 246 bp, Glycine max
  Clone ID: 700954256H1
ttcttttcttcttcaattcatatcatatcaattagatttgttttcagagtttgctagtgagataccatggacaactacaacagcaatgacttttggaaattcagtgaccagttgaggcttgaatctggtttggccaatctgtctctgaatgattattccatttggagcaacagctacagctccaagaggcctgatcagaggaggaactttgatgtcaagggcagtgatttcaacaactcatcaaag

SEQ ID NO: 21255 - DNA, 246 bp, Glycine max
  Clone ID: 700954257H1
gtcgtccgagatcgaggttgtcgaggaggtgcagtcccgcgacgagcaatcggcggcgtctggcggcggcggcgatggcatgggggcggaggagagcctccggaacgacgtgtacacggcggcgtcgtacggggatttggagaaactgcagagattggtggagcaagagggttgccccgtcaccgagcccgacgggttgggatactacgcgcttcagtgggctgctctcaacaatcgcactgccgc

SEQ ID NO: 21256 - DNA, 247 bp, Glycine max
  Clone ID: 700954259H1
atttatggtgttgacaagtggggtaggagagcccttttccttgaaggtggagttcaaatggtcatttgccaggctgtagttgcagctgctataggagcaaagtttggaattgatggaaaccctggtgatttgccaaaatggtatgcagttgttgtggttctcttcatttgcatttacgtatcagcatttgcctggtcatggggtcccctaggttggttggtgcctagtgagatctttcccttggaga

SEQ ID NO: 21257 - DNA, 247 bp, Glycine max
  Clone ID: 700954260H1
tagtaatattattcttcgaatccattttattattcataatgggtattttcacatttgaggatgaaaccacctcccctgtggctcctgctaccctttacaaagctctagttacagatgccgacaacgtcatcccaaaggctgtcgaagccttcaggagtgttgaaaaccttgaggggaacggtggccctggaaccatcaagaagatcactttcgttgaggatggagaaagcaagtttgtgttgcacaa

SEQ ID NO: 21258 - DNA, 233 bp, Glycine max
  Clone ID: 700954264H1
cgtggctgttttacttaccgcaccacaggcccttccagttgtggtttttgttcctattttatatctcgttctcaaaatatatataatacaagtattgtatgaatttattcatgtgtaacgtataatgttgtatatatctcggagaccagactctgtattacagcatgagcaattaaaattcagcaagttgttgcaaaaaaaaaaaaaaaaaaaaaaaaaagggggggcccccg

SEQ ID NO: 21259 - DNA, 249 bp, Glycine max
  Clone ID: 700954266H1
attattatactagtcatcataaaatgaaaattttgcttgctttgtagtttatccagggaatggtatataaatagataaggctctctatctagctgtcttaagtgttgtgccatccacatcttgtctttattttctatttatgtcacctgaacactatcataatgtactggatttccaagaaaatgttatcagttaaatttgaatgcatggttcactatttcaaaaaaaaaaaaaaaggggcggccgccg

SEQ ID NO: 21260 - DNA, 248 bp, Glycine max
  Clone ID: 700954268H1
agacaatcccgaggttaggcagtttgtagagaaatgcttagcaactgtgtccctcagactttcagctagggaactcttggaggacccttttctccaaattgatgattatggatttgactcaaaagttttgcagtatcaaagagattgttatgaagtaacgccattaattagacaacctgtgaatggaatttgtatcattaacaacaacttaatgagtggggacactgataatattggtggttatgggc

SEQ ID NO: 21261 - DNA, 246 bp, Glycine max
  Clone ID: 700954269H1
gtttggttccttgtgatcgattagggttattattctttgtggttgcggaacgaagcatgctgttgctgttcgagaatggatgagttgaacggcgccatgacgacggagaatagcaatgcggaggtggttcgatgggagaggtttctgccgcggatggtgctcagagtgctgcttgtagaagctgatcattccacgcgccaaatcatcgccgcgcttcttcgcaaatgcagttacacagttattgcg

SEQ ID NO: 21262 - DNA, 246 bp, Glycine max
  Clone ID: 700954270H1
ctcgattaatcgaatctcctgctcccggtattatttcgagacgttccgtatatgagcctctccaaacaggacttattgctattgattcgatgatccccataggacgtggccaacgagaattaattattggagacagacaaacgggtaaaacagcagtagccacagatactattctcaatcaacagggacaaaatgtaatatgtgtttatgtagctattggtcaaaaagcatcttctgtggctcaag

SEQ ID NO: 21263 - DNA, 244 bp, Glycine max
  Clone ID: 700954273H1
gctttaggtgttcctgctcttccgttgacatacgtggctcacgttctggcagttgttgccagcgtcttggtcgtggtctgggtcgtcaatttcaggggtggcttggcttgggattctgataacaagtccctcatcttcaacattcatccagttcttattgttattggcttactagttcatgggggtgaagctattataagttacaaagcttttcccctaaagaaggaagtgaagaaattgatac

SEQ ID NO: 21264 - DNA, 243 bp, Glycine max
  Clone ID: 700954274H1
gtgctgctgacaaggcaaaattcaacaatgtttttgtgaagaatctatcagaatcaaccaccgatgatgagttgaagaacacttttggtgaatttggaactattactagtgctgtagtaatgagggatggggatgggaaatcaaagtgttttggatttgtgaattttgagaatgctgatgatgctgctagggctgttgaggctctcaatggcaaaaattttgatgacaaagaatggtatgttg

SEQ ID NO: 21265 - DNA, 243 bp, Glycine max
  Clone ID: 700954275H1
ctctctcgtctcacttgaaactccacaacccaattttcttttcctatgacccaattccaaatccaaatcaccaattctaattccattcttcaggagttgaattgaattcgtgatgaagagggaccacaaagatagctgcggcggcggcggcgcgcggaagggactgtgaagggtgagtgttcctcaatgcagtcaaacgggaaggcgaagatgtgggaggaagagcaacagcagcagcagcag

SEQ ID NO: 21266 - DNA, 245 bp, Glycine max
  Clone ID: 700954280H1
ctttctttcttccttctcatcacaaagacacaagctttcttcctcaactaccctacccaacttcttattccactcatcacttcctttgaaattgaaaccaccaaaattgtttttttttttctccttcactcgtagtaatattttgaaaagtgttgtgctttgggttgagaattgtggcagggcctaatgggtaactgcctagattcttctgccaaggttgatgcagctcagagctccaaatccac

SEQ ID NO: 21267 - DNA, 246 bp, Glycine max
  Clone ID: 700954281H1
atgaaaatgggttcttctttgtggactttgtgtctaattttggcttcactagcctcttctgcattctgtgcctttccacggaggccagtggatgttccattcggcagaaactacgttcccacttgggcttttgatcacatcaaatacttcaatggaggttctgagattcaacttcatcttgacaagtacactggtactggcttccagtccaaagggtcatacttgtttggtcacttcagcatgaac

SEQ ID NO: 21268 - DNA, 246 bp, Glycine max
  Clone ID: 700954282H1
attagtactctcgttaatttttttgctaattgctaattgggcacaatggaaaagcttcatgctgtgtgcatcccatacccagcacaaggccacataaacccaatgctcaagctagcaaaactccttcatgttagaggcttccacatcacctttgttaacacagaatacaaccacaaacgccttctcaaatcaagaggttctgattccctcaatagtgtcccatcatttcaatttgaaaccatccct

SEQ ID NO: 21269 - DNA, 246 bp, Glycine max
  Clone ID: 700954284H1
cttgctaatactcatttattaaaaaatatctcttccaccccaacggttcactttcccaacgtgcaaagactaattaaccacagtaatgggttgtttgtgttttattaaaaaggacaaaatcaagggaaaggtgaacagagacaacgaggtttgcacgtcggatggagctattgatagccatggtcatcctgcagttcgaaaaagaactgggacttggactactggaattttgattttagtaaacca

SEQ ID NO: 21270 - DNA, 245 bp, Glycine max
  Clone ID: 700954287H1
ttcgtctttcattttcttattcttcaccaaaccgataagcaggaaatagctagtgagactaatccatcgcacaaacctcaccgattcaatgacctctaagctaattgcttccaatctccgtcaccaaatcacaaaatcagcccaaaacctccgccgccagctcctatccacggcggcggcggcagtgccggaacacgatgggaacaactccaactctttgggaatgacgatgaagggcgttcgaa

SEQ ID NO: 21271 - DNA, 245 bp, Glycine max
  Clone ID: 700954288H1
atcttcttatagcttcatcccaaaaagctcttttccttctaaatttgattccttagttcagcattctattattatatatggcttcttcaccttcctcagaaaacaaaaacctagagggagtagctggtggtgccggagagaaacccattccacttggtgagaacgttctgcagaagcatgctgcattctttgacttgaataaagatggtgtcatctacccatgggagacttttaaagggttgcgt

SEQ ID NO: 21272 - DNA, 242 bp, Glycine max
  Clone ID: 700954289H1
tctcactcttcagatctctctcccttccttccatcccaaccacaaggttgctgagaagacataaaaaatggtgaagatttgctgcattggagctggctatgttggtggcccaaccatggctgtaattgccttgaagtgtcctgagatcgaggtggtcgtggtggacattgctgcaccgcgaatcaacgcgtggaacagcgaccacctcccgatatatgagcctggccttgatgatgtggtga

SEQ ID NO: 21273 - DNA, 243 bp, Glycine max
  Clone ID: 700954290H1
ctcgagccgctcgagccggaactttagaaaccataatacgtctctcaacagctcatgccaaattgaagttgcgcagagaggtttcaaagtctgatgttgaagctgctttgaaggttctaaattttgcaatatatcacaaagaactaacagaaatggaggagcgtgagcaagagagggagagagagctggacaggaagcgcaaggctgatcatgatgaaaatgatggtcctgatcatggtccta

SEQ ID NO: 21274 - DNA, 243 bp, Glycine max
  Clone ID: 700954291H1
gttgccttttaccggaaaagtgtttcatcttgcctttggggaatcaagcctctttgccccttcctttgaaaaggtgcaaaagagaagggaactattggcaaatgaattacatgaaagattgttgaagagtgacgatgtgattcctatgaaggttgcagacttcataacagataaaatagaaaacatcagaaccaaacgaggtatcaattctaggttggtttctcagcatatggctttcacaat

SEQ ID NO: 21275 - DNA, 256 bp, Glycine max
  Clone ID: 700954248H1
cgcgcgcgcaaaaacgcattgtgtttctctctttccgcggcgtagatctgagcagtttgggaaaccctaactgctctcaccactctctttgctttttttcctctccgatcaacgacctctttcgtcgccctaagtcatggcaggacttgcacccgagggatcacagtttgatgctcgtcaatatgataccaagatgaatgagttgcttacatctgatggacaggattttttcacatcttatgatgaggtttatgac

SEQ ID NO: 21276 - DNA, 253 bp, Glycine max
  Clone ID: 700954215H1
ctctctctctctctctctctctctctctttctctctttctttctctcttttttttctctgatgcgtttctacaaaaacacaaccttttaactgttttttcttcttctttgcttgctccttatttcttccttcgccgaatcctagaatgtcctcgtcggggttccctggcggcggtggtgcgtcggagtttttcgccggggtaggtggtttcggcggcagatccattccggcgaccagcatgaacaaccccaac

SEQ ID NO: 21277 - DNA, 254 bp, Glycine max
  Clone ID: 700954216H1
aacaaatcaaagccatggccacctccaacttctctattgttctctccgtctccctagccttctttttggtgctacttaccaaggcacactcgaccgataccgtttctttcaccttcaacaagttcaacccagtccaaccaaacattatgctccaaaaagatgctagtatttcatcctctggggtgttacaactcaccaaagttggcagcaacggcgtgcccacctcgggatctctcggtcgtgccctttacgct

SEQ ID NO: 21278 - DNA, 259 bp, Glycine max
  Clone ID: 700954217H1
ctggctcgtcactccttgctcttagccctcctcctcttcgccgcggtggccaccgccgcgatggcggtggcgcgtccgacgccgacgacatcctgatccgtcaggtggtgccagatgttggcgaagctgaagaggaggacaacctgctgaacgccgagcaccacttcgcgagcttcaaggccaagttcgccaagacctacgccaccaaggaggagcacgatcatcgcttcggcgtcttcaagtccaacctccgcagagc

SEQ ID NO: 21279 - DNA, 258 bp, Glycine max
  Clone ID: 700954218H1
gtcatctttgtcatattccaaaattaagcttgcattattcaccagaatggctaattcatatgaaaacaacttcccccctcagaagcaagacactcagcctggcaaagagtacctcatgaatccaccaccccaatacaacagctcccaatacaagccatcaaataaacttcagggaaagatagctgtagtaaccgggggtgattctggaattggacgagccgtgtgcaacttgttttcattagaaggtgctactgtgat

SEQ ID NO: 21280 - DNA, 254 bp, Glycine max
  Clone ID: 700954221H1
ctgggggatctggacgcagatgggacttggaaggatccgagaaagatgactccccacgagaaactgcaaggattttaaacagagatctagatagagaacgagctgtggctgaagccaagatgtggggagagaacttgagacaaaaaagaaaacaaagtttgcagcagggcagtcttgatgcttaattttctgccttgaggctatggaagatggaagaaaatatggggagcttatctagagaaacaactcaaaca

SEQ ID NO: 21281 - DNA, 255 bp, Glycine max
  Clone ID: 700954224H1
gcaagatcggcggcaagctccgttacgcactcaacggtgtctcccacgtcgaccccgaaacccctctcaagctcgccgagtactacggtgtcgccgacaaggtcttcaagtacaacctcatctctgacgccccagacgccgccatcgcctcccgcgaccccatcatcgcccccaacgtcatcaacgccaccttccgcaacttcatcgaagtcatcctcgagaaccccaccaaggtcacccagtcctacaaccttg

SEQ ID NO: 21282 - DNA, 252 bp, Glycine max
  Clone ID: 700954225H1
acggatctcaactcccatttctagctccctccctccctctgcttttcttctcttctcattttccttcgaacctcctaatctctccctccagcttctgggttctccattttccctcgttttctgcatctgcatttcgtagattcagttctcatcggaaaatggacgttcaccgaagacccattccttcttccggcgaacaccgacaaacccagaagctgaagaccaccaccaccaccaccaccgattcgaaat

SEQ ID NO: 21283 - DNA, 251 bp, Glycine max
  Clone ID: 700954226H1
attgaatctcagaattctctaaaagagatctttttctgctctttgaagaaagaagggtctttgcttgattttggagatgtctctgctctcagatctcatcaaccttaacctctccgataccaccgagaaggtgatcgcagagtacatatggatcggtggatcaggaatggacctgaggagcaaagcaaggactctcccaggaccagttagcgacccttcagagcttcccaagtggaactatgatggttcca

SEQ ID NO: 21284 - DNA, 251 bp, Glycine max
  Clone ID: 700954227H1
cttccttctcacccctcgccctctcacgtttttacacacgtagacacatacacattcataattcattgctatcaccacacaagcctagctcctcatatcataccactgatttatcttccctctccatcgttcgttcattcattcactctgggcgcgcgcacgtgctaggaaccatcgattcgagaatgggcaacgactgtgtgccgtcgacggcggcggcggaggtcatggcggtggtggccgttgagctc

SEQ ID NO: 21285 - DNA, 249 bp, Glycine max
  Clone ID: 700954228H1
gttgggggctgatggtggaggtttgatgcgatcaatcctctcccagaaaaccacatattgcccttccgggttttcatccttccgaggttaaggttgtgggattttcatgcttatgtgggttgtgtaatttggaaggtgattaatggcaaatggttattcctcaaatgattgtttgaaaggaatagtagaaaattggtgtctgtcaggttcacagtatcagcttggcaaattgaaatagaatagagattt

SEQ ID NO: 21286 - DNA, 253 bp, Glycine max
  Clone ID: 700954229H1
cctttagaaagttcttcatactcttccagaagcagaaaaaagtgcctttttttttttacttctttacttgaagctttctgtgttgtgctgccatggccgtgacacagttcaaccccacttgctcaaaaactcatcttcactcatctcagctcccttttctatcgaggactcttcctagacatcgccactgcactattgcgccacttcatagaactcaacaagctaggatttgttgttctgttgccccaaatga

SEQ ID NO: 21287 - DNA, 250 bp, Glycine max
  Clone ID: 700954230H1
aggcattaggtcagacagctgactggtttaggagagcattggctgttgagcctgtcaaggggaacctgcggttaagtggatattctgcttgtggacaagatggaggtgtgcaacttcctcgtggatatattgaggagggtgtctctgatgccgacttggttcttttggtgactacaagacctacaactggaagtacacttgcctgggcggtggcatgtgaacgagatcaatggggtcgtgctatagctgg

SEQ ID NO: 21288 - DNA, 252 bp, Glycine max
  Clone ID: 700954232H1
tgaagaaacaaattagaagagtgtgttgtgttgtgttgaagtagcaagctagcaaagatgtttggcatcttaggaggcaataaggggcacaagatcaagggtactgtggtgttgatgagcaagaatgtgttggacttcaacgaaatagtgtccactactcagggtggtttggttggtgctgccaccggcatcttcggtgctgccaccggtattgttggtggagttgtcgatggtgctactgccatcttcagt

SEQ ID NO: 21289 - DNA, 256 bp, Glycine max
  Clone ID: 700954233H1
tttctgcgtattattccgatcagaatcatatatcatacctaatccatgattttttgtgcatgcatgtgttcccttcattacattgcattcataattgaattttatcatccaattcgtgaaactatttatctgtttcgagtttttgtcatttgaatttggttacaaaattgaagctggatatgaaaccactcttaattagcctactaggttgcaatcgaactctgttggtgttattatttgaatgtagttagttcta

SEQ ID NO: 21290 - DNA, 253 bp, Glycine max
  Clone ID: 700954236H1
agaagaaacaccctgtacccttcttacatcttctaatttatttttctgaggacttttttatttttatttcttcgtttccaccattttctgttacgccaaactgcgtctgcgacgcgaattgtgattagtgaacggtgaatgttgaggatctgctactttttgaacattgaataaggtctatcagacaaggatttgacagaatttgtcagaatcaaattgttaattctcttctgaagatttcattcgttcgttt

SEQ ID NO: 21291 - DNA, 253 bp, Glycine max
  Clone ID: 700954237H1
atgctacaagcccaacaaacttggttttaattggtataggcgtgccaaggtcttgttaattttgagcgttaagtgctgcaactaatcagatcccaagaccttggcctaccttgccatacagaaaaaaaaaaagcaaaaaaaaagccaaggtttggagccaacaaaaataaacacaaagcacaagtcatggaaagaataatggttggaagtgcagcaaaggttgctttcaccctcttggccactttcgccattg

SEQ ID NO: 21292 - DNA, 247 bp, Glycine max
  Clone ID: 700954238H1
gagagatttgatagcctcaactcaagtaagggttttctctttgagaaaatcgtatcttacaccttttggtgaccactttgagtgagagaagagaaattaagagagatactcaaattagattcaagagagatggccatcaaccatgaaacttgggctttcattttcggtcttctaggcaacgtgatctcctttatggtgttcctcgctccattaccaactttttaccaaatctacaagaaaaaatcta

SEQ ID NO: 21293 - DNA, 251 bp, Glycine max
  Clone ID: 700954239H1
gcttgcagtgattgtctccagtgatcaaacagagcaagtgctcttccaagatgtgcttctaccgcagccagccaagttcaaatactcaccagcttttgtatattttgtggctagcttcagtgtttctggcctttatgctcttgtttctgctcttgcatctatctctgtcatccagaagccaggattcaaactgaagttcctcctccactttatcttctgggatgcactgatattggggataacagcctcag

SEQ ID NO: 21294 - DNA, 253 bp, Glycine max
  Clone ID: 700954240H1
ctcaatgggttcttcttctattacaacatcgcccgcaaccatgaccatggctgcgatcgtgctcctgttcacggtctttgccgtttcctccgccctagacatgtcgataatctcgtacgacagcgcccacgcggacaaggccgcgccgttgcgcaccgaggaggagctgatgtccatgtacgagcagtggctcgtgaagcacgggaaggtgtacaacgcgctcggcgagaaggagaagcgcttccagatcttc

SEQ ID NO: 21295 - DNA, 249 bp, Glycine max
  Clone ID: 700954241H1
gcggttacacgagatcgtgaatgaagagattgacagcgcgcgcgagaatttggagtggaagctgacgatggagaacggattcgctcgcatggacgacgaggttaatcgcaggagccagagcaaccagaccttcacctgcaggtgcgagctccagactccccactgcgacgccgtcggatccaccgccgtcgtcgccatcgtcacgccggacaaactcgtcgtttccaactgcggcgactcccgcgccgt

SEQ ID NO: 21296 - DNA, 250 bp, Glycine max
  Clone ID: 700954242H1
tggactacggttttactgccgatatggaaaccgagctggataatgtttctggtggattaactgaatggaaaggcctccttagagactattggacacgatttaaatcatattgtgagcgtacatctaatgttcatattcatcaggttgagaagatgttggaaaaaaaatttggcgattatttatttgcttctctcccagatcagagccgggtgtgtccaagttgtatggaaggcacacttatttttaaagt

SEQ ID NO: 21297 - DNA, 251 bp, Glycine max
  Clone ID: 700954244H1
ctggagtaaaaaattaaaaaaaaataagaaataataaatattattaaataaataaataaataaaaataaaacggaagtctcaagtctcaagtctgaaatagttgagttgacggaagttgaaaattttggttgagcaagagccttctctttgttccgttccgcgaccatgtctcatgagacatgcccttccgtaaagaacttccttcttttggattctgatgggaaacgtgtcgcagtcaaatacttctctg

SEQ ID NO: 21298 - DNA, 163 bp, Glycine max
  Clone ID: 700954245H1
caacaaacgctctcttgcacagagaagatccaaaattcgcaacaatctcctctttctctttcactctttcactctcccactctcattccgccgccatggacgatccaccgttgcagaaaatcgcgatttcgggacccaccctagcctccctcatccagcgctt

SEQ ID NO: 21299 - DNA, 249 bp, Glycine max
  Clone ID: 700954246H1
ggacacaaagtgaaagagaagggagctatagccataaggagaaaaactttcaaagaggtgaaagcaaaagagttcttcttttccttttttatatatacttgggtgctaagctgtgtgagttcattgacaagcctgaaatggcaactatgctgacaaaggagcatggtctgaacctcaaggagaccgagctttgcctcggtttgcctggtgggggaggcggcggcggcggcggtggtgaggtggaaactc

SEQ ID NO: 21300 - DNA, 251 bp, Glycine max
  Clone ID: 700954247H1
ctcgagccgaatcggctcgagggcaactttggggcttctacccactatgatattgtatttagatgggaaactacaatcttcatttaggcaaagctaccaagatactcctcttatcagttgccaccaccaatttcatgcctcttcccggtgccttcatttctgattcttatctgggtcgctttctcgctgttggtttaggttccttcattactttcctgggaatggcactgttgtggctaacagccatgatc

SEQ ID NO: 21301 - DNA, 253 bp, Glycine max
  Clone ID: 700954214H1
ctttcgaaagattttatccaattgaaattttaaaaatgactgggataaacttaagaattcaattattgaaattgaataagtaaacaatttaattggattggtcgaatggtatcaaaaaaaatggagtactaactcccatttcttatttattattgaattaaccgatcaacttgctttgttatcgaacatttctttttgatttcaaaaattttccggaaaaaatttgaatctatttttatatgcgaatcaatcc

SEQ ID NO: 21302 - DNA, 265 bp, Glycine max
  Clone ID: 700954173H1
ggaatcgtctctcctccttccttcggtttcaggaaccaacaagaacaagaacaaggttccagaagacaaatggtatttagcctacattgtgtattttaccctgggtctcggttaccttctcccatggaacgctttcatcaccgccgttgattacttctcctttctctaccctgacgccagcgttgaccgcatcttcgccgtggtttacatgatagtcgggctggtggggatctccctcataatcctctacagccacaagtctgac

SEQ ID NO: 21303 - DNA, 271 bp, Glycine max
  Clone ID: 700954174H1
cgctctttagtacagcggaagaacgaagcctcctcgttcttcttcttctgcgctttctctctccctctctagaaccgtaaccgtcgtttctttctttctctctcctcaaccagagctaaagagtcaccttcttatttttctgaatctcgcggcgttgttctttctgctgctgcggctgtggttccggcggcgatgggacagcaatcgttgatctacagcttcgtcgctcgaggcaccgttatcctcgcggagtacaccgaggtcaccggaa

SEQ ID NO: 21304 - DNA, 268 bp, Glycine max
  Clone ID: 700954175H1
cactccctcctcttcacacattttcttagctctctccaacaatccctctcgttcacactttcagattgtgtgaagatgggggctggtggccgaactgctgttcctcctgccaacaggaagtcagaggctgaccctttgaagcgggtaccatttgaaaaacctcagtttagtctcagccagattaagaaggccattccacctcactgtttccagcgctctgttctccgctcattctcctatgttgtttatgacctcaccatagccttct

SEQ ID NO: 21305 - DNA, 269 bp, Glycine max
  Clone ID: 700954177H1
ggagagcattcaccattttcttgtggtttggtttcctagagacactaagtactcccatggaacaaaacaacaaaagccttgtttcttctaaattcttatgtttatgtttgttgatcaccttgatcagcattattgttgctccacaagcggaagcagcacgagcatttttcgtgtttggcgattcgcttgtagacaacgggaacaacaatttcttggccaccacggcgcgtgccgattcatatccttatggcattgattctgcatctcat

SEQ ID NO: 21306 - DNA, 271 bp, Glycine max
  Clone ID: 700954180H1
cacaacacagtttccactttccactttgactgtaccaaagtcacgcttgctccctctctcaacggcttccctcttcttcctctctctctctctctctctggacacacacatccttggtgttgaacgggtttttgggtgaaggagtagtgttggtggcttcatcttttagtgaataaggatacagcagcatgcggtggtggcttactctctctgttgatgtataccgcaaagtgatttccttgaatctgtattgcaaagttattctgtaact

SEQ ID NO: 21307 - DNA, 269 bp, Glycine max
  Clone ID: 700954181H1
gcttcaagaactatatgttttaccattcaagtgactcttgtagtagcttttctaacaacaaaggttgttttatctgatgacactgtgccaattcccgcgaacaaagcacaattaggtgaatggtataatactaatgtggggcctttagatcaaagaaagagcaccgtggacccagcattggtgactgctgaagaaggcgctaaggttgtaaaggtgatgcaagatggcagtggggaattcaagaccatcactgatgccattaaaagtat

SEQ ID NO: 21308 - DNA, 269 bp, Glycine max
  Clone ID: 700954182H1
gcaaagggaaggaaaagtaccttccccaataacccttctctccgatttggcttctctcatcggagggaaacaatcaataaaagaaaaaaaaaacccacaaaaagattataacaaaaaaagtatgaaaggaaaagtactaggttccgcagtttctctcatcctagtggtgggtgtggtaattggcgtggttgctgtagttcaaagcccaaagggcgtggaacaacaacaacaatggaggagaattgaaaaccagcaacagggccgtgaca

SEQ ID NO: 21309 - DNA, 266 bp, Glycine max
  Clone ID: 700954183H1
aaaccacacacctcacctattagaagtaacaaaagaccctccctctcaaaagaataaacaagtataaaaaagaaggcacttccctcaaaaagaaactaccctctatctctctcttttcaagccttaaatgagtaaaaaagagtgaagaaaggaaagaaaggagcaccatttttggtttgagaaacataattagcaagagagttcaaaatggggaagagagagtttaatggggtggtgttgatgatgctgtgtttgtgggtttgtgg

SEQ ID NO: 21310 - DNA, 263 bp, Glycine max
  Clone ID: 700954186H1
cttttggagaacaagactgccttcactacaaagaaagactatggcaaagaagagagagaagcacagtgggcaactgcacagaggactcttcatggtcttcagccacctgaaacaaccaaccttttcaatgacaagaacagttacagggagctgtcagagattgctgagcaagctaagagacgtgccgaggttgcaaggctcagggagcttcatactctgaaaggacatgttgagtcagtggtgaagctgaagggacttgacat

SEQ ID NO: 21311 - DNA, 262 bp, Glycine max
  Clone ID: 700954187H1
ctcccgacggaacactagttcagaccggcggattcaacgacggcgaccgcgccgtcagaaccttcaccccgtgccgcacctgcgactggaaagaaattgacgatggactcgcggcacggagatggtacgccaccaatcacatcttgccagatgggcgacaaataattatcggcggaagaagacaattcaactacgagttttaccccaagacacaagctaagaacacttacagcttaccttttctggttcaaaccaacgacgc

SEQ ID NO: 21312 - DNA, 262 bp, Glycine max
  Clone ID: 700954188H1
caaaagcttcaagcaagactttaaagtggctcaaatcaaagaaaattgatgtgaaactagaacaatcggtcgatttgagctcctcttctgaagaaaataagacatatcaaacttcaaatggagagactataaaagcagatcttcattttctatgcacagggaaaccacttggttcaacatggattagagaaactcttctaaagaatgacttggatgctgatggaaggatcaaggtcgatgagcacttgagagtgaagggcaa

SEQ ID NO: 21313 - DNA, 261 bp, Glycine max
  Clone ID: 700954189H1
ccttactctcctccctcttcatcaacgcacagcttcttcttcttctcatgccttcatagcttcctctcctctccctctttttccacatcttgtttcctatgccagcttctctttctctctgtttcgtccactctcttcatctgcacctgctacattgatggaggtggtcaaagcaattgccaagcacgaacctgcagctcctgaaagtgttgctatcagagctgatcagaagagttatagttacaagcgactcatcacatc

SEQ ID NO: 21314 - DNA, 265 bp, Glycine max
  Clone ID: 700954190H1
ttcctccactttgtcacctttattctctttcagtagaacaacagcaacctctctgccttccaaacccacattctggaatttggttccaatgagacaatcttcttctccggggcacttggccttagccttagacaatccacgtagaacacttcacgtgtcttgtggctccacatcaccacatgcttcccagagatcatcaattcaggggggtgaagcttttttcaggggtgtgttggaaagtatgcaatctgtttacttgaacaga

SEQ ID NO: 21315 - DNA, 265 bp, Glycine max
  Clone ID: 700954192H1
tttcaatcccacaacacactcattcctcattcttccactcccgcacaaaacgagctaggttgcagcaccccacagcttccctccaatccaaacacgtcctaatcccccgaaacactcttacccagaaacccatcctcaacctctcctccctcccgggcaccacctttacccccctcaagctcaaattcttcagcggcggcgccgtccgccgctccaccggcgcctcgggagccagaatgtcagccaccgcagcctccagctaggc

SEQ ID NO: 21316 - DNA, 269 bp, Glycine max
  Clone ID: 700954193H1
tgagaaataaagtagaatagactttttctgttacttctaccgcacaaaagtgagtgctactgtttatctctaatgggttcattctctggcacttgtgaaattgtcgaagtaagggaagacctaaatacagagaaacatgcaggtatatgtcagtccaattctggatatagcttggatgagaaaaatcagaagcatcctgtgcagaaactgggatataagggtaatctagatgatgatattaataagctgtttgaatcaattactcttaa

SEQ ID NO: 21317 - DNA, 260 bp, Glycine max
  Clone ID: 700954201H1
ataaggcacaagagtattcgccctgccttctccgcaatcagacacttgtcttctgcagctaaagagattactgtcagggaggctctgaactccgcactcgatgaggaaatgtcagctgatcctaaagtgttcttgatgggtgaagaggttggggaatatcagggtgcatacaagatatccaaggggctgctcgacaagtatggccccgagagggttctcgatactccaatcactgaggctgggtttactgggattggagt

SEQ ID NO: 21318 - DNA, 260 bp, Glycine max
  Clone ID: 700954202H1
cacaggcagaagaactaaaagcccagtcaaagtaaaaagtaaagcagaaaatggcggcatctctgagatgcagaaacagctcctccctcctcctaactcgcttcctcaactcagcgagtcgaaggtggttgcaaaccgtagcctacgaagaactgcgagctcacccggacaaaccctacacttcaacggcggttttcatccatggctttttgggatcctccagaaactggagatctttctctcgcaacctcttggcttct

SEQ ID NO: 21319 - DNA, 258 bp, Glycine max
  Clone ID: 700954204H1
ctcttcttcttcccacgctcctccttctcatacccttcgccaccctcgtctccgcccgccctcacctcgccggagactttctccgactgccctccgaaaccgataacgatgacaacgtccagggcacccgctgggccgtcctcctcgccggttccaatggctactggaattacagacatcaggctgatgtttgtcacgcctatcacatactaaggaaaggtggcctgaaagaagaaaatattattgtttttatgtatg

SEQ ID NO: 21320 - DNA, 255 bp, Glycine max
  Clone ID: 700954205H1
caaaatcagtctctaatatttttctcactgtcttgtctctccagagaactgtatagagagagatggcagctgcaacatctggtgctgtgttaaatgggttgggatcttccttcttgagtggaggaaacaggagccaaacccttctggccactgctattggaggcaaagttggtgctgctgctgttactgttagtcctagaagactcattgtggtagctgctgctgcaccaaagaagtcatggctccctggtgtca

SEQ ID NO: 21321 - DNA, 253 bp, Glycine max
  Clone ID: 700954206H1
aacaggactttccgttcacgacactcccttttatcgtttcacttccgtcgtcgtcgtcttcaattttggatcttcgcatcgaatcgcatcctatgggtagcagcagaggatacacgctcatggaggttggacccgacggggttgccgtcatcaccatcgtcaaccctcccgttaattcactttcctttgatgtattgcgcagtttacaggagagttttgatcaggcgatacagagagatgatgtcaaggcaat

SEQ ID NO: 21322 - DNA, 255 bp, Glycine max
  Clone ID: 700954207H1
gcaggaaggaggaaccagaatatggatccggatatggtggaaggaaggaggaatctgaatatggatcaggatatggaggaaggaagcaagaatcagaatatggatccgggtatggtggaagaaaggaggagagtgaatatggatccgggtatggagggaggagtgagtatgaggagaaacctagctatgggaggagcaactatgagagccaaggaggaggaggaagggttgagtatggttatgaggggcgtccac

SEQ ID NO: 21323 - DNA, 254 bp, Glycine max
  Clone ID: 700954208H1
attttcatcatcttcttcttctttttcatcaatcatcaccagtggttcttttccttctgagaagatcgaattgtgttttgcaaaaatgggagttccagagaaagaccctctttcccaattgagtttgcctcctggttttcggttttaccccaccgacgaggagcttctcgttcagtatctgtgccgcaaggtcgctggccaccatttctctcttccaatcattgccgaaattgacttgtacaagttcgacccat

SEQ ID NO: 21324 - DNA, 255 bp, Glycine max
  Clone ID: 700954210H1
ctttgcgcagttccctacctctcctttcaagatgcagatcttcgtcaagaccctcaccggaaagaccatcacccttgaggtggaaagctctgacaccatcgacaacgtcaaggccaagatccaggacaaggaaggaattcccccggatcagcaacgtctcatcttcgccggaaagcagctcgaggacggccgtaccctcgccgactacaacatccagaaggagtcaacccttcaccttgtccttcgtctccgtgg

SEQ ID NO: 21325 - DNA, 261 bp, Glycine max
  Clone ID: 700954172H1
gcagccactatagtaaacaatcttctctatctaaaatggagtttgttctaaactacctaaatgccactgccattggagttctttctctaaccctcttctttttgtttttgtataatcccttcaaatttgcattaggtaaaaaagaggctcccgaagttgcaggtgcatggccaatacttggtcacctaccactattgagtggttcagagacacctgatagggttttgggtgctttggctgataagtatggacccatattca

SEQ ID NO: 21326 - DNA, 270 bp, Glycine max
  Clone ID: 700954136H1
tcttgttgttgttggtgttgttcagttcttcttcctctctttgaacaacatctcacaattcattcaccttttaattcatctcactcacaaatcacaatgctcttcctttcttccttaataataataccataataatctgttacgttacggggcccaaatgtctgttacggagctcaaggagcgtcactctgctgccaccgacaccgtcaacaatctcagacaccgtttaaagcagaagcgcctttcgttgctcgacacagatatttctgg

SEQ ID NO: 21327 - DNA, 268 bp, Glycine max
  Clone ID: 700954137H1
gcgtgtgtgtgtgtgcgagagagagagacaacgaccccagacgcttccactctttctttggcggcggcgtcgttttctctacgctttacccattcattcattcattctcaggttcggggcatttcattctgattcactatggccaatggtccagcaccgttttctgagattgggaaaagggcaaaagaccttttatacaaggattacaacttcgatcacaagtttagcctctcaattccaaactccactggattggggcttatagcaa

SEQ ID NO: 21328 - DNA, 269 bp, Glycine max
  Clone ID: 700954138H1
ccagggccaggttggaattggaagctcttctatctatctctactttctattctctagtctttttctcacaacctgccatttctttctacttccattcaccataacgaaccgccaagctactagtaccttacacgattcatctctctctcatacactctatttttctctctgtcccctaccactctttcaaaataatattctggtttatctcaagcggtggaacactcttctccaccagtaccaccatccttcttcttcttcttctctcc

SEQ ID NO: 21329 - DNA, 268 bp, Glycine max
  Clone ID: 700954141H1
cagaaagcttgctgacaactgcactggtctccaaggttttctggttttcaatgctgtgggtgggggcactggctctggtcttggttcccttttgctggaacgtctttcagtggactatggcaagaagtccaagcttggtttcactgtctatccttcaccccaagtttacacctctgttgttgagccttacaacagtgtcctctccactcattcccttcttgagcacactgatgtggctgtcctgctcgacaacgaagccatttatgac

SEQ ID NO: 21330 - DNA, 271 bp, Glycine max
  Clone ID: 700954142H1
cacaaacttccttattttcttccaaatctcaccacccagaaagcacaaaagctacacacatatccaatcttttctttttcttcatttcgtccaccagattcatacacaattcacgtatacgtacaattattaaaaggaagagatggcaggagaatcatacgaggaagccatcacgagtctgaccaagcttctcagtgagaaagctgagctcggtggcgttgccgccgcaaagataaaggagctgacggcggacttgtatgccgccggttcg

SEQ ID NO: 21331 - DNA, 271 bp, Glycine max
  Clone ID: 700954143H1
ctttttaagtggctgctttcttccgtgaacagaaagggtcttcatttctagattttttggtctgaattgagatttatctgctactgctgatgtagagcatatagtaatgcgttcaatatgtaaggatagtgttatattggctgaagtgcaaaataatgcaagacgggaaataaaagagagatggtgtgtttgagggaaataaagagtagttagctgaatctaatcagggttctcaatctgatcaagaagcatccttgtcaacattgatata

SEQ ID NO: 21332 - DNA, 272 bp, Glycine max
  Clone ID: 700954144H1
ggtcaccttcaaaaccagtcaaccaacgtgatgctgatctcatccatttttgggataagttccgcaaagctcctgagggttctctcaggaaaaatgcagctcagaaacaagttttggaagcaatgtctcatagaatgcatgtagacaacagtgtaaaacttattgggaagcttttatttggtattgaaaagggtccagaagtactcaacgctgttagaccggcaggatcggcacttgttgatgattggcactgccttaaaaccatggtgagg

SEQ ID NO: 21333 - DNA, 272 bp, Glycine max
  Clone ID: 700954145H1
aaggggagcatcacttttcaacatttacaaacagataactctcttttaatacttgataatctgatcctgctccatactacgatgattccacgcacatttaatacttgatattcagacactgtttctttgttccgctgcctcgcatggcatcaacaactctcttcagcttcagactctctttgaacccactgcaccatcaacagacaacgaggccaaaatctctgctctcctctcctcgcaccaatccacgcctcgtttcttccattaacaat

SEQ ID NO: 21334 - DNA, 263 bp, Glycine max
  Clone ID: 700954146H1
ccatatccccccctagctacagagcagccaaaggggaggaataataataagcctatattctaaggccggaaaaataaaaaaggaataacaaaaatgtctggaaaggtaattatctcggctgtttctctcatcctggtggttggagtggccataggtgtggtggtggccgtcaacaagaagggcgaggatcccacacttcaatctcaacaaaaatcagtaagggttatctccaaaacactgatgaccagaagctctgccacgaa

SEQ ID NO: 21335 - DNA, 275 bp, Glycine max
  Clone ID: 700954148H1
accatccttcttcttcttcttctctccaccatatatagtatttgactatttgtaatattcatcatgttcattgtgcagtggtgaattgaagtgtttcagtttggcatcttctgatggtgctttatttataattattgtcatcaagtttcagactcattctggatcactgagttgattctcttaatgtcaagataaaaaaaataaaaggtagatgatgcatggaagcttgagaaatgcaaataaaagtagaaaagcctctagcagagaaagaaaat

SEQ ID NO: 21336 - DNA, 274 bp, Glycine max
  Clone ID: 700954149H1
ctcgagccgcgttatcatatcattccagcgtcactctgattgagagtgaagaaggtgggagatggagaagccacaaaacggagaagaaaaggaagaaaccacggcctctttctgcggttacgattctcttcaccgtcttctcaaggataatcttaacccccatcacttccaggaagtcagccgtttgcttactgggcttaattgtggaaaagcacttgaagcagtttctctctcagaatctgcaacttccctctctgcggaacatggttttgac

SEQ ID NO: 21337 - DNA, 270 bp, Glycine max
  Clone ID: 700954150H1
ggatttctttcatgagcttgatctatctagtttcttagttgatgactatttatctaggtaacctgtgttctgtagtttggaaaaatgattttccccccaggtgtagccaaattgaagacgggatctttgagaatggcatttgattttaccatgtgctgaagtatgttcacaagattttggtgtgtcaagttgccatccgttctgcaagcagcagcaaattagaatggctagcaagtctagatgaatttggtttttcttcaatgggatatt

SEQ ID NO: 21338 - DNA, 262 bp, Glycine max
  Clone ID: 700954151H1
ctttgctctttgcacctcagcacagtttcccatcgaaaactagcccatctttttccctcgtaccttttgcttcagcaacaacaacatcgtcgtcacaaatctagagatagatagatagatagagagaaacggttgaattgaagatgaaaatcactgtcatgactgctgatgaacaaatcctcaggttagatggtggatccccacgaatctgtggaaaacgtcaaagcattgctcgaggttgagacaagtgtgcctcttcaac

SEQ ID NO: 21339 - DNA, 264 bp, Glycine max
  Clone ID: 700954156H1
gctcctttgaggagacaagaattgggagtgttagtgaagtcactgagaaattcagcggcatcacgtgaagttgtggacctcagtgaggtgttgggggagcttatggagaacatagtgtataaaatggtattggggcgtgctagggatcatagattcgaattgaaaggacttgttcaccaggtgatgaacttggttggagctttcaatcttgcagattacatgccttggcttggtgcgtttgatcctcagggaataacaagacga

SEQ ID NO: 21340 - DNA, 267 bp, Glycine max
  Clone ID: 700954157H1
gggaagagaagtgaaaactacacacatagtcatataaaaacaccctcccattttggttcttgctttttgtctctcaacaataaatcccccaacacccttccaaaccacattgcttttgtgtcaaaattagaccaaagtttttcttcaccagtgatggaggaggaggatcacaaaatgtttggtcttgtctcagaaccagaggaatattgcaaagagttaggtgttgctgtcagagcagttcaaatggcatgcttcctctgtcagaaa

SEQ ID NO: 21341 - DNA, 271 bp, Glycine max
  Clone ID: 700954158H1
cacagagagtgtgtatgagaacataaagcaaagtcattttgtgaaggtgaattgctgaagagatagcagatttttgaaggaagatgaataactctgtttcagaaaacagtttcatcattgagagtgatgaagaagatgaggagaaggatttgaataaaggtggagttgatggaaacgattctgattcttccaattactcaaatgaaaaccctccacagcgaaagcccagttcttacaacatttcatggcctcagagttacaggcaatctat

SEQ ID NO: 21342 - DNA, 266 bp, Glycine max
  Clone ID: 700954162H1
ctcacaagccacgatttcaacgccacaccaaaaattccactgcaccaccaccctccccatttgtacttttcttctcattctctttccactcccctgcattctgcacacaatctagctttacgtgcttctgggcaaccgcataaggttaaactgttaagcatatcattgaaatccttttgggattggaacttgatatgatcatttgtattggggagtaagaccttgttacttttgcaaatgctaaatgttaataggatcagaagtca

SEQ ID NO: 21343 - DNA, 275 bp, Glycine max
  Clone ID: 700954163H1
ccaaaatcttcatattcatcaaactcatcaaaatgaatctgtaccactcctccaccaccaccaccaccaccaccatcttcaccgtcatattcctcctccttgcaatattattcactctcacaccccacaaggccaacggtgccacgtgtcaccctgaggaagaagcgggcctgttgggcttcaaatccggtatccgatccgacccgtccggcctgctcagtaactggatatcgggtacggactgctgcacatggaccggagtagaatgccactat

SEQ ID NO: 21344 - DNA, 270 bp, Glycine max
  Clone ID: 700954165H1
ctgtcaaaggatctcccttctgatcttcaaaagcttagatgcaaggttgctttcaacgcactacggtttgctcagccgattcaggaactcggtgacggcattgcagagagaatgcaaagcaagggaccttaccttgttcttcatctaagaatggagaaggatgtgtgggtgaggaccggatgcctccccggtttgagtcccgaatttgatgagattgttaacaatgagaggatacaacggccggagctcttgactgcaagatcaagcatg

SEQ ID NO: 21345 - DNA, 270 bp, Glycine max
  Clone ID: 700954166H1
cacaggcacaggcacaaggcgttcctcttcccgagcaagtcacagtcacagacccagacaactctgtgagtggggattccatacggcagagatttttgaatttctatgcttcccgtggtcacaaggttcttcccagtgcttctcttgtcccagatgatcccactgttctactcaccatcgcagggatgcttcaattcaagcctatcttcctaggcaagattccaagacaagtaccttgtgctgctactgctcaaaggtgcatccgtacta

SEQ ID NO: 21346 - DNA, 268 bp, Glycine max
  Clone ID: 700954167H1
caataatcccttttctcatttctttcatcttctcttactgctgtctgctaattctaatcttaattttctgtttactgtttctttcttccttcatattttatacgcttcttcttcttcaactactactctctctctcaaccttcaaagcttcaaactcaaaagcaatggcatttgatcccgtgcaacccgtcgcaaagaaagcaaggtcaggtggtgagattgtgagtgcaagagagcctctgcttaatggggttcatgactctgaaag

SEQ ID NO: 21347 - DNA, 265 bp, Glycine max
  Clone ID: 700954169H1
cttcttcgaatcccaagtctcaggtctggtaaccttttgaggttgttgggtgcagaagggagcgatggctgcttcagaggagaatagtgcactgttcccaatattcattttgacaataatggccattcctatagtgccatatacaataacaaagttgtgccgttttgccagtaagaaatcaaagagcattcactgtcagtgctctgagtgctcgcggtccgggaagtaccataaatcgatattcaagaggatttcaaatgtctca

SEQ ID NO: 21348 - DNA, 266 bp, Glycine max
  Clone ID: 700954170H1
ctctcacacacccaaacccaacattattaatactcttccttctctttaccttttacttttcgaagcaaaaacaccataacaaaacacccagaatttgtgggttccattcccaaaacaaagaacaagaaggagagagagagagagagaatgcaacgggagaaacaaaaaacagaagtatttctgtgattgattctctgcaaccgaatcatcatcagccacttcttctcccagtttcagctctcccctctctcttcttttcctcggct

SEQ ID NO: 21349 - DNA, 274 bp, Glycine max
  Clone ID: 700954133H1
cccaaggtgctcttattgttgcttcaactcttcaaatagtactaggctttagtggcctttggcgaaatgttgcaaggttcttaagtccactttcagcagttcctttggtatctcttgttggttttgggctttatgagttaggctttcctggggttgctaaatgtgtagagattggactgccagagcttatattactagtatttatttcacagtttgtacctcatgtgctacatgcaggaaaacatgtcttcgatcggttcgctgttttatttac

SEQ ID NO: 21350 - DNA, 280 bp, Glycine max
  Clone ID: 700954102H1
tttcaaggctctctctattgtttaggttccaaagtcaatatacaatttctgatctctgcatctcaatccaatagatcaaatatgccttcaaacgatggtatagttatcgtggtcatgggtgtcagcggtgctggaaaaaccacaataggtcagatgctggaaaaagagttgaaatacaagtatcttgatgctgatgattttcacttagaatcaaacaaagaaaagatgcgaatgggaatccccctaaccgatgaagaccggatgccatggcttgaatcgc

SEQ ID NO: 21351 - DNA, 275 bp, Glycine max
  Clone ID: 700954103H1
ttaaaattttgatcatcatggcctgtgaaaatgacaaaaaaggccacctattacttgccctagggctagtgctctgcgtcaccctgaccttcttcccaagggtgaccgaaggagggtgccctttgcatgcgaccctaggaacgggctcacgagggggttcaagttctgcaacacgcacgtgccgatccacgtgagggtgcaggacctcatagcgaggctcacattgccggaaaaaattaggctcgtcgttaacaatgccatcgccgtgcccaggc

SEQ ID NO: 21352 - DNA, 273 bp, Glycine max
  Clone ID: 700954104H1
ccaattcattaattatccaccctaacccatcattccttcacggcgaggcaacgcaaggtgggtaccccttgctctgcctccgccgtcacctacccatcatttcaaatattcatcgacataccttttatagctatgagcgaggaaaagcatcaaaagcatcatgacaccttgtcatcatcttcttctactcctacttgttatttttcctcctcttcttcttcttcttcgccgggcgagtcggaggaggagctgcagcacatgctgctggtgccg

SEQ ID NO: 21353 - DNA, 272 bp, Glycine max
  Clone ID: 700954105H1
ttgctttctaattattcgtgttgtcagtgtctctttgaggccattttgctagctatttaataatggcaattgagaagcatgaggatgttgagagtggatatttgcacgagcccttcattcaaccagaggatgctgctgctgcttgtaaagaaaatggatcagataagagtgtgaaaaatggatccattggaatggttttgcttagcacacttgttgctgtttgtggttctttcacatttggaacttgtgtgggctattcagcacccactcaa

SEQ ID NO: 21354 - DNA, 273 bp, Glycine max
  Clone ID: 700954106H1
gatcgagataactagaaacagtgtgatgaaaatgaaggtccttgttttcttcgttgctacaattttggtagcatggcaatgccatgcgtacgatatgttccctctccgaatgaacactggctatggtgcccgtactccggaggtgaaatgcgcaagttggaggcttgctgtggaaacacacaacatctttggctttgagaccattcctgaagagtgcgttgaagcaacaaaggaatacatccatggcgaacaatatagatcagactccaaaac

SEQ ID NO: 21355 - DNA, 271 bp, Glycine max
  Clone ID: 700954108H1
tgaacttgaactatcgtgtcttcttggctttctctgttcaggatcaacatggatattgtatcacgagctttgctatttccgttggctatacttgtgctcatattaagcacaccttgctcaggtgcttttgggaagagtggaactaatgtgaaaacagctatttttctgtcccccaagtttgaacttggaccaggatcggtagccaataaatatgattatgacgctgattttccaagaggtcatatagcacttaagagtttcaatgctgaag

SEQ ID NO: 21356 - DNA, 272 bp, Glycine max
  Clone ID: 700954109H1
gttttcaaccagaccgtccttcgtcagttaactatgggctaatcacaattcaggaagcccaaaactattaaagaaaccgacaacacaaaggatttgcagaaagtgcagctacttagttccattttcatcctctctccattaactttcagtcaaaacaaaacaaaacctctttaggtgtgaaattccacgtgccaaaatcatctccgaggcaccaacatcggcagccacatatttctttatttattgaaggaatcagtatataaaacacctgc

SEQ ID NO: 21357 - DNA, 180 bp, Glycine max
  Clone ID: 700954110H1
cacaaacttccttattttcttccaaatctcaccacccagaaagcacaaaagctacacacatatccaatctgtgctgtgtcttcatttcgtccaccagattcatacacaattcacgtatacgtacaattattaaaaggaagagatggcaggagaatcatacgaggaagccatcacgagtct

SEQ ID NO: 21358 - DNA, 261 bp, Glycine max
  Clone ID: 700954112H1
acttggttttaattggtataggcttgccaaggtcttgttgattgagcgttaagtgctttaactaatcaatcccaagaccttggtttaccttgccacacaaaaaaatatataaaaaggcaaaataataataaaaaaaagagaaggcttggagccaagaaaataaacacaaagcacaagtcatggaaagaataatggttggaagtgcaacaaaggttgctttcaacctcttggtcactttcgccattgtcattccatgccttg

SEQ ID NO: 21359 - DNA, 263 bp, Glycine max
  Clone ID: 700954113H1
tggagggtgtgaattgtgaatttgtgattgtgggaaaaagatgccgcagaggcactcgaagaacaacaacgatcttgcgttcttcacgtacgatgagaagcgaaaactaggttatgggacccagaaggagaggttgggcaaggactccattaagcccttcgatgcttgctctctctgcctcaaatccctaattgatcctatgagctgccagaaaggccatctcttttgcaaagagtgcattcttcagtgcctcttgtctcaga

SEQ ID NO: 21360 - DNA, 262 bp, Glycine max
  Clone ID: 700954114H1
gttcagtgctgtatgatgttgatgaaccaactgttcgaagtcttaatggctgccgtgtggcagatcaaattcttaaacttgttccaaatgttgagcacttccgaactgcattgagatgtttaaagttttgggctaaaaggcgtggtgtttattcaaatgttactggattccttggtggtgtaaattgggctattttagttgctcgaatttgccagctctaccctaatgcaatccccagtatgttggtttctcgattcttcag

SEQ ID NO: 21361 - DNA, 264 bp, Glycine max
  Clone ID: 700954115H1
cgacgttggtgtcaatgatggatgaagtcaccacttttcccgtcataaatctctggatttcttccttcactttacatccgagttcccattggtcgtcattttccttctgattgcccttttcttaattccctgctgtgctgttattttagtcctatactttctagtcactattctttttgctataccatcatttctcgtattgtactttgcataccctacgatccagaggctggtaagagaaataacatcttaagatatagcctt

SEQ ID NO: 21362 - DNA, 267 bp, Glycine max
  Clone ID: 700954116H1
caaagatgctgttctccttgcttctcaggatataactgagtggcctgtgctcgaacccctcccatcatacggtagaggaagagacgcaccggcaggaagattcacaagcctcatatttggaccaaaccttactgatgttattgtcacaggtgaaaatggcaccatagatggtcagggtgagttttggtggcagcaatttcacaggaagaagttgaagtacactcgcccatacctgattgaattgatgttctcagacaacattcaaat

SEQ ID NO: 21363 - DNA, 279 bp, Glycine max
  Clone ID: 700954117H1
cattgaggtaatacaaaaagctctgtttccaaatatctaagtcctttactttgtatgacagaggcatcaaaaaattgatcttaaatttttctgcattaggaagtgtccacaatgtgatcctattttccgcattagaattagatgtatctgaacattttccacaaaacgcattgacctttttgttgaactaacatgaaacttggcctagtcttttctgttcaataattatctctttaaatgtccaacccaacctaaagtagttaccaagcagttactcgg

SEQ ID NO: 21364 - DNA, 271 bp, Glycine max
  Clone ID: 700954119H1
atttagaaagacattgtggttacccatagtctcatagtgtcatactgcaacacaaaacaatgggttcccttatggcaggatgggactctacccacatagatcctcaatcagccacacttaaaaggaaccgctcactcaccaaggatgaaattgatgcttactggaaatcaaagaagaagatagaggaagaacaccttagagctatttccaacttgtcagagactattcaggctagcaaaagcacagaacctgagaagaagttgcagaagtc

SEQ ID NO: 21365 - DNA, 272 bp, Glycine max
  Clone ID: 700954120H1
tgcacccaaaccctggaattaagcacgttatttcattagggttggttttgttgaacagagaaaaagagaaaagaaaattatgggaagcgatggcgtgaggaaaccaagattcctatgccttcatgggttccgaacaagcggagaaatattgaaaacacagttacataagtggcctcaatcggttctagacaacctcgatctagtatttgtggatgctccttttccttgccttggcaaatccgatgtagaaggcatttttgatcccccttact

SEQ ID NO: 21366 - DNA, 276 bp, Glycine max
  Clone ID: 700954122H1
gctcggaattcggtcgaatcgagcgaatcggctcacggctcgagcgcaaactaacatcaaccaccaccaccaccacaacaacaacgtttgtgtctggtcgtgttgtgttgttagggattcatggcaacaataaacccttgattcctctccccattctcccaagagaagggccattttgttacagtgttggacacttgcaaatggatttagaagacaagttcctcgctaaagtttctggtgttcaaagcctttcatccagtgcacaaagtactccag

SEQ ID NO: 21367 - DNA, 270 bp, Glycine max
  Clone ID: 700954123H1
ggcaaaaagtagccatcgccccaacgatcccatttcccttgacttctctacgtgaagatccttgtgtcgcatagagctagttaaaatgtctgagggaaatgcagggaaaggaaagagaatcgccatcattggcgtctcagccttattgttggtggctatggttgtggcaatcacagttggggtcaatctcaatgagaatggttccaacaatgatacagaggacaacaagaaaaatcatgttgtttcttctataaaagccgtccaaaccct

SEQ ID NO: 21368 - DNA, 268 bp, Glycine max
  Clone ID: 700954124H1
aaaaccctgaagaaagacacagccattgtttacttttcattgattgagccaaagctttgtattttctgcgataattttccattgggtggaagaaagtctcaacctttattcgaaagagcaaggatctgagttgagttgagtgatcatgtgtggtggtgcgattatctccgacttcataccggcaggtcccgccagcggggcgcggcgcgtgaccgccgacatcctgtggccgagtttgaggaagcgcttctcgaagccgctgctggac

SEQ ID NO: 21369 - DNA, 270 bp, Glycine max
  Clone ID: 700954125H1
tgagaagccactttggtttctttgcctttctcaatacattttattttccaatggaggtaggaagtgttcttaactttctgcaggacaagaccattttaattgttggagccactggctttctcgccaaaatttttctggagaagatattgagggttcaaccaaatgttaagaagctttttcttcttttaagagcttcggatgccaaatcagctaattatcgcttgcaaaatgagatcatagcgaaggacttatttattgtgctaaaggaga

SEQ ID NO: 21370 - DNA, 263 bp, Glycine max
  Clone ID: 700954126H1
ttctaatagcccttcccttcatttggagacacattattgttctttcttcctacaagcctttttccctatccaactcttttctctcatcaaaccaaaagcacccttaattcattcactttgtgatatgtctcgcaagaggctaggaaaaaagcttcaacctgccaagaaggcatggaagagcttctccaacacagtccaacacaaactccacaaactcaacatccccaagtccatgaaaaccacccttcaacgcctcctctcag

SEQ ID NO: 21371 - DNA, 267 bp, Glycine max
  Clone ID: 700954129H1
gttgctttgcaagttgcgagtctctcttcctacgacaaccgtttcctctcgccggaaaaccgacattgatctctctctccgccgatccgtccgccatgagttccggcgagctcctccacatacaaccccaggagctgcagtttccctttgaattgaggaagcagatctcatgctctttgcagttgtctaacaagactgacaactatgtggatttcaaggttaagacaacaaatcctaagaaatattgtgttagacctaacactggag

SEQ ID NO: 21372 - DNA, 87 bp, Glycine max
  Clone ID: 700954131H1
ggcagtgtttctgtattctagaagtagaaggagccccctagtgcgcgttcgttctcgacacgcttttcgcatcacacacgaatgctt

SEQ ID NO: 21373 - DNA, 267 bp, Glycine max
  Clone ID: 700954132H1
cagcgatcgaagtttcacatcagccttatccagtttagggtttcggttccttaccctacctgttgacgtatcgaaaccttaaatttgggattaggtctgagcaatctggttggtagaacctttggtcttagagagtcaagttttatgtctggattagacgatcaaattcctactgccttcgatccttttgctgatgcaaatgctgatgactcgggtgctgggtcaaaggagtatgtgcatattcgcgttcagcagcgaaatggtagg

SEQ ID NO: 21374 - DNA, 282 bp, Glycine max
  Clone ID: 700954101H1
cacgatgttgcggcggagatcctgaaccggttgaacggtgtgaaccggagtgataggttgacggattgcatggtttcggcgttgaaatcgaggatgaatccggtggagtatcctccgccggtggcggagcttgttcaggaaggagcacgccgattcgactcagatgctcttggagaactcggtgtgcttcacggtagggttcatggcggcgaatctcgcgattctggaagccgcatttgaggagaaaacggagacgagcaggttctgcgtggtggattttga

SEQ ID NO: 21375 - DNA, 267 bp, Glycine max
  Clone ID: 700954065H1
cgaagaggagagagaaacgaagaagaagagtgtttctcacatcacatggcctccttgcccttggggcaccaccaccaccaccacaaaccggcggcggcggctatacatccgtcgcaaccgccgcagtctcagccgcaacccgaagttcctcgccggagctccgatgtggagaccgataaggatatgtcagctactgtcattgaggggaatgatgctgtcactggccacataatctccaccacaattggaggcaaaaatggggaacta

SEQ ID NO: 21376 - DNA, 260 bp, Glycine max
  Clone ID: 700954068H1
gaaagagagaaacagaagtttgcagaagaaaaggaaaataaaaatactaacaaaagagagaaaagaagatgcagtgagtcacagtcatagaatagaaacagaggcaccatttccgttttccaacaacctctaccctaacgccgttataacggttcgtgcctccgcgacgcgacgcttcaactgtgaaacggacgcgacgtagtttatataaagcgccgtccctttccgtttgtgcgttaatcaatcagcaagacgatgac

SEQ ID NO: 21377 - DNA, 257 bp, Glycine max
  Clone ID: 700954069H1
aagctgcgtttcgagttgtccttcttccatgagatcatcgcccaaccattctggtgtgctttctcagagagctgctgccgccgctgctggtatgtattgcggagacacttctacaatggaagagttgcagagtgcaatccaaggagctatcgcgcattgcaagaactctttgattcagaccaacaaaacaatggtcagtaacgaaatctaagtctaattaattaatctaatcaaatcactctttttccgttgttaat

SEQ ID NO: 21378 - DNA, 251 bp, Glycine max
  unsure (1)..(251): unsure at all n locations
  Clone ID: 700954070H1
cggctcgaggattcacattattctttctcagactccttcactctgtgttgtcgtttctgtttcttcagcaattcttctcatcgtaggggaaaacatgaagttctgcaaaaagtatcaggaatacatgcaaggccaggagaagaaacttccatgtgtaggattcaagaagctcaagaagattctgaagaagtgcaggagaaactcttcatccctgaaaccccttaatgcatcccttcgncaaaacctgcccg

SEQ ID NO: 21379 - DNA, 254 bp, Glycine max
  Clone ID: 700954071H1
gaagaaaatgaaagtccttgttttctttgttgctatagttctagcagcatggcattgccatggctcagaccatgaccatgaccatggccacacctaccaaattttccctctgagaatgaaaactggccatggtggccactacattccggaggtatcatgccaaagttggaggcttggtgtggaagcacacaacgtcattgactggaaaaccgttcctcagatttgcaagggatatattgggaactgacatgctt

SEQ ID NO: 21380 - DNA, 253 bp, Glycine max
  Clone ID: 700954072H1
gtttcactgcataaatttgagagaaaactctgcaaacatgttggtttatcaggacctccttacaggtgatgagcttctctcggactccttccgttacaatgaaattgagaatggaatgctgtgggaagttgaggggaagtgggttgttaagggagcagttgatgttgacattggtgcaaacccttctgctgagggtggagaagatgagggagtcgatgacgcagctgttaaggttgttgacattgttgataca

SEQ ID NO: 21381 - DNA, 84 bp, Glycine max
  Clone ID: 700954073H1
ccttaatgtaatattggaacgaacagatattgatgatatagtgtcgtggttaatggggaatctaacatttcagagaggtcaggt

SEQ ID NO: 21382 - DNA, 251 bp, Glycine max
  Clone ID: 700954074H1
acaaaacattggcatctgatgcaggttccgagcatagtgagtcatctgaaatacggaagacaagccggacagcctcaattgaaagcctttcttccaagagtgggcacgacgaggaagaaaaatccaaagctgatcacaatgctcttcttgatgatgggtggtatattttgtcggactgaattccggagtttactgactatttgttctgctgagagtggaaaaacataggagttaatgctatattgtttata

SEQ ID NO: 21383 - DNA, 250 bp, Glycine max
  Clone ID: 700954075H1
ctcgagccgattgataaacataacctacacgatgctattcgtggacaggttgtccaactaatgaggctagattgcaagcgcgctgttcctttgttaatccagaatagggacttaataagtccacctgaagttgtgaatcaacttctaaatgcagatgataagagtgattgtagatattttttacatttatatctccactcattatttgaagtaaatcctcatgctgggaaagacttccatgatatgcagg

SEQ ID NO: 21384 - DNA, 246 bp, Glycine max
  Clone ID: 700954076H1
gggttagggttttctctcttcatcactctctgtgtcgctccgtttcaatggctcagcaagacgctcaaaacggcgggtcggagaatgccgctgctgctgctacggtgtcgtttgtcgctgtgaagccgcagctcctcgtcgaagctcccaaagccaacgacgccattctgttcttcaaggctgcgtttggcgctgaggaagttggccgtacgctcaaccctaagcgcaaagctgagcacgagctcc

SEQ ID NO: 21385 - DNA, 247 bp, Glycine max
  Clone ID: 700954077H1
caacaagaagaaggttatttattgcacaagtttgaactggagtgcggatggaagcactttgtttagtggctataccgatggtgtggtcagagtttgggctattggacgttattaggttaagctttttagtgttttcagatgcgaatctgtttttgagttttgggacaaagttagttactgctttactgtagaattgatttttatgttgaagaccgtggcactgaggccttttatttatttttaaaac

SEQ ID NO: 21386 - DNA, 246 bp, Glycine max
  Clone ID: 700954078H1
cgtgttcaacacgttccgcgcgttggagggttcttatttggatcacattaaagaagagttgggtcataagagtgtgttttcggtcgggccgttgggattcggtcgggctgagtccgacccaaatagaggatccgaggttttgcgttggcttgacgaggtggaggaagaagcgtcggtgttgtacgtttgctttgggagtcagaagttgatgagaaaggaacaaatggaagcattggcggtgggatt

SEQ ID NO: 21387 - DNA, 251 bp, Glycine max
  Clone ID: 700954079H1
gtggtgccttatcgctgtggttatcatcttcttcttcctctttcttagatctcttctttctctacgccgcacgccgaaaccatggccggaaaaggagagggtcctgctatcggaatcgatctcggaaccacctactcttgcgtcggtgtgtggcaacatgaccgcgttgaaatcatcgccaacgaccaagggaacagaaccacgccgtcttacgtcggattcactgacaccgagcgtctcatcggtgatgc

SEQ ID NO: 21388 - DNA, 253 bp, Glycine max
  Clone ID: 700954080H1
ttctcacccacccacccacacacactctctccagcgtttctctcaattgggtattgtcatttactgtgtttaattgggatgtgttgctgttgcacaaattgagatattgcaagtgaaatgaaggccaggcacatctcattcttctcttgatatttctgatggcactcgctgcaaacaaagtttctagcagtcctattgtgactaaaagaacagctctttgcagatcacatgaaaaacactatttttcctcgtc

SEQ ID NO: 21389 - DNA, 247 bp, Glycine max
  Clone ID: 700954082H1
ggaaatgtttccaggtggtacaagcacattgatgctttgttgagaatctctggtgtttctggcgagggatctggtgttattgttgagggatccctggttgcggacctgttgcaactcccccagctgctgacactaaggctgctgttgctgaggatgacgatgatgatgatgttgatttgtttggtgaagagactgaggaagagaagaaggcagctgaggaacgggcagctgcagtgaaggcatctgc

SEQ ID NO: 21390 - DNA, 255 bp, Glycine max
  Clone ID: 700954083H1
gttgtagcaaaagaagtaaacaacacacacatatataaatatttgtaagatatatatatatatatatatgatcatgggttttcttcacaagctttgggacgaaacgctggcgggtccggcaccggaaacgggtctggggaagctccgaaagtacaattcgttctccggcggaatctccgtccggtcaacggtggcggaggcagttccgataagtcgcagcatcaccattgttcggtcccagtctggtttcggaag

SEQ ID NO: 21391 - DNA, 257 bp, Glycine max
  Clone ID: 700954084H1
attcattatatttttgtgtaaatagaggaaaaactcgatggaaaaatggtggtttaattctatgttgtttaataggaagttagaatacaggtgtgaattaagtaaatcaatggatagtcttggtcctattgaaaataccagtctaagggaagaccctaaaattttaaccgatatagaaaaaaaaattcacagggatttggattatttagaaatggaaggttttttttctagcgatctgaatactgtttctaagaatg

SEQ ID NO: 21392 - DNA, 255 bp, Glycine max
  Clone ID: 700954086H1
ttctttatttataacatggagtactctgtggaaactttggaaagagatcttaagaacacgaggaaatactacgggagtggaaaaacaaaggaagcaccatggagagaatcacagcttaaagggttgcacaattttctcgtggaaaaagaggaagaattgtgacgggcctcacagcatgatttggggaagcattacgtggaggcttttagagacgagcttggaacattaaatgtaagcccttaaacttggcaacca

SEQ ID NO: 21393 - DNA, 254 bp, Glycine max
  Clone ID: 700954087H1
cgcaagtattcctccaatctccgtcgatcaccaccaccatgtcgtggctcctccgatccaccaagtctaagctcctctcttcctcttcctcttcttctctttctagaaccttcccctctctccctcgccctcagatcggagccatctctcccctccccgatcttttccaccgcaacaccgccaccatgcctttcgcgaaggaaaacgcttccggtggaaacttgaccggtcttcccaaagttcccgcgaataag

SEQ ID NO: 21394 - DNA, 229 bp, Glycine max
  Clone ID: 700954088H1
ctcttttggggtatggaattcaacaagttcagaatcagaagctatgaggggcaatctgatagggctcaagtggaagatcttgagagaagatgcgaggtagggccatcagaaagcgtgtttctcttcacagacactatgggtgaccccatttgtaggatccggaacagtcccatgtacatgatgctggtaagtgattcacacacaattactatatgccactataagggcc

SEQ ID NO: 21395 - DNA, 248 bp, Glycine max
  Clone ID: 700954090H1
gcatgacatttctcacctcacatgtgccgatttcctccgagcccctggagttcagacccctctcatcgtccgtttctccactgttatccacgaacgtggcagccctgaaaccctcagggatcccagaggtttcgctgtgaaattctacactagagagggtaacttcgaccttgtgggaaacaacttccctgtcttcttcgtccgcgatggcctcaagtttcctgacatggtccatgctctcaaaccca

SEQ ID NO: 21396 - DNA, 246 bp, Glycine max
  Clone ID: 700954091H1
gataagatagagtcatcatcttctaaaatgtattttcattattatggacaacttctgcatcagcaaaatatgttgcaggactatgtgcggacagggacctatcatgctgctgttcttgagaaccgtactgatttcattggtcgtgttgtagttgatgtgggtgctggtagtggtattttgtcattatttgctgctcaggctggtgcaaaacatgtttatgctgtggaagcatctgaaatggcagaa

SEQ ID NO: 21397 - DNA, 244 bp, Glycine max
  Clone ID: 700954092H1
gtcttgagaaaaggtttggtcagtccgctgtctttgttgcctctacgcttatggagaatggtggtgttcctcaatctgctactccagaaactcttcttaaggaggctattcatgttatcagctgtggttacgaggataaaactgattggggaagtgagataggatggatttatggttctgtcacagaagatattcttaccggatttaagatgcatgcccggggttggcggtctatatactgcat

SEQ ID NO: 21398 - DNA, 249 bp, Glycine max
  Clone ID: 700954093H1
gcaaagcgcaagttgactcattatccaaggaattgcgaagtcgtgcaactatcccagattatgcttataaggcaattgatgcattgcctgtttctgctcatccaatgactcaattcacaactggtgtcatggcccttcaggtgcagagtgagtttcagaaggcatatgagggtgggatagctaaggcaaggtattgggagccaacttatgaggatacaatgaatctaattgctcgtttgccagccattg

SEQ ID NO: 21399 - DNA, 75 bp, Glycine max
  Clone ID: 700954094H1
ctccctactaggatgctatgctcattccagctgggcgtagctgtagcgtgtcaaaaaaggaatctgcggaggtgc

SEQ ID NO: 21400 - DNA, 248 bp, Glycine max
  Clone ID: 700954095H1
ctactttcagctcctaagagcacgcatcactgttgcacttcttactcgttctccctcttttttttcttcttcttcttcttcgctaaaccccccctttatttttcctatctcactaacatcgatgggagacgagaataagaccaagtcccctgcttccggcgtgtggtccaccatcaagcctttcgtcaatggcggagctccggcatgctcgccacctgcgtcattcaacccatcgatatgatcaaggt

SEQ ID NO: 21401 - DNA, 254 bp, Glycine max
  Clone ID: 700954064H1
ctcgagccgattcggctcgagaatcgttggacttgtcgaacaacacttttcacctggggaggcttcccaagtgggtggcttacgtcgccgataatattctctctgaagcttgtgaattgcggaataaagatgaggctagaggattttaagccttcggagacttatttctatgattttattgatctttcggggaatgaaatttcagggagtgcaattgggttggtgaatagtactgagtatttggtggggttttg

SEQ ID NO: 21402 - DNA, 257 bp, Glycine max
  Clone ID: 700954038H1
agggatttccatggaagtctcaaaagaagaagctcgagtggcacccgcaccggccctagtggcgttgctgccatcccctggcatgggccacctaatcccaatgatcgagttcgcaaagcgagtggtgtgctaccataacctggcggtgagtttcgtgatccccactgacggcccaccttcaaaagcccaaaaggcagttctggaggcccttccggactcaatttcccacaccttcctccctccggtcaactctccga

SEQ ID NO: 21403 - DNA, 160 bp, Glycine max
  Clone ID: 700954039H1
atgaaattgagagagttgccaaggctaatcgttaagccaacccaacaaccagtattgtggccagaaagatttcgacctttgtacttcatttatttaaattttgaatattgtgtattacttttgatgaatttagttaatttttagttcgcgtaaggatttt

SEQ ID NO: 21404 - DNA, 257 bp, Glycine max
  Clone ID: 700954040H1
ctcgagccgaatcggctcgagaaggagaagcgctttgctgatcccgaacagcaggaagttacgtgtaacggggagctgcttcgaggatcagacgcttattgatggtatctgcagtaaatataacgatgcagtgattcatctttttgttagggtgaaatatgcagaagttaggacgggacaagatgagttgtccgttgtggcaaaggagttgaaagatacaaaagattatgatgttagtgaaactaattgtaggaaaa

SEQ ID NO: 21405 - DNA, 258 bp, Glycine max
  Clone ID: 700954041H1
ctcacagaattctcgccttttccgaatatggcatcgcgcgtcagcacttggcaatctcacttcctccgcgccgtatattaattcccctcattttcgctcacaacttaagctttccagcaactcctctttgcacaagccactcatgcgcgacaagactgtgctggtaaccggcggaccgttacatcggcacccacaccgttcttcagctcttgctcggaggttgcagaaccgtcgtcgtcgacaatctcgacaattcct

SEQ ID NO: 21406 - DNA, 251 bp, Glycine max
  Clone ID: 700954042H1
caggactggtagaaaatggtgtaacaaaagttccacttatgttctattgtgaaaactctaatctcaatgatggcataaccagtgcatcaaattcaaagatcagcatccccataattgacctcacagtcatccatgatgatcctattttgagagatcatgttgtgggaaaagttagatatgcatgtgagaagtggggcttctttcaggttataaatcatggaattccaactcatgttttggatgagatgatc

SEQ ID NO: 21407 - DNA, 250 bp, Glycine max
  Clone ID: 700954043H1
cgctctttcagctttgactttggtggaaactaaagactagtcaaaatggtgaagttcacagctgaagagctgcgtcgcattatggactataagcataatatccgtaatatgtctgtcattgctcatgttgatcacggaaaatcaaccctgactgattctcttgtggctgctgctggtattattgctcaagaagttgcaggtgatgtccgtatgactgatacccgtgcagatgaagctgagcgtggtatta

SEQ ID NO: 21408 - DNA, 251 bp, Glycine max
  Clone ID: 700954044H1
ctctcttctcttcattctccctcttaattcttttctcttttctttctttcacacaaactcctcttattatgatgggtcttgatcaagatgctagcagcaactctggccttcatcttattctagggttagctttgactgccaccaccaccactactccatcactaccatccatttccaacaagcttgatcatgttgatcatcatcaccatcttataactcttagaccaacaacaaagtcaccctataattcc

SEQ ID NO: 21409 - DNA, 251 bp, Glycine max
  Clone ID: 700954045H1
aaatgaacgacgcagatgtctcaaagcaaatccagcagatggtgcagttcatccgccaggaagctgaggaaaaggccaacgagatctctgtctccgccgaagaggaattcaatatcgagaagctgcagttggtcgaagccgacaagaagaagatcaggcaagaatacgaacgcaaagagcgccaagttgaaattcgcaagaagattgagtactcgatgcagctaaatgcttctcggattaaagttcttcaa

SEQ ID NO: 21410 - DNA, 250 bp, Glycine max
  Clone ID: 700954046H1
caagcccaacaaacttggttttaattggtataggcgtgccaaggtcttgttaattttgagcgttaagtgctgcaactaatcagatcccaagaccttggcctaccttgccatacagaaaaaaaaaaagcaaaaaaaaagccaaggtttggagccaacaaaaataaacacaaagcacaagtcatggaaagaataatggttggaagtgcaacaaaggttgctttcaccctcttggccactttcgccattgtca

SEQ ID NO: 21411 - DNA, 251 bp, Glycine max
  Clone ID: 700954047H1
ctcgcaaatttcccctcactttccgggaaaaaaacagaactccaatcacacctcacaagctccctttttcagcaaggcctaccaccaccagagtggtgttggtgaagtctcaggccacagcacctgcttcttctgaggctgtggcagtgaccacctgtgtcttctgagatgaaggcatgggtctatggggaatatgggggtgtggatgttctgaagctggactccaatgttactgtgcctgatgtgaagga

SEQ ID NO: 21412 - DNA, 267 bp, Glycine max
  Clone ID: 700954049H1
tctaaatgcagaattacctgcatgccttcctgtgcttgttgatcggatgggaaatgagataacccgacttactgctgtcaaggcattcgctgtcattgctgcttctccacttcgggtggatctatcatgtgttctagagcatgtggtagcagagttgactgcatttcttagaaaagctaatcgtgctctaaggcaggctaccttgggaaccttaaattcacttatagttgcttatggcgataagattatgttgtctgcttatgaagt

SEQ ID NO: 21413 - DNA, 266 bp, Glycine max
  Clone ID: 700954050H1
tgctcgagccgaatcggctcgagctcattaattgcaagaatggcaccccgttgcttggtgatgtccctttctgttctcttcactcttggtcttgcgagagaaagccatgccagagacgaagatttttggcatgctgtttggccaaacactcccattccaagttcattgcgagatcttctaaagtctggccctgcaagtgttgaaatcgatgatcaccctatgcaaattgacgacacagtacccgagaaccttcttctataaagaag

SEQ ID NO: 21414 - DNA, 259 bp, Glycine max
  Clone ID: 700954051H1
gctaaaatgcaaggaggatttcaatcatttttgtcacacgggaatgtcattagaaatgctgttctacaacgggtgcgcatggtgaaccccctgttacagccaattgtctcttcgcggtttgaatctgttacacctgctcgcattgaggagcatggttttgagagcaccacaatttcagacatcttgaatgataaaggcaagggtgctgatggctcctggctttggtgcaccacagatgataccgtttatgatgctgtta

SEQ ID NO: 21415 - DNA, 261 bp, Glycine max
  Clone ID: 700954052H1
ctcttctttctcttcttcctcctcttcttagcctccgccgccgccagcgtccccgcccacaacatcacccgcatgcttgccaaacaccccggcttctccaccttcaaccactatctctccctcacccacctcgccgaagagatcaaccgccgccagaccatcaccgtcctggccctcgacaatgccgccatgtcctccctcctcgacaagcacctctccctccccaccatcaaaaacgtcctctccctccacgtcctcgtc

SEQ ID NO: 21416 - DNA, 258 bp, Glycine max
  Clone ID: 700954053H1
gcagacttaacaacagcacaaagcgggttactgtctgttcaagctaccatctctctctctctttcttagtgcctccttgccagaagttaaaatggcccaagaaactttcctattcacatctgaatcagtgaacgaggggcaccctgacaagctctgtgaccagatctccgatgctgtgctcgatgcatgcttggagcaggaccctgacagcaaggttgcttgtgaaacctgcaccaagaccaacatggtgatggtttt

SEQ ID NO: 21417 - DNA, 252 bp, Glycine max
  Clone ID: 700954054H1
tttcgttcgtcaccatgacttttaagcgcaggaatggaggtcgcaacaaacacggccgtggccacgtcaagttcattcgatgctccaactgcggcaaatgctgtcctaaggacaaggctatcaagaggtttctggtgaggaccattttgaaccgggttgcattcaaaaatgttcaggaggctttgtctatgaacaatacacgcttccgaagctttatgtgaagatgcatattgtgttcctgtgctatccact

SEQ ID NO: 21418 - DNA, 252 bp, Glycine max
  Clone ID: 700954055H1
cactcactcagtcgctcacgctctgtttcagatctgaagaagccacataaccctaagcttcaaacgggtaagtgtcgctgggacttcaatggcagtgaccgaagctcaaaatcctcttcttggagaaaacacatgtggttccttgttaaaaaagcttcaggaaatatgggatgaggttggtgagagcgatgagcaacgagacaagatgcttcttcagttaaaacagcagtccttggttttgtacaagagaag

SEQ ID NO: 21419 - DNA, 243 bp, Glycine max
  Clone ID: 700954056H1
attcaacaagaccccgaactccaagcttggtggaaagaacttgtccaagtgggtcatggtgagttgaaagataagccatggtggcaaaagatgcaaacttgtgaagagttgattgaagcctcggccaccctcatatggatcgcttcagcccttcatgcagctgttaactttggacagtatccatatggaggtttaatcttgaacaggccaaccattagcaggaatgctgcctgagaaagggtc

SEQ ID NO: 21420 - DNA, 255 bp, Glycine max
  Clone ID: 700954057H1
caaagataaagcattccatagcctcccataaaaatgaagaatactatcttctctgctctctttctactttgtgccttcaccacctcatacctaccttcaaccaccgcggtggtcgataccgacggtgatattcttcagaatcctggcacatactttatcttgtccgtttttcgacccggcggcggagtagaattcgccgccactggaaacgaaacttgccctctcactgtcgtgcagactctcttcgggaggggc

SEQ ID NO: 21421 - DNA, 252 bp, Glycine max
  Clone ID: 700954058H1
ctctgtctctctctctctctctcgatcaatcatggctttgcccaatcagcaaaccgtcgattaccctagtttcaaactcgtcatcgtcggtgacggtggtacaggaaagacaacgttcgtgaaaaggcatcttaccggtgaatttgagaagaaatacgaaccgaccattggagtggaggttcacccattggatttcttcacaaactgtggaaagattcgcttctactgttgggatactgccggacaagagaa

SEQ ID NO: 21422 - DNA, 80 bp, Glycine max
  Clone ID: 700954059H1
atcgcaatctctcaatcgagtgctacatcagacatacctcgcgaattggggaagctggttagacccaatcgcgagaggca

SEQ ID NO: 21423 - DNA, 247 bp, Glycine max
  Clone ID: 700954060H1
gccactttcgccattgtcattccatgccttgaggctggcattgctgagtttgacgattttctcaaagcccaagctgatgaagcccataaaattgctcttgattcctatgtcccagagccccacgatgtcgcccatgaactcaatttccatgttcatatggcactggaaaactccacaaggagggaactaaggcagaggaaacttagaggaggaggcaaatgtcaagcctccaaccccattgacgctt

SEQ ID NO: 21424 - DNA, 247 bp, Glycine max
  Clone ID: 700954061H1
agaaaaagagaaaagaaaaaaatgtctctagtgactgcagagatcaaagccaaagcagaggtgtatcatggagatgaactctgccaagagaagtcaaagttgctgctaaaggaggtagggctacctaatgggcttttgccattgaaggacattgaggaatgtgggtatgagagggatagtgggtttgtgtggctgaagcagaagaagagcacaaaccacaagtttgagaagattgggaagctggttt

SEQ ID NO: 21425 - DNA, 250 bp, Glycine max
  Clone ID: 700954062H1
aaaaaaaccctaggagagtcgtgaccatagcggcgcctccttcaccctaatcgattttttcttcatggagtagtgtcataatcagacacagatcatggttgttctttactggcacctccttcacctctttgtggggaatatttgactgtgaagttctgtctttctcccttgcagaggcatccattcctctttctggattggttctaacaactaataacggaggacaatctttcatagactgttctaaata

SEQ ID NO: 21426 - DNA, 252 bp, Glycine max
  Clone ID: 700954063H1
cccacttttaccactaatgtcactggcattagcttcttctgtatccctcccatttgggcaataactttctcttttcagttttctacttctcccaacactcgcggaactagaaagcctctacttccaattccacgtggcaaaaaggagagactctgattctgagccgcttctagaaccttccattgtccaagaagtttcattccacgacgacaacgaagaagaagaattccttgacgaatttgaatacgatga

SEQ ID NO: 21427 - DNA, 258 bp, Glycine max
  Clone ID: 700954037H1
gatgtataggcaccgtagggaaactcatgaacatcgcaacgcgttaggtagcttcctctccactattcaaaatcggttccattccaatataagaagtgaaagagcccagaactaccaggcaagaacatagtgtatgtgtttcaaaactgtgattttgttatctgttcttcaaaaccattgaagatgaggtggctctttcctctcctctttcttttttcgcttggtcttactgttactggtcaagaatccattgagttc

SEQ ID NO: 21428 - DNA, 255 bp, Glycine max
  Clone ID: 700954010H1
ctcgagccgaatcggctcgaggtaaccgtttagattttacactacattaataatacttaaatacttaatatacacacacgagagggacaacgcggagagattcagaaacagaacgactcggtatttctcttcctctaaagaccgagtccgactcggagggcgaagaaggcaaactcagtaacctttccttccttcactacacgcgagagagacctcagtgtctgagacgcaggcaacgtgcattttcccatacga

SEQ ID NO: 21429 - DNA, 253 bp, Glycine max
  Clone ID: 700954012H1
agccaagtgaaagtgagaaaaaataaaaatcaaagagcataatgtcagggatcattcacaagattggggagacccttcatgtgggagggcacaagaaggaggaggagcataagggtgagcaccatgctggagaatacaaaggggagcaccatggtgaacacagtagtgagtacaaaggagagcatcatggtgaacacaaagctggagagtaccatggtgagcacaagccagagcacaaagaggggttcctaga

SEQ ID NO: 21430 - DNA, 254 bp, Glycine max
  Clone ID: 700954014H1
tggaaaacaaagtgtgcctattgatctaaaggagtccatccgagtccttgctaaacttagagaagcaccttggtattatgcagaaactaaagaacttccgagatcatcacatgaagtaaaagatggacactggcattccatctcaaagggtgctccttggtttccttatgaaggtaaagaaataagccgtttatcttttgaatcgcgagaaaccatcaaatccacaccaaagctaaaagagcttcctagacttt

SEQ ID NO: 21431 - DNA, 253 bp, Glycine max
  Clone ID: 700954015H1
gtaaacgtgcatgcaggccacaagggtaagccagtgcatgtatcagttggctcaaagtctccatttgattacgtctacgccgccacggaaactcaattacacgatgaccccaacgtggcactcttcttcttggaaaaggacttgcattctggaacaaagttggacttgcacttcaccaggagtacatctaatcaagccacgttcttgtcacgccaagttgcggattcgatacccttttcatccaacaaggtgg

SEQ ID NO: 21432 - DNA, 256 bp, Glycine max
  Clone ID: 700954016H1
gacatggcgaaatcggcgtcgaattctctgatgcagagcctgaagcggttcataaagaagccatgggagatcacgggcccgtgcgcggaccctgagtacaaatccgcattgcccttggccgtggagtaccgcctcagctgccccgccaccgtccaggagaagcccatcatccccaactccctcccggagaccgtctacgacatcaagtacttcacccgcgaccagcgccgcaaccgccctcccatacgacgcaccg

SEQ ID NO: 21433 - DNA, 270 bp, Glycine max
  Clone ID: 700954017H1
cccgatgatagctcagcactgaagccacccaatgtatatggaagcattgagttgaaaaatattgatttttgttatccttctcgaccagaagtgttggtgttaagcaattttagtctcaaagtcaatggaggacaaacaattgctgtagtgggagtttcgggatcagggaagagcacaataatatctttgattgagagattctatgatccagttgctggccaagttttgctagatgggagggatttgaaacaatataatttaagatggttg

SEQ ID NO: 21434 - DNA, 264 bp, Glycine max
  Clone ID: 700954018H1
catcagttcctccaagtccacgttaacctcaacgagaattccgttgttcctagcgatgaactcgttcgccaaatcagaacccgtgtcatcctcagcctcttcatcatcatcaacgtaccagcaggtgccggagcaagatgctaataacgacttggaccgcgtacagacaacacgtttcgcaggtacacgtccaacgttaccaaggggagtggcaaaggaacagccattgtctggttcaggaacgatctcagagttttggataac

SEQ ID NO: 21435 - DNA, 259 bp, Glycine max
  Clone ID: 700954019H1
cggcgaacgaaacgctgtcgttgcgccaatcgcggcgttgttgttggtggtgctactcgcggcgagtgtggtggtggaggctcaggagaactcggacgtgaagacgctggtgaagcacatgcacgggaagaagtactgcgacaaaggatgggaatgtaagggctggtcaatttactgttgtaacctcactattactgattatttccagacctaccagttcgagaatctcttctccaagcggaactcgccggtggcgcac

SEQ ID NO: 21436 - DNA, 259 bp, Glycine max
  Clone ID: 700954020H1
cagttccatataccctctctctagcttccttcactcacttaattgtgcaatcccaattcaaatcccatcagaatgatgaaatttcaagcatgttcaaaccccatctcaaacttgttctatgcgtgttgtgtccttcttttaccaccaaccatggccttaggagattgcacctgtgacacaaaagaggccacaaagagtgactcaattgaagtcctccactacaaaattggctcaattgcttctgtgcttgttgctgggg

SEQ ID NO: 21437 - DNA, 249 bp, Glycine max
  Clone ID: 700954021H1
tagagctatagttatattgatattgctatttgttaagctcttatttcctcggccatggctaataatgaacgtgatctcttctcggcggagattgtgaatcgtggaattgaaccgtcgggacccaacgctggctcgttgacattctctgtgagggtgaggaggcgcttaccggattttctgcaatcggtgaaccttaagtacgtgaaattgggttaccattatctcataaaccatggcatatacttgttc

SEQ ID NO: 21438 - DNA, 252 bp, Glycine max
  Clone ID: 700954022H1
cgttcactctccaaaaaggagagtgagcctttgaagatataacacagaaaaaaagaaccagctaatagggaactgcatcgacactatagcagaagatgacatatatacacaagatgggaccattaccatctccaaaaaacctgccaacaagaaaaagactggaaattggaaagcttgctatttaatcctggaaatgaatgttctgagagattggcatactatggtatgagtacaaacctggtgaactatctt

SEQ ID NO: 21439 - DNA, 257 bp, Glycine max
  Clone ID: 700954023H1
tctaattacagtagccgatcacaacaattagttggccctcaaaaagctggttctaataaggagtggaaaccaaagccaacaaatacgattaatcagggttctggaccagctagtgcatctgaggttcttgtttcagttgactcaactgggcagttacaatctgcatctagtgctcttaactctgaagaagctacttcaaactgcagagggactgggaggattttcatcttccacagcgtcaacatgttatacttcca

SEQ ID NO: 21440 - DNA, 244 bp, Glycine max
  Clone ID: 700954024H1
cagggcccaactccatcttctgaagatgaagtttctgagatcagaaagctgtttgaaaatgaatgcaataggagaaaggcagcggaagcagaggtagaacatctaaaaattctactggggaaaaatacacacacacaggctggaggggatgcagaggttataaaggttcacagcattctggaggatgaggttaatcagaaaaagaaacttgaagaagaaataataatattaagaagtcaattat

SEQ ID NO: 21441 - DNA, 256 bp, Glycine max
  Clone ID: 700954025H1
caaattgaaccttaccttttttttattcagaatctcaattcaattttcatggtggaccaatttgctgaattgggctaacacctttgattgatcgttgtgggggtcttttggtcaatattttggaactgtgaagatttttgttttagactgtgctggttttgtttggtaattttatgcactagggtgcttctgtgttactacaaggaaatgctttcctattggattgcagtgttttagttaacaatggctatcactg

SEQ ID NO: 21442 - DNA, 255 bp, Glycine max
  Clone ID: 700954026H1
attggattgttcctccgaacagtgaaccctcacctaacaatcagaacccaggatttggtgaaacgatgaacagtgataggaaaattggggttgccttggacttttccaaaggaagcaaaatcgctctgaaatgggctattgacaatcttatcagcaacggtgacactctctacatcgtccacaccaagccttccggaggaagtgaatcaggaaatcttctctggtccaccactggttcacctctgattccattgt

SEQ ID NO: 21443 - DNA, 251 bp, Glycine max
  Clone ID: 700954027H1
ccaacctctaacctacctcattggctactctctcaacaacttcaccttcttcctcctcgatcatgtctcacttcaagggcaagtaccatgatgagcttatcgccaatgctgcgtacattggcactcctggaaagggtattcttgctgctgatgagtcaccagggacaattggcaagcgtttggccagcatcagtgtagagaacattgaatccaacaggcgagctcttagggagctgctattcactgctcct

SEQ ID NO: 21444 - DNA, 250 bp, Glycine max
  Clone ID: 700954028H1
cccaatcgtagccgtcgcactttgcgttttctacgtcatctccgattccccgacaatggccatccaaatgagcaagaagagaaagttcgtagctgatggagtgttcttcgctgaactgaacgaagttctgacacgggagttagccgacgacggatactccggcgtggaagttagggttacgccgatgcgcaccgaaatcatcatcagagcgagcaggcccctatccagtctccaaccccattgacgcgtg

SEQ ID NO: 21445 - DNA, 252 bp, Glycine max
  Clone ID: 700954029H1
aatcgatcaattttcaattttcaattgtgcccatcttcgttgctgccaccatgcataggatcaacaccgcaaggtccattttttctgctgttttcagaagcaaatctcggcctcactctgctgctttctccacctccttgctcttcgacgaaactcagacacagtttaaggaaagtgttgctcaatttgcaacggaaaatattgcccctcatgcttcgaaaatagaccaaacaaattatttcccaaaggagg

SEQ ID NO: 21446 - DNA, 253 bp, Glycine max
  Clone ID: 700954030H1
ccataatagcagcaacaatggtgaagcactacagacccccggggcagaaaaaggagggaaatgctgccaaatttgtcattaggtcacaagcaatcaagcagcttcaaatcagtctaccccttttcaggaaactatgtattttgaaaggtgtcactccaagggagcctaagatacagttcaagggaactcatcagacttattaccatgtcaaggatgtttccttccttcatcacgagtctttggttgaaataca

SEQ ID NO: 21447 - DNA, 257 bp, Glycine max
  Clone ID: 700954032H1
gatcgtgttcctgaaactatgacaaccatgtcaacctcatcctcttcccaaagcctcaaaattggcattgttggattcggcaactttggccagtttctggccaagacaatgattaaacaaggccacactctcacagcaacttctcgatctgattactctcaactttgtctccaaatggggatccattttttcagggatgtcagcgcattcctcgccgcagacatagatgttatagtgttgtgcacatcgatattatc

SEQ ID NO: 21448 - DNA, 271 bp, Glycine max
  Clone ID: 700954033H1
atcttgtgttgtgtccctcttttaagctatttccttctcttaacacaattggttgtgccaattgccatagtcaccaaccaattaacaaaggtatatatatcatcatatcatcaccaaatgaaaaatattgggttgttttttcttgtggtggtggctacttttgtggcggcagccacagctggtagcttttaccaagactttgaaataacgtggggtggtgagcgtgccaaaatctatgagaatggaaaccttctcacactctcccttgaca

SEQ ID NO: 21449 - DNA, 265 bp, Glycine max
  Clone ID: 700954034H1
cgagataactagaaacagtgtgatgaaaatgaaggtccttgttttcttcgttgctacaattttggtagcatggcaatgccatgcgtacgatatgttccctctccgaatgaacactggctatggtgcccgtactccggaggtgaaatgcgcaagttggaggcttgctgtggaagcagacaacatctttggctttgagaccattcctgaagagtgcgttgaagcaacaaaggaatacatccatggcgaacaatatagatcagactcc

SEQ ID NO: 21450 - DNA, 263 bp, Glycine max
  Clone ID: 700954035H1
caaacctcagacagaaggtgcagcttttcgtactcgctggctttttggcggaactaattacaggagaatgtttgaacccctagatattgctgagtactacgcgaatggtggtaaagactatgaggctaagggaagatctagacattatatagtgttgcaggagtggctggaagaggataagaaagagaaaagcaattcaaacagtacaaacaaaaaggatgtggaatctattttaacttttgactcttgcttttgggcacatg

SEQ ID NO: 21451 - DNA, 258 bp, Glycine max
  Clone ID: 700954036H1
gagcgagcggactcggcatgactcggcattggcgctttaccatttgtctttggtccagagtaaccgatccaagatggttaaactcggttcggttccggttctattgaatatggttaagtcgggtcacatgacgggtcgggttttgttgattttggggaacttgggttccgggtcggacgggagggccacgatgcttgatgcgggcatggtggagtgtttggtggggttgctcagtggggccgagtcaaggagcgggtc

SEQ ID NO: 21452 - DNA, 260 bp, Glycine max
  Clone ID: 700954009H1
gaatctgcaagcaccatagatttgtccgagaaaaaatgtgaaggggttgagtcggagctcgagggccttttcaagctaaggattgaagctgaggttgaatacctagccatctcaaaggtaatgcagaacatgaagggtggggcaggtatccaacagacattattggaagaacaagagaaactgtctgaaaatcaagcgcagattctcgacaaagttgtagatgcagagagtaaggcttcagtgctgaagaacaaaacaga

SEQ ID NO: 21453 - DNA, 244 bp, Glycine max
  Clone ID: 700953970H1
acacaaactcagggtagggcagagagagagagagagagagagagagagagagagaatgggagggtgggctatcgcggtgcatggtggcgctggtgtcgaccctaatctcacactcgagcgccaagaagaagcgaaacaacttctcacgcgctgtctcaatcttggaatctctgctctaaattctaatcttcccgacatagatgtcgtcgaacttgtggtgagggaattggaaacggatccgctg

SEQ ID NO: 21454 - DNA, 243 bp, Glycine max
  Clone ID: 700953971H1
ctttggttcagggggaaagatcccagttttcagtgacccttctaatctttttatcttctcttctctgtccctcactccttcctttttcctctctcacacatataaatatatagcttctggatcttcttccacctcttaacggatctcagattccaaaatctatctcctttaggctctccaaatttttacttcagttcttaatctcctgaaattctgttttttttttgtgtgtatgtgtgtgtg

SEQ ID NO: 21455 - DNA, 244 bp, Glycine max
  Clone ID: 700953973H1
ttttgaaagaaaaagaattaggaaatgatgttccgaaagagagacaaggaattctcaaagccattgtgaatttcttatgggaggaaggaaagtcttcctatgaacctgtttggccgaacatgaaatttggttggagaattatagtaggatcaatcattggatttttgggagcagcattgggcagcgttaggaggggtaggaggtggaggaatttttgtgcctatgctggctttgatcattggct

SEQ ID NO: 21456 - DNA, 245 bp, Glycine max
  Clone ID: 700953974H1
gtgccttatcgctgtggttatcatcttcttcttcctctttcttagatctcttctttctctacgccgcacgccgaaaccatggccggaaaaggagagggtcctgctatcggaatcgatctcggaaccacctactcttgcgtcggtgtgtggcaacatgaccgcgttgaaatcatcgccaacgaccaagggaacagaaccacgccgtcttacgtcggattcactgacaccgagcgtctcatcggtga

SEQ ID NO: 21457 - DNA, 243 bp, Glycine max
  Clone ID: 700953975H1
tgcaaactttgacagggaacggatccccgaacgtgttgtccacgctcgtggagctagcgcaaagggtttctttgaagtcacgcatgacatttctcacctcacatgtgccgatttccttcgagcccctggagttcagacccccctcatcgtccgtttctccactgttatccacgagcgtggcagccccgaaaccctcagggatcccagaggttttgctgtcaaattctacaccagagagggtaa

SEQ ID NO: 21458 - DNA, 248 bp, Glycine max
  Clone ID: 700953977H1
ctcgagccgattcggctcgagattctgtatctggagggagccatgagtgcacttgcagcatactccgctactccttccgccacccaaaccctctccctcttccgctccctcctccgcgccgcgcggagtttcccgattacaacatcagggagtacaccaaactacgcaccgccgatgcgtttcgccacaacgccactctctccgacccaaattcaatttccaccgccttcgcccacggcaagtcacag

SEQ ID NO: 21459 - DNA, 253 bp, Glycine max
  Clone ID: 700953980H1
cagaaagcttatgcagccttgcctagcagtgtacaacagagacttggaacatacttctacaagggtataatgtatggtgctgttggatttgcatgtggtattataggccaaggcattgcaaatatgatcatgactgcaaagcggagcataaagaaatcagaagaggacatacctgtgccacctcttgtgaagagtgctgctctttggggcgtctttctagccgtttcttccaacacgcgataccaagtcgtca

SEQ ID NO: 21460 - DNA, 256 bp, Glycine max
  Clone ID: 700953981H1
agcaactatgagtctacaaaaagctaagataaagaaacttggttttatcttctttgttattattatattcacttcttcaatatcttggttctttgatattattattcgattgagcaaaaaatgggagttccagagagagaccctcttgcacaattgagcttgcctcctggatttagattttatcccactgatgaggagcttttggttcagtacctttgccgcaaggttgctggccatcatttctctcttccaatca

SEQ ID NO: 21461 - DNA, 251 bp, Glycine max
  Clone ID: 700953982H1
gcccaaacaaacatctctgtacctctctccctctttccctctctttcgcttatcaattttcgttttaatttctctacgactcgggtcgacctccgatcactttgggtctatcggcggggacttgggtcgaactcgcatgactcaatttactgcgaggtacggaatccgtgaattttcctgcgaggtaagattccgttgaaattttgctttggtccgagggggagggtggaattaggatcgatttggcttca

SEQ ID NO: 21462 - DNA, 250 bp, Glycine max
  Clone ID: 700953983H1
gccaaatccgagagccatgtccgtggttgatatgttgaattgagaagttagtagggttccttcattcgactcaaacacacaatgagtttgtctctcattcaaggttattcttccgccgaagacgaagaccaaccccaaccccacgattccgacctcgaagattccgacgatgaagccgccgccgccgcctcctggaccgccgccgcaaaccacccttctctgggcgacagatccatcttcgaccacgttc

SEQ ID NO: 21463 - DNA, 246 bp, Glycine max
  Clone ID: 700953984H1
tgcattcaatggggaaaacccaaggcctggagtcatcattaacaaaccagatggaggtgatgtttataaaggagttccaaaggattacaccggcgaagatgttactgttgataacttttttgctgctttacttggaaataagtcagcactgactggtggcagtgggaaggttgtggacagtggtcctgatgatcatatatttgtatactatactgaccatggaggtcctggggtgctcgggatgcc

SEQ ID NO: 21464 - DNA, 244 bp, Glycine max
  Clone ID: 700953986H1
ttttacttcccctatggctcgtcactccttgctcttagccctcctcctcttcgccgccgtggccaccgccgcgatggcggtggccgcgtccgacgccgacgacatcctgatccgtcaggtggtgccagatgttggcgaagccgaagaggaggacaacctgctgaacgccgagcaccacttcgcgagcttcaaggccaagttcgccaagacctacgccaccaaggaggagcacgatcatcgcttc

SEQ ID NO: 21465 - DNA, 241 bp, Glycine max
  Clone ID: 700953989H1
ttccattctctctgtgtatttccctacctctcccttcaagatgcagatcttcgtcaagaccctcaccggcaagaccatcacccttgaggtggaaagctctgacaccatcgacaacgtcaaggccaagatccaggacaaggaaggaatccccccggaccagcaacgtctcattttcgccggaaagcaacttgaggacggccgtacccttgctgactacaacattcagaaggagagtactctt

SEQ ID NO: 21466 - DNA, 243 bp, Glycine max
  Clone ID: 700953990H1
tccaagcaaaacttttcaaacccaaaaaaaatccaaaaaaagaaaaacaaaacgcttaacgcaatacaaaaaccacagtttcaatcacatctctctctctctttctcgcaaatttctactttctgggttttctatttgagattcgttgttccaatgagcgatcacttggtggtgttcgttgaccgtctcgcgcgccctgtccccgttgacccggtggcgcagcgccttccgagccgtctcctc

SEQ ID NO: 21467 - DNA, 244 bp, Glycine max
  Clone ID: 700953991H1
attcattcttcttcttcttctggtgctaagtgcctaagctcaaatggcgtcgtttttgtcttttctccctgccgtttccgctcgtcccattcccaccagcgccttctctcccaaaagacctctctttcaaactccacccaccttgcatttcaaaaatcaccggtttgcagttagttgcagttatgcagaagcaggtgtctatgctaattctagctctaacaccatagatgttgtggctgatgtt

SEQ ID NO: 21468 - DNA, 248 bp, Glycine max
  Clone ID: 700953993H1
ctgcaattcagcgggctcaagtgctccccactctcatcttcttctctcttctccaaaccttctctttggacccaacaatcccaaaagcgcgtttcaattaccattgcgaactcaatagcaatagccaatgcgcagaacaaagagagagcgaggcttaagaaactcttcgaagaagcctacgagagatgccgcaatgctccaatggaaggtgtttccttcaccatcgaagacttcactgctgctcttga

SEQ ID NO: 21469 - DNA, 252 bp, Glycine max
  Clone ID: 700953994H1
ctttgcacctcagcacagtttcccatcgaaaactagcccatctttttccctcgtaccttttgcttcagcaacaacaacatcgtcgtcacaaatctagagatagatagatagatagagagaaacggttgaattgaagatgaaaatcactgtcatgactgctgatgaacaaatcatcacgttagatgtggatccccacgaatctgtggaaaacgtcaaagcattgctcgaggttgagacaagtgtgcctcttca

SEQ ID NO: 21470 - DNA, 251 bp, Glycine max
  Clone ID: 700953995H1
cccatttgtttggcttctcttctgtcattattcttgaatctttgctaggccaagaccagaatatagaaaaaaagccataaaatggcacaagaaaaggcacttcgtgttaggtacctagtggcattccttcttgtgttcttcactatggcctcatgtggctcaggtgttggagtcaactggggaaccatggcaactcacaagcttccaccaaataaggtggtcaagatgcttcaagaaaacggttttgataa

SEQ ID NO: 21471 - DNA, 275 bp, Glycine max
  Clone ID: 700954001H1
agcagccactatagtaaacaatcttctctatctaaaatggagtttgttctaaactacctaaatgccactgccattggagttctttctctaaccctcttctttttgtttttgtataatcccttcaaatttgcattaggtaaaaaagaggctcccgaagttgcaggtgcatggccaatacttggtcacctaccactattgagtggttcagagacacctgatagggttttgggtgctttggctgataagtatggacccatattcaccatcaacaatgg

SEQ ID NO: 21472 - DNA, 269 bp, Glycine max
  Clone ID: 700954002H1
atccacacacaacacacacctctgcctctactccgcacaactcctcacagacaagacacaacacacgctcatgttgttgatgagtggaggcaacaaaaaacatatatccatcactcacaagaccaattgacctttgttcttggtacaattcgattcaaatttgtcgcactaaggagagccgctcaaggctctgggatgtactatacgccgttcggggttctgattttcggcggcgagaaggttcaagagacacagtgggagaaggagcg

SEQ ID NO: 21473 - DNA, 232 bp, Glycine max
  Clone ID: 700954003H1
cttctcttccctttgaccattcaaccttcctcgcctttgcctccgtttcgtgagtccactcttcttcgattctagcgtgactgagatggctggaggtgttattcagcagatattgaggaggaaactccaccctcggtttactaactctcccttgttgtcacccatcgtagcaaaaaaagatgatgctggctctactggcagtcagtccttaagagcacttgcattaattgga

SEQ ID NO: 21474 - DNA, 262 bp, Glycine max
  Clone ID: 700954005H1
acagaaacaaaagtggcagtattaggtggcatcaccgaagtgcagggagctgccaacagcgtcgagatcaacaatctcgctcgctttgctgtagaggaacaaaacaaaagagagaattcagttctggagtttgtgagggtgattagtgcaaagcagcaagtggttgctggagtgaattactacataacattggaagcaaaagatggtgagattaaaaatgagtataaagcgaaggtttgggagagggaatcccaagagttgc

SEQ ID NO: 21475 - DNA, 243 bp, Glycine max
  Clone ID: 700954007H1
ctcaaatccaaatccaattccaattccaattcccaatcttctcaaaccctaattcctcatcttgaaaatgagagaaatcttgcacatccagggagggcaatgcgggaaccagatcggagcgaagttctgggaggtgatatgcgacgagcacggcatcgaccacaccggaaagtacagtggcgactcctgacttccaattggaacgcatcaatgtttattacaacgaagcgagtggcggaaggt

SEQ ID NO: 21476 - DNA, 258 bp, Glycine max
  Clone ID: 700954008H1
caaagaagccccttctcactcagttcacgtttctcactttttgtgtgcctgcagcagcatttacttattaaatgctgaacctccaagagggtggttctccttctggaccaagttggaatttctagctacttgttgccacaaaatgattggtctcattttcatgggggggggttgagatctgagtctttagtctttttcactgaaaaagatctataaagttggtgtcttgagtccttgttcgtatgtctgtgtatataa

SEQ ID NO: 21477 - DNA, 247 bp, Glycine max
  Clone ID: 700953968H1
ctaaatctaatcaattgatctcattttccaaattttctgtctctgacattaacaataagtggctctcaaaaaagagaagatattttggtggaaaaacactcaatcaacacacatgattgaagtgcaagcaaatgccatggagcagagttggtgggccaatatgcctcacgagcttctcagagaggtcctcctccgaattgaatcgtcggagtccacgtggccgctgcggaggagcgtcgtggcttgt

SEQ ID NO: 21478 - DNA, 261 bp, Glycine max
  Clone ID: 700953933H1
ataaaaacgtgattagctcacagtcgtttcggggcattcttgtgcactcagttactctctctctctctggagcgtcgtcgtttcgttagggcacaaaaccccttttcggatcggtggagcaaggcctcgccggcgagattcccgaggctgttcaatcagcgatcgagcaccggcgaaaagcggcgaagatgaaggttttcgtgaagactctcaagggcacgcacttcgaaattgaagtgaacccttcggacacgctttctg

SEQ ID NO: 21479 - DNA, 258 bp, Glycine max
  Clone ID: 700953934H1
ctagcagaaacaattagagggtttaaattgattctttctggagaattagatggtcttcctgaacaagccttttatttggtaggtaatatcgatgaagctactgcgaaagctacgaacttagaaatggagagcaatttgaagaaatgactttaaatctttgtgtactgacccccaatcgaattgtttgggattcggaagtgaaggaaatcattttatctactaatagcggacaaattggagtattaccaaatcatgcgc

SEQ ID NO: 21480 - DNA, 253 bp, Glycine max
  Clone ID: 700953935H1
gctaattagatttctgagagaaaggaaagggtgtgagaagagaatggagagtaaagaggaagatgttaacgttggagcaaacaagttctcagaaaggcaaccaattggtacagcagctcagggtggtggtgacaaggactacaaggaggcacccccagctcctttgtttgaacctggtgagctcaaatcatggtccttctacagagctggaattgctgagtttgtggcaatttcttgttcctctacattacca

SEQ ID NO: 21481 - DNA, 252 bp, Glycine max
  Clone ID: 700953936H1
ctcagatctttcaagttcaaggccatgaacatgatgttcccatttcgcacccacccattcacaatcgctggtttccagagggttgctgtccattaatcaaccttcccttcaaacatcacgacgattttataaacagatatgatacaccgttgctgagagagagaatcttccacttctcagcagagtctattgcaaaactgaaagcaaaggctaactcggagtgcaacacaaccaaaatctcatcgttccaat

SEQ ID NO: 21482 - DNA, 250 bp, Glycine max
  Clone ID: 700953937H1
ttttcggatactccaccaccttgatccaaaactcgaagatcttggtgaggaagcccatggcaaatcagcagaacatagtggtggcagatggcacagggcagaagaacatgcccacaggaatagtcctccataactgcgagatcatgccggaccctaccctcttggcagaccgcttgagcgtgaagacttacttggccaggccatggaaggcattctcaagggcagtgttcatcgagaatgttatcgggga

SEQ ID NO: 21483 - DNA, 246 bp, Glycine max
  Clone ID: 700953939H1
atcaaatctgttctgcccatagccgaatcaaatggatttcaattggcaaaacccttccccgagtggcaatgccgtggtctaccagtgtttgaaggctctgaatgcctggttcggacagatcctgctaaacacggcgagggtttcttcatcgctttgtttactaggaaagatgctaacttttcagggggctcaaataaaaatgaaactagaatttcccacagcactcccgaaattaaaaacgcgcga

SEQ ID NO: 21484 - DNA, 247 bp, Glycine max
  Clone ID: 700953941H1
attctcttcacaatcccgtgatcccatttcgttccgttcacttcaatctcaatggccgataataagcaacccaatcacgaggaggcaagtcctcttctccaccagtcccaacccaaatccgaaccaccaacgccacctgagactcccgagtttcttctcggatggaccgctgatgggctcccgctgggccacggcagcgtcgtgggccagcccatgggccgcgccccttggaactcctccatctgcg

SEQ ID NO: 21485 - DNA, 247 bp, Glycine max
  Clone ID: 700953942H1
gtttgatcctggctcagaaggaacgctagctatatgcttaacacatgcaagtcgaacgttgttttcggggagctgggcagaaggaaaagaggctcctagcgtgaaggttgcttgtctcgcccaggaggtgggaacagttgaaaacaaagtggcgaacgggtgcgtaatgcgtgggaatctgccgaacagttcgggccaaatcctgaagaaagctaaaaagcgctgtttgatgagcctgcgtagtatt

SEQ ID NO: 21486 - DNA, 246 bp, Glycine max
  Clone ID: 700953943H1
agcatttttcagagtagaaccttcactctgctatcccccatattcctgtgtttcctttgaaaaaaaaagaagaagaaaaaacatgtctaggttttttggattcttctttgtgggtcttacgttgatgttggtcggtgtggcaaatgctatggctaactcttccaacaaatttgatcaactcttccaaccaagttgggcttttgaccactttattcatgaaagggatcatctcaaactcacacttga

SEQ ID NO: 21487 - DNA, 249 bp, Glycine max
  Clone ID: 700953945H1
cgaaaaatgtcgaagctgatcttcgtgttcctttcgcttattcctcttctctgcacctccttctccccagagagaccctcagatcgacgcgtcctcgttttgctcgatgacttcgccatcaaatcctctcattctctcttcttcaactccctcaaatctcgcggcttcgatctccaattccacctcgcagacgacccccaaattgcgctccagagatacggccagtacctctacgacgccctaattctc

SEQ ID NO: 21488 - DNA, 255 bp, Glycine max
  Clone ID: 700953947H1
ttccttttcatcattctcatatcctcaatcaccccccctcgcactcgctcttcccttcctctggtggcgacaatgtcgactcctgctaggaagaggctgatgagagacttcaagaggctgcaacaagacccgcctgcagggatcagtggtgccccccaggataacaacataatgctgtggaatgctgtcatatttggtcctgatgatactccatgggatggaggcacgttcaagttgacactccaatttactgag

SEQ ID NO: 21489 - DNA, 269 bp, Glycine max
  Clone ID: 700953948H1
cttcggctcgagctcaactcaaaactcaaattatttggtttctgctctgtaaattccctctgctgcttaacaacatccatcttctccaaaacaaaaacaaagaaatatctaaaatctggaacttacgctgatccataatttgttgcttttcttccttcgtacaatgtcagaactttagcatcacctttttgcctttccttcttactaactcagataactaccgccaccatgacttcaaaatctagacccaatctatctgaaaattccaa

SEQ ID NO: 21490 - DNA, 258 bp, Glycine max
  Clone ID: 700953949H1
caagaggttagggtttcaccgcgaagaagaagagagagcagaagcagcaatggaagcatacggtggtttcatgattgacgagacagccgttagggttgagaacgctttccttgatttcctcaaaagcttcaagtccagtagccatcggaacgaactttattacgaagcggagatcgaattgatgacgagcaatgactccaacaccatgttcgtcgatttcgaccacgtcatcagattcagcgacctcctccagcaaac

SEQ ID NO: 21491 - DNA, 254 bp, Glycine max
  Clone ID: 700953950H1
cttgaagttcagcatcctgctgccaaggttttggttttggctgggcaggctcaacaagaggagattggggatggagctaatttaactatttcatttgctggggaactcctgcagggtgctgaggaacttatcaggatgggtttgcatccgagcgagatcatcagtggatacactaaagcgatcaacaagactgttcaaatattggatgaactggttgagaatggttcagagagtatggatgttcgtgataagga

SEQ ID NO: 21492 - DNA, 252 bp, Glycine max
  Clone ID: 700953951H1
ttcgggtgttctgcgtttttgcgaatccgatttggcctcaatttcgccattcctttttggattcgtcttttttttttcttcttcttctttttcatggaccgcagagtctatcaccatcgtcctgctcctccggcacatgcttctccccctgaatactttgtcctccaggggaacacaacttataaagacgatctatatttaaggaagaggacagggatgcgtcggtggctttgttgcacatgtcaggtggaa

SEQ ID NO: 21493 - DNA, 249 bp, Glycine max
  Clone ID: 700953952H1
ctttttcaaaaacaactcagcctaccacgatgtacaccaccagctactatggcaacaagtacaacttctcgcagccattcttcgttatgtgggacaaaatcttaggtacctacatgccttacacgttggaggagagggaaggtggtggttttgaaactagaccttgcaaagattacaaggatgattaacttttttgcttgacgagcattctttatctgtactagtattgttttccctttttatgagcag

SEQ ID NO: 21494 - DNA, 246 bp, Glycine max
  Clone ID: 700953954H1
aaggcatcgtgtgcttagcaatactgtgatagcagaggccccatcttctgcaaataaggaaagttcagaatgtaataattttaattttcaaccacttcctgaacctaatgttgttgagaagatttacacaacaaattgctctgatgagaagccccagttatcttcctttgaaagctcacaaatagaagaaacaaatgtcattgaaactgaggagaaggtggatgtgaatccaccagagtctgaggt

SEQ ID NO: 21495 - DNA, 246 bp, Glycine max
  Clone ID: 700953955H1
tggcacattcttaatttctcatgatacccccgaagaaaaaaaaactgacccttttcagttttctcttatctctctgtctttccttccattgagacagacacatttgtactagtttcatttttggagctttaagccattgtgcatctcttctcatttgtgtccactgtaagagggtgttgtgttgggttaccctctctctccatctgcattgtttgtggctgtcagtgttatcatacaaggtgttgt

SEQ ID NO: 21496 - DNA, 244 bp, Glycine max
  Clone ID: 700953956H1
gtgggctagtccagtcgtctcaattctcttcaggtaattctgctggacaatcactgcaaggaatgcaagcaatgggtatgatggggtcgccaaatctcacctcgcaactacgagcaaatggagccatggcttatgcacagcagctgcgtatgagtcagggtcaaatcaggcagcaactatcccagcaaggttcacttaacactgcacaggttcaaggtttaccaaggtcatcatcccttgcttt

SEQ ID NO: 21497 - DNA, 249 bp, Glycine max
  Clone ID: 700953959H1
gagttcaaacaaggtttttcacagcacatcgatacgaggatgttgcggctgtcgattcaacgagtgaggaagttgaactttctcagtccccagatctctgctttgggaaggtcccatttgtcaactgctgctgaaccatcttccagtaagagcaatccaccgagggttccaaatcttattggaggcagttttgttgactcaaaagcatcaactgtcattgatgttataaacccagcaacccaagaagtt

SEQ ID NO: 21498 - DNA, 249 bp, Glycine max
  Clone ID: 700953960H1
cgaaaatggagcattgtaactgctacatgttcacgctgagccttcttcttcttcttcttcttactccgccttctctctccgacgatctcggattcgattttccggcgaagaagctgataagagaccttaacctttttccttctgaagatgtcaacatcgttcctcgccactccaattctcacgccaacaaaatcgtcgagaaaccgcttaggttcccaaacttagtgccttcagactccggcatttccc

SEQ ID NO: 21499 - DNA, 254 bp, Glycine max
  Clone ID: 700953962H1
ctagaggagcgtgaatttgacgacttgagtggccatgacattataagccactccagaagctcccaccctccaacccccattgtccacaagcacactaaatccaatcacaacaaccacaagaaaaagagatcagattccgaggaagatggctccgtctcttgcaacaagtgcagacctcactcccgcgacaaaatcttcatccttcccttggatcactcctccaccaacaactctcacaaaccctcttccttact

SEQ ID NO: 21500 - DNA, 282 bp, Glycine max
  Clone ID: 700953964H1
acgtctcctcggacttctgctcgagccaatatagcccaagccctatacaagcaaaccctaacacacacccatttgattcagtagccatggctagcctcaaggttgcatttttggctgcagtgctctgcatggttgtggtgagtgcacccatggcacatgcagctatcacgtgcgggcaggtgacgaatagcctgatcaattgcatcggttacctccagaacggaggaacgccgccgtcgggatgctgcaacggagtgaagagcctcaatgccgccgccaaga

SEQ ID NO: 21501 - DNA, 84 bp, Glycine max
  Clone ID: 700953965H1
aagaaactccatagcgacagagacaattcacgttatattgttagtttattcgtcacatcttgctgtgagtagtcatggcaagcc

SEQ ID NO: 21502 - DNA, 258 bp, Glycine max
  Clone ID: 700953932H1
caaacacatacattgtagtatcacttttgtctcggaatttgttctttttagttcatactagcttaaaggtatcatgtgtggttttgatgtgcatggctgtgatgagtgcaccaatgatggtgcaagccgtgtcatgcaatgatgtttctgtgaacctagcaccgtgcctatcttacctgatgcagggtggagatgttccagaatcgtgctgtagcggagtgaggaacattctgggttctgccagcaccacctttgaca

SEQ ID NO: 21503 - DNA, 252 bp, Glycine max
  Clone ID: 700953966H1
atttggtttgtttgaggtcttgtatgtggctgcagatatccaaaccttaaattcggtcctcgaatctttctgatcattggttgttttttattctttcaaatacattccaaaatctcttggaaattgcgagattcactgcttatcctagcagcagattttgggttctgacccaattattcattttccccaactgggtcttgtggattttttgttggggttttaaatttcgtgttgctgggtttgaaagttatt

SEQ ID NO: 21504 - DNA, 242 bp, Glycine max
  Clone ID: 700953893H1
caagaaggtgcgtcccttcctccccccttcttggttccaaaccaaaaccatcagtgcaccttcttcttcttcttcttcttcttccagtgcccgcatcatcaagagaacaacaatggaccccaacgagctgaagcgcgtgttccagatgttcgaccgcaacggcgacggaagaatgacgaagaaggagctgaacgactcgctggagaatcttggcatcttcattcctgacaaggagctcggcc

SEQ ID NO: 21505 - DNA, 238 bp, Glycine max
  Clone ID: 700953894H1
cccaattcttccccctccacccacccagcatatctctctattcctatttattagcacccctcacattaccttgtgtcaccaactactttgactcctttaccataccattacaataattatcaaacctaaccagtaaaaatggtgaccgtggaggaaatccgcaacgctcagcgttcccatggacccgccaccatcttggccttcggcaccgccacgccgtccaactgcgtctcccaag

SEQ ID NO: 21506 - DNA, 178 bp, Glycine max
  Clone ID: 700953896H1
gggttatcatttctccatttccattttctctctcacttttcaagaatcgtaagctatgggaaagtcttacccaactgtgagtgctgattaccagaaggccgttgagaaggcgaagaagaagctcagaggcttcatcgctgagaagagatgcgctcctctaatgctccgtttggcatgg

SEQ ID NO: 21507 - DNA, 264 bp, Glycine max
  Clone ID: 700953901H1
attcctaattgtttaaacctaattctcatttcttcatcgttcgattcttctcctcctaaagatgcagatcttcgtgaaaactttgaccggtaagaccatcacccttgaggtggagtcctccgacaccatcgataacgtgaaagctaagattcaagacaaggaagggatcccacctgaccagcagagacttatctttgcgggtaaacagcttgaggatggtcgaacccttgccgactacaacatccaaaaggaatccactctcca

SEQ ID NO: 21508 - DNA, 268 bp, Glycine max
  Clone ID: 700953902H1
cggaattcggttccacaacgatataactctaccgtgccctacgataaggggtttctcagagcaggagcaatgtcttccccttatctacctgccacaactgactcacttgctctcgcaactgaggccaaagacccatctgaggccatctccattctttatcgggtgcttgatgatccttcttcttcaccagatgctctgcgtatgaaagagcaagcaatcacaaacctcactaagcttctcactgatgagaataggggagaggatctgc

SEQ ID NO: 21509 - DNA, 255 bp, Glycine max
  Clone ID: 700953903H1
cgattgaatgacctcctgagtttggctgattatgttgtatgttcagaaaattttccacgggcctggacagaggcatcatctattccaagagcactagtttcaattattttaagattgccaagacttaaatttgctattgtaactttgggaaaagatggctgcataatgcttgagcgatgtgtggatgatgaaggttctcacatagaagaaatggacgttgaaagctgtttgacaacattaaaagagagaaaggac

SEQ ID NO: 21510 - DNA, 252 bp, Glycine max
  Clone ID: 700953904H1
ctcttcttctcttgcggctagggttttagcgcacttcttctagatttaaggaagatgggtaaggaaaaggttcacatcagtattgtggttattggccatgttgactctgggaagtccactaccactggccacctgatctacaagcttggaggcattgacaagcgtgttattgagagatttgagaaggaagctgctgagatgaacaagaggtctttcaagtatgcctgggtgcttgataagcttaaggctgag

SEQ ID NO: 21511 - DNA, 251 bp, Glycine max
  Clone ID: 700953905H1
tcatagaatatactttgaactcaggcacacttgtgcataatactatcatgtcatgccttcgatgttgtttggtttgattcagcaaacttgaacaaaagggcttgatggaattcacttcttcttttgatttaaccttcttctatgactatgctactccaagcaaagtagtcctatggctggcatctatcttctccggcatcatcctatgtgttcttgcttatacatcaactgctattttgagttctttgttg

SEQ ID NO: 21512 - DNA, 245 bp, Glycine max
  Clone ID: 700953906H1
gtagttgcagagagacgatggattgagaattctctctcttttctctttctcttcccaactttccttccttgggatcattctgcttctttgctatggaagactcagattcagttgctacgctgatagattcgacaacttctaagctacagcagctgcagtaggtatcagcttgaccggaaagttaccgagctgttactctgaacttgatatggaaagaactcgaggaacattttcatggtctggag

SEQ ID NO: 21513 - DNA, 244 bp, Glycine max
  Clone ID: 700953907H1
tggtaatatgacaacagatgtgacctttagtttcttatgttctgtgacagaatctaaggtcaaacctgacgatgtggaagcttggaaccctaccccctgctttgattgcattcaaaggtcatgttcacccgattggcccctcttggcacatgcttggcttgggttatcagaacaaaactgacattgagagtgtgaggaaggctgctgttattcatttcaatggccagtcaaaaccgtggttgca

SEQ ID NO: 21514 - DNA, 244 bp, Glycine max
  Clone ID: 700953908H1
agcaattgctgaaggtctcgctcagcggattgcaaatggtgatgtacctgaaaccatagagggaaaaaaggtcataaccctcgacatgggtctgcttgttgctggaactaaataccgtggtgagtttgaggagaggttgaagaaactgatggaagagatcaaacaaagtgacgagataatacttttcatcgatgaagtgcacactttgattggagcaggagcagcagaaggggcaattgatgct

SEQ ID NO: 21515 - DNA, 247 bp, Glycine max
  Clone ID: 700953910H1
gacatagcaaacgatccaaactcttttttcatttgcagcatcaaaatgagtggtagcaacgatggtagcggcagctggagctctaggtttttgaaggtggctagtgcagctgccgctacagccgccgttgccggcggtttatatgccattctttcatcctcaacctctgctagctctgagatggaagtgccgtttggcagcgcacggcgtgagagcaaagaacgtgacgatggtggctccgggtctc

SEQ ID NO: 21516 - DNA, 247 bp, Glycine max
  Clone ID: 700953911H1
gattcatcaagatttttcttgactaagattttccatccaaacattgcaaccaatggagagatttgtgtcaacacacttaaaaaggattggaatcctagccttgggttacggcatgttcttattgttgttaggtgtctattgattgaaccattcccagaatcagctctaaatgaacaggctggcaaaatgctgcttgagaattatgaggagtatgctagacatgctaggctttacactggaatccatg

SEQ ID NO: 21517 - DNA, 249 bp, Glycine max
  Clone ID: 700953912H1
agataacatgctatcagttgcaattaacagccagggtatcctgtcgagaacagatgagaagtggggagtactgaaaagtccaacttctaatgacaaaacggaaagaataccacttttgaagagggatattataatgagcgtggaagagttgcctgaaagatatgggcgtcgatgtttgggcaggggattcttgacctctcgaccagctatttttgtgattgtttcggttgctgtttgtcttggggtatg

SEQ ID NO: 21518 - DNA, 250 bp, Glycine max
  Clone ID: 700953913H1
cgacgtaagaatgtattctagtttgtcacggaatttgtaaatcaaacgaattcgttgattccatatcgattcgcatttgcgtacacccctgaccccttgatttctctcagttccgttctgcatcatagagtatggccagccacgatcttcgattcttcgagttgaacacaggcgctaagataccttccgttggtttgggaacgtggctcgctgaacctggcgttgttgctcgcgccttggccactgcaat

SEQ ID NO: 21519 - DNA, 258 bp, Glycine max
  Clone ID: 700953915H1
caccgcaaccctacacccctcctacaccccaaccccaacatcaacaacaacaattcccttatacacccctcccagaccgccctctcgaagaagaaccccaacctcaacgtcatatcccatacgatcttctccctcgccgcaccaccaccctcccctggaaccctaaccctaaccctaaccctagaattcctgatgatttcgaccgcgattatcaccacaaacaccaccgccctctcccgccgcccccgctcccgatcg

SEQ ID NO: 21520 - DNA, 271 bp, Glycine max
  Clone ID: 700953917H1
ttcggctcgatcatggcgtccgagtgtaacggtaaaagctcatggcctgagttggttggagtggaaggaacggtggcggtggctacaattgagagggagaatcctttggtggatgctaacactgtgcttaaaggatccatcgtcaccgctgattttcgatgtgatagggttcgggtttgggtcaccaaacatggaattgtttatcaggctccaagaattggataagaagtgtttacactaaagcacttcatatatatgttatgagtcatga

SEQ ID NO: 21521 - DNA, 257 bp, Glycine max
  Clone ID: 700953918H1
tatttttcgcgtcacataaacaaaaaaaataaactggggagaagcatgttgttgatgttgggactatgcttcctattgttctctgcatttccacttgcgttctctgagagatgccacccacaagacaagaaagcgttgctccaactccagaaggacctcggcaacccttatcacatcatatcctggaacgcaaaggaggattgctgcgagtggttctgctgcgttaagtgtgacgagaaaacaaaccgcgtcattag

SEQ ID NO: 21522 - DNA, 252 bp, Glycine max
  Clone ID: 700953919H1
gtttttcctctttcgcagctcaaactcaaatccccatctattctctctccgtacttgaggtcagtgtggtgctcaatcattcgatctacgctttgactggtcaggacagtagcacataatcttcttctataacatcgaccggggtcgtcctctcgaaaaatgctacctctgcgtccacaatcacaggttggagcaccaaaaacatcgctgtctcttgtttcctcagaccccctcctgtctcctgatgaacct

SEQ ID NO: 21523 - DNA, 249 bp, Glycine max
  Clone ID: 700953921H1
caaattcaagagattcccaaacttttttactttttattccctttttctcactatacaatacaaatacacattcaacaattttcgattcaagttcaaagccatcgacgagtgttgaggaagaataacaatgggaatgatagtggattttgaaaatgaccaaaacgacgccgttctggttccgccccctaacttcgccatggttgaagactgcgttttccgatccagcttccccaccccttccaatttccc

SEQ ID NO: 21524 - DNA, 246 bp, Glycine max
  Clone ID: 700953923H1
tgttagtctgaataatatctagacagagtacgggaaactattggcatttagcaacggttcacgctaatttaggaacaatttttgtttttcgaattttgttgacttgttttgtttcttttagtctgattaatttataatctagagataattcaagagattattggcatttaacaatggtttgacaccaaactaggagcagtttttgtttttctgattttgttgacttgttttgattttgtttcagtt

SEQ ID NO: 21525 - DNA, 244 bp, Glycine max
  Clone ID: 700953924H1
ggaattgttgtaactttttgattcctaaattctctaaaattcgaaattctaatttcgttaggggaaagagattgtttgtgtgtgagtgagtatggctggaaaaggcgagggtcctgctatcggaatcgatttgggaacgacgtactcttgcgtcggcgtgtggcaacacgatcgtgttgaaatcatagccaacgatcaaggtaacagaactaccccatcctacgtggctttcaccgacacagaa

SEQ ID NO: 21526 - DNA, 247 bp, Glycine max
  Clone ID: 700953925H1
aaaatagtgaatcgcacttgcaacttgccagcactactgaccacaatcactgattttggcggtgttcatgttcgacctcatcgcgaaggtggaaggctagtattggaagctgtagcttctccttctcctcgtccatattttcacatagagcgcggcgatggaaggcttaggctgtgtttgcttgagagcttttcggcctcggatagtgatgatgaagtttgtgatgctgaggaaggtgttgatacca

SEQ ID NO: 21527 - DNA, 247 bp, Glycine max
  Clone ID: 700953927H1
atcgcgaggtggttgagagacgcgtttttacagttacgggcacaagagctgatgaggagacaattgacagattaattgaaactggagatagtgaacaaattttccagaaggctattcaggaacaaggacgaggccagataatggacaccttggctgaaatacaagagcgacatgaagcagttagagatgttgagagaaaacttcttgatttacaacagatatttctggatattgcggtgttagtcga

SEQ ID NO: 21528 - DNA, 243 bp, Glycine max
  Clone ID: 700953891H1
tggtggggagggagcaatggggtccaataatcatggcaactcgaaggagtttctagaactcataaagtccatcggcgagtcccgatccaaggccgatgaggagtgcatcgtcctccgcgagatcgaaaccctaaaacgccgcatcaacgacgctgacactccgaaacgcaagatcaaggagtacatcatccgcctcctctatgtcgagatgctcggcgacgacgcctccttcggatacatcca

SEQ ID NO: 21529 - DNA, 249 bp, Glycine max
  Clone ID: 700953928H1
ctcaaaaaaggcaaagcttattcccccaagacttagctagcactagcaaacacctctatatctaaaatggtttcaatttctgatcatgaactggttttgatctttggtctcctaggtaacattgtgtcattcatggtgttcttagcacccttgccaaccttctatacaatttacaagaagaaatcatcagaaggatttcaatcaattccatatgcggttgcacttcttagcgcactgttgcttctatat

SEQ ID NO: 21530 - DNA, 258 bp, Glycine max
  Clone ID: 700953849H1
ctccaccaatgtcgctgctgccgccgccgaaacctcaccggagctccggtaactcccctggcgacagcattccagactggatctccgaatcaatcaacggcggctccctccgccgcgtcgacctcaactccggcaccaacggctgggcgtcgccgccaggctccgtgttctccctccgctccgagagttactttgagaaccgccaaaaatctcccgccggcgactacctcctctcgccggcgggcatggactggctca

SEQ ID NO: 21531 - DNA, 247 bp, Glycine max
  Clone ID: 700953851H1
gaaaaaaggtcgttggagtctactcctgatcccattagaataaaaaggtgttggaatagagggaagaacgtggaaagtggttgacgaagaagacgaagaagaagaatggagaagtcagggaagagagtgttgcttacctccaacggcgacgacatttctcaaggcattgccttccatttggtgaagcaagggtgcaggttggttttgctgggagatcagaattccctgcggacatcgcgaacaaaat

SEQ ID NO: 21532 - DNA, 248 bp, Glycine max
  Clone ID: 700953852H1
tcccgaatcaatgtaccgagttataaagcactacactactatgaaccagagaatgcctctcatctatgtgaaactgtatacatatcaaatctttaggggattagcatatatccataccgcactgggagtttgccatagggatgtgaagcctcaaaatcttttggttcatcctcttactcaccaagttaagctatgtgattttgggagtgccaaagttctggtcaagggtgaatcaaacatttcataca

SEQ ID NO: 21533 - DNA, 244 bp, Glycine max
  Clone ID: 700953854H1
ctccaagagaaacttgtatctgacctgttggatattggggagatttcttatgctccctcaaggctgaaagaattggaattctgttctgaggagtttgaaaattatgttccttgctttaatgtttctgacaatctagctcttggtttttctgatggaaatgagtttgaccggcaatgtcgtcatgagctcaggcaaaattgtttagttctctctccaccaaattacaagattcctcttaggtggc

SEQ ID NO: 21534 - DNA, 240 bp, Glycine max
  Clone ID: 700953855H1
cacaattctttttttttttattgtgtatccaattccaaattcacccgtaaaataccttcctttgtctcaccagccatatgtgtatgatggaaggagatgagaatattcaagcatcaacaaagggaaaaaatgtggaaagcttcaccagcttggaggcaccaaggaagaaaagcaagaggatagaaaacaagaggaggtttagtgatgaacagttaagatcactagaatgcatatttgagt

SEQ ID NO: 21535 - DNA, 247 bp, Glycine max
  Clone ID: 700953856H1
ccagttttcatttcaattccatctacgagactacttatcttttataagcatgttctaatagatcaatgactagttgtatgtttgtgatacttattagataaagtttttccccctaatgataatatggaaaatggcatttgtgaacatgaacattgtagagggaaatctaagtgaacatggctgttgaatattagcagctgcccttaatgtggagtatcttgagctaggaaaaaaaattggcacaaaa

SEQ ID NO: 21536 - DNA, 249 bp, Glycine max
  Clone ID: 700953857H1
gtttgattggaacgacgaagagctagctaacataatatggggtgaaggaggtgagagtgatgatcatattgtgccttatccagaggtaaatgaagatgttagcaacaaaaaagaatggaatcaagaagctgctgcgactaagctcactgagctgaagagaccggaggctaaaactgattttcatgaaagaaagctaggaagcagttccaaccttgataatagtggagaactacctacctcaggatatgg

SEQ ID NO: 21537 - DNA, 246 bp, Glycine max
  Clone ID: 700953859H1
ggtgtttctccgagttgcttcaattgaatggctcttcagcttccaccacttcctggccgtgccatgcgcttcaactcaagcgtgtgctcccttcctgcacgaaaatctagcacctttgccactctgtcacaaccccgaagcgactgggttgaagccactaacagtttcttcgaccaagacaaacgacccatcatgttatttgacggagtatgcaacttgtgcaacgggggtgtgaagttcgttcgt

SEQ ID NO: 21538 - DNA, 240 bp, Glycine max
  Clone ID: 700953862H1
cgaagagggtggggagaagatttagtgttgtggccatggcggagtctgagaagagtactgtgcttgttacgggagccggtggtcgcacaggacaaatagtttacaaaaaattaaaagagaggccaaaccaatatgtggctagaggtctggttagaacagatgaaagcaaacagaacattggtgctgcagatgacgtttttgttggggatataagacatgctgaaagtattgttcctgcaa

SEQ ID NO: 21539 - DNA, 206 bp, Glycine max
  Clone ID: 700953864H1
gggaacttctccaaccacctctttgctgttgagtttgacacagcaaaggattttgagtttggggacattgatgacaaccatgttggaattgacatcaatagcttggcctccaatgcctctgcatctgaaggttactacactggggatgatgattcaagcaaacagaatctcaccctcaaaagtagggtacatattctagctggggt

SEQ ID NO: 21540 - DNA, 250 bp, Glycine max
  Clone ID: 700953867H1
cttttgctttaccaaattccattttccaattcaaaaccctaactccgttcgaagcaccaaatcgtgatggcaccaaaggcagagaagaagccagcagagaagaagcctgtggaggagaagaaatcgacggtgggagacaaggctccggcggagaagaagccaaaggccggaaagaagcttccgaaggagggaggcgccggcggagaaggtaagaagaagaagagaaacaagaagagcgtggagacataca

SEQ ID NO: 21541 - DNA, 245 bp, Glycine max
  Clone ID: 700953868H1
gccgcagcttgaaacagagcagagcgaccttgaagagctatggctgtcggaaagaataagaggatttccaagggaaagaagggtggcaagaagaaagcgttagtgcccattcccttcttcactcttttattctctcctttaaactctgatttctttcttcttcttccgtgattccacagcgctgatccctttgccaagaaagactggtacgatatcaaggccccttccctcttccaggtcaagaa

SEQ ID NO: 21542 - DNA, 244 bp, Glycine max
  Clone ID: 700953869H1
tgcttgccaactttgggatggagctcaaatgtgaaaactgaaccaattatttgtgctttgcaaaactgtaagctccctaatttccctgatgatatatcctggttggccagaggttctaaagttggatatgagattgaaaaccagaggatgcagcttgagaattgcttgatccagtacttgactcatactagtaagacaatgggaatttctttggcaactaaagaggcaagtgtcacaatgcaaa

SEQ ID NO: 21543 - DNA, 248 bp, Glycine max
  Clone ID: 700953873H1
atcacattcactgtctagtgatccaccttcacttcccgtttccagtaatttaaatcacactctaatcagttctcaggattcctgtttgcatcatattcacaagttagttcaattctggttcttcattgttcatacttcatactctaactgttcaccttaaatttcctgtccaagtaacttgggtgatgtagagtttttttatttcttcaccttcctgggttttacttttcatattcctacttcatttg

SEQ ID NO: 21544 - DNA, 246 bp, Glycine max
  Clone ID: 700953874H1
tgattctgctgtggatgtagggaacaatgactatcttcccacccttttcaaggctgattaccctccttatgggagggactttgttaaccaccaacctactgggaggttttgcaatggcaaattagctactgatttcactgctgacacattgggtttcaagacctatgctccagcatatcttagcccacatgcatcagggaaaaacctccttattggagcaaactttgcttcagctgcatctggtta

SEQ ID NO: 21545 - DNA, 240 bp, Glycine max
  Clone ID: 700953875H1
ctggcacgagagcgcattgagttgtggtcaacagagagaaagtaggagagaaaagaaaaagcctcaccggcttcggcgaaatggatctgccgccggcaccgatccggtggcgcgcaaccgcaatcccattctttgtggcggttctctttgtatccaccatctccccttcgcgcgcaatctactgcgacgaagatgattgctacgatctacttggggtttctcaaagtgccaatgcttccg

SEQ ID NO: 21546 - DNA, 242 bp, Glycine max
  Clone ID: 700953876H1
ctgataacaaagttgaagaagaaaaggccttagtgctcagtgctagagaacttttttttgttttcttctttttttcttttttcatctcttacttccatgatttgttgtgggcttctcaacatcatacattgactctatcagtttcattcctgaatcaattagtttcttcactttcactttctaactgggaggatcaaagtgtgtgtctttgtcctcttggtgttgtttcttcttcttcttca

SEQ ID NO: 21547 - DNA, 233 bp, Glycine max
  Clone ID: 700953880H1
ggtggatcaggaatggacctgaggagcaaagcaaggactctcccaggaccagttagcgacccttcaaagcttcccaagtggaactatgatggttccagcacaggccaagctcctggagaagacagtgaagtgattatatacccacaagccattttcagggatccattcagaaggggcaacaatatcttggttatctgtgatacttacattccagctggagaacccattcccac

SEQ ID NO: 21548 - DNA, 252 bp, Glycine max
  Clone ID: 700953881H1
aataactcaaaatcagttctcttctgcctgcgctctttcgcttcctgcgaatctttccgagaatcgagtcacagagtagagcgaaatcggcgtagagatacaaaaatgccaaaagtaaagacaaatcgtgttaaatacccagagggctgggaattgattgagcctacactccgtgaacttcaagcaaagatgagggaagctgagaatgatccacatgatggcaaaagaaaatgtgagacattatggccaata

SEQ ID NO: 21549 - DNA, 243 bp, Glycine max
  Clone ID: 700953885H1
atttctctctcttctgctctcactctcactctctctcacttggggttgaagatgagaatttgtggagcagcaatcagcagcagctacaccaccacgtccaattcccttttagtgtttgcttcctcttccctctccagtcctgcaaaaaccaagttcctgccctcactttctagattttctgtcaagcgtccgtacttcctttcccaaacttatccgcgcattgctgtgaacaagccctccatg

SEQ ID NO: 21550 - DNA, 243 bp, Glycine max
  Clone ID: 700953886H1
gcgattcagatcttagggtttcaatttttttttctgtggagccccattggccatagccgccagccagagaagagtagaagccttcgatcctaggttttctttccccccctttctcccaaatcggacctttttcgcttctcgattcgcttccgtagccgggcgatttgaggacccagaaaagaacgaaccgaacgttttatattttttcggataatcaatcgaagatgtctcgttgcttccctt

SEQ ID NO: 21551 - DNA, 242 bp, Glycine max
  Clone ID: 700953887H1
acacggtgttcggaaagtacgagatggggaggcttctggggaagggcacgtttgccaaagtgtattacgggaagcaaataagcacgggcgagagcgtggcaatcaaagtaatcaacaaagagcaagtgagaaaagaaggaatgatggaacaaatcaaacgcgaaatttccgtgatgcgtttggtgcgacacccaaacgtggtggaaatcaaggaagtgatggccacaaagacaaaaatcttc

SEQ ID NO: 21552 - DNA, 244 bp, Glycine max
  Clone ID: 700953888H1
ggagagaacaatttgaaaacagcagtggcagtgtttgcattacatgcagtgtagccgaaggagatgagttccaaagagagttgcagaagtgaacttcgcattgcgatccgccaactcagtgatcgatgtctctactctgcttctaaatgggctgcagaacagttggtgggtattgagcaagaccctgccaagttcactccctcgaacacgagatttcagcgtgggagttcgagcattcgcagga

SEQ ID NO: 21553 - DNA, 247 bp, Glycine max
  Clone ID: 700953889H1
ctcggtgaaactcaagtacgtgaaactagggtaccaatacctggtgaaccacattctgactctcactctcatacccatgatgatcgccatcttcatggagattctacgcttaggccctgaagagatcctgaacctctggcactccctccacttggaccttgtccaaatcctctgctccgccttcctcatcatcttcatcgccaccgtctacttcatgtccaaaccccgcaccatctacctcgtcgac

SEQ ID NO: 21554 - DNA, 239 bp, Glycine max
  Clone ID: 700953847H1
ggctactggaattacaggcaccagtctgatgtttgccatgcatatcaactactgaggaaaggtggtgtgaaagaggaaaatattgttgtatttatgtatgatgacattgctttcaatgaagagaacccacggcctggagtcattattaacagtccacacggaaatgatgtttacaagggagttcctaaggattacgttggtgaagatgttactgttgacaacttttttgctgctatact

SEQ ID NO: 21555 - DNA, 245 bp, Glycine max
  Clone ID: 700953890H1
caaaacaagtggaatcacaaatttctttctccatctttaatgaccaaattgacctttaggcaagattggtaaaagacaaatggactaaaatacagacacgtgtgattacgtgaagaagtggcaccccatgtccttgtctagtagaactcgtccatagaatgatcactttgttataaaaaggctttatattcttatattcatctacaccaagctacaccatttgttcaagaaactaccaagtagca

SEQ ID NO: 21556 - DNA, 246 bp, Glycine max
  Clone ID: 700953811H1
ctcttctaatgtctagttctgagagcacaaacgcgagaactagaccagcgtcatggttttctaccccattctgtgttatcgttctcccggtggccgtggctgcgcttctctaccggctcgaaccattcaagccggttcttttgccggtccagctgggccggtccaccgtggcggttccggctcgtaacggccacatgcaagatggatcggaacgtgtgggtgagggacacttggagggcccggtag

SEQ ID NO: 21557 - DNA, 247 bp, Glycine max
  Clone ID: 700953812H1
caaaccagttgttgaagagagagtaattttattttttgtggtggtgattggggaactgagagagtgagtgagtggagtagcagaagagaagatgggatctgtgtgtatctgagactgtgcatcatccctgttcctaacgattcttgtggacagacagcgcactggtattttaaacaggcctgatgggttctagattcccatctcatcagctcagcaatggcctgtatgtatcaggtcgccctgaaca

SEQ ID NO: 21558 - DNA, 242 bp, Glycine max
  Clone ID: 700953815H1
gaaaatcgttgagtttatgatagaactaaaagaagtaaaagaagtaaaagaggtaatagaaaatcaaattgaaagtttggttaactcatcggatgatattaagaacaaggtactgcaattgaaattggaggttcctaaggctggagagacgcctgattcagaatcaaagagtagaattggtgattttatatttagaacatcatctagaattattatggccatacttcttagagacatgtttg

SEQ ID NO: 21559 - DNA, 231 bp, Glycine max
  Clone ID: 700953816H1
ctctagcaccacctagtatctctctaactttgagaaagtgtgtgttgtgtgttctcttctctcactaaaaaaggtttcattaattctatattatggctcagaccacagcgaatcacacagtgaccgtatctgggtgggcagctcatgattcttcgggcaagattaccccctacactttcaaaagaagggagaatggtgtgaacgatgtgacaataaagatactgtattgtg

SEQ ID NO: 21560 - DNA, 256 bp, Glycine max
  Clone ID: 700953818H1
ggcgtcgttgaggtcgccatcgacgatgaagacgtcatggagaatccccactcctacgtccacagcaacatcgcgggcctcgtcacgcttctcgaggcctgcaaatcggcgaaccctcagcccgcggtcgtttgggcctcgtccagctccgtctacgggctcaacgagaaggttccattttccgaatcggaccagaccgaccggcccgctagcctctacgccgcaaccaaaaaagccggtgaggaaatcacacaca

SEQ ID NO: 21561 - DNA, 252 bp, Glycine max
  Clone ID: 700953819H1
gcgaccccatattgcactgcaccttatctcacctctctttgactgttctccaccccagggtaatgcccacactaagttattcccaaaccacaccaatgtcgacctcttcaccactcttcctcctcctaattattattattattattcctatcctccactttcacgcggcggaaccccgccaagggacagtggcagctcctccacaaaaacatcggcattgtcgccatgcacatgcagctcctccacaacgac

SEQ ID NO: 21562 - DNA, 245 bp, Glycine max
  Clone ID: 700953821H1
caaggatcgagtgaaaccatctccaatgccagacagctggaagctgagcggagatatttgccactggtgttgtgctaggagcttacatggcactaatgacagtagtatttttctggctcatgaaggataccgacttcttctcggacaagttcggtgtgaggtctataaggaacagccccggagaaatgatggcagccctgtacctacaagtcagtattataagtcaagcactaatttttgtgaca

SEQ ID NO: 21563 - DNA, 61 bp, Glycine max
  Clone ID: 700953822H1
cagaaaatgagaaactctctcatgagttctgtctgattgcatagcattggttaggtagttg

SEQ ID NO: 21564 - DNA, 235 bp, Glycine max
  Clone ID: 700953823H1
agctattcttacctcttggcatgaccattcaaatgtcttcttttctcttagcttctcttgctgttttctttttcttctcctccttggagaagagttttgcctttcaagcagcaagaaaggaggacacagaaagcaacaatcttcatcaatatactcatcttgttcacctcaggtcactccttccttcatcttcttgcagctcttctaccaaagggcccaaaacaaaagcatcatt

SEQ ID NO: 21565 - DNA, 249 bp, Glycine max
  Clone ID: 700953824H1
ctcgccggaaaattcctcgccgtttccggttaccggcgatggcctcggcgacgtcgtttttcggcctcggtcttcgcccctccgtcccaatttgcgccaacagaaacaacggcattcgattctctcagtttcaagtctcctttggctttcgtgagaactccacttccctcaagactttgaattcaacaccgttgaagaaaagagaagctttctcaaatgggtcttcgagaacgcgaagaaacccgttgt

SEQ ID NO: 21566 - DNA, 249 bp, Glycine max
  Clone ID: 700953825H1
caagaatccacacaaactcagggtagggcagagagagagagagagagagagagagagagagagagtgggagggtgggctatcgctgtgcatggtggcgctggtgtcgaccctaatctcccactcgagcgccaagaagaagcgaaacaacttctcacgcgctgtctcaatctgggaatctctgctgtaaattctaatcttcccgccatagatgtcgtcgaacttgtggagagggaattggacacggatcc

SEQ ID NO: 21567 - DNA, 246 bp, Glycine max
  Clone ID: 700953827H1
aagaccttggatttttatattaagcttacttggacttacaccacttgctgaacgtgtgagcttcattacagaacaagttgccttttacactggtcccacagttggaggacttctgaatgctacatgtgggaatgttactgagctcataatagcaatatttgcccttagcagtaacaaaattgccgtggtcaagtattctctgttgggttctattctttcaaaccttcttctggttcttgggacctc

SEQ ID NO: 21568 - DNA, 244 bp, Glycine max
  Clone ID: 700953828H1
gttaacaaattagggttaaaatccaattttaaaattgaatactaaaataagcaaaataatcaagagattaaattcataactaggggattaaatttacaattatgagataaaggaaccaaatttacaaaattttgcaggtaggaggaattgagttgaaatcgaaagggaagcggtggtttaggttaggatttggtgagtgagtggggatggcgaagttcaatgtggtgcagaagcgaaggagagc

SEQ ID NO: 21569 - DNA, 243 bp, Glycine max
  Clone ID: 700953829H1
agcatctaagtgagatacacagtagttaggtagcaagcataagtgtctaaccttagaaacatatctgctacatatcgtgtgcattttggaattgtgccactaaaattctattcatctatggctgcctcatcttatgctatgcaatcaatccttgcaaaccctatgatccgcatttccagcgggtctagggagaaccattttggtgttcctgcttatcacatgagaaggaatgttggcctgaga

SEQ ID NO: 21570 - DNA, 173 bp, Glycine max
  Clone ID: 700953832H1
gaaaaatgggtaagacaaagacaaagacatttattttaaccaacattcaaaactgttccattttttttacgtgtgatctgaatgaattaaaattttgacgacactgaagcgaggataaaggtgtacgagttgaggaataagacgaaggcggagctactgagacccagctcaag

SEQ ID NO: 21571 - DNA, 256 bp, Glycine max
  Clone ID: 700953833H1
gttctcttgcagcaacaaggtttagtgacaccaaacagacgggaaatgggtcgtggggtcagtgctggtggtggacagagttccttggattatctctttggcagtggggtacctgccagcagtgcaaatggtgctcgcactcaaaatgcaagtgctccttcaccaccggttgataagcaaagtccagcaccagcaccagcaccagcacctgcacctgcagcagcagcagcaccagcacctgcaccagctccagcac

SEQ ID NO: 21572 - DNA, 253 bp, Glycine max
  Clone ID: 700953834H1
atttgaattttctactgttgaaatgccatatgagacatataatggggtgaatgtgaggcttaggtatgtattgaaagtgaccattaaccgtggctatgctgggagcatagtagaataccaggattttgtggttcgaaactattctccacctccacaaattaacaatagcatcaagatggaagttggaattgaagattgtttacacatcgaatttgaatacaacaaaagcaagtatcatctcaaagatgtcatc

SEQ ID NO: 21573 - DNA, 251 bp, Glycine max
  Clone ID: 700953835H1
caacaatggaggagaattgaaaaccagcaacagggccgtgacagcgttgtgccaaggctcagacgaccagaaactgtgccacgaggttctgtcatcttcgaacagcacagacccaaaggagtacatcgcaaccgtggtgagaacctcgatggacagcgtgatcaaagcgttcaacatgagcgacaggctgacggtggaacacggcaacagcagcgccggaatgaagatggctctggaggattgtaaggact

SEQ ID NO: 21574 - DNA, 247 bp, Glycine max
  Clone ID: 700953836H1
catcatttgaaaaccttggtttttttgcttcaggcttccaactgctgtatccactgcctgagccaccatcttctatgctgttttctttgccatccttgtcttcccttccaccatcttgagatgtcaccaccaaatcacttagcttctgcaactgtttcaaaaaaaaaaaaattaccacagttaagggtcacaagcttaaatttgttgggcatctttggcaacacaaataagtagtattgttaaagga

SEQ ID NO: 21575 - DNA, 246 bp, Glycine max
  Clone ID: 700953837H1
atcctctctttttctcttcgcactctccctcatggcaaggttgagaggctctatggtctcgcccctgttgctaagtacttggtcaggaacgaagatggtgtctccattgctgctctcaacctcatgaaccaggacaaaatcctcatggaaagctggtactatttgaaagatgcagtccttgaagggggtattccatttaacaaagcatatggaatgacagcctttgaataccatggaacggatcca

SEQ ID NO: 21576 - DNA, 244 bp, Glycine max
  Clone ID: 700953838H1
gtggaaagtaactttgagatgctacataaaaccacaattttgctttgcctctcttggatgtgtgaatattcttggttaaagcaacccctccttccgtttccaaaataataataaaaaagatcataaatgctaacaataggtgttccaacacctatataaataaatctgctgcccatgatatcgatgggggttccaaaacctttcctgtcttgatccattgtaggttcttaacttctttcatatt

SEQ ID NO: 21577 - DNA, 246 bp, Glycine max
  Clone ID: 700953839H1
ttgattttccctcttctctttttctctctcgtgagtctcgtccctgaagcgaaattctagaatggcggaagaagctcctgcatctgaaacctccgtcacaatgcctcaaccggcggaagtcatcaccgtcgacggaaccctaacctcttccgagaatgacaagagcggaatctccgtcgatgccgccgcgcacggcggtgaaaagacggtgtccaacgctgaaccttccggtagcgatcctcagaa

SEQ ID NO: 21578 - DNA, 245 bp, Glycine max
  Clone ID: 700953840H1
ggaaaaaaaaaaaacgaaaatgctgagaatcgccgcaagcgcaaagagaattgttcaaacggcgtcgttggaggcgccaccgttggggattagggttctgccgcgtctctaccacgaaagggtggtggaccactacgacaacccccgcaacgttggatccttcgacaagaacgaccccaccgtcggaacgggtctttttggtgcacccgcgtttggcgacgtcatgaagctccagattaaggttg

SEQ ID NO: 21579 - DNA, 233 bp, Glycine max
  Clone ID: 700953842H1
ggctcgagtctcacgttttccgcttcagtttcctcgggaaaatcatgctgaaaggtccaggcctctactctgacattggcaagagagctcgcgatcttctgttcaaggattatcagaatgaccacaagttcaccatcaccacttacacttccaccggagtggaaatcacttcaactggagtcaggaaaggtgagatatatttggccgatgtcagcactaaggtgaagaacaag

SEQ ID NO: 21580 - DNA, 242 bp, Glycine max
  Clone ID: 700953845H1
tcttgttgttcatggcttggctgatgcttgtagattcgtttgtaatgatgcaaagtttctctcacgtggcataatgaggttggatgctcgtgcacgtcaagatgttgcttttcttgggactgaatttctcaaacttgatgctcgggcaagagaggatactgagaaaattgaccgtgatgtcaaggaaaaagctagccgacttagtcatattgctactatattgaaggataaagctcagtcca

SEQ ID NO: 21581 - DNA, 251 bp, Glycine max
  Clone ID: 700953810H1
attcctaattgtttaaacctaattctcatttcttcatcgttcgattcttctcctcctaaagatgcagatcttcgtgaaaactttgaccggtaagaccatcacccttgaggtggagtcctccgacaccatcgataacgtgaaagctaagattcaagacaaggaagggatcccacctgaccagcagagacttatctttgcgggtaaacagcttgaggatggtcgaacccttgccgactacaacatccaaaagg

SEQ ID NO: 21582 - DNA, 241 bp, Glycine max
  Clone ID: 700953846H1
aggactcaaggtgaagcaccctgtggtttttgtgcccgggattgtcactggggggcttgaactgtgggagggtcacctgtgtgctgaggggttgttcaggaaacgcttatggggtggtaccttcggagaagtttataaaagaccttcatgctgggtggatcacatgtcactggacaatgaaacaggattggatccaccagggataagagttaggcctgtctctggacttgtagctgctgat

SEQ ID NO: 21583 - DNA, 248 bp, Glycine max
  Clone ID: 700953771H1
aagcacgccgtgtttcgctatctctcccattctctcgcatctcaatacccttttgatttgtgaaaggaaagcaaacatgcttgatcaggtccaacaccctacaatcatggacaaggttgctggccagctccatctccgttctggtgtttctggtattaggagttatgaaggagcctactgccaccccacaatgtaccaaagaccctcttttgggaattactcgaatgctgcattgcagtatcctgtga

SEQ ID NO: 21584 - DNA, 244 bp, Glycine max
  Clone ID: 700953772H1
atggcaccaacagccaagactctgacttacctggcccaggagaaaaccctagaatcgagcttcgttcgggacgaggaggagcgtcccaaggttgcctacaacgaattcagcgacgagatcccagtgattctcttgccggaatcgacgaggtggatggacgcagaagagagatttgtgagaagatcgtggaggcttgcgagaattggggtatattccaggttgttgatcacggtgtggatcaaca

SEQ ID NO: 21585 - DNA, 245 bp, Glycine max
  Clone ID: 700953773H1
gaagtgaatggcataaaaatgcatgttgcagagaaaggagagggtccagtggtgttgttcctccacggcttccctgagctctggtactcatggcgccatcagattctctctctcagctccctcggctaccgcgccgtcgctcccgatctccgtggctacggtgacaccgaagcaccaccttcaatcagcagctacaactgcgtccacatagtgggtgatctcgttgcgcttattgactctctggg

SEQ ID NO: 21586 - DNA, 243 bp, Glycine max
  Clone ID: 700953774H1
aaaaaaaaaaatgtagaggaacctggaaacttccacgaggttttcggtgaaaaccaaatttggggctttgcatcgcaagatttaccctttccaatcaaaattcttctgccttcccctaccaattctttctctcaaccgatttatctgagtgaggggtttggccaatgacgagtggttttggtgaatcaacgagagcgtctgcaccgagcccatcatgctcggggaacagttcaaacgatgccg

SEQ ID NO: 21587 - DNA, 242 bp, Glycine max
  Clone ID: 700953775H1
ctcgagccgcataaaatgactgaggaaagggcaagatgtcattcttcaacctttagaaatcacgtattagtttatacagatcataaatcaaagcttgaagaatgacatcttgccctttcctcaagctttgatttatgatctgtataaactaatacgtgatttctaaaggtttagaagctggaattactctgtaaagaagaaaatgaaaagatacagaagataaatataggaagacaaagata

SEQ ID NO: 21588 - DNA, 240 bp, Glycine max
  Clone ID: 700953776H1
tggagacttacctgggaaaagatgatgatgtttgaagatatggggttttgtggcgatttggatatgttatgtgtttctcttggagagggggatattgctgtgagacaaactgaaccggatcctgtagttgaggatgactacagtgatgaagaaattgatgtggatgaacttgagaagaggatgtggagggacaaaatgcgtcacaagcgattgatagaacaaaccaagtccaaggaaggg

SEQ ID NO: 21589 - DNA, 247 bp, Glycine max
  Clone ID: 700953778H1
cttccgaaccaaaaaaggagagagattctaatttctaaaatctaaaccatcatgaagaacacaaacaccaacacgaaactgatcctcctccatccttatatccaaaaacaaggaagctccaatcgcttgtggcttctagcattggtatcaatcctcaccctcgcttttcttgttaccctcatttccacaagagaatccaccttcatcaccactgcaacttcttctgtgactccctcttcaaataatg

SEQ ID NO: 21590 - DNA, 248 bp, Glycine max
  Clone ID: 700953779H1
ttcagggctgatgagctaatggagttctacaaatcagatttgaaactcaagaaattcttgcatataattgaggattctcctgttttccctgttatatatgacagtaatagaactgtgttatccttacccccaattattaatggtgcacattcagccatcactctggagacaaagaatgtatttattgaatgtactgcaactgatctgacaaaggcgaagattgttttaaatacaatggtgacagcctt

SEQ ID NO: 21591 - DNA, 250 bp, Glycine max
  Clone ID: 700953780H1
ataatatcgtgtggcagactccagcgaatcccccgcaccctaacgattacgtctttcgaaacgggattcgatacgttagaccatactacttcgaattcatcgctcatgttaaaaatcggtgggcagggaaaaccattgtggatttgttcgctgaggaattcaaaggtcgaccttatgagtattatgttagtgcagtgaaatgtggaaggattcaagtggatggtgagatggtaccggtttcatacatagt

SEQ ID NO: 21592 - DNA, 252 bp, Glycine max
  Clone ID: 700953781H1
gtttcgaatagattatcctaagtctttgggaatagtgctgcaatggcttcaagtcaggaggaggtgacccttttgggagctactggaagcccatttgtgtgcagggttcatattgccctcaagttgaagggagttcaatacaaatatgtcgaagaaaatttgaggaacaagagtgaactgcttctcaaatccaacccagttcacaagaaggttccagtgtttattcacaatgagaagcccatagcagagtct

SEQ ID NO: 21593 - DNA, 250 bp, Glycine max
  Clone ID: 700953782H1
gctctcctatcttttgattaggaaagcggcacataccagggggtagcgactgtttattaaaaacacaggactctgctaagtggtaacacgatgtatagagtctgacacctgcccggtgctggaaggtcggaaggagaagtgttataagctttgaatggaagccccggtaaacggcggcagtaactctaactgtcctaaggtagcgaaattccttgtcgcataagtagcgacctgcacgaatggtgtaacg

SEQ ID NO: 21594 - DNA, 250 bp, Glycine max
  Clone ID: 700953783H1
gtaaaatctcgccgccttcacataaaaataatctttaatgaaagaatttcatatcaggtgaaattaatttatgatctttgaggtagacccgtattatctgacctatgaaaaaatccctgcttatccacgcacgatttggaacttctgaaaacacgctgaaatagatttttttttttgggtataatattgattgtagtagtattaattttatcttctgatattatatttccaattttgctgtcaaaacatt

SEQ ID NO: 21595 - DNA, 247 bp, Glycine max
  Clone ID: 700953784H1
cgcaaaacatggtggttttaaagtccacttcaccactctcatctctcacttcccacttctttaacctttcttcctcctcctcctcctcctccaaattcacctccccacactctctccgccgccgccacttccaccatgtccactccacttcaagagttgcgcaattcactatcagagcctacatggagaaccccaacacattaggcagtttcgccaacagggtcattggtgcactccccgtggtggg

SEQ ID NO: 21596 - DNA, 247 bp, Glycine max
  Clone ID: 700953785H1
ctttgcacctcagcacagtttcccatcgaaaactagcccatctttttccctcgtaccttttgcttcagcaacaacaacatcgtcgtcacaaatctagagatagatagatagatagagagaaacggttgaattgaagatgaaaatcactgtcatgactgctgatgaacaaatcatcacgttagatgtggatccccacgaatctgtggaaaacgtcaaagcattgctcgaggttgagacaagtgtgcct

SEQ ID NO: 21597 - DNA, 72 bp, Glycine max
  Clone ID: 700953786H1
agaaaacctattccgagttgtcgctcttgctcattctggttgctcagtccctctctgcctcctcattctcac

SEQ ID NO: 21598 - DNA, 245 bp, Glycine max
  Clone ID: 700953789H1
gaagaaacgatggcaagtccaggatcgcacattgttgtccttgcgttcgtgttgctcatttcatcaaaacttgcagaatgtcacaacatagttcgcttccttcctggcttccagggaccccttccttttctacttgaaactggttacgtggaagtgggtgaaactgaagcagaggagcacgcagaactcttctattattttatcgagtcagagaacgatcctaaagggaaccctctcctactttg

SEQ ID NO: 21599 - DNA, 243 bp, Glycine max; identical to SEQ ID NO: 21274
  Clone ID: 700953792H1

SEQ ID NO: 21600 - DNA, 244 bp, Glycine max
  Clone ID: 700953794H1
cagagggatcatcggctgaatctatagctgcacttgctaaagtggatgttgtcaagcagaggatggaagctgcatatgaaacgttgcaggatgctgcgggattaactcaattgagtgcaaccgtggaggatgtatttgccagtggagatcttcctcgtgctgcagaaacgttagctaacatgaggcattgcttgtctgcagttggggaggttgctgaatttgccaacataagaaagcaacttga

SEQ ID NO: 21601 - DNA, 253 bp, Glycine max
  Clone ID: 700953796H1
atgcaacaagccaaacaaacttggttttaattggtataggcttgccaaggtcttgttgattgagcgttaagtgctttaactaatcaatcccaagaccttggtttaccttgccacacaaaaaaatatataaaaaggcaaaataataataaaaaaaagagaaggcttggagccaagaaaataaacacaaagcacaagtcatggaaagaataatggttggaagtgcaacaaaggttgctttcaacctcttggtcac

SEQ ID NO: 21602 - DNA, 230 bp, Glycine max
  Clone ID: 700953801H1
cgttgttgctgcaaaaaaaaaagtgtaagcaatttaaggagagggtataaatatgtctctttcgttgcttaatttctagaaccgcgaaaaagtgcggaacgtttccaaaacgtggggggtgttgtgtaacaatttgcagtctggtctgacagcgacgatgtcgtcctgtgcgtctctgtgatgcagagtgtcttgaagtgagagggtttgtgagttggttggtagtttgg

SEQ ID NO: 21603 - DNA, 255 bp, Glycine max
  Clone ID: 700953802H1
aaaacaaagaaaaaaaaaaacccttagccaacacaaccatcatggccacctctgctattcagcaatcagcattcactggtcaaactgctctgaagcagctcaatgagttcgtccgcaagaccggtggcgccggcaaaggtcgcactaacatgcgccgcaccgtcaagagtgctcctcagagcatttggtatggccctgaccgtcccaagtacttgggtccattctcggagcagattccatcatacctgaccggag

SEQ ID NO: 21604 - DNA, 254 bp, Glycine max
  Clone ID: 700953803H1
ctcccatgaccgcagaaaaagcaaaaacatccaaaatacagaaaaagctagaaggccatctctgactaacgcgccaccaaagacctcacgcgcaaccgcagcgcgtgcgtcaatctccgtagcccttttcctttccctctctctctctctagacctcgtcgaagcaccaccatgaccacaacatctctctgaaaatcactcacacgcaaaagagagagagaatcgaaacaccccgtaagcagcacagcacaatc

SEQ ID NO: 21605 - DNA, 248 bp, Glycine max
  Clone ID: 700953805H1
gtttgttgtgagctataagctagtttatcgtgaggagaatatgaagttgtttgttttctttgttgctgcagtagttttggtagcatggccatgccatggcgcaggctaccaaaggttccctctccgaatgaaaactggctatggtgagcgttcttcggaggtaaaatgcgcaagttttaggcttgctgtggaagcacacaacatccgagcctttaaaaccattcctgaagagtgcgttgaaccaacaa

SEQ ID NO: 21606 - DNA, 244 bp, Glycine max
  Clone ID: 700953807H1
aagctaaatccgacgccaaagccgccgatagcaggttgaagcggaagggcgctggtgctgggaggaagcaatcgaggaaagctgctaaggaccctaacaagccgaagagacctccaagcgctttcttcgttttcatgtccgagttcagagagcagttcaagaaggagcatcctaacaacaaatccgtcgctgttgtcggcaaagctggtggtgaaaaatggaaatcgctatctgatgctgaaaa

SEQ ID NO: 21607 - DNA, 250 bp, Glycine max
  Clone ID: 700953809H1
caacatcatctgcagggagcatgactcccaggtctccgttgatgacaccacggacaagtcagattgacttgctcttggcagggaagggtgcttattctgaacatgatgatctgccgcagatgaatgaacttgctgacatagcgcgctgtgtggcaaatgctcctttggacgatgatcgcacgacgtcatatttattatcttgtcttgatgatttgcgggttgttgtagatagaaggaaatttgatgcact

SEQ ID NO: 21608 - DNA, 249 bp, Glycine max
  Clone ID: 700953769H1
gggaacctccgtgtcagtattatttaaaaactggaacctgtaaatttggtgcatcctgtaaattccaccatccaaaaaatggaggtggatatttaagccaagctccactaaatgtttacggatacccgttacggccgggtgagaaagaatgctcctactatttgaaaacggggcagtgcaaatttggtatatcttgtaaattccatcatcctcaaccggctggcacatcattgccagcatctgcacctc

SEQ ID NO: 21609 - DNA, 252 bp, Glycine max
  Clone ID: 700953732H1
ttttacttcccctatggctcgtcactccttgctcttagccctcctcctcttcgccgccgtggccaccgccgcgatggcgtggcgcgtccgacgccgacgacatcctgatccgtcaggtggtgccagatgttggcgaacgaagaggaggacaacctgctgaacgccgagcaccacttcgcgagcttcaaggcctagttcgccaagacctacgccaccaaggaggagcacgatcatcgcttcggcgtcttcaag

SEQ ID NO: 21610 - DNA, 258 bp, Glycine max
  Clone ID: 700953733H1
acacgaatgacccaatttggtttcagtttctcgaattctgggaacgtgtctccgccctctggtctcttccccttctccgcaagcaaaaccccaatttcttcttcacgaaccctaattcactcttcccattccaaatctcaatcacctttctgattcaatctttctctcctcgccaatctcttcgttcacctcgcaaatcaaggtgagggattcgaattgaaacctcaagatgccagccacagcaggaagggttcgtat

SEQ ID NO: 21611 - DNA, 254 bp, Glycine max
  Clone ID: 700953734H1
ggtttggttgggggtaaagagaatgaagattcagtgtaacgtgtgtgaggctgcggaggccaaggttctgtgttgtgctgacgaggctgcgctgtgttgggagtgtgatgagaaggttcatgcggctaacaagcttgccagcaagcaccagagagtgcctctttctacctcttcctctcatatgcccaaatgtgacatttgtcaggaagcattaggctattttttctgtctagaagatcgggctctgctctgca

SEQ ID NO: 21612 - DNA, 252 bp, Glycine max
  Clone ID: 700953735H1
tttgattctctgcttcgtcctttcattcctcttccgaatcgttaatcgttcgatcgatccatctcccgcttccaatgacaacccctaccgacaacaataacaaccctgcacaggaaaaccctaacaaaaccctagaccccaccgaaccagatccaatccctgccaccgaggacgacgccgccgccgacactaaggactccgacgccaaaaattccccgccgcccgattctggaaacgacgctccgctctccg

SEQ ID NO: 21613 - DNA, 209 bp, Glycine max
  Clone ID: 700953736H1
cctgcccgtacagcataacttatggagatggaagtacgacctctgggtcctatattaaggatgatcttacatttgaccgagttgttggtgatctccgtactgtacctgataataccagtgtgatttttgggtgtggttctaaacaatctgggacattgagttcaaccactgatacatcccttgatggaataattggttttggacaagca

SEQ ID NO: 21614 - DNA, 251 bp, Glycine max
  Clone ID: 700953737H1
tccgtgccctagcttcttcctcctccgccattgcagcagggcacacaaccttcgtcacaaacccaattcgcgagggatcggattcgccatcatggggaagaagaagaagagagtttcctcgaaggtgtggtgttattactgcgatcgcgaattcgacgacgagaagatcttggtgcagcatcagaaagccaagcacttcaagtgccatgtctgccacaagaagctctccaccgccggcggcatggccatcc

SEQ ID NO: 21615 - DNA, 237 bp, Glycine max
  Clone ID: 700953738H1
tgacaaggttgcactgattatatattattttgtagcttcgttgtttttttttctttctcatttaactttgttcttcctttttgaggggttgggtgggggttaaaataaacatatgtttgtatttttcccccgcttttaccttctgtttacatttcacaatacatggatcacaaatggtgtatgatatgaatgtcatgttctaaggcatgatagtgctttctatttgacacttttgga

SEQ ID NO: 21616 - DNA, 248 bp, Glycine max
  Clone ID: 700953739H1
cgaagacagcatgtaacaccactcatggtcgcagagatcaagtggttcaagtcaccaaagctaggagtggtcaactcaactctgatctgaggaaattggccgtgaatctcattcccttccctcgtctgcacttcttcatggttggatttgcgcctctcacctctcgcggctctcagcaataccgcgcattgacagtgccagagctgacacagcaaatgtgggatgccaagaacatgatgtgtgctgca

SEQ ID NO: 21617 - DNA, 247 bp, Glycine max
  Clone ID: 700953741H1
ctcctatctatcgtgcgtatctctttctctctccatttttatttatatatttctctccattatttggtgtgcatgctctagacacacacacaccccaccaccaccaacactgagttttagcagaaggatagagagcagaatgattcaaagaactgtgtcctttcccagtttaaggaaattgcttcttcgggctggttgttctaaatctgcttcgtccaagatcggaacttacaattgctttgcttct

SEQ ID NO: 21618 - DNA, 246 bp, Glycine max
  Clone ID: 700953744H1
cacaagttcaaaggccatggatgttgcacattttttgtttggcatctttgggaatgcttccgctctgttcctattcttggctccagtgatcacattcaagaggattattaagaacagatccacagagaagttctcgggcattccatatgtcatgacactgctcaattgtctccttttagcttggtatggtttgccttttgtgtctccccacaacatattagtgtcaacagtgaatggcactggatc

SEQ ID NO: 21619 - DNA, 248 bp, Glycine max
  Clone ID: 700953745H1
gcatagcaaaatgatagagtactgcgagtaaggaaggttccaagcctcatatcacagatttccaaggaaacaacgaacccatctcaatctgcttcttccctataatcgaacccttcaaatcgcagatcaaaatcgaagcttattatacagtgatgatgaccgtgaagcaaggtttcttctctctgcgaggctcactcctcttcttcgcaatcctcacccttctctccttcacctacctttctctcaaa

SEQ ID NO: 21620 - DNA, 226 bp, Glycine max
  Clone ID: 700953746H1
ctcgctttctcttctctctcgggttctctctcgggttctctctctctctctctctcgcacaccgaaaccgaaagcgataatatatagagagagagagagtaagaggagtgcactgcacacgaggtagagagaaggaactaactcaccgaacagtgaaaccaagacattctgaatttgagcttcggttagtaattcggagtgtgtgtgtgtatgacttcgatggctt

SEQ ID NO: 21621 - DNA, 108 bp, Glycine max
  Clone ID: 700953747H1
atcttcatcccgttcctgttccccttcctctctgtttctccattcccactcgtggagttactctccttacttttcttttctctcccgtcgcttccacagcaaccacga

SEQ ID NO: 21622 - DNA, 252 bp, Glycine max
  Clone ID: 700953748H1
cttctttctttgtttctgtgtgttcgagattgaagaagatgatgcaggctggacccggcggcatggcccaacaagcgaaccaacaatacgcacagcaacagcaacaaccctacatgatgatgccgccgcagcctcagccccctcagatgtgggccacatcggcccagcctccgtcccagtcggtggctcctccgcaacccaccagcgccgatgaggtccgtaccctctggatcggtgatttgcagtactgga

SEQ ID NO: 21623 - DNA, 257 bp, Glycine max
  Clone ID: 700953749H1
agagtaatgaattgcgcaaacaagtggatctgaattcacattcacaacaacagaacgttgctttcccctctctgctattaggagagacagacaactcactccttcgccaatcggagcatggcggagctccggcactcttcctccctcggcagccgagcctccaattctccgatgaagcgcgacgccgtcgccgtcggtagcgattcctcccctctcattcccgacaaccacctcgcccacgacgacgacgagcacga

SEQ ID NO: 21624 - DNA, 254 bp, Glycine max
  Clone ID: 700953750H1
agcatggcttccaatctgattagagtgagcacaagcttggttctagtagttttagtagctctcacagttcaaattttctacatttcacccatagatccagttttgctggatataaaacctgctccttcaaccaaagacaatcaattacagaatatcattaagcttggagaaggacttttgaaggaaccagaagatgttgttgtagataaagaagggactctctatacagctactcgagatggttggattaaaag

SEQ ID NO: 21625 - DNA, 252 bp, Glycine max
  Clone ID: 700953751H1
gttatgggggccaccaacccaccttagcaacatttggtgcggaccaatatgatgagaaaaatccaaaagagaagagttcaaaagtggctttcttctgttacttttactttgcgctcaatgtcggttctttgttctccaacactgtactagtctactatgaggatacagggatgtggacaatgggtttcttggtatcattggtctctgctgtcatagccttcttggctttcttattgggaactccaagatata

SEQ ID NO: 21626 - DNA, 249 bp, Glycine max
  Clone ID: 700953753H1
agagaaatcaccacattttgtactaaacctgcttattagtttcttaactagccttgtttttgtgttattttgcatggcttccaagcaagaaccaaagctctctttgacccttctagtggacaaagaaagaaactgtgtggttgtggctgaagcaagtggagacttgatagacatattgttcagttttctcacccttccactcggaactatcataaggcttgtgtcgaaaaagcaagggcacgacgaagc

SEQ ID NO: 21627 - DNA, 247 bp, Glycine max
  Clone ID: 700953757H1
gaagattctgactgacacaagcagagtggtacttctgaagcagattgtttcttcttcttcacactccgctgcgctgcgagatttccatgattgtcccatccatttcaggaagggtttggtgatagattcaataatcaaggtttagtatggcagattctttgatatccagaagtaaaagtgatgtaacggcaatgaaggagacacttcgtacgcagcagcaacttctggaaaagctatatgctgagtt

SEQ ID NO: 21628 - DNA, 244 bp, Glycine max
  Clone ID: 700953758H1
agtgagttttgtttatttgaaattaacaagtagcaaagatgtttggaatcatcggaggaaacaagggtcacaagataaaggggaacttggtgattatgcgaaagaatgtgttggatatcaacagcattaccagtgttaagggtgtcatcggaaccggcattaacatcattggaggagtcgtcgacaccgttactgctttggcgtcccacatctccatccagctcattagtgccaccaaggctga

SEQ ID NO: 21629 - DNA, 246 bp, Glycine max
  Clone ID: 700953761H1
cgcttccgtctcgttcggttcaaccacaaaccttcctctgaatcacttctcttactctgcaacaacgtcgttttccttcttcttcttcgtcttcttcttctttgctcacccggctcagttcgcgctctcagtaaaacgcgctcaagtgtcgccgttttctgcaaattcagctagggtttcactctcgccgcgatctctcatcctagctcgccgagttcgggttctaatcgccgcgtctaagttcac

SEQ ID NO: 21630 - DNA, 248 bp, Glycine max
  Clone ID: 700953762H1
attagctagctcgcacattaagttatataacacatatttgcttgcttagaaatactattattgaagatatggggagtgtagattatgagtaccctttgggcatgaacaactttgagagagtgcaccaagtcgaggttccaccgccacagccgtttttcaagtctctaaagtactctttgaaggagactttcttccctgatgaccctttgaggcagttcaagaacaagccagcttccaagaagttcatg

SEQ ID NO: 21631 - DNA, 219 bp, Glycine max
  Clone ID: 700953765H1
ccaagacatagcaaacgatccaaactcttttttcatttgcagcatcaaaatgagtggtagcaacgatggtagcggcagtggagctctaggtttttgaaggtggctagtgcagctgccgctacagccgccgttgccggcggtttatatgccattctttcatcctgaacctctgctagctctgagatggaagtgccgtttggcagcgcacggcgtgagagc

SEQ ID NO: 21632 - DNA, 247 bp, Glycine max
  Clone ID: 700953767H1
aattaagcaattacgtttaacactctaaaacatctctcgttggctatattatatatcctgaaaagctcactcatggcaagtatttctactgtctcggttcttgatagaaggcttgaagggaaagtggctcttatcagtggtggtgctagcggtataggtgaggccactgcaagactcttctctaagcatggagcacacgttgtgatagctgatattcaagacgatttgggtctctctctttgcaaac

SEQ ID NO: 21633 - DNA, 251 bp, Glycine max
  Clone ID: 700953731H1
accatgttgtgtcaagtgtgaactcaaaacatatttctctctttctttgtttcgattttggagtggtgttgctatctctagctccatgaactttttctaacacacaacacaagaagaggaagaaggggaacaagaagatcgaagaagaagaagaagaaagttaagatatgttgcttggaaaacgtcctcgggcaccgattatgaaaagaactacaagcatgagtggtggtttggccgtggaaaccaaaaca

SEQ ID NO: 21634 - DNA, 248 bp, Glycine max
  Clone ID: 700953768H1
gcagtttcaaagagaggatttgggattgggaaggcgagggattgcgctgcgtctcttcctcttctctttcgattcatccctcattcataatcttccaatccaacaacctcagcctcacactcacacatacacacatctgaacgcgtatcgtccctcccatggcttcaaagcgcatcctcaaggagctcaaggacttgcagaaagacccaccaacttcttgcagcgctggtccagtagctgaggacatg

SEQ ID NO: 21635 - DNA, 249 bp, Glycine max
  Clone ID: 700953691H1
tgatttttcaattagggttttccgtgaaatgaaggagttgggtatcaaccccactgttgtcacttacaacacattgattaggcttctgtgtgattgctatagacacaaggaggcacttgcgttactccgaaccatcatgccccgtgatggctgccaccccactgccgtttcttaccattgtttttttgcctccatggagaagcctaaacagatacttgctatgtttgatgagatggtggagagtggggt

SEQ ID NO: 21636 - DNA, 251 bp, Glycine max
  Clone ID: 700953692H1
ctcttgttctctgattggcctagccagtagtagccaatttgttggagctggttgggaatggcgtcgaaaccgaaatcaaatggaaattccaaatgcaacaaaggattcgctgacagctatatgctgttgaatcctgaagacgctcatttcttcgatcttgttcatgtgctgtattcccgtaacttgggaacccgaaattttgtgaccagcaatgctgagggatcttatgagggaagcttccgccaaagatg

SEQ ID NO: 21637 - DNA, 182 bp, Glycine max
  Clone ID: 700953694H1
ctttctactgtttttcttgagattcgaagcacgaataattgtttaatctttgaaattcaaataccctggtggacttgagtttcaaaatacactttttaatatggctatcaaattatgagtctgaccctgcaaaaaaaaaaaaaaaaaaaaaaaaaaaaaaaaaaaaaaaaaaaaaggggggg

SEQ ID NO: 21638 - DNA, 256 bp, Glycine max
  Clone ID: 700953695H1
gcctcagtaatctgagagagaaacaaaaacaatgaaggtttccattgccaagttccactcccttcccctatgttttttccttctcttggccttcaacacaaaacccctcctagcagcagaaccagagccagtggttgataagcaagggaaccctttggagccaggagtagggtactacgtgtggccactttgggctgatgaaggaggcctcacactaggccaaacaaggaacaagacatgccctctttatgttatc

SEQ ID NO: 21639 - DNA, 256 bp, Glycine max
  Clone ID: 700953703H1
attaattgcaagaatggcacttcgttgcttggtgatgtccctttctgttctcttcactcttggtcttgcgagagaaagccatgccagagacgaagatttttggcatgctgtttggccaaacactcccattccaagttcattgcgagatcttctaaagcctggccctgcaagtgttgaaatcgatgatcaccctatgcaaattgaagaaacacagtacccgaaaaccttcttctataacgaagaccttcatccaggc

SEQ ID NO: 21640 - DNA, 254 bp, Glycine max
  Clone ID: 700953704H1
ctcgagccgattcggctcgaggttgatatctcgtttgccaaaaatgaccccaagattagacccattttgtgggttggttactcccgggcaagctgggggaactgccattgctgatgtaatctttggtacaactaacccaggaggaaggttacccatgacatggtacccacaaggttacttggccaaagtgcccatgacaaacatggacatgcgtccaaacccaacaacagggtacccaggaagaacctatagat

SEQ ID NO: 21641 - DNA, 253 bp, Glycine max
  Clone ID: 700953705H1
gtccatttcttcttcccatattgttctcgtgtgttgtgtgtgtcagtgttttggtgtgtgtgtgagtgagagaaagagaaaaaaagaaaagaaaaagagtgtcttggggcggttttggtttgagtttaacactttcatttcgaagatgccgcgcccagggccaaggccttacgagtgcgtgagaagggcttggcacagcgagcgccaccaacccgtgagaggttccatcattcagcagattttcagggtcgtc

SEQ ID NO: 21642 - DNA, 250 bp, Glycine max
  Clone ID: 700953707H1
ttctcattctctgtttcgctttcaccgagtaacttcactttccccaactccacctgagaaaaagatacccataattcgcacgcacgcacgcacgcacttgttctgactcagtgcttgtgttggacgcagaagaaccagaaaagaaaaacaagcacgaggagatgattaacttcgaagaaaccgagttgcgactcggcctccctggcgggtctgcgagtgatcacaacgagtcaacaacggtcaagggcag

SEQ ID NO: 21643 - DNA, 250 bp, Glycine max
  Clone ID: 700953708H1
gtggaatgaagctaagcaaattagaggtggaaactgaatatgatacgtcttaactaccatgatatatatatatagagagagagagagagagtgaagggagttagaaactttaattgataacttatttgcgtgtggattaatcttcagaatgaagtgtcccaataatcttagtggcaagaattgcctgttattttcgtcaaagtattccaagtgaagtgttctacaaatgcgatagacataactatttatt

SEQ ID NO: 21644 - DNA, 248 bp, Glycine max
  Clone ID: 700953710H1
ggtttgtacagcgtttgctttgggggcgaaaaattcagccttttccgatttgcaccaaattcaacagagaacaacaccatttgtggattgctgtaaactgcattatttggctgttagctaatggacaagggggtgccacctagcctcttcgtcaatgacggttctttcatggagaggttcaagcaacttcagcaagagcaggagaaagggaagaatgtcaaattggaggattctacaccaattaaggt

SEQ ID NO: 21645 - DNA, 108 bp, Glycine max
  Clone ID: 700953711H1
ctagcaactagcaagtgctcttctcaaaaaagcaaaaacataaagaaatggctgtcactttctctctcctgcccgccctgcccggctgccaacttccacacttgcagc

SEQ ID NO: 21646 - DNA, 160 bp, Glycine max
  Clone ID: 700953712H1
gaagaagtgaagtgcagtgatcattttgttgttgggtgtgagtcttgggtgtgaaaatgtcgcacagcgataccataccccttcacccatcttcccaatccgacatcgacgagatcgagaacctcatcaatgccagcgttcaccaatcagtcccttcggc

SEQ ID NO: 21647 - DNA, 248 bp, Glycine max
  Clone ID: 700953714H1
cgtgattctattcaattcatcatacattaaaatatcatcgttatcatatcattccagcgtcactctgattgagagtgaagaaggtgggagatggagaagccacaaaacggagaagaaaaggaagaaaccacggcctctttctgcggttacgattctcttcaccgtcttctcaaggataatcttaacccccatcacttccaggaagtcagccgtttgcttactgggcttaattgtggaaaagcacttga

SEQ ID NO: 21648 - DNA, 259 bp, Glycine max
  Clone ID: 700953717H1
tgttgctgcaccaccgaacaacttcccctgtaaatcgcgtttcgtttgtgcaaggttttaaaagatggctgatgctgaggacattcaacctcttgttgttgataatggaactggaatggtcaaggctggttttgcaggtgatgatgctcctagggccgtgttccccagcattattgggagaccacgccatactggtgtaatggttgggatgggtcagaaggatgcttacgtgggtgatgaagcccaatcaaaaaggggt

SEQ ID NO: 21649 - DNA, 254 bp, Glycine max
  Clone ID: 700953718H1
ctctctctctctctctcttccaaccttttctctgtttcttctaaaagtctcagcacagcataacataacccttcttcatcttcttcttatgtgattgacttgtgtccaccacggtgacccatttctgtatcttctggtgaaaagctaatttgttcactctaataggtgtacagtgctaaagtgtaaactttgaaacctagcttcctagttgaatcatcagaagcttataagtcgaatccatatttttctggacg

SEQ ID NO: 21650 - DNA, 253 bp, Glycine max
  Clone ID: 700953720H1
gagagagagagagagagagagggagagatcacatttcctgaactataagctatatagcacttccataatcttacaacaatggaggggaccagcagccaaagcacgtttgccttcatccctagcacaattgagacaccaagtccaagcatccctgagatatcatcatcatcttcccctggctctcttgcaagaattgcacaaagttaccctcccggctttcccagaaaggtgttagcggagattatagggacat

SEQ ID NO: 21651 - DNA, 251 bp, Glycine max
  Clone ID: 700953721H1
catcgacctcattgaaaaggctctaggaccaaagagcaagagcacagaaggggtgaaaaattggccgagcaaacacgttggagtgcattctgttggtgattatacagccattgagctaattggcagagaccgcccaggtctcttgtctgagatttcggctgttcttgccaacctccattttaatgtttttgcagcagaagtttggactcataacaggcgaattgcttgcgttctttatgtcaatgatgcaa

SEQ ID NO: 21652 - DNA, 250 bp, Glycine max
  Clone ID: 700953722H1
ctctttgttgaagtgagttctcgaggagggattgcgaagataattagagagaggaaatggaaagacgtaacttcagtctttaattttccatcaacagctacaaatgcttcttttgtgttgcggaagtactatgtttcattgctctaccattatgaacaaatctacttctttaaagctcgtgaatgggatcctattgctcctgatgtttcgcagaaccaatcgaccctgccagttcctcctccaaaaatgc

SEQ ID NO: 21653 - DNA, 247 bp, Glycine max
  Clone ID: 700953723H1
atagcattccgcaaaatggctgccaccaccttagtctctgaagtcactctcccctcctcctccggccagcggaagatgccgctgatgggcctcggcaccgcgccggaagcaaccagcgcggttaccacaaaagatgctgttcttgaggccatcaagcagggctacaggcactttgatgctgcttctgcttatggtgtggaacagtctgtgggagaaccatagctgaagcacttaagcaaggactaat

SEQ ID NO: 21654 - DNA, 248 bp, Glycine max
  Clone ID: 700953724H1
atacaattggacatgtagcggcaacagttagcatgtcaaaagttgcggtatcattcacacacattatcaagagtggtgaacctgcttttagtgttctggtttcaagatttcttttgggtgagagctttcctgtgccagtctatctgtctttaattccaatcattggtggatgtgcacttgctgctgtgactgagctcaatttcaatatgatcggttttatgggggccatgatatcgaatttggcattt

SEQ ID NO: 21655 - DNA, 249 bp, Glycine max
  Clone ID: 700953725H1
cttctccttctctctctctttttcgcctcattccattttcatctatcaatggctccagtagcagcagcatcttcagattcaatcaagccaagagatgtttgcatcgttggtgttgcacgtacaccaatgggtggatttcttggtactctgtcatctctatctgccaccaagctaggctctatagctattgaagctgctcttaaaagggccaatgttgatccatcccttgtggaagaagtattttttggg

SEQ ID NO: 21656 - DNA, 247 bp, Glycine max
  Clone ID: 700953727H1
gcctaagtattcctcaatgaccgatagcgtacaagtaccgtgagggaaaggtgaaaagaaccctatttagggagtgcaatagagaacctgagatccgatgcgaacaatcagtcgaaggagcttagagcctttacttgatatttagtaaagcgcactcactctaacggcgtaccttttgcatgatgggtcagcgagaaaatgggaacagcggcttaagccattaggtgtaggcgcctttcagaggtgg

SEQ ID NO: 21657 - DNA, 247 bp, Glycine max
  Clone ID: 700953728H1
caaaaacagagtagcctacacgtatcagagagagtgagagaagagagagaatatttctgttcgtgcagatagatagatagatggctcggagctccacaagaatgaaatgggtctccatcttcacacttctattcctctcccactcgcccctcacaaccttcgcagaagatgggctagtggcgaatggagattttgaggttagcccatcaagtgggttccctaacgaggcgattgtggagggccccag

SEQ ID NO: 21658 - DNA, 248 bp, Glycine max
  Clone ID: 700953729H1
gcggtggtgagcgaacggtgcgagaatcaatcaaagagcgttgaacagtgtaaaaacaaggtcgataacctaaagaagaggtacaaattggagcgacacagaatgagcagtggctgcatttccaccagccactggccttggttcaagcaattggaacagatcgtcggaaattctctcccggcgaagttctccgacgaggataaagcggtcatttcagccggaacttctccccggcaatcgaaaagata

SEQ ID NO: 21659 - DNA, 246 bp, Glycine max
  Clone ID: 700953690H1
cagtggtgacaatgtgcccccacctgtgaatacgtttgcagagattgatttgggtgaagcacttaatcagaatataagaaggtgcaaatatgtgaagccaacacctgttcagcggcatgccataccgatatctctagctggacgggatttgatggcttgtgcgcagactggttctggaaagacagctgcattctgcttcccgattatcagtggaatcatgaggggccaacctgtgcagaggccacc

SEQ ID NO: 21660 - DNA, 248 bp, Glycine max
  Clone ID: 700953730H1
cagaaattaagctagagctacatagtttttttcttttctcaccttccttctctcccttcagacaagggacgaaaaatcagagagagagagagagagagagagagaaattccaaaaccatgtcgtcccacagtcatctaagtttcgcctttggggttctaggtaacatcgcctccttcgtgtgctttctggcaccactaccgacattttatagagtttgtaagaagaaatcaaccgaaggttccaatca

SEQ ID NO: 21661 - DNA, 251 bp, Glycine max
  Clone ID: 700953658H1
cgttttctttgaaacgcacagcttcaatcaccgaccacaccacccatcaacgacatgcttcctctttcccttctcaagactgcccaaggccaccctatgttggtggaactgaaaaatggggagacatataacgggcatttggttaattgcgacacatggatgaacatccatctgcgagaagtcatttgtacatctaaagacggagatagattttggaggatgcctgaatgctacatacgaggcaatacaat

SEQ ID NO: 21662 - DNA, 254 bp, Glycine max
  Clone ID: 700953659H1
gaaagagaagggagctatagccataaggagaaaaactttcaaagaggtgaaagcaaaagagttcttcttttccttttttatatatacttgggtgctaagctgtgtgagttcattgacaagcctgaaatggcaactatgctgacaaaggagcatggtctgaacctcaaggagaccgagctttgcctcggtttgcctggtgggggaggcggcggcggcggcggtggtgaggtggaaactccaagggccactgggaa

SEQ ID NO: 21663 - DNA, 170 bp, Glycine max
  Clone ID: 700953660H1
ggcggcggcggcggtggcgcctcctccgccggcggtgagcttgatgaacccgacggagaattcggtgaagttcgcgcctcctccttctttggctccttcgcatagtgaagagaaagagagcaaaagcaaatcgtcttgccataatgggttgtgtaagcaaaacatgggag

SEQ ID NO: 21664 - DNA, 259 bp, Glycine max
  Clone ID: 700953661H1
gcaaagctccctccaggctcaatggggtggccgtacataggagaaacccttcaactctattcccaagacccaaatgcctacttttccaccaaacataaaaggtatggcgaaatattcaagaccaacatcttgggttgcccctgtgtgatgctgacaagccctgaggctgcacgctttgtgctagtgactcaagctcacttgttcagaccaacatacccgaaaagcaaggagcgtttgattggtccttttgctctgtttt

SEQ ID NO: 21665 - DNA, 262 bp, Glycine max
  Clone ID: 700953662H1
aatttaccttcatctttctctcagcttcaccttcaccttcaccttccgaattgtatcaaacctcaaaaaatggatcatcaaaacaaacacgtagcagtctttgctttcccctttggcagccaccttatgcctctcttaaaccttgtcctcaaactagctcattcccttccaaactgttcattctctttcattggcacacacaaatccaatgcaatccttttcccaaaaccccacatcccaaataacatcaaggcctatagca

SEQ ID NO: 21666 - DNA, 261 bp, Glycine max
  Clone ID: 700953663H1
atggcggcttgtctgcaactgtggcaatgcaaactagcgagaccctttgactcattaccggtgcgaaggtcaattcctttgagtctgaggtgttcggccgcgccctcttcttccaagccgacgcgctcctacagcatcactctcatccccggcgacggcatcggccccgaaatcatctcggtggccaaagacgttcttgtcctcgccggttatctcgaagggattaaatacgacttccgcgagatgcttatgggtggagct

SEQ ID NO: 21667 - DNA, 261 bp, Glycine max
  Clone ID: 700953664H1
cctcgtccttcgctgcaccatcttcgtcaacctctggtccttcgataacgattgccgtataggattccctcatcgaagatactaaccgcatcctcgccgagatccgatccgacgccgacccctccgatcccgacgaccagcaattcttcaaccctaacgacaccttcaccctcggccccaagatcgataattgggacactgagcgcaagaattggcttcaccaaaaccccgaataccctaatgtcatcggaggtaaacctc

SEQ ID NO: 21668 - DNA, 250 bp, Glycine max
  Clone ID: 700953666H1
aaaaaagcaagagagaaaggaagattaagatcgtgtctattttgcaatcaaaatcccttctaacttctccgttgatgtatgtatattttgttcacagagcaaaccccacaatccacatgataatgataatgatggcgatgtctttctctctctcttttcctctcacactcttcccatctattccctcatggtttcttctctcttccttcccaataaaaattacccacttctaatcagacaaaaagtagag

SEQ ID NO: 21669 - DNA, 243 bp, Glycine max
  Clone ID: 700953667H1
cactgatgctggtggcataatcctactgttccaagatgacaaggttagtggattgcagcttctcaaggatgatcagtggatcgatgtcccaccaatgcgtcactccattgtaatcaaccttggtgaccaacttgaggtcataaccaatggcaagtacaagagtgtcatgcaccgagtgattgcccaagccgatgataccagaatgtccatagcttctttctacaaccctggtgatgatgctgt

SEQ ID NO: 21670 - DNA, 243 bp, Glycine max
  Clone ID: 700953668H1
gttaagggctgcactataccagaatgtctcagggaagaggcagtgcatctttgcctattgtggtcactgtggtttcactactgtgccttttggaacgtgctaacgcagcaacttactccgttggaggacctgggggatggaccttcaacactaatgcttggcccaatggaaaaagattcagagctggtgatatcctaatcttcaactatgactcaacgacccacaatgtggttgctgtggaca

SEQ ID NO: 21671 - DNA, 240 bp, Glycine max
  Clone ID: 700953669H1
cccatagcagccatgtaaggagtgtccatgcatttttaggcttctgctctggtgacttttgcttttgtctgatatggtgtataggaaattgagaattgtattactttttgcaaactcacatgtgggcccttcatttttgtctctcactacttcactgattgtatttaaattttacagaatctttaaattgcattgacataataggatgacaaaaacaattgttatgtttaccgtcactaa

SEQ ID NO: 21672 - DNA, 247 bp, Glycine max
  unsure (1)..(247): unsure at all n locations
  Clone ID: 700953670H1
cttctctctgtttcttcttttctctttgtctgaggtccatttttgagcaatggcgagaaaactaagcattgttgtactttgcattgttcaaatgctgcttcttcttgtggaaaacgatgctgagattgttgtgtccaccgtggaggctccagctccgcagcctcacnagaacaccacccacaccctgtccagcgctccagctccgctgcctcacacaaacaccaccaagtcccatgttcccaatttg

SEQ ID NO: 21673 - DNA, 249 bp, Glycine max
  Clone ID: 700953671H1
tgaaactcttccactacctcttctcactactcacactactcttcctcttccaagccaaagaaggagtttccattagccctttgcaattgatcacacacccacttgaccccttaacaaagcaagaaatcaccctcgtccaagccacagtcctaaagaaataccccagaccacccaaccatgtcttcttccactacgtcggcctcgacgatcccgacaagacgcacgtcctaaagtgggcctcctccggca

SEQ ID NO: 21674 - DNA, 247 bp, Glycine max
  Clone ID: 700953672H1
ctcaacggagcacctctcttcaggtcgccatctagactgcaatcatggctgatggaccacagcatccatcagttgttcagaagctagctggacagtcttacctggtgtccaggctaagccccaactttaactctgggacttattcctcgactggttcttacttcactggaggactgcactcttctgggttggctgttgtgtcgcctggatctccagttactgtgcatgctcgcggagagaaaggagt

SEQ ID NO: 21675 - DNA, 250 bp, Glycine max
  Clone ID: 700953674H1
gcagcgcattatagcacaccacacaaaaaagcaaaacagagagaacaactgttactcacacacgccatgggtaaatgaatggtttttgagcaacagcagttaaaagagaaaagggattcagcgaagatgacatcggttggtgtggcaccaacttcgggtttgagagaagccagtgggcatggagcagcagctgcggatagattgccagaggagatgaacgatatgaaaattagggatgatagagaaatgg

SEQ ID NO: 21676 - DNA, 252 bp, Glycine max
  Clone ID: 700953676H1
atcctgaaattaattgaatgtgaaaagttggagatgagcttattatcgtttaagtggcttatatgctgctgctagtatggtgacggactaagcacaatcatgtaactagttactaactattggacccatcttacttaccccatatgtggtagtaataatgaggctatgaatttgcaattgttattgaattgattgtatatggtgtggacttgcaggttgcatcacaaccaaggagcttggaactgttatgcg

SEQ ID NO: 21677 - DNA, 254 bp, Glycine max
  Clone ID: 700953677H1
cacaagaaaaggtggccctttagaaggagcacatgttcacatcgtccacttgtctgattcaagtgcttccttagatctgattaaggaagcaaaaagtcatggtgacagcataagtgttgagacttgtcctcattacttagctttcacgtctgaagagataccaaatggggctactcgttttaagtgttccccacccattcgtgatgcatacaacaaagacaaattatgggaggctgtattagagggacacattg

SEQ ID NO: 21678 - DNA, 260 bp, Glycine max
  Clone ID: 700953679H1
ctcgagccgaatcggctcgagagtcacacaaaaggagcttgatttccctcatttgctggagcctctacgaagacttctaagaggtcaagcctctctatttgaatggtcaagatcaacttcattggcgaggacactgtctccaagagttttagaaaatcaaattgacacaaagaaggagctggaaaagagccttaaagccacttgtgaggagttcatcatgtcagttactaagcttgttgtggatcctttgctttcattcg

SEQ ID NO: 21679 - DNA, 215 bp, Glycine max
  Clone ID: 700953680H1
cacacacaaaagaaacaacactccaagaggaccaccaggtcctccacctcttcctttcatcggcaaccttcaccaactccacaactcatccccacatctctgcctatggcaactcgccaaactccacggtcctctcatgtcgtttcgcctcggcgccgtgcaaaccgtcgtggtttcatcggccagaatcgccgaacaaatcttgaaaacccacg

SEQ ID NO: 21680 - DNA, 244 bp, Glycine max
  Clone ID: 700953681H1
tcgcaagcaaaaagaaagaatcccaggcgaggagaaagatggaggggaaggagcaggatgtgtcgttgggagcgaacaagttccccgagagacagccgattgggacggcggcgcagagccaagacgacggcaaggactaccaggagccggcgccggcgccgctggttgacccgacggagtttacgtcatggtcgttttacagagcagggatagcagagtttgtggccacttttctgtttctcta

SEQ ID NO: 21681 - DNA, 239 bp, Glycine max
  Clone ID: 700953682H1
attccacaacagtgggagggagatccaaaaagagagagtggaaaagatggcgcggttgatcacagtggtgtggtgcgcggtggcggtgctattatgcgccgcggccggtgcgtcgtgggtggaggaggcggcgaacccgatacgaatggtgtctggcgtggaggcggaggtggttcgggtgatcggggagtgccggcgtgcgttgaagtttgctaggttcgtgagcaggttcgggaaga

SEQ ID NO: 21682 - DNA, 244 bp, Glycine max
  Clone ID: 700953683H1
ttcctatcttgttctgattatggaacagctgaagccaagtgctgctaactcttcccctctcactcccctcggcttcttggacagagcagccaccgtccacggcgacgtcccttccgttgtttataacaacaccaccttcacgtggtcccagacgcgccgccgatgcctccagctggcctccgccctctcctcccttggtatccgccgcggcagcgtcgtctccgtcgtggcccccaacatcccc

SEQ ID NO: 21683 - DNA, 246 bp, Glycine max
  Clone ID: 700953686H1
cggctcgagggaatggatctgagcactattgaattggcgaagggctaatgaagcttaatggtttattcacagggagcacgagaagctccagagaactctttacatcattattaagcagtcttatcaaaggtttctttccaagagatgttataagatataattggtaaaattaagtttattgaaagattttgcgaaactttgcctgggatatagtgaaaatggacagatcagatacatcaggctttg

SEQ ID NO: 21684 - DNA, 246 bp, Glycine max
  Clone ID: 700953687H1
gtttctaggtatggaaactctttcatatgggtcagcaccatgctgccaagttgtgaactcaaagtggaaattagttgaaaagagtttgagttcacgtcaatcaagagtttcctctataggaaaacttggagtttattacacaggtactatttctgcatgtgcgcctgtgagattttatgagatgggtactagggtgcagctaagaagctcaacaagattcaatttcaaggtttgtagtggaagtta

SEQ ID NO: 21685 - DNA, 246 bp, Glycine max
  Clone ID: 700953688H1
atcctctgaattcaactcgctcgcacatgggaatttattgaccagcatcaaccagatctgtgactgtgttcgattgggtaccaactattattcaataggctgtcagtaacgtaaaagtaatccctgtgccccagccatggctgcaccgtttttctcaacgccctttcagccttatgtttatcagagtccgcaagatgcaattataccttttcagattttagggggtgaagctcaagtggttcagat

SEQ ID NO: 21686 - DNA, 248 bp, Glycine max
  Clone ID: 700953655H1
aaaaaacagtggcacccaaaccaaacggaacctcgtcggatacaaaattcccaacatatttgtttttcttcattttccaccttaataataataataatacctcctgttgttgttattattaatattatttttcttttttgggtcggtttagattttagaatccttaccatgataaaaactcctacaaaatctcaccagtttcgaacctaacacacttatgacttatcccatatttcgtatttatctcg

SEQ ID NO: 21687 - DNA, 259 bp, Glycine max
  Clone ID: 700953625H1
cgatgccaaacgtagcgccagagactcccacgtccccattttggcacccttgccaattgggttcgctgtgttcttggttcacttggcaaccatccccatcaccggaactggtatcaaccctgctcgtagtcttggtgctgctatcatcttacaacaaggaccttggttgggatgaacactggatcttctgggtgggaccattcatcggtgcagctcttgcagcactctaccaccaggtcgtaatcagggccattccctt

SEQ ID NO: 21688 - DNA, 259 bp, Glycine max
  Clone ID: 700953626H1
aagcacacaaacaaagtttaattgctactttatatgctcatggctgcttcaagtaacacaacagtgagttatatgtgacagaagacaaagaccaaagttcttctgaaagttctgtatggtctctccaggttcaaggtagccaataatgggtatcaagtgcatacacgtttttgatagattatatagttttttcacttgttcgaagaaaagcaccatgccaagtggcagaagaattttccacagggatgtggaaaaggaa

SEQ ID NO: 21689 - DNA, 260 bp, Glycine max
  Clone ID: 700953627H1
tctgctcagagcctcattaagtttttctctctttcacttatttattgactctccataagcccttcaaacctctctctattcctctctactagtcaccttctcccttccattcactccacttcttaacacccccaaacagaacaacggcagagcaagcagccagaaaaatggtgttgctgtccaaagcaacaacagaacaatactcctacatcaagaactacatgccaactgcattctcctcaacaattcccatagtggac

SEQ ID NO: 21690 - DNA, 186 bp, Glycine max
  Clone ID: 700953628H1
accaaatcaaagacacctgagccattcaattcccctcctttattgctttcaagtttcaacactaattttattatctgaaaaaatggctttcaaagtttcgtttttccttgcacttgttctagtttccaatatcctcctccttgatacaacagctgctggacgcagcattggcgaaaactccaactc

SEQ ID NO: 21691 - DNA, 263 bp, Glycine max
  Clone ID: 700953629H1
ggcagactagtatccgatcctctgtcctctcgaagctttcatcgttcaacatattctcaccatctcagtcatgggcctgctatcttgttttaggtctaccgtcctgagaaaatgttccaaaggaagctctggcatgtcaagattcctgtatacgaacaattttcaacgaaacttgatttcgtctggtggcaatgaatcgtattatgggtattttaacaggagatcatacacttcactttatatgggaactggaactgtgggtg

SEQ ID NO: 21692 - DNA, 265 bp, Glycine max
  Clone ID: 700953631H1
tgaagttttattacatcatataaaattttagcgggatatttaaaattttgtcttgtcatcatattaattttaatgacattttaaattctgcccctctccactcagaccattggtaattgtgtgaatttttctggataggtgggttattgtgctgaagtttataaagtttagtactttgaaagttgaaacagatatgttgtgtggttgagaaaaagcaagatctggctgacacaattgggctgaatacaatgttagcttctaggta

SEQ ID NO: 21693 - DNA, 266 bp, Glycine max
  Clone ID: 700953632H1
attgatttcattttcggatactccaccaccttgatccaaaactcgaagatcttgctgatttgccatgggcttcctcaccagaacatagtggtggcagatggcacagggcagaagaacatgcccacaggaatagtcctccataactgcgagatcatgccggaccctaccctcttggcagaccgcttgagcgtgaagacttacttggccaggccatggaaggcattctcaagggcagtgttcatcgagaatgttatcggggacttgat

SEQ ID NO: 21694 - DNA, 250 bp, Glycine max
  Clone ID: 700953634H1
cttcttcctccaagagaagtaaacaaccctcacattcaccacagcagcacacacagacaaagacaaccttgtttgtctccaatcaaaacctttcaagctggcgttcgaaaaccaagacaaccctgtccgagaaatcaagcccaagaataggagaatcatgggtgctggaggccctgatgatgaggacaccaacaggtggccaccgtggctgaagcctctgctaaaagacagtttctttgttcaatgcaag

SEQ ID NO: 21695 - DNA, 252 bp, Glycine max
  Clone ID: 700953635H1
ctctctgaagatggcttcacgcaggctcgtatcttctctgattcgatcctcccttcgtagatctcaatcgaagccctcaatttccgcatcgacatcgaggctcacgtcatccaaccgtgcctcaccgcacggatacttgctgaaccgcgtcgccgagtacgccaccgccgcggctgctgctaccactcctccctctcctcctcctccggggaagaaggagctcggcggcggcgggaagatcaccgatgaatt

SEQ ID NO: 21696 - DNA, 252 bp, Glycine max
  Clone ID: 700953637H1
gtgagagtgaagcgcgaagcgagaagcgacatggatccagacgcgttggcaaaggcattcgtggagcactactactccaccttcgacaccaaccgcaacaatctcgccaatctctaccaggaaggttccatgctctctttcgagggtcagaagatccagggctcccacaacatcgtcgccaaactcacctcccttcccttccaacagtgccagcactccatcaccaccgtcgattctcagccctcaggcgtc

SEQ ID NO: 21697 - DNA, 253 bp, Glycine max
  Clone ID: 700953638H1
gtttctctcccctgctatctctaaattgaacgtgttttctgctacttttgcgcgtgtgcattcctcttcccttcaaagctagcactttacccaccaccacaacaaccccttttgctcccacgtgcacagagtcaaacccaaagctcttcttttctctccaaacccataacaacaaaaacagagcttctctgttttctccattcccaaaacacaaaatagaataaaaacggaatcttcttcacgcataattctg

SEQ ID NO: 21698 - DNA, 249 bp, Glycine max
  Clone ID: 700953639H1
ctatgacaaagatttcagatcagatataattgaatctattctatgtgggtccctgtttccatcagagttttcaatcaatgatatagttaaacgttgggttgagattttctctggatttgataaagtggaggtcaaggctcttgaaaagatacttgagcaaaaacaaaggttacaggaagagatgcaaaagtatctagttctgaggcagactagtcaggaaaaagacattcctgaggcccaaaaaaagat

SEQ ID NO: 21699 - DNA, 253 bp, Glycine max
  Clone ID: 700953640H1
aaaaagcaagagttaccactcagtctgtactatccacttacggttcccaacatatgaacaacaacgccgccatgtagaacacaaccgcttcctttttcttcttcagaaactcttctctttctcattttcctcttctttgaattcaaagggctctagatggatacagctgaccaaagaaaaggcaagtatgctcctaccagggatacagagaacccactgttgggaaaatttgacaagccgcttccatgttttg

SEQ ID NO: 21700 - DNA, 253 bp, Glycine max
  Clone ID: 700953641H1
atttccctacctctcccttcaagatgcagatcttcgtcaagaccctcaccggcaagaccatcacccttgaggtggaaagctctgacaccatcgacaacgtcaaggccaagatccaggacaaggaaggaatccccccggaccagcaacgtctcattttcgccggaaagcaacttgaggacggccgtacccttgctgactacaacattcagaaggagagtactcttcacctcgtcctccgtctccgtggtggcat

SEQ ID NO: 21701 - DNA, 254 bp, Glycine max
  Clone ID: 700953642H1
gaaactcacagaagaaacactgacagagaagagacagttgcagcaactcctttcaatatgtgcagctgaaaggacaacagaagagacggccatgaatgaaactagctccagatctcaccaaattcttagattgacagttgaaagtaatcctcgtgattatgcagacaccgcaagatccggagctctatttgccagtgtgaattttgttgatctagcaggaagtgagcgtgcttctcaagcaatgtcagcaggca

SEQ ID NO: 21702 - DNA, 256 bp, Glycine max
  Clone ID: 700953644H1
gagagagcgagcagtttcagacacagagagaggggtttgggattggagggattgacgctgcgtctcttcctcttctctttcgatccatccctcattcctaatcctccaatccaaccacctcagcctcacactcacatatacacatatctgaacgcgtatcgtccctcctatggcttcaaagcgcatcctcaaggagctcaaggacttgcagaaagacgcaccaacttcttgcagcgctggtccagtagctgaggac

SEQ ID NO: 21703 - DNA, 257 bp, Glycine max
  Clone ID: 700953645H1
agccaccaagagcagccactgttagagaactcgttcatagaagaagacgagccgcaagaaacagcttatgattcgtcggagaagatagtggtggtcggagtcgacgagtccgatgacgaggagaattgggggagagtgccccgattctcgtggaagaagctatggctgttcaccgggccgggctttctgatgagcatagcgtttctggaccctggaaacttagagggggaccttcaggcgggtgccattgcagggta

SEQ ID NO: 21704 - DNA, 259 bp, Glycine max
  Clone ID: 700953646H1
gttcccaaattcattttaatcctaattctgcacttcttgatcattcgatttttctcctcaagatgcagatattcgtaaaaactttgaccggcaagaccatcacccttgaggtggaatcctccgacaccattgacaacgtaaaagctaagattcaagacaaggaagggatcccacctgaccagcagagacttatctttgcgggtaaacaacttgaggatggtcgcacccttgccgattacaacatccaaaaggaatcaac

SEQ ID NO: 21705 - DNA, 68 bp, Glycine max
  Clone ID: 700953647H1
atttcgtttaggttttcaattttgaagcatcgttcgaataatactctttcccaaattctctctctctc

SEQ ID NO: 21706 - DNA, 263 bp, Glycine max
  Clone ID: 700953648H1
cgctcttcaacaattgaaaatagttcaccctgccgccccaacccaacatcgtctttctctctccaatatctctaccctaatccaccctttctgaacaaaaataaaaaaataaaaaaaaacccatcgatttcttggacctccatgacttctttgtctacccatcacacctatagccgaaagcaaaaatctctcggcctcctctgcaccaattttctgagtttgtacaacaaagaaggtgtgcgcctggtcggtctcgatgacgc

SEQ ID NO: 21707 - DNA, 250 bp, Glycine max
  Clone ID: 700953649H1
tgttttgttaaagttcacttagaaatccttcgccctctcataattttatctccaatggcattgggaagcataatgcacttccttcaagataagaccattttagtcactggtgccactggcttcctcgcaaaaatttttgtggaaaaaatattgagagttcaaccacatgtgaagaacctttaccttcttttgagagccagagatactgactctgctactcaacgtttacatactgagatcatagggcagg

SEQ ID NO: 21708 - DNA, 251 bp, Glycine max
  Clone ID: 700953650H1
ctcacacttgacaaagaggaggcaccatgacaagcactcttctgtctttgctcttcttgctcttctctcttctcactccaactctaatttcctcttcaccagttctaaaccctcaagaggtcgtacaagaggtcaacaagaaaatcaatggctctatagcaagacccagaaggaacttgggctacctctcatgtggtagtggcaaccccatcgatgattgttggacgtgtgaccccaactgggagcagaac

SEQ ID NO: 21709 - DNA, 249 bp, Glycine max
  Clone ID: 700953651H1
atcgagataactagaaacagtgtgatgaaaatgaaggtccttgttttcttcgttgctacaattttggtagcatggcaatgccatgcgtacgatatgttccctctccgaatgaacactggctatggtgcccgtactccggaggtgaaatgcgcaagttggaggcttgctgtggaagcacacaagctctttggctttgagaccattcctgaagagtgcgttgaagcaacaaaggaatacatccatggcgaa

SEQ ID NO: 21710 - DNA, 248 bp, Glycine max
  Clone ID: 700953652H1
cccatctagaatcccttgacttttggaacgctcttaattctttctttctctctctgcctctcatttaaaatctttgtcaccaagaaattaatagcatcaccccaccgtttgagccaaactctgacgtccttcaacacattacataactctgcaccctcctctgttttcaaacacatatatacatcttttcctaaaaataaaaaacagaacaagaaacagagaacatagcaccctcctctgttttgaaa

SEQ ID NO: 21711 - DNA, 250 bp, Glycine max
  Clone ID: 700953654H1
aaaaaaagtcttaatttgtttcttgttcttcttcttctctctgtcgtttgttctcttgatctttgatctctgtgttatatgttgtagcaaaagaagtaaacaacacacacatatataaatatttgtaagatatatatatatatatatatgctcatgggttttcttcacaagctttgggacgaaacgctggcgggtccggcaccggaaacgggtctggggaagctccgaaagtacaattcgttctccggcg

SEQ ID NO: 21712 - DNA, 258 bp, Glycine max
  Clone ID: 700953624H1
gcacaaccaacacctccacagcctctcctacctcccggagccatggccgccgccgactcctccgccgctccatcgcaccagttgtcgcagagggagacggacatccagatgatgctcgccgccgacgttcacctcggcaccaaaaactgcgactttcagatggaacgctacgtcttcaagcgcagaaccgatggtatttacataattaaccttggcaagacatgggagaagctccagctcgctgctaggattattgtt

SEQ ID NO: 21713 - DNA, 176 bp, Glycine max
  Clone ID: 700953583H1
gaaatcttaagacttccttttgcgctgatcaatcaaggtcttctcaggcaaatgatgttcgcaagcaaatcgatggcagcgctgttccagtacatacagaacgttagttatcgccgcggatacgtactcatcatgctggtgggagtatactttgttacaaacttgatccttgctgt

SEQ ID NO: 21714 - DNA, 236 bp, Glycine max
  Clone ID: 700953584H1
ggcggtatgtcccagtcctaacctcatcaatcacagtggaaaggaggatgcagcaaacaactttgcccgtggccactataccattggaaaggagattgttgagctttgcttggaccgcatcagaaagcttgctgacaaatgttcatcgcctcgtgatcatacaaataacactagtagccgtgataccaatgatgatcattatcagaatcgtgatgatcaacatgacactcatgatc

SEQ ID NO: 21715 - DNA, 171 bp, Glycine max
  Clone ID: 700953586H1
cacctcctttccctctacaaataatgttgatgaggagtaacaggtgtcctttcagtttgaacagctttagattctcaaacaattaaggaaatcagttatggctccttctaggaaatctagaagtgtaaataagcaggttcattgcttcatttcagtctttctcttctcaca

SEQ ID NO: 21716 - DNA, 231 bp, Glycine max
  Clone ID: 700953587H1
gaagttgtgctattcaatcccaaagccacagaaataatattattcagattttagagactgaaaacatcatggccaacctcgacctcgacccattccagacaagcatcttaatcctcgtcccaatagcactcctggtggcgttactatctcgtactcgtcgaagagcaccctacccaccaggcccaaagggtttaccaatcataggaaacatgttaatgatggagcagctaa

SEQ ID NO: 21717 - DNA, 228 bp, Glycine max
  Clone ID: 700953589H1
aaacacatacattgtagtatcacttttgtctcggaatttgttcttttgagttatggcaagcttaaaagttgcatgtgtggttttgatgtgcatggctgtgatgagtgcaccaatgatggtgcaagccgtgtcatgcaatgatgtttctgtgaacctagcaccgtgcctatcttacctgatgcagggtggagatgttccagaatcgtgctgtagcggagtgaggaacat

SEQ ID NO: 21718 - DNA, 225 bp, Glycine max
  Clone ID: 700953591H1
ctataggacaaaagagaacaaacaaaaacattggatggcaacgacaactagaacaactttcctcaaacgacgcagcatttccgcttccgccgaatctccctccagctacaggatccgcttctctccgataatggactccaacgagtccttcccttccagcttccccaagtttaactccgacctcaccgcgggcctcttaaacccaatgttcccacctcccgacaa

SEQ ID NO: 21719 - DNA, 232 bp, Glycine max
  Clone ID: 700953595H1
atccatataggcatagccgcataggccaagtcacacaaataacacaacacaaacacaaaccttcaaaagccacaaaacacacacttccgatcgaagagacaccgcgtcaattaagctactgacttctgagtaatgcatggacggcagagataggaattgttttggctattaaattactttcttttgaggtttatgactgtgttgggttttcactatgagtggtgttcctaag

SEQ ID NO: 21720 - DNA, 234 bp, Glycine max
  Clone ID: 700953596H1
gaaaatgattgatagcaataacaatgtcaacatgagccaccacaatcctaatttcacaggaacaaaggaagttgttgttgaagacgaggaatcaccattgttggcgttgccactgctaagaaacagagaggaagatgaacaagggtcagggtcaaaggcatcggttactggttctgtgttcaatctctcaacaaccatcatcggcgccggaatcatggccttacctgcagccat

SEQ ID NO: 21721 - DNA, 262 bp, Glycine max
  Clone ID: 700953601H1
attttgcatgagattgaggaggaacccagagccaagatggcacttgacacttgcaagcaactcatggatctttctattggggaattaacaaggtcacttgatggaataaatgagtttaacctcataaatgttgacaaaatcctcatgaatttaaaagtttggcttagtggtgcggttacataccaagatacttgcttggatgggtttgagaacaccactagtgatgctggcaaaaagatgaaggatttgttgacgataggca

SEQ ID NO: 21722 - DNA, 275 bp, Glycine max
  Clone ID: 700953602H1
cacgcgtacggctcgacgaaatataaggttggcaacctggaattccagagggagcagctctttgggatgaagagtgggataaatttgaggatgaaggatttgctaatgatctcacttttgcatcttcaaaaccgaatcctgcatttattgatggagaacaaaatttatctgatgataattctgttcatggttcacctgtgaatgcaaatgggaagcaagaaaattctgctaatggtgattatacagttgaggatgaatcctatgcacacagtgaa

SEQ ID NO: 21723 - DNA, 272 bp, Glycine max
  Clone ID: 700953603H1
gcgtacggctcgcgcacccttctttgactgttctcccacaccacacccatgacactcctcctgctccttattctcctctttcacgcggcggaagcccagggacagtggcagctcctccacaaaaacatcggcattgtcgccatgcacatgcagcttctccacaacgaccgcgtcatcatcttcgaccgcaccgacttcggactctccaacctaaccctccccgacggaagatgccgcaacaacccaaacgagttggtcgtcaaacgcgactg

SEQ ID NO: 21724 - DNA, 253 bp, Glycine max
  Clone ID: 700953604H1
gatctgcctcctttttatcaaatctatctcttcttcaagaatagttgaaaatggggctgtctttcaccaagttgttcagccgactgtttgccaagaaagagatgcgtatactgatggtgggtctcgatgctgcgggtaagaccaccattctgtacaagctcaagcttggagagattgtcaccaccattcccaccattgggtttaatgtggaaactgtggaatataagaacatcagcttcactgtctgggatgt

SEQ ID NO: 21725 - DNA, 177 bp, Glycine max
  Clone ID: 700953605H1
cgagaatccctccctttctggctttctctctctaaaactatcatgccctccaccgcggctcccgtccttcccatatccaatccccaaaccaccgccgcacccggggcgctatcgaggctccggcgaacaacccggccttccgcgtcttcatcaacaccctctccgcgtctctccgac

SEQ ID NO: 21726 - DNA, 257 bp, Glycine max
  Clone ID: 700953606H1
gtaaagttgaagatgtggatgaagataaggagaaggaggagaagaaaaagaagaccattaaggaggtatctcatgagtggtcattggtgaacaagcagaagcctatttggatgaggaaacctgaagagatcacaaaagaagaatatgctgctttctacaagagtcttaccaatgattgggaagagcatttggctgttaagcacttttctgttgagggtcagctggagtttaaggctgtcctctttatccccaagagg

SEQ ID NO: 21727 - DNA, 257 bp, Glycine max
  Clone ID: 700953607H1
cattcattcactccaaggagggatctctctctctcactccttcttctctctcctctggcacccctaaagcttcttctgttctgtgcaggcagtttttctttggtttggttgcatcctttgatctgatcagcaaatttgagaattcagtttgggaagggccattcctctttagtgcaaaacagatcgcaggtgcctttgtgctgatggccactaatgaaaatcttccaccaaatgtaattaagcaacttgccaaggag

SEQ ID NO: 21728 - DNA, 259 bp, Glycine max
  Clone ID: 700953608H1
cctcgagccgattcggctcgagaaacaaatcaagaaatgtttcagactcagaagcattgtgaccgcctaagcctcaccaaattcactgatttggacacttcatcatcggatgacaatgatcaaaatagcactggcagggaactcaacaaggacaatgactccatggagaagaggagaaagagggtgagtggaagaagctggaaggtgaagataaaggacttcattgactcacagatgaggaagctggtggagaagcaag

SEQ ID NO: 21729 - DNA, 261 bp, Glycine max
  Clone ID: 700953612H1
aaaccctagtctccatacatcaacttgggaggttaaagagacggcaacgttgtgctgtccgccttgaccgagccagagcttcgtcttggccctcgattttgccctgtaaaactaatcccagtcacaacagaaataatcaatggcaccgaaacagaccaaggctgagaagaagatcgcttacgatgcgaactgtgcgacctaatggaggagtacggccaaatcctcgttgtaaactccgacaacgtgggatcgaaccagctc

SEQ ID NO: 21730 - DNA, 246 bp, Glycine max
  Clone ID: 700953613H1
cttcataggacttctaatgaagtctatttttttttgtttttcttatttgggtgtgggagttttgttcaaagtttgagttttaatgcttgcactggaaatgagccattgtcaagagtttatgtttccttaacgacataaaattctttttaccggtaccattatgattgcaaagataatgttttgggtctcgaacatgagacattcaaaaaaaagaggaaaaaaaaaaaaaaaaaaaaaaaagaggga

SEQ ID NO: 21731 - DNA, 267 bp, Glycine max
  Clone ID: 700953615H1
aaaggctcggataatacatctgatttggaaatgtggagcagctcagaaagtgaccataagcaactctctggagataagggtgctgatgataagccgcagaagtcccagaagcctaacaaaaatgtattgtcagcagccaaaattgcgaagaagatgaagttaaaatttactaaagcatggattgcatatcttagattgcctcttccacatgatgtttacaaagaggttcttgtttgtcttcaccaagcagttattcctcatctatct

SEQ ID NO: 21732 - DNA, 267 bp, Glycine max
  Clone ID: 700953616H1
ctctcatttttcatctcacccttcctctatttccatcctttcgtgacaacaacaacataaccctctcgcccccaacacacacctcttctttttaagggtttatcttaaaccaggatttttggcactaatttctctatgggagaagcaccagcattgcttgttgatgacgtgcaggatggggctctgaatggccttgaattgaaaaatggaacttgcaaaacaactgctactgttggcgataagatgtatgtcattggtggagctgat

SEQ ID NO: 21733 - DNA, 257 bp, Glycine max
  Clone ID: 700953617H1
atttactgttgccctgtgttattcttattggattttcatagtgggtacattgattattctgatctgctattgagaacttttgggggatgtaactgggaaggtattaacatactctgctcaagacagcatatacaaggtatttgacctaaaaaactatacaatgctgtactctatttctgataaaaatgtccaagagattaagatcaggtaatttttcttaccgtgcttgtattatttttacttttagaaaacacttc

SEQ ID NO: 21734 - DNA, 254 bp, Glycine max
  unsure (1)..(254): unsure at all n locations
  Clone ID: 700953619H1
ctcttttcgttctctccaatttcccgaaaccctaatttcctcaatcctggttttggaattcgacaatggagcagaagaggagcagcaagatgtacaacctgttcgtgaagcacttggacgggaaaaccctaaccctcctattcccctctccgatcctctacgcgagttccatcaaggatcgcctcttccaactcactggaatccccgcccaccaccagcgcctcgtcaccggctgtcnagcactcaacgatgac

SEQ ID NO: 21735 - DNA, 256 bp, Glycine max
  Clone ID: 700953621H1
ggcgcgcattaaagcggtgcgtcttttattatatataaaactctccccagttttcaagttccactactcagcagcacagcagcaacaacaacaataacaagcagagtcatagagagataaaggggctgcttaaattttcagccttttggagaaagagacattactcacatactcactcaccaccgagatccatttttttgcgaagaaagttgaagaaaaaaatggaaacaatgttgcctccgaaccaagcagagga

SEQ ID NO: 21736 - DNA, 249 bp, Glycine max
  Clone ID: 700953582H1
tcttgatggattatgatgcattgaaggctgttgggacagggttggggactgcagctgtaattgtgatggataaatctacggatgttgtggatgctattgcaaggctttcctatttctacaagcatgaaagctgtgggcagtgcaccccatgcagagaggggactggttggctttggacgatcatggaaagaatgaaagttgggaatgccaagttagaagaaattggtatgcttcaggagttgactactc

SEQ ID NO: 21737 - DNA, 254 bp, Glycine max
  Clone ID: 700953622H1
aaaattaatgcccctttcattttctctgcatctgtagtatctatcaccaatcaattccactcttcttcccatcaaacaacaaaaaatcaatctgggaaacaaaaacaaaatgccgtcattagaggaggaactcttcccatcaaccccaggaaagttcaagatcgagcggtcccaccacatgaaccgccaactctatcgctgtttcgcctccaccagcaccatgttcctgtgggccctcttcttaatcgccctca

SEQ ID NO: 21738 - DNA, 251 bp, Glycine max
  Clone ID: 700953623H1
atgattttgcgttgctaataagtgtccttaggatattagtttaagaattaaaaaaaaaaaaaatttattttgtgaatcataagaaaatgaaaaaaaaaatcatgagaaacataattttgtgcctccaaataaagatatttctactttaaattttttaagaaatatacttaaggtattggttagtatttcccttatctatatatgccatcatgccagccatgtgacttgttgacattggtatagtttggtgt

SEQ ID NO: 21739 - DNA, 242 bp, Glycine max
  Clone ID: 700953548H1
gctcgaggtacagcgtgcacagttcaattgatcaactcagatttcagggacctaagtctagctgctaatagactcgcccatcatgccatcaaacttggtggcattggctttggagcctcttttttcggaggatttgctgccattgctgcgactcaacccggggatttgggatcgtacaaaacgggtaaccaatattctcacagcacttactcattccatacatttccttcagcttgccttca

SEQ ID NO: 21740 - DNA, 249 bp, Glycine max
  Clone ID: 700953549H1
atctcctttaccaccattctagatatcagagaactttgcagctctcttaggtttttaaaaaacaccacgcaaacagcaagatggccacttccgacagtaacatgctactaaattatgttccagtttatgtgatgctcccactcggagttgtcaatgttgacaatgtttttgaagacccagatggccttaaagaacagctcttgcagcttctagctgcgggtgttcgatgggcggattctcaagtgggaa

SEQ ID NO: 21741 - DNA, 243 bp, Glycine max
  Clone ID: 700953550H1
aaagaaacaggctttatttgagcactttgggactctcaattctcagggttaccttctctatcagcttctgcagattagctggaagaaataaagaaagaaaaagataacaaaagttgttcaaaggccatggatgttgcacattttttgtttggaatctttgggaatgcttccgctctgttcctcttcttggctccagtgatcacattcaagaggattataaagaacagatccacagagaagttc

SEQ ID NO: 21742 - DNA, 243 bp, Glycine max
  Clone ID: 700953551H1
caggggaaaacagtattcacttcctatggtactacgttgtatcagctatttcttttatttaccacatccaataatccagatgtttgggttcctgcatacaagtcgtcacgttggtattgcctgtttttcgtactctttgtgctggtgggagtttactttgttacaaacttgatccttgctagtgaagccgcctcatgccgtttattcccccttagattccactggcaggatagatgatcctga

SEQ ID NO: 21743 - DNA, 239 bp, Glycine max
  Clone ID: 700953552H1
cttcctcttctctctctgcatctccatctcaccaaatacatacatggacaaccgacaccaccaccgtgaattcaccttcttaagctccgcccacttcctcgatcacatagatcctccttctatcaaagaaatggatttcttctcaacttcatcgcctcgtgatcataaaagtaacactagtagccgtgataccaatgatggtcattatgagaatcgtgatgatcaacatgacactcatg

SEQ ID NO: 21744 - DNA, 238 bp, Glycine max
  Clone ID: 700953554H1
gtaggactcttacccttcttcagtttttctcattttctggttctgttgttgcagacgctgacatgacaaaacacgcttcttcctaatcaatcctctttgctactttgactcaccaatataaatatcaattataaattgccgcgtccattgcttcatttcactctttctcttctcacatagggtcatgagctccggcgtgcgctcgtgtccgccgtcggacagggcggcgctgctggca

SEQ ID NO: 21745 - DNA, 236 bp, Glycine max
  Clone ID: 700953555H1
tattttcttgtcgttgagaagcttcgcgaacgaaagcaaagaaccctagaccgtcacagaaccattccatagccatgtctggtgttggccctctttctcaggattgggaacctgtcgtcctccgcaagaaggctcccaccgccgccgccaagaaggacgagaaagccgtcaacgccgcccgccgctctggcgccgaaatcgaaaccctaaaaaagtataatgctgggacaaacaaa

SEQ ID NO: 21746 - DNA, 236 bp, Glycine max
  Clone ID: 700953556H1
gggttttctcgctttttgcagataagcatcaataggatactagatcatggattggtactatgggaacggcattaatgattatctggttcccagagatcaggatttattggacaggcatccttcaccagactattggtcaaactggggaataagtgcaactgaaggttttaattcacctaaaaatctttttatcatggatttctttgaagaaagattcaataatcaaattgagcttg

SEQ ID NO: 21747 - DNA, 234 bp, Glycine max
  Clone ID: 700953558H1
gaaaccagatgaacctgtattagattggtacagcagaatgaaaatagcatcaaatgcggcgaaaggactatggtacttgcacgacaaggccaatccttcagtcatataccgggacttgaaatccgccaacatcttgctggataatgataacaatgcaaaactatctgattatggactggccaaacttgctggtaaagataagacgaacatcgtaccaacaagagttatgggaaa

SEQ ID NO: 21748 - DNA, 207 bp, Glycine max
  Clone ID: 700953559H1
cgtggagatcgaatcctctagccctctcaactcatatttcccacgtagttcgtcggtcaaaccaacgattctcttctcaaagtaatagagagatctttttctggttagacttctatcaatgcaatgaaagaaccatcccttcctatttctttgtcctgtcagaaatagaataagacccaaaagagcccttctttaccactttagggg

SEQ ID NO: 21749 - DNA, 238 bp, Glycine max
  Clone ID: 700953561H1
tctcgagccgattcggctcgagctcttttgggaattactcgaatgacgcattgcagtatcctagtgatgccctcatgcaaagatactatggatttgtctgctgctgcaacaactgcctcccccgtctttgttgctgctccagcagagaaaggccattttcttatagactttctcatgggaggtgtttcagcagctgtctcaaaaactgctgctgctcccattgaacgtgttaagcttt

SEQ ID NO: 21750 - DNA, 236 bp, Glycine max
  Clone ID: 700953562H1
cttcttatagcttcatcccaaaaagctcttttccttctaaatttgattccttagttcagcattctattattatatatggcttcttcaccttcctcagaaaacaaaaacctagagggagtagctggtggtgccggagagaaacccattccacttggtgagaacgttctgcagaagcatgctgcattctttgacttgaataaagatggtgtcatctacccatgggagacttttaaagg

SEQ ID NO: 21751 - DNA, 235 bp, Glycine max
  Clone ID: 700953563H1
ggaggggatttaatctgttgtgatggctgtccatcaacatttcatcagacatgcttggatatacagatgcttcctcctggtgaatggcattgtcaaaatttacaggtgcaatttggacaatgccattcaccaggaggaagcatctatatatccaagcagctctgatgaatggcattgtccaaattgcacctgtaaattttgtggcatagccagtggaacttctgataaagatgat

SEQ ID NO: 21752 - DNA, 180 bp, Glycine max
  Clone ID: 700953565H1
aagccatagaaattaagtgttcatagaagacattgattagaaagtatatataccaaggggaagcagcaaaagaagcagcaccttaggaccagttgcaatcaacagttaagtggtatcttgaggaactccatgtttggagccagaaaaaggccaagatgctgggcctcttgtacatgattg

SEQ ID NO: 21753 - DNA, 241 bp, Glycine max
  Clone ID: 700953566H1
ccttgcttattgaaggtaaccatgttcgattaagtggtcaggatgttgaaagaggaacttttagtcaccgccatgctgtagttcacgatcagacaacaggagagaaatattgtcccctggacaatgttataatgaaccaagatgaagagatgtttaccgttagcaatagttcactttctgagattggggacctaaaacggattatccaaacccaattgggaatcccggttcacaaccaaac

SEQ ID NO: 21754 - DNA, 178 bp, Glycine max
  Clone ID: 700953567H1
caatttgctcacttttagttttctctgtctctcattccaaccagctagttggttattctttccaccggtagttgccaaatcttcggtggttaaacgcgtcgttcacacggaagctctatcttagaccttgacgtcaaactagctcattcccttccaaactgttcattctctttcattg

SEQ ID NO: 21755 - DNA, 76 bp, Glycine max
  Clone ID: 700953568H1
gttcaataacatagagccacgtggttggcgacaagctaagacatgactacgcggtttcgctgttatctttgttcca

SEQ ID NO: 21756 - DNA, 236 bp, Glycine max
  Clone ID: 700953569H1
caaatcatacagtgaagatgatatccataagagcatcaagtacaacgtgtgggcgagtaatcctaactggtgtgacatgcttcaatttgcattccctctctgtagcagcagcatcagtgatggaacgtgctcgcaggctagcaaaccgcgccattctgaggcgtctggtttcagaggcaaagcagcatcagaagaatgaatccgtgctgcactcttccaccacccccatgctgctc

SEQ ID NO: 21757 - DNA, 76 bp, Glycine max
  Clone ID: 700953570H1
ctcaaccacttcacttttccaatcatcgtattctatcatcaccagcgtttggaacccacgctgcattaacaaacca

SEQ ID NO: 21758 - DNA, 216 bp, Glycine max
  Clone ID: 700953571H1
aaagtgcttgtcaagtagtatctgccactgaaattgtctgaaatgaaacattctgatcattagataacttatcacattatgcaggcagcagcaacaacaccactctatcaactcgtgagcttcaagccaaagcttcaaactttcccttcaaaatctcaactttgccccttagggacccctttctgcagactaggaatggcttctgtttctgggttt

SEQ ID NO: 21759 - DNA, 232 bp, Glycine max
  Clone ID: 700953572H1
tgttttttgcttcattgtttttcgatcttatttgaaagtagcttttaaagcacatcacgttgattagaagcatgtttcttgaaaaggggataaatatactatgtttgggtaccttgtggaaatgttatcatgtttggtatagagctattgcactactttactttggatcggcagaaatgttgaggctcaagttcctggtactatcttctggcactcaagaaaagagttagct

SEQ ID NO: 21760 - DNA, 233 bp, Glycine max
  Clone ID: 700953573H1
cggcaattccgatgaccactcccgaccgtcgttgatcggcgaaaacatcgccgccttccacggcttctccggcggggcaggcactgcctccaccgccgcccctcgccttcactataacctctggggtccggtggttgatcagccgggaacgccgtctagcagctccggtggaggcggtttccggcggccgagtcagcagggtttgtctctcagtctttcatcacagcaaacaa

SEQ ID NO: 21761 - DNA, 231 bp, Glycine max
  Clone ID: 700953574H1
ttcaaataccctttaacattatttttaatattcacactgaaaaaaggtaataaaaaaagaagctttttttccttgagcatcacaatcggacacagaccctcttaagaaaaaggaaaaaaaagccttatgtgaatgtgacaatggaagctaagcctcttcgaactgttccctcttcacacaacacttctggtttctcactttctcttccactctctcttctttagcccatca

SEQ ID NO: 21762 - DNA, 219 bp, Glycine max
  Clone ID: 700953547H1
cctttctttaaatcccaatattttctgcgcgaattttgctagaaaccgttagtgggtatcctcaaaatactagattttcgattcgtttggtgaacggatttttaggtgtgattattacgttttttttttgttcaacaagctatggaggtttcggtgattggaagctcacaagcgaatctgggcgcgtctgaattgccttctagggaagtgggatttgga

SEQ ID NO: 21763 - DNA, 227 bp, Glycine max
  Clone ID: 700953576H1
ggaaggtctcctcctaaaatgattgaaggccctgatggtagaagcttgcagctgaaatttaggtcccggttgtctcttcccctattcacaggaggaaaagtggaaggcgagcagggggctccaatacatgttgttctgattgatgccaatagtggaagcattgtaacatctggacctgaatcctgtgttaaacttgatgttgttgtccttgaaggtgattttaacaa

SEQ ID NO: 21764 - DNA, 232 bp, Glycine max
  Clone ID: 700953577H1
ggaactgttgatggcagtaccgctcaactacgagatgcttgaaagtagttgcttttactgtatttattgatattgggttagtgttccgtgtaccgcaccgagccttaataggttgtttgagattctgtaagtaactactccgtgcttcaattggtcaaagtaaatgaaatgaaacgttgatatcaatcactttgtatataagaaatcattagcaaaaatcttaagaaaagaa

SEQ ID NO: 21765 - DNA, 235 bp, Glycine max
  Clone ID: 700953579H1
gtttatttttttcttcctttttctctttttataatatcagcccccaaactcccttgtgtacagtgatcgatctcaagaagaaagactcaaaaaatggaggggaatctagagaagaagttgctgagcaaagaggaagtgtcagaagaagataatttatcattggtgaagagggtgtgggaagagagcaaagagatgtggatagtggcagcaccagccatattcacaaggtttacga

SEQ ID NO: 21766 - DNA, 221 bp, Glycine max
  Clone ID: 700953580H1
gtacaacgtgcaggtcagagcacccttcagatacttctctaatgttgccattagcaaaagtgaagagtcccttgaattcaaacaagaatggttacaaatgaaggatatgtatcacaatcttagccaaaatcttgaagaggtgacaagcaaaacaattccattccaacttgatggagaatatgcagttttctcaaatacagagcaaagaaatcatccaacca

SEQ ID NO: 21767 - DNA, 179 bp, Glycine max
  Clone ID: 700953581H1
aggaggaacaaccatgttccctggtattgctgacagaatgagcaaggaaatttctgcattggcacccagcagcatgaagatcaaggttgtagcaccacctgagagaaaatacagtgtctggatcggtggttctatcttggcatctcttagcacctttcagcagatgtggattgcaaagg

SEQ ID NO: 21768 - DNA, 244 bp, Glycine max
  Clone ID: 700953508H1
cgatttcgttctgcccctcccgcaaatctcaaacaacaaggcgaagctgccaataataatgggagcgcgtgggagggttctgaaccgcttttgagattcttgaattccggggacacccatgatacgacgtcgtcgcctaccttacgagaattcgtggataataaggttgctaataatagtaaacctgcgaaggagtcatcagcacctctgagtcgcatgaattcccaacagggttatagtactt

SEQ ID NO: 21769 - DNA, 239 bp, Glycine max
  Clone ID: 700953511H1
ctctgagtagaagaagatcaagatcaaggaagaggatgtcgaaagaggatgtgtttgttggcgcgatcgaccaaggaacgagcagcagcaggttcataatatacgacgcgaagactggagtagtaggatgccaccacgtggagttcacccagttctacccgcaagccgggtgggtggagcatgaccccatggagatcttggagagtgtgaaggtgtgcgtggccaaggccgtcgataag

SEQ ID NO: 21770 - DNA, 238 bp, Glycine max
  Clone ID: 700953512H1
cttttgtctttgtttctcttacaattttattttgcttctcttccttggagaagagttttgcctttcaaacaacaaaggaggacacagaaagcaacaatcttcatcaatatactcatcttgttcacctcagctcactccttccttcatcttcctgcagctcttctgccaaaggtcccaaaagaaaagcatcattagaagtggtacacaaacatgggccatgctcccaactgaataatca

SEQ ID NO: 21771 - DNA, 241 bp, Glycine max
  Clone ID: 700953513H1
gggttctgagctcatacactgcaatgctacctacgatagaaagtctcttctcatcaatggttagaggagaatcctcatctcgggctccattcactatcccagaagcacccctaaggtttgtgtttcattttcttcactctttatgtgtttcaatcttaaaatgtgtttcaagctttgtgttgttttgtttgcttcaaatgtgggaggatctaattcggaaggccaaacacggaggacttga

SEQ ID NO: 21772 - DNA, 243 bp, Glycine max
  Clone ID: 700953514H1
attacaaggagttttttttatatagaattgagaaaggaaacacacacaaactaagcagtagttcagctatttatactgattttttacaaataaacaactcactaatattagtaatttgttacaattgttttaactacaagcttagtttgttagaactattttaattaccaacttaatttgttacttatgtgaaccaacctatcaacaatttgcatatataggatatgattacgaaatttcaga

SEQ ID NO: 21773 - DNA, 256 bp, Glycine max
  Clone ID: 700953516H1
ttcggctcgaggaaagatcaccaatcggccccttgctggtactgttagaagaggaaaaacaccaaaagaagatatcatgttggagaaacaacttttgaatgatgaaaagcaatgtgcagagcacgtaatgctagttgatttggggagaaatgatgttggaaaggtctccaaaccgggttctgttcaagttgaaaagcttatgaatattgagcgctattcccatgttatgcacatcagctcaacagtcacaggggag

SEQ ID NO: 21774 - DNA, 243 bp, Glycine max
  Clone ID: 700953519H1
gtctttgtttcttgttgagtaacaactcaacctgtgacagtttcaaatgagtgaagcaacggcaagattcgaacggcgggtcctggtggcggtggacgaaggcgaggagagcatgtacgctctttcttggagcctcaggaacgtaattttccaaaatcccatatagtacttagttgcagcttttcaattcttcttcttctcatgagttctactctttcttggaaagtgcttttgaattctgtt

SEQ ID NO: 21775 - DNA, 242 bp, Glycine max
  Clone ID: 700953521H1
gtggaacctctctctctctctctctctctctgcggaaaccggaatatctcagttctctgatcagatccatccgacgtcgtttcagtgataatggctccgttcagcggcgatgagacggcaccgtttttcggcttccttagagccgcagctccttttcttttcggtcaatgctagcggtcaattttgtggagtggctgagatgaccggacgtgttgatttcaataaaagtatggatttctggc

SEQ ID NO: 21776 - DNA, 241 bp, Glycine max
  Clone ID: 700953522H1
ccgattcattaacttcacacacagacacggtgtctccaccacaccatagcatatagtactagtagattaaacgccacagaccatattcacacacttcgcatcggaaacccctcaaaatgtttaaaatgggtgattaaagagacttcacttttgggattgagcgaatccaagaagcttctagtacatgcttctgattccaatttaaatggtggcttggaagttcatccaaaacaaagttcta

SEQ ID NO: 21777 - DNA, 218 bp, Glycine max
  Clone ID: 700953523H1
caacaacattcattcattcacagctgtcacgccgtgaacggaaaatggcaacggcgagacgcatttcccgcctatcaccgaatgcaacggaacgacaccgtgcgagtctgtggccgccgacctcgacggtacgctcctcatcacccgtagctcgttcccgtacttcatgctcgtcgccgtcgaagccggcagcctcctccgaggcctcatgctcctgg

SEQ ID NO: 21778 - DNA, 237 bp, Glycine max
  Clone ID: 700953526H1
tgaagaaggtgtgttgaggagggaatcaaaggaatcttttgaagggtgaagagagtaaagaggtgaagtgttggtgggttttgctcagatttcttctctctgttgaggatcatgaaattgaagtagatatacttgacaggtttgaatagtagggaatgggttatgctgcagttgaagttgctgttttcccagatgcggattacttagacttttaggggatgttattctgattagtga

SEQ ID NO: 21779 - DNA, 231 bp, Glycine max
  Clone ID: 700953527H1
cacaaagcacaaagcaaagctcatccttgagttaaaaaatggcagcagcttcttccatggctctctcatccccatccttggctggcaaggccgtgaagctgggcccatcagccccagaagtgggaagggtgagcatgaggaagaccgtcaccaagcaggtctcctcaggaagcccatggtacggcccagaccgagtcaagtacttgggcccattctctggcgagcccccgt

SEQ ID NO: 21780 - DNA, 235 bp, Glycine max
  Clone ID: 700953528H1
ctagagttttaaaaatggcagcagcctcctccatggctctctcttccccatccttggctggcaaggccgtgaagctgggcccatcagcccccgaagtcgggagggtcagcatgaggaagaccgtcaccaagcaggcctcctccggaagcccatggtacggcccagaccgcgtcaagtacttgggcccattctctggcgagcccccgtcctacctcactggcgagttcccaggtga

SEQ ID NO: 21781 - DNA, 242 bp, Glycine max
  Clone ID: 700953532H1
ggcatctttggagcaaaggcaagaagaagggagaagggggtttctgaaactgttgcttggaaatctgggagttggtttgcctgcactattgggaagtggcaaagcttatgctgatgaacaaggggtttcatcctccagaatgtcttactccaggtttctggagtatttggacaaggacagagttaaaaaagtggatctttatgacaatggaaacactgctgttgttgaggctgtttcgcccg

SEQ ID NO: 21782 - DNA, 153 bp, Glycine max
  Clone ID: 700953533H1
cctgagtggattgattttccaaggggtgatcaacatcttcctactggcgtaatagttccagggaataacaacagttttgataaatgcaggcgtagatttgacttgggtgatgcggactatctaagatatcgagggatgcaagaatttgatcac

SEQ ID NO: 21783 - DNA, 238 bp, Glycine max
  Clone ID: 700953534H1
cgacggtgaaacttgttttccttgcgcgaagtttggcattcccccaatcgcttcatcctcatctacttaaccctaaccccacactctcacatactacatatataaaaccgccgtcacgatgatgctcagaattcgtagccgcgatggcctggatcgagttagcttcgaaaaatctcggggcaatggcaaagtcggttctattggtgctacgaagatgttcctgcctatgatgagttag

SEQ ID NO: 21784 - DNA, 243 bp, Glycine max
  Clone ID: 700953536H1
ttcagattggtcaagctccttttactccccgcaacaaaacaccacctagttgcagattttttcttcttcaaaaatttgtttatctttatcctaatttgatttggctttaaggttttccattatagcggttttctgaaagaatcccctgggatcagcaacgtctcatcttcgccggaaagcagctcgaggacggccgtaccctcgccgactacaacatccagaaggagtcaacccttcaccttg

SEQ ID NO: 21785 - DNA, 153 bp, Glycine max
  Clone ID: 700953537H1
cacacaccaatggaatcataacaagaaaaagataaacactccccagagttcaaagagcaagcactatttcctctgttgtgtcttttttcaatttgttttccctctctgtagcagcagcagcagtgatggaacgtgctcgcaggctagcaaacc

SEQ ID NO: 21786 - DNA, 238 bp, Glycine max
  Clone ID: 700953538H1
ctcaagtcccaacctgcttcttattgaagtacccaaagcatgtctacaaccgaaaaggggctttcaagtgctttgaatgccagaatcgaagggtgcggcactgaaactatagtgtttgctcatggctatggaacggaccagtcgatatgggacaaaatacatcctttggttcttgctttaaattaccgtcttgttacgtttgattgggcttttgctggaactgtgaaggatcagagcc

SEQ ID NO: 21787 - DNA, 240 bp, Glycine max
  Clone ID: 700953539H1
acaaaattaaacatttcgaacaaaaatagattcttctgcttccaacacaaataaacaccactcaatctaccttgtacacgtgactcatctcttcatccaacactagttgagttcttagcttattggagaaaatttgtgttgaggcaaattttgtttccttgcattatcacctcatgacgatgtcaggctgcacaatggccagactctcgatgacctgagtgaggctttactggaagattg

SEQ ID NO: 21788 - DNA, 237 bp, Glycine max
  Clone ID: 700953540H1
tccattttcttgtgttctgcctccatcgagtaccaagaaaacagaacaaactaaaaatgggactcttttcttctacaaaactgcttccaattgttgtgctgttttctcttcttttcacatcttatgccacaaattcagctgaaaacaactttgttcactgccttgtgaaccattctgagccctctcaccccatatccgcagcaattttcacacaaaacagttcctcattctcttcag

SEQ ID NO: 21789 - DNA, 241 bp, Glycine max
  Clone ID: 700953541H1
cggctcgagatcaaaccacacacctcacctattagaagtaacaaaagaccctccctctcaaaagactaaacaagtataaaaaagaaggcacttccctcaaacagaaactaccctctatctctctcttttcaagccttaaatgagtaaaaaagagtgaagacaggaaagaaaggagcaccatttttggtttgagaaacataattagcaagagagttcaaaatggggaagagagagtttaatg

SEQ ID NO: 21790 - DNA, 236 bp, Glycine max
  Clone ID: 700953542H1
gaatctaatataacgttattcatagtgaaaataaatcgagccaaggaatttattaataattgtcttcatttcatattagctgcctgctgcgacttccttatgcataattttactgtttatagaaattgtgaagctatactgttgtaattgtcatgtaaattgttccctttttcatcttacttgatttggtaaactccggttacttgtatccaaataagatgggccatttgtattgc

SEQ ID NO: 21791 - DNA, 234 bp, Glycine max
  Clone ID: 700953544H1
ttttgcaatcagagagtgaagagaagagaagaggttgatgggtcggcgaaagaacaacagcaacaacaatcagtgctcctcaagcaaggaagacgctgacatgaatagcaaccaccttcggtttgaagaagctgacgaggctgtcgacgagagttccaacctcgaccaatccatgtgcgacatcgaagaatccgatgataaaaccagcgccgactattacttcgattcctactc

SEQ ID NO: 21792 - DNA, 236 bp, Glycine max
  Clone ID: 700953545H1
tctctctcctcacgccaaaccacaccagcttcgtcccttcatctcctcactttctcatttgtggaattacttttgtctcttcctctctgatcttccacaggctcctattatcccttttgctttcccaatccttttcgcgaaaaaaaaaagttcactttctattttggcccccttttgtggttcctgaaacgcgttaagggttctgtttgtgttattgggtcaataatggggtcctg

SEQ ID NO: 21793 - DNA, 243 bp, Glycine max
  Clone ID: 700953507H1
tcctcgtgtgcgtgaaaacgaagcaacgccacacgatggtgttctacttcaaagcgcgccctgaagccggcgatttcaccatcttcatgggcctcgacaagttcgagaacgaggaactcatcagatacggttttcccgaagatatcaggttccctactgttcgtgaggctgcatctagtaaagacaaaattacagagaatgctagcaaaaataggctgaagaagagaattttggctgacattt

SEQ ID NO: 21794 - DNA, 238 bp, Glycine max
  Clone ID: 700953546H1
atcccttatcctcccaaaaccaaaccatgtctacctccgcagcttctctcgcactcccaaccctcactctccgaactcgacaacctctctgttctccccaatgcttctcctcgtccctctccctcacccctaactccaaacccatttccatttccgccgttttcctcaaaacaacgctgtcgtcgtcgtcgccgttgtcgctgtcgtctcgcttcgttccccatgtctctgtgttgga

SEQ ID NO: 21795 - DNA, 247 bp, Glycine max
  Clone ID: 700953472H1
gtctggtgcataaacctcaacaacacactcttcaattttctagggtttgagttttgctccctttttcttcgccttctccaatggccgcttcctcgctcctgagatccgcgcttctcgctccttcctcctgcgatcgccccaaggtatataccaatgcctcaagttctaatttaaaatccaagggattacatagcagcatttttggtacttcaattcaatgtgactccttagtcttacaaaattgcaa

SEQ ID NO: 21796 - DNA, 246 bp, Glycine max
  Clone ID: 700953474H1
tggagagcttcacttggcagtgagattcacttgcaccgcatgggttaacatggtagcccagtatggtaggcctttactgcccaaaatgcattatgtccaaccaatacccgtcaggcacatagattggctcgccaccaggtcatgcagattgtggcagctcgcctatctagagccgagccaccccttaggcgtgaagcagttgagtacatgctcgacgttgactaccacatgtggagtctaaggaga

SEQ ID NO: 21797 - DNA, 242 bp, Glycine max
  Clone ID: 700953475H1
cttagccatgtctctcccacacactaggaatgtgtgttttggtgtacggttcttgctctggctgtggccacaagtgccagaaacgttcccaaccccaaggatgctggtcttaaggaccagaagaacttctcagctatggtggagttggtggttttccgggattgggaacaatggactgccttttggaccatactgtgccggaataggtggtggttttggcggaggtggtggacttggtggtg

SEQ ID NO: 21798 - DNA, 240 bp, Glycine max
  Clone ID: 700953477H1
atataatagcccaggaatagaaaattccaacagcaccgtcacttcctctaccgctttcttcctcctcattaaggcgcaactctctctctctctttctttttctttgttaggtttggtgacacttagtagaaagagcgtgcgaagagggtggggagaagatttagtgttgtggccatggcggagtctgagaagagtactgtgcttgttacgggagccggtggtcgcacaggacaaatagtt

SEQ ID NO: 21799 - DNA, 240 bp, Glycine max
  Clone ID: 700953478H1
gcaacacaacaaaaaaagactacacagagagaagcgtcttaataaacgctcttctctgaaaaacctgatttcttctcttcttctcttctctttcgtttcgatcttcgatctctgaaaatgagagaggcatttcaatccacatcggtcaggccggtattcaggtcggaaacgcctgctgggagctctactgcctcgaacacggcattcagcctgatgggcagatgccaagtgataagactg

SEQ ID NO: 21800 - DNA, 239 bp, Glycine max
  Clone ID: 700953479H1
caggtcgcctgcccttgctatttggacaagacaaatcaggggtttccaaataagttaaacatgataaaacggtttccaagtaggaacaaccagaggtccaaaggcatcaaggtaaagcatgttctcaaattgttctgttgcttggtgtttgcttctggttgatctaccaggttaagcacaatcatgataaacagaatgaatttgccaacgattcaaaactgtcagtcagtacacagaca

SEQ ID NO: 21801 - DNA, 241 bp, Glycine max
  Clone ID: 700953480H1
attcattctggatttctaatttctcgccatacacataattgtctcatagacataacaaagagagagatgcgaagcatggcaagctcggcttcctcgcgaggcattgcagccatcgtcggtgtgggcccaaccttggcctctccatcgctcgcaagttcgctcacgaaggctacacagttgccatcctcgcgcgtgacttggggaggttgtcaagatttgctgacgaaatagcgagggaaga

SEQ ID NO: 21802 - DNA, 247 bp, Glycine max
  Clone ID: 700953481H1
aatagattctttccatcagtttgctggggtgaagtggctgcgggagaagcctttgtctaagtttgaagatgtgcaatggctccttatacacaaggcagaagaggagaaactcattcaagttactattaactgcctgagcagtatcttaataagttaatagaccaattcaatgaatattatattagtgacagtgttagcagatctgctcagctgtggaatgatcagaggaagttgatactgcatgatg

SEQ ID NO: 21803 - DNA, 173 bp, Glycine max
  Clone ID: 700953482H1
aaacaaaccccttctctctctaccacctctactttctctctctagggtttcgtcgcgaactctcactctcgctttcgctctgcttgtcacgattgtagggttccaatcctcgcgcgaattgcatcacagctgtgatcgaccgagttttgattcttccccttcctcggggtgtt

SEQ ID NO: 21804 - DNA, 241 bp, Glycine max
  Clone ID: 700953483H1
cttgtttcacaagtttccttggaagcggacgcagttaccctctctacctttcttctattttctcattcctgcctctcttctcaacatggccgccaacagatggttgaaacctgaggtatacccactcttcgcttcagttggtgtggctgttggaatctgcggtatgcaacttgttaggaatataaccaccaatcctgaagtcagggtgaccaaacagaacagaactgcaggaattcttgag

SEQ ID NO: 21805 - DNA, 243 bp, Glycine max
  Clone ID: 700953484H1
gcctcccataaaaatgaagaatactatcttctctgctctctttctactttgtgccttcaccacctcatacctaccttcaaccaccgcggtggtcgataccgacggtgatattcttcagaatcctggcaatactttatcttgtccgtttttcgacccggcggcggagtagaattcgccgccactggaaacgaaacttgccctctcactgtcgtgcagactctcttcgggaggggctttccagca

SEQ ID NO: 21806 - DNA, 243 bp, Glycine max
  Clone ID: 700953487H1
ctttccctttctctctttttttccttcatcaatggtggcggtaacttttgagaaagctctgtcttttggctcttggagctcaaaagcaagagcaccttagattataagatcggtttcgctttcattctgcccttttctcagagagagcaacgaggtcttatagttaaatctgatgctgaagattgaggaacttaaagtttgaagtttgaggagtgtttgtgattacaaagaatatggatcaaa

SEQ ID NO: 21807 - DNA, 239 bp, Glycine max
  Clone ID: 700953488H1
catcttctgccacctgtttctaactccccaacccaagaaatttccttttacccctttcccctctcctcttttcttattcatcaaaattcctctttggtgtcctctccctcggtcaactccgtttactataatatgaccactcttttcttcctcttcttcaacttcaatactcacctttgaatggattctaattcttcttctccaagtcccaacaaccacgcttccacaaccaaaatcaa

SEQ ID NO: 21808 - DNA, 242 bp, Glycine max
  Clone ID: 700953489H1
atcaaaatgaagaaacccaatgctgcgatccgtgatgctaatgctgctttggagattaatcctgattctgctaaaggatacaagtcacgtggcgtagacgagcaatgcttggtcaatgggaagaagtgcaaaggatcttcatgtggcttcaaagttagactatgatgaggaaataaatgctgtacttaaaaaggtggaaccaaatgctcacaagattgaggaacaccgtcggaagtatgaaa

SEQ ID NO: 21809 - DNA, 165 bp, Glycine max
  Clone ID: 700953490H1
acgaaagtaaaacgaaactcaatcatgtacattcaccctaagcatacttggagaatgatttgttatcaagtccccattagtcatgttggactattcctttttaatgtgttacatgaagtaaatgtgcttggtgctgtggaatttaatgatgctacgttggcagtg

SEQ ID NO: 21810 - DNA, 239 bp, Glycine max
  Clone ID: 700953491H1
caaaattgtaagctacttgaggagaaaaatttactacttgggagtgttttggagctcaaagatgcaaagtttgctgctgaacaagagaatagtgtaatcctccatgaggcactggctctaaaaaaccttagtttggtctatgagagctttttcactgagaaggtcttggaacagcgtgcacttgctgaacatctcagcgatcttcactctgtgaacagtgaccttaaacaggagcttgt

SEQ ID NO: 21811 - DNA, 237 bp, Glycine max
  Clone ID: 700953493H1
aaaagcgtcacgagcgagagaggaaggaagagaagagagatagggagagcgagcgtgagaggaagatcttcgatttagggttttcaatttcgtattcagcaaggcggcgagtgtgagatttttagagagagagaggtgagaacgctgagtgctctgctgagagattccattgccccaagagaaggaagaggaggagaaggtggatatatatatatatatttttctttctgtttattt

SEQ ID NO: 21812 - DNA, 238 bp, Glycine max
  Clone ID: 700953494H1
gtaaagagaaatgaatgaaatgatatagttgagtttggagcgaaacagaagagaagaaagatccaccgatgaagaaaaataaagagaaagagaaagagaagtgcgtggctgtgacaagccctgtgagtggcgaagacagcgatgataagcaacgccctgcctttccctcggtcagattctcttcccgcaacgcttcttccaaatacgatttcgtcaaggtgaaggtgtggttgggtga

SEQ ID NO: 21813 - DNA, 237 bp, Glycine max
  Clone ID: 700953495H1
cgagaacattatccaagaataggtgtgctgaaatttctggcgtgcagaagaccaataatcagaccataaagtttttaccgttttcaaatgataggcgtaaaaatggccttaacacattcaacactttcccacgaatgtttcagagggctggttcagctcagtttagaaggcctctccttcatttggtgtccactcaagaatcaaggcacaggtacctcacccaatgtgttccccttc

SEQ ID NO: 21814 - DNA, 238 bp, Glycine max
  Clone ID: 700953496H1
catcattgtattgtacagcacagccccaacttcttacttgtgttctgttctgttctgttctctctttctctttctcttctttttttccacgcgattctttcaattttcaattttgattcaatcaattcttcttttacattctcgattccttcctttcttacttaaaaattcttatattatgcatcatttctcaccaaccacctagggtttctctccgacgttaggtttttttttctcg

SEQ ID NO: 21815 - DNA, 256 bp, Glycine max
  Clone ID: 700953501H1
aaaagattcagtgaagaacaacgttaatggcatctcttggtgtgcaagcagttcatcctcctccattaacatccacctccgacccacctcctctttttgatggcaccaccaggttgtacatcagttattcttgcccctatgcacaacgtgtatggatcgctcggaacttcaagggactaaaagacaagatcaatttggtgcctataaaccttcaagacaggccagcttggtataaggagaaagtctactctgaaaa

SEQ ID NO: 21816 - DNA, 252 bp, Glycine max
  Clone ID: 700953502H1
taacaggcgaactgatttcgttatcagaacaagaattggtggattgtgatactggatataaccaaggatgcaatggaggacttatggactatgcatttgagttcataatcaacaatggcggcattgattctgatgaggattacccataccgtggtgttgatggtagatgcgacacatataggaaaaatgctaaagtcgtttctatcggggcctacgattgtgcacagaaagtgcttctaaactgtttcgata

SEQ ID NO: 21817 - DNA, 248 bp, Glycine max
  Clone ID: 700953503H1
ctctgatggattatgatggattgaacgctgttgggacagggttggggactgcagctgtaattgtgatggataaatctacggatgttgtggatgctattgcaaggctttcctatttctacaagcatgaaagctgtgggcagtgcaccccatgcagagaggggactggttggctttggacgatcatggaaagaatgaaagttgggaatgccaagttagaagaaattgatatgcttcaggagttgactaaa

SEQ ID NO: 21818 - DNA, 244 bp, Glycine max
  Clone ID: 700953504H1
gttcattctctttgcgcagttccctacctctcctttcaagatgcagatcttcgtcaagaccctcaccggaaagaccatcacccttgaggtggagagctctgataccatcggctgcgtagttgtcaagatccatgctgatggaccattctattgtggtcagctttgctcaaggtggaaggacggttgtgacatctcgggtttatccaacaaaggcaatctatggagctgctaggttgttcttgtt

SEQ ID NO: 21819 - DNA, 247 bp, Glycine max
  Clone ID: 700953505H1
gaagaagctcctccagtgccacctgcaccgcccatagtggccatgctgccatcccctggcatgggccacctaatcccaatgatcgagttcgccaatcgagcagggcgttaccaaaatttgcttggaacgcatcagaaagcttgctgacaactgcacaggtctccaaggttttctggttttcaatgctgtgggtgggggaactggctctggacttggttcccttttgctggaacgcctttcagtggac

SEQ ID NO: 21820 - DNA, 247 bp, Glycine max
  Clone ID: 700953471H1
ggaacacaaaaaatggcagatattcctcgggtgaagcttggaagccaaggcctggaggtttccaagttaggatttggttgtatgggcctaagtggagtgtacaacgatcctgttcccgaagaggttggcatctctttgatcaaacacgcattcaccaaaggggtcactttctttgattctgcagatttttatggagcacgtgccaatgaagttttggtcggaaaggctctcagggactttcctcgag

SEQ ID NO: 21821 - DNA, 243 bp, Glycine max
  Clone ID: 700953506H1
ccttccccctccacccacccagcatatctctccatgccgatggtacccagccacgggtggaagctgccatggttaatgccagaatacgcaagcctgtcagagcaaaccaagccaaagttgggtacattgggcctgctactgatttcaactatgaccacaaacatcttggtactggccctcaaacacttctcgaaattgctgagggtcgccacccatttttcaagacactctcgaatgccaaaa

SEQ ID NO: 21822 - DNA, 242 bp, Glycine max
  Clone ID: 700953443H1
aactcagcctccacagcactactgttatatatggattcgatgcttcttcgatcttttcctaatattaacaacgcttcttctctcgccaccactggttcttatttgccaaatgcttcatggcacaataggaaaatccaaaaagaatataattttttgaggtttcggtggccaagtttgaaccaccattacaaaagcattgaaggagggtgtacatgtaaaaatgtaatataaaatttgttgtg

SEQ ID NO: 21823 - DNA, 238 bp, Glycine max
  Clone ID: 700953444H1
ccactgtcctgaagaacctcctacctgccttgttccttttcctgaaggttataaacgcccaattgagtggcctaagagcagagagaagatatggtattacaatgttccacacaccaagcttgcggaagtaaaggccaccagaattgggtgaaagtaacgggcgagtaccttacttttcctggtggtggaacccaattcaaacatggggcacttcattacattgactttatacaagggc

SEQ ID NO: 21824 - DNA, 247 bp, Glycine max
  Clone ID: 700953446H1
cgaccaacgtgttggcactgcaaagtgcaaacaagctcgatcacttgaataactcagtcgaagattagattcagattcacggcgaaagaacaaaaccctaaaaaaatggatttccacggcggaggaccactccgttcccgcagttcccagtccccttctccctctcactccgcctccgcctccgccacctcctccatccacaagcgcaagctcgtgtccgaggaccacgcgcctcccttccccccct

SEQ ID NO: 21825 - DNA, 242 bp, Glycine max
  Clone ID: 700953447H1
gtcacttttatggacactgcaattgagataaaagatcttctttctgtagttgctgactcatacttattacgtaagggtgaaaaacaatctatgcttgttccacacttcagcaggatgagtatcaacgaagagaagtcagaagtctttcctccacattggatattcattctacattgactgttcctttaaagagtcctgagaaagtgaaagtcaagccatcacaaaagaagaacaagaaagta

SEQ ID NO: 21826 - DNA, 253 bp, Glycine max
  Clone ID: 700953448H1
cagctcgagttttcttcttcttctcttcccttactctcatcctcgattcagtggcagaggtgacggaattcacgtgatttccatgagtggctccgttttccttgaatcgaacaccacgtctgttcacggttcgcggtttcgaaattgagctcgattcctcgtcagtggtgatcgtcagtgcatgcatcctcggattggtaatgtgcgagcttgatccatctatttgcggcgttttgagttaattttgcctgac

SEQ ID NO: 21827 - DNA, 250 bp, Glycine max
  Clone ID: 700953449H1
ggagtgggagcttccctgtaaagtggcacatcataaaagatgtgccaaatgcaaattttaggcacattatactagagaacaatgagaacaaacctgtcactaatagcagagacacacaagagataatgcatagaaaggtttggaaatgctgaaaatattcaaaaaccataatttgaagacatctttgcttgatgactttatgtattatgaaaatcgtcagaagatcatgcaggaagaaaaggccaagttg

SEQ ID NO: 21828 - DNA, 249 bp, Glycine max
  Clone ID: 700953450H1
gcgagggagaacgagacgtttgctttccaggctgagatcaaccagctcctcagtctcatcatcaacaccttctactccaacaaggaaatcttccttcgtgaactcatcagcaacgcctctgatgctttggacagattagatttgagagtttgacggacaagagcaagctcgatgctcagccagagttgttcattcatattattcccgacaagactaacaattcgctgaccattgttgacagtggcattg

SEQ ID NO: 21829 - DNA, 254 bp, Glycine max
  Clone ID: 700953451H1
ccgaaacagtttccatctctctcacaaaatgacaacaatatcaaattgctcccttctcttcctcttcctcttcctctccaccctccacatagcttccaccctctcaacccccaccaacttcatcaagtcctcctgcagcaccacccagtacccagccctctgcatccagtccctctccgtctacgcctccaccatccagcaagacccccacgagctcgtccagacagccctctccctctccctcaaccacaccg

SEQ ID NO: 21830 - DNA, 248 bp, Glycine max
  Clone ID: 700953452H1
tcccttctctactccattatccacacaacttgcaactcttcccggatccccaacgccatacctcagatctgtacgtcgtcgtttctatctacctcttaccgtttccgttcaggattaataatttagatcccctatgttgcaacagaacaaggaatcttcttagattctttttctgcgtttattagcgtttcacaaatagagagagagaaacagaaacagaaacagaagaagaaacttttcttatttat

SEQ ID NO: 21831 - DNA, 248 bp, Glycine max
  Clone ID: 700953453H1
atcgagataactagaaacagtgtgatgaaaatgaaggtccttgttttcttcgttgctacaattttggtagcatggcaatgccatgcgtacgatatgttccctctccgaatgaacactggctatggtgcccgtactccggaggtgaaatgcgcaagttggaggcttgctgtggaagcacacaacatctttggctttgagaccattcctgaagagtgcgttgaagcaacaaaggaatacatccatggcga

SEQ ID NO: 21832 - DNA, 251 bp, Glycine max
  Clone ID: 700953454H1
cgaattttctgcagttgcactcctaatcatatgttctgggggcccttgctgctctgcttcatgttcaccaacaattcaggctgctcaataagattgaagaaaaaaaagttttggtagccaggtgctggagttttgcttgcagctcttttctaaggtgtcaatgatatgaggtgtaaaaagcaatgttgatgtgggatatgctcaactcaatatcagtgttgtgacaaggcacatggaatgacatttgctgg

SEQ ID NO: 21833 - DNA, 252 bp, Glycine max
  Clone ID: 700953455H1
gaacttcctttatcaccagagcaaggaccagataagagaggccgtcaaactcctcgatctcgataacgtccattccctgttcgatgaattgattcagagagcttccaagtgtgttgcttctccctcttccaaaaaagttactctaacgctaaagggttctgcttcctcggttcctaccagcttgtccaagaattcggttcctgtgggcggttttgataagccgccacttgcccctgctgctactacttctag

SEQ ID NO: 21834 - DNA, 252 bp, Glycine max
  Clone ID: 700953456H1
ggcttccctggcggcttccaccgcggctatgtcagaaatccttggaaaccccgttaacctcagatgcgcaaccaggtctgctccatcaccaactacacctgccaccttcaagaccgtcgcacttttctccaagaagaagccagctccacctccaaagaaaaagcctgccgctgtatcccccgccaatgaggaactcgccaagtggtatggtcctgacagaaggatcttcttgcctgagggtctcttggaccg

SEQ ID NO: 21835 - DNA, 246 bp, Glycine max
  Clone ID: 700953458H1
accacgttgcagaggcttcaggagaaaagggatgctgctgtatttgacattgtgaatgctcgagaaaagcagaggaaggtcacgataagtgatttggctattgtctccaatgggggtaaggggacatttcatgtggaggacaaaccagtggatgctgtgtcctttgcagctaatggtaatgtggaagaggtggtactttctcctgaaaatggaaatgtggagttgtcttatccagacttggtaaaa

SEQ ID NO: 21836 - DNA, 243 bp, Glycine max
  Clone ID: 700953459H1
atgaagcaggctttctctagcagctagagatggcagagggaagagggtccactctcgtgcacctcttggtcgtggttctgtgcttggtcgctttcgggttcgccattgccgccgagagaagaagaagcgtcggaaccatgcacaaaattgaaggaacaaatgaaacattctgcagctatagttcagatgttgtcactggttatggagtgggcgctttcctgtttcttctttctggtgaatcac

SEQ ID NO: 21837 - DNA, 244 bp, Glycine max
  Clone ID: 700953460H1
caccattctagatatcagagaactttgcagctctcttaggtttttaaaaaacaccacgcaaacagcaagatggccacttccgacagtaacatgctactaaattatgttccagtttatgtgatgctcccactcggagttgtcaatgttgacaatgtttttgaagacccagatggccttaaagaacagctcttgcagcttcgagctgcgggtgttgacggggttatggttgatgtgtggtggggga

SEQ ID NO: 21838 - DNA, 239 bp, Glycine max
  Clone ID: 700953461H1
cccaattactggtactggcattaacccagcaaggagtttcggagcagctgtaatctacaacgaagacaaaatctgggatgatcagtggatattctgggttggaccaattgttggagcagcagtggctgattttaccaccaatacatccttagagcagcagctatcaaggctcttggatccttcaggagcaacgcttaattaattaatcaattaagctagctaccttgattaatttgcca

SEQ ID NO: 21839 - DNA, 227 bp, Glycine max
  Clone ID: 700953462H1
ggctcgaggttgtgttgtgttgaagtagcaccctagcaaagatgttacgcatcttaggaggcaataaggggcacaagatcaagggtactgtggtgttgatgagcaagaatgtgtggacttcaacgaaatagtgtccactactcagggtggtttggttggtgctgccaccggcatcttcggtgctgccaccggtattgttggtggagttgtcgatggtgctactgcca

SEQ ID NO: 21840 - DNA, 242 bp, Glycine max
  Clone ID: 700953463H1
atattccccctttccctagtttagctacttacctcaatctttctcatgggaaagtttgccctagccaatatcctcttggtccttctcttgaacttgagcactttgctcaatgttcttgcttgtccctttgcccttacccttctcccaagcctccaaaaaagcctcccgttgtgaaaccaccggttcacaaaccaccaaaaccatgtccaccacccaagtcatctccaaaaccaccccatgta

SEQ ID NO: 21841 - DNA, 254 bp, Glycine max
  Clone ID: 700953464H1
cagctcgagtcttaatttcataacaaaagaaatatcattcatttgtgctactagcagctactatctatatctatatgtgcacaatagagcttctccaaatactctgaaaacctactccaaattttgcatgctacctgacaactaagaaacgtgctgctgtcctataatttgaactacttatcactgtcaattaattcagagttcagcagagtgccccaacatgctgaaaaagggaaatggggtgcctgcttatt

SEQ ID NO: 21842 - DNA, 252 bp, Glycine max
  Clone ID: 700953465H1
cgttcttcttcttcttttctttctttccaaaataaaatcttttacccttcacacccccacccctttgggtttctctcctcaattttgcatctggcggcttctcagttctcaccaccatcatggtttcacttggagctacctgtgctctgtgctgttctatgttcatggtgtttgtcactttgagtttggctggggacatagtacaccctgatagtattgctcccagaaggcctggctgtgacaacaactttg

SEQ ID NO: 21843 - DNA, 223 bp, Glycine max
  Clone ID: 700953466H1
tgctgttcttgcgcgtgaacaagcctcaggtaagccaaaaccatggttaagcataacaatgttatcccaaacggacacttccgtaagcactggcagaactatgtgaagacttggttcaatcagccagcacgaagacaaggagacgattggctcgtcagaagaaagctgtgaagatattccccagacctacggctggacctctcaggcccattgtacatggtca

SEQ ID NO: 21844 - DNA, 249 bp, Glycine max
  Clone ID: 700953467H1
gcaaaacctctcttcttctgattgattcacttctcgatttttctgttttcgttttcattttcggtttccgatctaatatcgatgcgattcgccattgccggaaaatgagtcctccggcgagtgtccggtgatgatcgctctcgagagaggctgttgttgttgttcttcttcgacgtcatggttttgttctgagattctgctcactttcaccaaaacggctttactatgtaccgcgtttcgctttcgtgt

SEQ ID NO: 21845 - DNA, 242 bp, Glycine max
  Clone ID: 700953468H1
cagaaaagcgttaatctccgatggcttcgtcgagggacaaggaacccgcgccgccacatcatcacccacctcttctgagcagcctcgtcgtccgcccctcccacaccgaggccgtcgcagctggtggtggtcgcgtcgccgacttcgagcctggcgaactccaccgtgatccccctcctccttattcccgctccgatcgatatcccgatgaacctgctctgatgttgcctgcaagatcttgg

SEQ ID NO: 21846 - DNA, 248 bp, Glycine max
  Clone ID: 700953469H1
ctcgagccgctccctttctcctcggtccacagagacaaaatgtaagacaggtgccaacagtacatcacgaaagaaaggactagctgagccgagatcactaactaaaacgaatttaatactaatcgaaaatataatagaatagaaatagaactgtcttttcatatagatatcccttcaacacaacataggtcatcgaaaggatctcgaagacccaccaacgcacgaaagccgggatctttcagaaaatg

SEQ ID NO: 21847 - DNA, 250 bp, Glycine max
  Clone ID: 700953442H1
ctttctgagaaaccatcgattattatcattacaatggatcgttcagaatatcaaattgaggatgataacctgaagcttaaggttatcttccttccatttttatcaattagtcacataattcccatagtggacatgccagaatcttcgccatgcatgacgtggacgtcactatcatcaccaccacgtccaacgccgcgcttttccaaagctccatcagtcgcggtcaaaacatcaggacgcatgtcatgaa

SEQ ID NO: 21848 - DNA, 250 bp, Glycine max
  Clone ID: 700953414H1
atacgctatgtattttcagacaagacaggaacactaacagaaaacaaaatggaattccagagggctagtgtgcatgggaagaattacgggagctccttgcctatggttgataatacagcagcggaagatgttattcctaaacggaaatggaagctcaaatctgaaattgcagttgattctgaactgatgacattgttgcagaaagactcaaatagagaagaaaaaattgctgcaaatgagttttttctta

SEQ ID NO: 21849 - DNA, 245 bp, Glycine max
  Clone ID: 700953415H1
agagagaaaattaacatgggaagaggaagggttgttctggagagaatagagaacaagatcaaccgtcaagtaacattctcaaaacgcagaagtgggttgctgaagaaggcctttgagctttctgtgctatgtgacgctgaagttgcccttatcatcttttctagccgtggcaagctttttcagtacagcagcactgatattaacaaaatcattgagaggtatcgccaatgtcgttacagcaagtc

SEQ ID NO: 21850 - DNA, 253 bp, Glycine max
  Clone ID: 700953416H1
gtcgatggagattagaaacgtgttgggtgagagtgtgagagaagtgaaagaggaagatctgcagaaacttccttatctgaaagctgtgattttggaaggcttgaggcgacacccgccaggacactttgttttgccgcatgcgtcactgaggacgtagtttttaatgattatttggtccctaagaatgggacggtgaatttcatggtggctgagatggggtgggaccctaaggtatgggaggatccaatggcat

SEQ ID NO: 21851 - DNA, 258 bp, Glycine max
  Clone ID: 700953417H1
ctgacaccctcccatttgctacaatgggatcaggttcacttgctgcaatgtctgtatttgagtccaagtacaaggaaagtttgagtagggatgaaggcattaagctagttgttgaggcgatatgcgctggaatatttaatgacctaggaagtggaagtaatgttgacgtttgtgtgataaccaagggacacaaggaatatctcaggaaccaccttctaccaaatcctcgtacctatgtcaatccaaaaggctttgatt

SEQ ID NO: 21852 - DNA, 256 bp, Glycine max
  Clone ID: 700953419H1
caataccttagcatgaaattcaactttgtgggactacatgttgaagtttgattggtgaacgagatctgatctcttgatccacaaaaccatggctgaaaaggtgaccatcatgaaactcaaggttgaccttgagtgtgagaaatgctacaagaaggttaagaaacttctcggcaagtaccctcaaattcgggaccagaagttcgatgagaaggaaaacattgtgttcatcacagtggtgtgttgtagccccgagaag

SEQ ID NO: 21853 - DNA, 254 bp, Glycine max
  Clone ID: 700953420H1
caaatagagagagaacttcaagtgagggtgagagtgacacaaatctagagagagcactagtactctaaaagtctattatattcttcaaaatatgaccatgcatcgcgagtcttgggcttttgtcttcggcgttatgggcacaatcatctcctttggagtgttccttgctccattgccaaccttttaccaaatctacaagaagaaatccactgaaggtttccagtcacttccttatgttgttgcactgttcagtg

SEQ ID NO: 21854 - DNA, 253 bp, Glycine max
  Clone ID: 700953421H1
caaggcagaaccaaatagctcattagtgagtttttgagttcgtgtgtcctttctttgtgtgttgcaaggttacaagatggaggatcaaaatgcatcatctaatggattgggcaaggtgttccacaaggttaagccctacttgctatgatgtcccttcagtttggctactccggaatgtacatcatcaccatggtttctttcaagcatggcatgagccattgggtactctccgtgtaccgtcatatagttgcca

SEQ ID NO: 21855 - DNA, 254 bp, Glycine max
  Clone ID: 700953422H1
cgttagtggactgatgtattaatccccaagtacatgtcaatcaggcacagagtcaccatgcatatagtttagttttgttttctggaaccaattattatttattggtactgactcattatgtaggcactggaatattcaacggtgatttgaagttagtgactcagcagcaatttgaagtacaggatcaagcacgccaccgttctcatgactctgggcaccaacattctttgagactaccaccttcgagtccctat

SEQ ID NO: 21856 - DNA, 256 bp, Glycine max
  Clone ID: 700953423H1
cagagagtgatttcagtgagtgatcggtgttcacttgatctcatcataatcgtcagcgtcaattgaagaagatgccgatcagaaacatcgccgtcggaaggcctgaagaggcgactcaccccgacacgttgaaggcggtttggctgagttcatctcaaccttcatcttcgtgttcgccggctcaggctccggcatcgcctacaacaagctcaccgacaacggcgctgccacccctgccggcttcatctccgcctcc

SEQ ID NO: 21857 - DNA, 255 bp, Glycine max
  Clone ID: 700953424H1
ggcttcaacgacggctaccgtgcggtcagaaccttcaccccgtgccgctcgtgcgactgggcagaagttcagcatggactcgcggcgcagagatggtacgccaccaatcacatcttgccagatggacgtcaaataattatcggaggaagaagacaattcaactacgagttttaccccaagacacaagccaagaatacttacagtttaccttttcttgctcaaaccaacgacgctaacgctgaaaacaatctctac

SEQ ID NO: 21858 - DNA, 252 bp, Glycine max
  Clone ID: 700953425H1
aattgttgtaactttttgattcctaaattctctaaaattcgaaattctaatttcgttaggggaaagagattgtttgtgtgtgagtgagtatggctggaaaaggcgagggtcctgctatcggaatcgatttgggaacacgtactcttgcgtcggcgtgtggcaacacgatcgtgttgaaatcatagccaacgatcagggtaacagaactaccccatcctacgtggctttcaccgacacagaacggttgatcgg

SEQ ID NO: 21859 - DNA, 247 bp, Glycine max
  Clone ID: 700953427H1
tgaaaagatgccttcaccccaaaaccagaagcattgaatgaacagaaggcattttcagcatcagcatcaacatgggtggggattctattgtttctcatggtacagacgaaggttcttgtttggaggagaattttccttgctttcatctcaccctcacctgctctcagggataatttgggcttgcaggatgaagacaacagaatgaaagcggagaatgggttaacttgtagtgaaactgatgaagaaa

SEQ ID NO: 21860 - DNA, 247 bp, Glycine max
  Clone ID: 700953428H1
gaaagagcttccttgttcaatggctccatttggctccttggtcattctcccctttttgttgatagcaacagtgacttgttctacttcagagaaggaaaatagtaaaactttcatagtccaagtccaccaccaaaccaagccttccatattccctacccacaaacactggtacgactcctccctctcttccatttccaccaccgcttctgttatacacacctacgacaccgtttttcatggcttctcc

SEQ ID NO: 21861 - DNA, 247 bp, Glycine max
  Clone ID: 700953429H1
ccaatttccccaccattagggtttttcatttgaaatgtggaagggcaacaatggagcccattgaatccgaatcagttagttcctccgccaaagaccagcaactgggtgaaccttcttccactgttcaccccccgatcacgatcctcaaccttcagatctcaatcgcgttacccctgttgatgatgcacttggtgaggagtttcagaacaagttggatttgaaggatgggggtgagagtgagaataat

SEQ ID NO: 21862 - DNA, 244 bp, Glycine max
  Clone ID: 700953430H1
cacgtttcacaatcactttttgcgcttctctcactcactcactcttcttcttcctcttcgtgtggttttctttctcgaactcgaactaagatgcgtgagattcttcacatccagggagggcaatgcgggaacagatcggagccaagttctgggaggtggtgtgcgcggacacgggatcgattcaacggggaggtaccaaggggacaacgagttgcaactcgagcgagtcaacgtctactacaat

SEQ ID NO: 21863 - DNA, 190 bp, Glycine max
  Clone ID: 700953431H1
caccatttcaaggcaattttatgaacacaagaggttaaattaactactccattaaatgatttcgttaaattattttataattatataagttattataaaataatttaacaaaatcatttaatggagtagttaattattttataataacttatataattataaaatgtataatttatagttttactgtttc

SEQ ID NO: 21864 - DNA, 136 bp, Glycine max
  Clone ID: 700953432H1
gagctacagcaccattatcattcatctccattactttcctattcgatcctcgatccctctcccacatagaagattcatcaccccaaaacccaatttttttttaataatacaactgcaattatttttattttctagt

SEQ ID NO: 21865 - DNA, 256 bp, Glycine max
  Clone ID: 700953433H1
cactcatatttggcatctgctggtattgatggtgtcaaagttgatgttcagaatatccttgaaactcttggagcaggacatggtgggagggtgaaacttgcaaggaaataccaccaggcattggaggcatcaatcgctaggaacttccctgacaatggaatcatttgttgcatgagtcacaacactgatggattatacagcgcaaagcgttcagctgttattagggcatcagatgatttctggccaagagaccctg

SEQ ID NO: 21866 - DNA, 252 bp, Glycine max
  Clone ID: 700953434H1
atgaagagcgaagagaatggctcccaagggtttaatctttttggctgtgttatgcttctcagcactgtcactgagtcgttgtcttgcggaggataatggacttgttatgaacttctacaaggaatcatgccctcagctgaagacatcatcaaagaacaagtcaagcttctctacaagcgccacaagaacactgctttctcctggctcagaaacatcttccatgactgtgctgttcagagttgtgatgcttca

SEQ ID NO: 21867 - DNA, 251 bp, Glycine max
  unsure (1)..(251): unsure at all n locations
  Clone ID: 700953435H1
tgcaaacaatgtcaccaattgggttggtaccatttggatgacacccatattangcgcctacattgctgacgctttccttggccgctattggactttgtcatagcctccaccgtttatctctcgggtatgtctctgttacactggcagtgtcccttcctagcctgaagccacctcaatgctttgaaaaggatgtgacaaaatgtgccaaagcctccacactacagcttgcagtgttctatggtgcactctac

SEQ ID NO: 21868 - DNA, 252 bp, Glycine max
  Clone ID: 700953437H1
gacctctggtgggacccaaaaggttggggtgaagaaggctttggttttctatggagggaagcccccaagagggatcaaaaccaattggatcatgcatgaatataggctaactgataacaagcctaacaataggcctctcctggttgtgacttgggcaacaagaaaaacactctaaggcttgatgattgggtgctgtgccgaatctacaagaagagcaacacgcataggtcacccatggagcatgacagggaa

SEQ ID NO: 21869 - DNA, 252 bp, Glycine max
  Clone ID: 700953438H1
tttttctccattagattaccaagctctgcaactttgcttctcaacatggagtatcgtctcctacccatttttactttactcaatattgcactggtggcaacccatgctgctttaccccctgaagtttactggaagtcggtgcttcctactacgccaatgccaaaagccatcactgatatcctttactctgattgggtggaagagtaaagcagctcagtgcatgttggacgtggaggcagtgaacgtgcatac

SEQ ID NO: 21870 - DNA, 125 bp, Glycine max
  Clone ID: 700953439H1
gcaacaaccaacgatgttacttaagtcgcagcactgaagaggttccaaaactttcttatggcacgttgcataataccgcaaatacgaaggatcataataacacaaggtctcaatgtgtgtccgag

SEQ ID NO: 21871 - DNA, 253 bp, Glycine max
  Clone ID: 700953440H1
aaaccctcccccttctccatgggacagtcaccgtccaccaccgccgcgcctccgccagacctcaaccgccaccaaattcctcagatacatccaaacaccgattccgatttcaccgattacaccctccgtctctccgacgattgcctggccgcaatctttcatttcctgagcaccgccgatcggaaacgttgctctctggtctgccgccggtggctccgcgtcgacggccagaggcggcaccgtctctccctca

SEQ ID NO: 21872 - DNA, 252 bp, Glycine max
  Clone ID: 700953441H1
gcattagaccatgaatctattctttccaaacctcactcactccctcttctctcacaatgccatctgtggccactttacagaacagttagttaatgatgtcatcttttgttgttcttcatggcctgcatggctctctctccgctcccagttcctaggccaagacaccctcactcatctctaccctcgtaacaaggcttccaccattcataacaagccaacaacagcacaaccacgtgccaaatttgacatgct

SEQ ID NO: 21873 - DNA, 232 bp, Glycine max
  Clone ID: 700953412H1
aaaacctttgctttcgccccatcttctccgccgttaccggtaatcgccgccgccaagctcgccggaatctctccctcgattgatacctctctctctcctgactcacctcccgcatttatcttctccgatgggctcaattgcatggagcatatgctcttctacgttatatcggccgagttgccagccttcccaatttctatgggcaaaatgcattagaatctagccagatgga

SEQ ID NO: 21874 - DNA, 256 bp, Glycine max
  Clone ID: 700953372H1
ctcacttcacaaggagcagaattttgattgtggacttgagcaaaataatactcgcctttcaaaattgcatgaatctcatgagagtcatatgcttgcagagccagatgacacacttgaaccttgtgcttcgggatcatttacatgttatcttgagggagagaaagtacattcagatggtgaacttaacagaacattatccgagtgtttcccatcaaagagtccaatctttctgagagaatagattctgcatggactg

SEQ ID NO: 21875 - DNA, 255 bp, Glycine max
  Clone ID: 700953373H1
cttctctcgatcgggtgtgtacgtaattaacataacatgtttcgataaccacacaccccttgtgtcatggcatgatgatgatgatgatgagaccagtaacgtggccctgataaagttttcaaagtctaagcatcttcttccttgttgtcatgcatgcctgatggaatcgacgacgcaaaagaacaaaagcaaaaagtcatcgttgttgatgcgtctaaacccgttatgggcttcgacgactctattatgcccaat

SEQ ID NO: 21876 - DNA, 254 bp, Glycine max
  Clone ID: 700953374H1
tgctttcagataactgatagttgtgtgcaattatttgaattcaagaatgtctcaacccgactcgttggtggctgagattgaggtgaaaacctctgctgatcacttttacgacaccttgaagggtaagaaacagcatcgtattcatgatgttgcccctcatcatatccataaggtggaagttcatgaaggtgagtgggataaatctggcaatatcaggtgcttacattcgctgatggggacactgttgagacctt

SEQ ID NO: 21877 - DNA, 255 bp, Glycine max
  Clone ID: 700953376H1
aacacaaacatccctcttgatttgaaggttgttttgtgcttatagataaaagttctgccaaatcaagaggggttttcagatcatagtgtgtgtgtgtgtgtgttaaacaatggctaagttctttgctgctatgatcttggcactcattgccatttccatgcttcaaacagtggttatggctgctaatgagcaaggaggccacttgtatgacaacagagcaaatatggaagtgggagtgtcaagagataccaatgc

SEQ ID NO: 21878 - DNA, 256 bp, Glycine max
  Clone ID: 700953377H1
tataataccaagttatctgacttttttgagattctggcaacatctgaggatagatatggacagactttcgtttccacagcacgtggtaggaaatatcccgtgactgtcaacctatggcaaccagagaaaaatgcttttgaatgggctacatctttgaaagcccctcacacagaggatgcaattcgggttactcagtccacagcaaactttttcatagtgaagctaggaaatccacaaacacacctgatgctcaaaa

SEQ ID NO: 21879 - DNA, 255 bp, Glycine max
  Clone ID: 700953378H1
ggctcgagcggctcgagcactttctctctctctctctctcacccagatcttgtagcaatggcgagcgctcccactccacgcgaagagttcgtgtacatggcgaagctggcggagcaggccgagcgctacgaggagatggtggagttcatggagaaggtctccgcctccgccgagagcgaggagctgaccgtggaggagcgtaacctcctctccgtcgctacaagaacgtgatcggcgctcgccgcgcctcctggc

SEQ ID NO: 21880 - DNA, 256 bp, Glycine max
  Clone ID: 700953379H1
cgacgacgcggggaatctccggtctccaccgacatctcttgtattctcttcacaatcccgtgatcccatttcgttccgttcacttcaatctcaatggccgataataagcaacccaatcacgaggaggcaagtcctcttctccaccagtcccaacccaaatccgaaccaccaacgccacctgagactcccgagtttcttctcggatggaccgctgatggctcacgctgggccacggcagcgtcgtgggccagcccat

SEQ ID NO: 21881 - DNA, 247 bp, Glycine max
  Clone ID: 700953380H1
caagagtactagaggagactgggtcgtgtttttcagaattttgaatactaatttgttttggtgtggggatgtgagaagaaggcacagggtgagggagaaagagggtggtagtttcctgggagaggactttttgcttcattttctgagaactgcttctaaaacttttacattatatttggcatcaagagagactgcatgaatattttaagcgagaggctttgagggcgttggtagtaagaatggatat

SEQ ID NO: 21882 - DNA, 252 bp, Glycine max
  Clone ID: 700953383H1
ttagattgcgtgaataacgcgacgctgttaaccttgttctcgggaaaataccatgtacaagatatcgattacaagagatacaaaatcaaggttagtgacgcgggtgcagtggaggactcaaattgtttcatccctcgcaatttcttatgggatggtaatttcaggcccacgggcctggtcggcccagatgattttggatcacagccgtttgtttggaccttgatttcaccagaattgggtacttcaactgcg

SEQ ID NO: 21883 - DNA, 70 bp, Glycine max
  Clone ID: 700953384H1
cgttgctcgtttcaatttctctcatgggcaccaagactatcaccaggaaaccctcaacaatctcaagact

SEQ ID NO: 21884 - DNA, 210 bp, Glycine max
  Clone ID: 700953385H1
tcttcaatggaatttggcaaaaagtagccatcgccccaacgatcccatttcccttgacttctctacgtgaagatccttgtgtcacatagagctagttaaaatgtcagagggaaatgcagggaaaggaaagagaatcgccatcattggcgtctcaaccttattgttggtggctatggttgtggcggtcacaattggggtcaatctcaatga

SEQ ID NO: 21885 - DNA, 255 bp, Glycine max
  Clone ID: 700953386H1
aagaaagtggtatatattgatatatgtgtgtatttcctttgggcttgaaactcaaaactataataatgggttcttcttctcctccggacactagcaagagcataaagctagagcgatacaacagctacatcaggagactcaacagcaccaaactcctcaacgcctcctccaaactcctcttccgtgccactatcttagtcgcactcatcctcgtctcctcttcaccttcaactaccctcccctcgccccagactt

SEQ ID NO: 21886 - DNA, 255 bp, Glycine max
  Clone ID: 700953388H1
aaacaactacttggtctatgactattgccatgatcctgggagagaccatacacttactccagaatgctaaggttttaagctatatttggattaaaattgggaaagtatgtatttttataaattctaatacacaattgcaaaatacagaatgaaaaaggaataattaatttgtagctttgaaaacaaagttacttttgaactttcccaattgaaattatacatccacttaattggtttggttcaagttggtatatt

SEQ ID NO: 21887 - DNA, 253 bp, Glycine max
  Clone ID: 700953390H1
attttagttgtctcagtcatcattcatctcttgcatgcacccagcaataagtaagtggtatgggcataattggtgtctccaaggactgaaatttatttgcaagttggcttgctcttggaatctcaaattctgggtttcaagtttatttgctacagcaaaatgactagtacagaggaaaagcctgtgactgtgagtgaggaacatgatgcaagtcttgcagaagaacagtttctcttccagttcaaaaggttga

SEQ ID NO: 21888 - DNA, 253 bp, Glycine max
  Clone ID: 700953391H1
gtggcattaccaggatccatctggaaaagttcagggaccattttccatcgtgcaactacgcaaatggagtaacacaggatactttcctgctgatttgaggatttggagaaccactgagaagcaagatgattctatactcttaacagatgccttgacagggaatttttctaaggaaccatcaatggtggataaagctcaatcggtgcatgatttcattacccatcatcatactctaggaagtctccacaacaag

SEQ ID NO: 21889 - DNA, 253 bp, Glycine max
  Clone ID: 700953395H1
gtcttaagtagtaatgttcagctctggagggttggcaaatggatgctatggtatatggtatggcaaggataatgacattgtacctctgtagtatgcgttgagccaaccatgtgacatcattgttcttgactctacaaccaaaaaactggctgggatactatgatagattttgaagggatcatttcagctgttgagtgtttgttattgtgatttatttcttatttctgccaaatgcagctagttcggttccagt

SEQ ID NO: 21890 - DNA, 256 bp, Glycine max
  unsure (1)..(256): unsure at all n locations
  Clone ID: 700953396H1
ttttcccttttattttgctctcttctctgcacaacaattccttctcattccagatattccaaccatcgaccgatctcaattctcaaccttaacctctcagaatgtcttacgcttatctcttcaaatacatcatcatcggtgacaccggagttgggaagtcttgtcttctacttcaattcacagacaagcgctttcagcccgtccatgacttgaccacggtgttgaatttggtgccangatgatcacaattgataac

SEQ ID NO: 21891 - DNA, 255 bp, Glycine max
  Clone ID: 700953402H1
ctagcctccgtgatgatttgatcttcaaaattcttgattctgaggggaatgaaatatcacgtacaggtgttcaaataaaattgatattggagaaaggtgttttggaagacaactttccccttggaggtggccatctgcgtttgaagttgcaattcatccttagtgatgaagagcgcgacagaattcgttcattgagacaatctgcattaaagaaaaaacatgatgagcttcttagttccagtagaagaggtgaag

SEQ ID NO: 21892 - DNA, 260 bp, Glycine max
  Clone ID: 700953403H1
ccaaaaaccagtctccgctgaagaagtggtcgctgttcctgcggagaacccaccatctgaagccgaagctgaaaacatcgaagcagagaaggcccagagtggtgtagaagacaagatttcccagtcggtttcgttcaaggagagaccaacgtggttggcgacctccccgaggcgcagaagaaagcccttgatgagctcaagaagcttggtcaagaagcgctcaacaaccatgagctaactgctcccaagccagaaccgga

SEQ ID NO: 21893 - DNA, 259 bp, Glycine max
  Clone ID: 700953404H1
gaaggtcttgatgatgcagatgatgatggtgaggaagaatatgaaaatgacttagaagtgacagaagaagctgagcctgttctccagaagcctcctgaacaaccagtggttacaaaagaagctgaaaggcaactttcaaagaaggaattaaagaaaaaggggcttgaagaacttgaagctgttttggctgagctaggatacacacgagaggaacccactggtcaagaagatgattccaatggtgctgagaagaaagaag

SEQ ID NO: 21894 - DNA, 255 bp, Glycine max
  Clone ID: 700953406H1
ctggagtatataaaacatgatgacttaatattaagaatttttcaacgtgtcgaaaaacaaactctacaaaagatcctgaccgatgatgggactcccaatgtagctgcaataagtgggctgtatcatgaaattagtcaacgtggggcaaggacttgttagcttctgaagtgaaagagttgttatttggaacaaaattaaatgacacaaatatcaaagaggaacagatagcagacatgttaaaagtttttgaccgaa

SEQ ID NO: 21895 - DNA, 258 bp, Glycine max
  Clone ID: 700953407H1
tgacaaagctagtagctgaagttcttgagaggaacaaattacctggtgcaatattcacctctttctgtggaggtgctgacattggtcaggcaatagcaaaagacactcgcattcccctggtttcatttactggaagttcaaggttggcttgatggtccagcaaacagttaatgagagatttggcaaatgcttgcttgagttaagtggtaacaatgcaataattgtcatggatgatgcagacatcaaattggctgtacg

SEQ ID NO: 21896 - DNA, 257 bp, Glycine max
  Clone ID: 700953408H1
tgactcgagccgaatcggctcgacttcggctgtctcatcactaccaacttatatttcaaggggaccaagttatggctcccgatgcaaagttctcctagcttttgaagataacgggtcttcaaaaattggggttaggtttgataatcaattccagatggaaatgatcttggtggcctttgcgaagatgaccatgggttcttctgttctgcaaatcatttactacaagtagacggctctggaggggatgatcttgacaa

SEQ ID NO: 21897 - DNA, 251 bp, Glycine max
  Clone ID: 700953409H1
atcggccagcaccaacagcatcggcggcgacagtcactctccgacaacaacacttccgcggcgaaaaatgtctctggtggcgaacgaggatttccagcacattctgcgtgtgctgaacaccaacgtggatgggaagcagagataatgttcgctatgacctccatcaagggtattggaaggagattcgccaacatcgcttgcaagaaggccgatgttgacatgaacaaaagggctggtgagttgagtgctgc

SEQ ID NO: 21898 - DNA, 255 bp, Glycine max
  Clone ID: 700953410H1
tcgtcctctaacactcttccaaatcatggctagctcactgcttgtgagggttgccagctgcatggttgtggtgtggatgtttagttttgggcacataattcccttggcagaagctgaaattccatgtggcagggtgcaatcactgtggctccatgcatagggtacctaaggggtcctggtggaggtgtccctgcaccatgctgcaatggggttaagagcataaacaaccaagccaaaaccaccccagatcgtcaa

SEQ ID NO: 21899 - DNA, 256 bp, Glycine max
  Clone ID: 700953371H1
aaaaaccttggcccgcatgatcggttgatccatgtttatcatttcttgaaagacacaactcaaaatcaggtgttttcctctaaatctgtctaatatattaatatttttttctttctaaaattactaccttaaaattttttctaacatttgtactttcttttcttttgtgttggtgttttttgaaaacagcagcaagttcagaactttggacatcctttttattggttatccatgagggtgagacattaactgaagt

SEQ ID NO: 21900 - DNA, 259 bp, Glycine max
  Clone ID: 700953338H1
ctcgagccgttttgcatcgtcgtcacacatggagatctccggcaccgttctccgtcaggtcagctacgtctccggctatgggacccacacgcggtcccgcggcctggctcctcgttttggggtgaggatggggatgggttctggtttctgtgacgaggggcatttgcggtattaccaggacaccaaaaaggttctcaccccaaagaagaagttgaagctctcaagggtttctccaaattagggcttgcatcggatcccg

SEQ ID NO: 21901 - DNA, 261 bp, Glycine max
  Clone ID: 700953339H1
gagagtcggtctaagaggtaggaacaaaatgaggagtgtagagcgaagatttggcagataaatgagtgaatattgtcattcatggttaatctgatttgcatggtttgaattttgaaaaaatattatttttttttgttcttttcttatcctgaggttcagttatttcgtgtaaatctcagacatgcaagcaatttgaattgaaaaaataatccgggatctttagattctcttctctctcatcatcttcggtctttgctgaat

SEQ ID NO: 21902 - DNA, 260 bp, Glycine max
  Clone ID: 700953340H1
ctctcttccaaacacacatcctcacccatggcagcaccatcttcagagacaaagtcaccatcatcctcgaacacgcagcttccgctgaaaccaatcccaggcagctacggaatgccgttttttggagcaataagcgacagacacaactacttctaccaccaaggacgcgacaagttcttcgcgacgaggattgaaaaacacaactccaccgtgatccgaacaacatgcctccggggcccttcatctcctcggaccctcgt

SEQ ID NO: 21903 - DNA, 261 bp, Glycine max
  Clone ID: 700953342H1
aagacttcgagatccctacaatttctaaagatgttgacatgaaggagatatttagcatactaaagcaagcattaatctccaaatctcctctaagtgaagtattcttcaaaaaagaatgatctaagtcatgctcttgcccatactcttgcccttgctcacgaaataccaacccaattcattggaaagattctataaaaatcaaggtaatggtgaacaaatcaataataagattgtgttggccgaagcagatggagattttgt

SEQ ID NO: 21904 - DNA, 263 bp, Glycine max
  Clone ID: 700953347H1
aagaagcccaatcttttcatctacggtgatggccccacaaataccatcatcactggccgcaagaactttcacgagggtaccaagacaatgagaaccgccaccttctctactgttgccgaggatttcatggcgaagtcaattgcatttgagaacaccgctggtgcagaaggacaccaagcagtggcacttcgcgtgcaaggtgatcgttcagtgttctttgatgtgctatgcgcggttaccaagacacattgtatgcccacgcc

SEQ ID NO: 21905 - DNA, 262 bp, Glycine max
  Clone ID: 700953348H1
gaataaacggaacttgaacaattatggttacttatcgatggacatgtatgttcatctattgtaggaactccttatatttctagtatcaatgtaatgtagtgcttaatgtagcttgactgttaaatggggatttgagtaggctttatttggcattcagatagttatgaaatctgaattgacttcagtttcttgctaaccttggtgagaagcagactttgtagcggatctgaatggtgcactatgaatcgaccatgtactttaa

SEQ ID NO: 21906 - DNA, 262 bp, Glycine max
  Clone ID: 700953349H1
ggaggaaataatatcatttccgttctcaaaatcataacagtacttcgcgtgccctagctcactccgtcgctcctcacccttccggcagtgcttggtcgtggccgtcacggttcaaacttcaaaaggctatggatgacttgtttgattcttcgctgaacttggaggacacccattacaaggaaggctatgacgaaggctacagccatggccttgtcactggcaggaagaagctaggcaggttggcctcaaggttggctttgag

SEQ ID NO: 21907 - DNA, 256 bp, Glycine max
  Clone ID: 700953351H1
ttgggattggatcaagctcctctggaggattgagaagtggccggaaatttatattgaaagctgtacctactttcccttcattgtctccttgcattaattccaaaagcaatggcgatgaggattcttgtaacagtccgagcaagtcacctctcaaagctaatgagtgccctcaacgtgagagttaacaagcagaagattgtgtaatctgttgccgacatttgtctgtaaaggttgccgggggtgacttattatgtga

SEQ ID NO: 21908 - DNA, 258 bp, Glycine max
  Clone ID: 700953352H1
gaattagctgatatagacgtttttgttagtacagtagatcctatgaaagaacctccacttataactgcaaatacagtactatccatccttgctgtagattatccagtggagaaagtttcatgttatgtctcagatgatggtgcagctatgctgacatttgaagccatttcagagacttcagagtttgcaagaaagtgggttccgttctgtaagaagttaacattgaacctcgggctcctgagtggtattttgctcaaa

SEQ ID NO: 21909 - DNA, 258 bp, Glycine max
  Clone ID: 700953354H1
cattggtgtggcctagctgttttctcaatgagaaagccttcatctctgctaagcgcacttttgcgctttggggttcccttgttgcttgttatcaccttctgttatgctacttctactgctgcagcaacaactcaagtttcagggaatgaagagctgccaaagacaaacctaaatgggcatgatgaagaagcaaaattcggattttttcatcataaaccatattcaagaaacatattccaattccagtatataaacctg

SEQ ID NO: 21910 - DNA, 54 bp, Glycine max
  Clone ID: 700953355H1
caagctacaagcacccaaaggggaggaataataataagcctaacttctaaggcc

SEQ ID NO: 21911 - DNA, 258 bp, Glycine max
  Clone ID: 700953356H1
caaaaacattctctcccattcctcaatcctcccccttagcccttcattttctttttctttcttttgttggtttgtttattcctttattctctgcttctgcattttgtacatgcggtgttctatttctcttggtttgataacaggatttggcacaagcgttgtggtctccccatttcaggagaatcatcactcattgccataatatagagcttgttaaaacaaaagacagaaaagtgaagtgttttgagatctggcatg

SEQ ID NO: 21912 - DNA, 256 bp, Glycine max
  Clone ID: 700953357H1
atcggataagctatttgagcctgaattattcaagcagattgattctgttatcaaggcatgctcaaatccctcaataatacgctcactgttcagtgctactttacctgattttgttgaagatcaagctcgagaacttatgcatgatgctgttcgtgtaattgttggcagaaagaatatggcttctgaaacaataaagcaaaaattggtttttactggaatgaagaaggaaaacttctagcaattcgtcaaagctttg

SEQ ID NO: 21913 - DNA, 257 bp, Glycine max
  Clone ID: 700953358H1
ctgggttgcagggaaaaagaaaaataaaatgggttccgataataccaacttggagttcttgaaggagatcggtttgggctcctccaacattggttcttacattaatggccaatggaaagccactggttcttctgtcacttctgttaatccttctaacaatcagagcatagctcaagtgactgaagcgactttgcaagattatgaggagggattgcaagttgcagtgaagcagccaagacatggatgactattccggc

SEQ ID NO: 21914 - DNA, 215 bp, Glycine max
  Clone ID: 700953359H1
cacactctttctctctcttcaattcagcttcttcagcttcagcgaaatcctgttctaaccgtagatcgtgccttttcttttgtgcctgagaagccacttctctacttgcggttcttcttcttcttcttcttcttcaattttattcgattcgcttgctggaaaattctttgagtgagggagaggatgtctggtggcacacagaagagtctgagaaa

SEQ ID NO: 21915 - DNA, 253 bp, Glycine max
  Clone ID: 700953360H1
ttcacatgttaatcaagcactggacttgaaaaaagaaccacttccagagaaacatgatttagacgaagggctaacaactgtaaaagaaaataaggatgagaaccacgcaaaagtatttactcttctccaggaggtaccctgttcctctgtatcttcagcaaatgagagttcaataacaatgtctgtgccactgggaaatccatgtgccttcaaggagatacaccttccgtgaaagaggtaatagcacgagatg

SEQ ID NO: 21916 - DNA, 259 bp, Glycine max
  Clone ID: 700953362H1
cgccctttctttcgacggtgccgttttgggcttggccttggcctacgccgccgtccgcaccctcttcaaattcaccgccacctctgccgccctccgcaagctccaccgcgccccttctgtctccgtctccgacctccgatccctcctcgccgagataacctccgacgccgacggaaactccgacggtggcaacatcgtaattgtccgcggcactgtcgagccaagtccgccgtcgaaggcggcacctggaaaaccctga

SEQ ID NO: 21917 - DNA, 260 bp, Glycine max
  Clone ID: 700953363H1
gttgaaaacagagtctctgtttctctgaagctgaccaaagaccattctcctgtctaatttgctggcattattgccgtcttgttgtttttgcacccaaattcccttcccttgcataacaagtttcaatatttccaattttaagattccaaacacacccccccttcctcttttttttatcccttttctgctttgttctctgtagagtaacagatctttgcatctctggttataattccgagccgggtttcttgttagcactg

SEQ ID NO: 21918 - DNA, 252 bp, Glycine max
  Clone ID: 700953364H1
tcgcttcttcgccatgggagaagacttcaacaataacgatcctctcatccgcaaccaaaacgccgccgttcaggctcgcgccaaggaccagaaccgcgccaacgcccttcagctcaagctgattggacagagtcaccctactggtctcacagcgaatttgttgaggctctttgagcctaggcctgccttggactataagcctcctccggagaaaagaaatgccatcgctaataggcacaaaaaagagcaaga

SEQ ID NO: 21919 - DNA, 258 bp, Glycine max
  Clone ID: 700953365H1
tgccgttaaggatccatctgctccccatggagttcggcttttgattgaggactatccttatgcttctgatgggctagagatatgggatgccatcaagtcctgggtgcaagaatatgtgtcattctactacaagtcagatgcagcaattcaacaagaccccgaactccaagcttggtggaaagaacttgtccaagtgggtcatggtgatttgaaagataagcatggtggcaaaagatgcaaacttgtgaagagttgatt

SEQ ID NO: 21920 - DNA, 259 bp, Glycine max
  unsure (1)..(259): unsure at all n locations
  Clone ID: 700953366H1
gttcctctcgaggaaattatgaaggataagaattttgatcttgtaacaaaagaaatatttggaccctttcaggttatcacggactacaaaaacagtcaactatcagttgtattggatgctgtggaaagaatgcataaccatttaacggctgctgtagtttcaaatgattctgaggtgctccggttgcccnggctcttagaccagcataagtagtaccattactgaattgccaacaacttcctgtaaaaacaaaggatca

SEQ ID NO: 21921 - DNA, 258 bp, Glycine max
  Clone ID: 700953367H1
aaaaaagatatattatagcaactgaactattgtgaagcataaaagaacaaaaatcttatttagttgtaaagcaataaaaatatacagataaatgaagaggtgaaagaaagagagaaaaaaaatcaatgatatagaattctaatatgtaaaggtctatgggttatctcataaaaggtagtgtaataaagcatcaatctaaatcaattcatatctatttaatatgaattaatttataacgtaaacaaattaagagctctg

SEQ ID NO: 21922 - DNA, 257 bp, Glycine max
  Clone ID: 700953368H1
ccttgttcttctttctctattgtctatagtcatctccattgttctcttcattacccacacacacaaaagaaacaacactccaagaggaccaccaggtcctccacctcttcctctcatcggcaaccttcaccaactccacaactcatccccacatctctgcctatggcaactcgccaaactccacggtcctctcatgtcgtttcgcctcggcgccgtgaaaccgtcgtggtttcatcggccagaatcgccgaacaaat

SEQ ID NO: 21923 - DNA, 243 bp, Glycine max
  Clone ID: 700953369H1
tagagttggatgctttactttcgttgtcaggtttatgtgaatcttgtagtgtgaatagatttcacactgtttctgttctctctagtttcctatctttttttaacactccttggaatttataatgatggcatgcaaagtattctccctgctatcttagcagaaagaataatattaactgagtttgaataatttgaggactaaatcatacacccaaataaatcaggggtcaaaattaccagctag

SEQ ID NO: 21924 - DNA, 259 bp, Glycine max
  Clone ID: 700953337H1
attaggtcaccaccacgatctataatcttatccttgggaaaatatactgtgatcatcatgggaacatggatatacgtggtaatcgtacatattcatgcagactcaagttcaaagagcagacgatccttgatcgaaatcctcgccaggtaagagttattggttattagtggcaagtcacaattctttgcaacctgttctttatattattctatttatcttcctactccttaaatttcgcctgtctaaattccaaagtaac

SEQ ID NO: 21925 - DNA, 256 bp, Glycine max
  Clone ID: 700953370H1
gaggaagaagacgaagaagaatccaaaagcaatcccatctgtgtgtttgcacatcagaagggagggctatcaaactcaaaggattgctctgaatcggtttagtcttcttcgtttttcttcaaattcctcgtgacagatctaatctaatcaggcttatgggggtgtttcagacattgcatgcatatgggagcagtggttgtgttggatgctataaaagcctacactgagtgctactgtggatgtgccatcgaaaggg

SEQ ID NO: 21926 - DNA, 265 bp, Glycine max
  Clone ID: 700953294H1
tactgctacagggaatgagccgggatgttcagcctccacaaaagcatgcatatacggcatccagtacggtgacagttcgttctccgttggctacttcagccgcgagcggctctccgtgaccgccaccgacatcgtcgacaacttcctcttcggttgcggccaaaacaaccagggcctctttggtggctccgccggcctcatcggcctcggccgccaccccatctccttcggtcaacaaaccgccgccgtatatcgtaaaatcttc

SEQ ID NO: 21927 - DNA, 272 bp, Glycine max
  Clone ID: 700953295H1
tttctgtgataggatggatttgccttgttctcaacataagcgtttttgctgctcctctttgcatcatgaaacgtgtcataaagacgaagagtgtggaattcatgcctttcagtttgtccttctttttgaccataaatgctgtcatgtggttcttctatggccttctcctcaaggactactacatcgcactcccaaatactcttgggtttctattcggcataatccagatggtgctgtatttgatttatagaaacgccaagccacaaggatta

SEQ ID NO: 21928 - DNA, 273 bp, Glycine max
  Clone ID: 700953296H1
agcggtatgaaattcaccacaagctccgctatactgatgaggctcttgtagctgctgcacagctgtcctaccagtatatcagtgatcgatttttgccagacaaagctatcgatttgattgatgaagctggttcacgagtccggcttcaacatgcacagttacctgaagaagcaagagaacttgacaaggaggtgaggcagattattaaggagaaagaagaagctgttcgcaaccaagactttgaaaaggctggagagctacgtgatagagaga

SEQ ID NO: 21929 - DNA, 261 bp, Glycine max
  Clone ID: 700953301H1
aatggaaattgattgctttgtgttgatctcgcacaattagaacccagaaactgattgcagcatgtttttgcttttatgatgatcatgcgttttatgatctttccttgcgtgtgtgtgttcctttctaattttgaactttcgatcatggatttatttaaaattctttaatttgccgacatatcgtgaacgattgtggaatcagtgatttttttccatcaatccatggaattcgtctgaatccatgttagcattcggctttca

SEQ ID NO: 21930 - DNA, 81 bp, Glycine max
  Clone ID: 700953305H1
caaattagttcattctctttgcgcagttccctacctctcctttcaagatgcagatcttcgtcaagaccctcaacggaaaga

SEQ ID NO: 21931 - DNA, 265 bp, Glycine max
  Clone ID: 700953306H1
caaacttccacgaccatctattctttatatccgcttccaatttgttaattttcattctgatacgattcagggtatcgccaaatttctcgattttccgcatattttggatttggaggggtttgaagaaataaccgaactttggaaggaaaaacacaaccccatatgatgcaacgcttggttgatcatgttcttgctgttactaaagagtcattgaaggcaattactatgagtccttaaataatattgtgaggctaatcaacggagt

SEQ ID NO: 21932 - DNA, 81 bp, Glycine max
  Clone ID: 700953307H1
gggaagtcaagggttccgacaaggcatggatctttattctaagagacatgatcgccaagctgtgacttgtgacgatttttc

SEQ ID NO: 21933 - DNA, 266 bp, Glycine max
  Clone ID: 700953309H1
attgaatggcaaatacgacgatggcaaatatgaacacgaacagcaactccaaagaagaaagcaaaaaaatggatgaaagagaggcgatacccttgctcaccccatacaagatgggaaattttaatctatctcacaggattgtgttggcaccgttatcacgatcgaggtcttacaacttcatccctcagccgcatgctgctctatattattctcaaagaacaactaaggtggctttttgattggggaagcctccggtgtgtctgata

SEQ ID NO: 21934 - DNA, 264 bp, Glycine max
  Clone ID: 700953313H1
gagattattgccacttttttctgttttgtgtatagtttgaattcagatctgcaacatgcatgcttcttcggttgttccaaagtgctataatttgtgattttcttggcttggaatcggttgagtaagcataatcgactaagcatgtaagcataatcgattaagctcaaacaaaccgattacgcatgtaagcataatcgattaagctcaaacataaaccgattactatctgtataattactaattagtattttgagtgaatactaa

SEQ ID NO: 21935 - DNA, 267 bp, Glycine max
  Clone ID: 700953314H1
ctaaaattctctttctgcttagtctccacgctcttgcttgcttttgtgtgagagaacaatggcaatggtgaagtctcccaagaagcaagtgaacctcttctattcccttgactgtgaagaccttgcccagaacgttgctcttcaatcaccccacatcgttctccagaacatcaaatggaggtcatttgctgatggatttccaaatatatatataaataatgcagaaaacttcgaggtcaacatgttgctttcttggcatctttcagc

SEQ ID NO: 21936 - DNA, 267 bp, Glycine max
  unsure (1)..(267): unsure at all n locations
  Clone ID: 700953315H1
gggagacgtgagaggcgttcgtatcaagaactgctcattgactggcacaaccaatggccttagaatcaaggcatggccagagaggtatccaggtgcagcgtcagatgtaagcttcagtgacattatcatgaaagatgtcaaaaatcctatcatcattgaccaagagtatgaatgttatccagactgcaaaaagaagccgtcacttgtanagctccaaaatattcattctcaaatataaggggaactacaatttcaccacttgcagtg

SEQ ID NO: 21937 - DNA, 267 bp, Glycine max
  Clone ID: 700953316H1
cagatctggagcaggagaatagcgttggcagcgtttgcgtttgctctgctgttccaatcggcctcagcagacgacgtcgttgtgctctctgaagataacttcgagaaggaagttggtcaggacagaggagctctcgttgagttctatgctccttggtgtggacactgcaaaaagcttgctccagaatatgaaaagcttggtagcagcttcaagaaagccaaatctgtttaattggcaaggttgattgtgatgagcataagagtttgt

SEQ ID NO: 21938 - DNA, 269 bp, Glycine max
  Clone ID: 700953317H1
ccattctctctgtgtatttccctacctctcccttcaagatgcagatcttcgtcaagaccctcaccggcaagaccatcacccttgaggtggaaagctctgacaccatcgacaacgtcaaggccaagatccaggacaaggaaggaatccccccggaccagcaacgtctcattttcgccggaaagcaacttgaggacggccgtacccttgctgactacaacattcagaagggagtactcttcacctcgtcctccgtctccgtggtggcatgc

SEQ ID NO: 21939 - DNA, 266 bp, Glycine max
  Clone ID: 700953318H1
gtgcatacatagctatctatttatctatagcaagtgcgtcaagagacacgtggtaccctagctagagtgccattctgtggtttctttctttctttctttctgcatcacatcacaatttgcattgcctcgtgtcctttttcttctttgctctccaaaaatctcacacacacaggtatctagcaaatgggttctcaccaacaagaaccatggctattggagaatgggaaccaagggttttgaccaaggagaccaggcatggccgttct

SEQ ID NO: 21940 - DNA, 260 bp, Glycine max
  Clone ID: 700953320H1
gtggtttcagtgagtgatcggtgttcacttgatccttcataagtcgtcatcatcatcatcatcatcaccgttgattgaagaagatgccgatcagaaacatcgccatcggaaggcctgaagaggctactcaccccgacacgttgaaggcggggttggctgagttcatctccaccttgatcttcgtgttcgccggttcaggttccggcatcgcctacaacaagtcaccgacaacggcgccgccactcccgccggcctcatct

SEQ ID NO: 21941 - DNA, 262 bp, Glycine max
  Clone ID: 700953321H1
ctttctctaatccaaatatctctccgttaatgctctcaccacaaacttcaatagactagccaaaagctaacaccaactataggccaaatcaccaataaatattatttcccgttcttttggcgtgttggccacccactgaacacatttgcactcacacatagaagcagagagaggccattggttggtttcagagatgggaagcatgcacatagaaaccccagaacttttgctgatggtagcaaaaacttcgatgatgatggac

SEQ ID NO: 21942 - DNA, 263 bp, Glycine max
  Clone ID: 700953322H1
gtggtttcagtgagtgatcggtgttcacttgatccttcataagtcgtcatcatcatcatcatcatcaccgttgattgaagaagatgccgatcagaaacatcgccatcggaaggcctgaagaggctactcaccccgacacgttgaaggcggggttggctgagttcatctccaccttgatcttcgtgttcgccggttcaggttccggcatcgcctacaacaagctaccgacaacggcgccgccactcccgccggcctcatctccg

SEQ ID NO: 21943 - DNA, 262 bp, Glycine max
  Clone ID: 700953323H1
caataagcgaattctcagatttgtatgcatggagaaaacaacaacgcacattgtagtaattcccagtgcaggattcagccacttcgttcccattatccacttctcaaaacaactcgttgagcttcacccagaaattcacgtagcatgcatcattcccatactagggtctctcccaagtgccgcaaaacccattctccaaacccttccacaaaacataaacacgctttccttccaccggtgaaccctaatgagctaccacaag

SEQ ID NO: 21944 - DNA, 263 bp, Glycine max
  Clone ID: 700953325H1
atttcatttcacctctctttcctaacccccaacgccacgccactgtcactttctccaccaatgtgcaccaatagcaataataagaatcatctctcacttctccattaaaattaaaatccaatctaatctgggtttccctttctcccatcagaggacaaagcttccaactttgcgggattcgtatttgttgtttcagtgctgtgatggggaaggtcgcggtggggctgcggttgtctgcgccgccgccgtctgcgctacggcgg

SEQ ID NO: 21945 - DNA, 262 bp, Glycine max
  Clone ID: 700953326H1
aattccctcaaatgtttcacaaccttagcaaaaaagacatctatgataatcaatctagaactgcttttaagactatgtggcaaggcatggatggactaagaggtccaggtctttctggcagcggcaattacttaagtagaagtgctttactatttggaagtccaaaccaaaaagacgactatctgaaggatgcacaaaagtactttggcaagtctaccgcatcattgaatcactgaaggccatccgtggacagaaaagtagc

SEQ ID NO: 21946 - DNA, 261 bp, Glycine max
  Clone ID: 700953329H1
ttggacgtggaggatttggagcagtgtaccaaacagttcttagagatggacattcagttgccataaagaagctcacagtatcaagccttgtcaagtctcaagaagattttgaaagagaagtgaagaaattaggaaaaatcagacaccaaaacctcgttgaacttgagggttattattggactccatcactgcagctcctcatatatgagtatctctctggtggagtctctataagcatctccatgaaggatctggtggaaa

SEQ ID NO: 21947 - DNA, 265 bp, Glycine max
  Clone ID: 700953331H1
atttctcaagaaaatccattggctctacttgattgtggatgaagggcatcgattgaagaatcatgagtgtgctctagcaagaaccctggactctggctatcacattcaacgaagactgctgttgactggtaccccaattcagaacagtttgcaggaattatggtccctgctcaattttctccttccaaacattttcaattcagttcagaatttcgaggactggttaatgctccctttgcagaccgagtggatgtctctctaactg

SEQ ID NO: 21948 - DNA, 73 bp, Glycine max
  Clone ID: 700953332H1
gttgtttctctcccaccctatgaacaacaacccattaatgtaatgaaagtttcgtataccaggtcgcggcctt

SEQ ID NO: 21949 - DNA, 175 bp, Glycine max
  Clone ID: 700953333H1
tgatgtttagggtttttatgaaccccgtcgctcagtaattgtacccggataggcggctaagaataataatctgagacgaccaacctcagcctcttaccatgagtaagctacaaagtgatgcactgagagaggcaatttcccaggtggtgagtaattcaaaggggaaaaatcgtaa

SEQ ID NO: 21950 - DNA, 270 bp, Glycine max
  Clone ID: 700953293H1
aaggcagaaagcaagctcatcctagagttttaaaaatggcagcagcctcctccatggctctctcttccccatccttggctggcaaggccgtgaagctgggcccatcagcccccgaagtcgggagggtcagcatgaggaagaccgtcaccaagcaggcctcctccggaagcccatggtacggcccagaccgcgtcaagtacttgggcccattctctggcgagcccccgtcctacctcactggcgagttcccaggtgactacggctgggaca

SEQ ID NO: 21951 - DNA, 262 bp, Glycine max
  Clone ID: 700953334H1
cttactggaagccttgttgtgagtaagagaaaaggcttcctgcaacgagcacaccaacttgatacctctgattctttctttgcttagaattccacagaatatggagactgttcttttcaatcactccccacctttggaattcaagggtttgagcaaggaggaggaagactcattgctagggcaagtggaaatatggaggtacatgacatgcttcacggactcctggccttgaaagctgtcatagagcttcgtatagcggaca

SEQ ID NO: 21952 - DNA, 266 bp, Glycine max
  Clone ID: 700953258H1
tgagtttacatgcttagttctgaacgtggatgtccctttcataatatctccctctttatttccaagaaccttcaactctatctccaccttaaaaggttagggtaaaataatatagttgacaacttgacacaatgggatgattattgaagaagctgaagggagcacccttctggccttctagccctttattctccttcccctgaaccctttttcttatttatttttttcacaacacccatctctcccaaatgcttatcttgatttga

SEQ ID NO: 21953 - DNA, 209 bp, Glycine max
  Clone ID: 700953259H1
aaatggtcaggtgggacaatatgatgtcagcatcaatacccgacgaggatatcttctacacagttggatttttgcattcaagtgggtttgataattggaaggcctatgatgctcaagataaagaaattctacaattctgtaacgactctgggatcaacgttaagcaatatcttccccactaccgcacacaagaagattggacaaaccat

SEQ ID NO: 21954 - DNA, 124 bp, Glycine max
  Clone ID: 700953260H1
cacgctttctctctgcttagggttttgatcgcatcggatcttcactctcttctccgatctcaaaatgcccgccgtttatggagctcgcttgaccaccttcgaagactccgagaaggagagtgac

SEQ ID NO: 21955 - DNA, 203 bp, Glycine max
  Clone ID: 700953261H1
ggaagcagatgctgttgtttcagtattgggtgaaatggatgcatggatactttgtggctttttccttcaaggaggtcgttacactattggaggcatacactatgttgatgattctgatacgcttgttcctgcaggggacactgagtttgccaaagctgcttcctttggctacaaatcttcaaacctgcgtgattgggtagagg

SEQ ID NO: 21956 - DNA, 277 bp, Glycine max
  Clone ID: 700953263H1
gaaagaagcatatgatgaaattcagactccattggttccccaaatgccaactacattggggctgaaagaactgaaggaatctactattgaactggcttcaagtcaaggatatattgatgcccctgttgatgaggttgtctttgatgtgaataaggatgtggatgaccttttgccagttgaagttaaagaacagcgcctcagcaatctactgcaggcattgatggttgcggcttgtgttgctgctatgcccgttttgaagaagataccaacttcagtg

SEQ ID NO: 21957 - DNA, 180 bp, Glycine max
  Clone ID: 700953265H1
ggtagaccagtgaaagatcatcccaaatcatcttggttgagtttatttaattttggacacaagtaatcgtcctgttattgtgattaagatattttagatgaatttgaggaaatattttcttctctaaattaattttgaacatattacaggataaaaaagaaaaaaaaaaaaggggggccg

SEQ ID NO: 21958 - DNA, 270 bp, Glycine max
  Clone ID: 700953267H1
gcaagtgggccaagacctaatccacaaggatcataccattatggtttgataaacacaactcgtacaattagacttcaaaattctggtccagttatcaatggcaaacagagatatgctgtcaatagtgtgtccttcatacctgctgatacaccacttaaactggctgattactacaagatccaaggggtgttctcccttggaagtatccctgactaccccactggtagtggtggctaccttcaaacttctgtcatggaagccgatttccga

SEQ ID NO: 21959 - DNA, 88 bp, Glycine max
  Clone ID: 700953268H1
taagagaatggctgtggcgtcgtcatcatcccttatcacgatgaaggtcaagctcgcattttcgggtctctcggagtaccctgggtgg

SEQ ID NO: 21960 - DNA, 266 bp, Glycine max
  Clone ID: 700953270H1
caacaaccttgtcctcaaggttgaaatttgggaattggctttggatgaaaatatcatttttccaagtcacattctcaactagactatccttccacttgatcaagccttgtcaggctgtagcacccattttgtgacacttctttggcctaaaacggcctctggttcaatgtcagtattagttggaattaccttaacttagcctttcttaattgtaagacgtgaaaaattggatggattgaagactatgatggaagttggaatttgta

SEQ ID NO: 21961 - DNA, 268 bp, Glycine max
  Clone ID: 700953272H1
ggcgatggacctcggaacctatgacgtgccagaaggagtggacattctgggaagatacgatgcagagtttgcaaaaatcctcgcaaaagatgctttgaaattcgttgctgaactgcaacgtgagttccggaacgatatcaagcatgcattagagcgcagaagagaggcaaagaagaagtacaatgaagggtctcttccggggtttgatcctgccaccagtgacatcagagagcaggagtgggtgtgtgcacctgttccaccagctgct

SEQ ID NO: 21962 - DNA, 266 bp, Glycine max
  Clone ID: 700953274H1
attcccgtccccttaatccaaaatggcaaaaggttttgccgcattatgctcaagatattggtagggaagagagcgaagatgaaagtgatgataatgatggatatgaaaacaatgcacccaaagtttgtgggctatttcctcggttctgccttttgaatccagttccaggattaagaatggagggtaggattcgaagttctacatttcatggagtgcagagtaaatcaattacttctcacagaagaactgcaaaagagcatggtaga

SEQ ID NO: 21963 - DNA, 257 bp, Glycine max
  Clone ID: 700953275H1
ccactatgaaactctgaactgagaaatgaataacattacaaaacgctaaaccctaatcttctgcaattcgtgtgcgtggaaaggttcgagaatggtttcgctggaggaatctcgctctaattcgagccgtttccccttggcgaggagttaccagtaccactcctcggtttcgtccaaaacgcagcgtcacatcggaaggtccatgcgcacgatacgctccagtttcttccaggacgacaacagcagcagctgctgct

SEQ ID NO: 21964 - DNA, 266 bp, Glycine max
  Clone ID: 700953276H1
cttgcgccttagccctctctcactccgcctccatcgatctctttacgccctctgactccgtctgtacgtgtcactccgcctctgtcagcgccgccaccgtcgtagtgtctcctgcaccgtcgctctctcaccattgaagtcattgttgtcgtcgtgggggttgtgagggcatattcgtgttgctccatctggtgcgcgtctcattcaatttaatttgtttttccctttttattctcctatagcttgaaggggttgttttggtgcat

SEQ ID NO: 21965 - DNA, 271 bp, Glycine max
  Clone ID: 700953278H1
ccttgttctgtaccaaccctttcttccacatgttgagtttcagcatcgtcctctcttgagtccccatatcaaatacccaccgaattcaaccccccatataacaaatctcctcccatcccatttttcagcaccaaagtttgaaacttttctcaattgggttgaggagagtttgactcaaatttttatttttctaacgaagcagtagctattagaagtgcaaaaattaaatgtccaacatcttcttgttgatgtttgagattcatgtatccga

SEQ ID NO: 21966 - DNA, 274 bp, Glycine max
  Clone ID: 700953279H1
cctgatttacattcttgccattcgtgttgaactgaaaaccaaattgaaagaaagaagcctacggtctgaaaaatccacttgtcctgatgagttatgtaagtccagtaatggcagcagcaactgcccttctttctcttgcattagatccatgggatgaattccgagaaaacaagtactttgataattcattgcatattactcgaagttgcttgctgatgcttcttggtggcacattgccttttttatggtactaacagaatatgttctggtctca

SEQ ID NO: 21967 - DNA, 278 bp, Glycine max
  Clone ID: 700953280H1
gaaaagaaaagaaaagcaataaagaaagggaaaaaagaagaagagagaagacaaagacaaaaggttctcaaaactccatgattattcagattctctcaaaaacagtaccaagcaatagtcccctacttgatcaacccacaggagtggacctctctcagagtctctacaagaccctgtttaggcttgggttggaacaacatcaaaaaaagaaaggagagactttctttctcttttgtagatcgagatcgtagaaattaagagaggcatgaatagaggtg

SEQ ID NO: 21968 - DNA, 270 bp, Glycine max
  Clone ID: 700953281H1
gaatgcagcaagcgtgtttggttgggggggttagtattcttgagacttgcggaatacagttccatggtggtggagtgtttcttttcgagttatgcaggatgtgggagtagtgatgtttccattactgagctctgcaaactttaggcttgatttgctatagattatcatgtttattgatagatatcatcaaatggatgattaagttggatttaccatgcctataatgatatgataagtagactaattaaagctgcatgcaattatttattg

SEQ ID NO: 21969 - DNA, 265 bp, Glycine max
  Clone ID: 700953283H1
ggcgatatggttgcttggggcatgggaatgaagaatgtgaatcagtacctaaggtggtggaagcattgagcaatgtcaaagctgttcatgttgcaacaggagattacacgacctttgtagtgtctgatgatggtgatgtgtattcatttggctgtggacaatctgctagtcttgggcataatgctgctggaaatgatgagcagggcaacaggcatgcaaaagtgttagatccagagcttgtcacttcactgaaacagatcaatga

SEQ ID NO: 21970 - DNA, 267 bp, Glycine max
  Clone ID: 700953284H1
tctcgagccgattcggctcgagattggccagatttttttctaagaaacgaaaggcggtgacacttgtatgtggaagaaagtagcaccgtctcttctccactttagctaaactcccgaaacgcagctgcgccactcgtttctctggcctcgccgtgattgctaccactccgttcgcttcatccatgtgctgttgtatgggttgaacgaggaagataagaaattgcttcgggaatggagtgggacagcaattccgatctgagcggggac

SEQ ID NO: 21971 - DNA, 269 bp, Glycine max
  Clone ID: 700953285H1
tctcgagccgaatcggctcgagactttccccaacttgcaatgacataacctgatggtcgtgaacgaatctgtcatgaagcgtacaacactagtggctaacacttcaaacatgccagtggctgctcgtgaagcttcaatttatacaggaatcacattagctgagtatttcagagatatgggttataatgtcagtatgatggcagattctacatctagatgggcagaagcattgcgtgaaatctctggacgactggcagaaatgcctgcag

SEQ ID NO: 21972 - DNA, 266 bp, Glycine max
  Clone ID: 700953286H1
cttacctcttggcatggccattcaaatgtcttcttttgtctttgtgtctcttacaattttattttgcttctcttccttggagaagagttttgcctttcaaacaacaaaggaggacacagaaagcaacaatcttcatcaatatactcatcttgttcacctcagctcactccttccttcatcttcctgcagctcttctgccaaaggtccgaaaagaaaagcatcattagaagtggtacacaaacatgggccatgctcccaactgaata

SEQ ID NO: 21973 - DNA, 265 bp, Glycine max
  Clone ID: 700953287H1
cacatccatctttgccttctgcatgttggttctctgtaaacagatactgcaaaagaagaataatattgaatatttggttgggttgaatccctgggttgatgcgttgcagacatcacggctattctaagagtgtctctctctctcattcatgtcccaactgtacgacggaggacaggttgcgtaactgccaccaacccttcgccgcacggtgggcgtggtgctttgccttctgaaggtggtagcccttcagacttgctcttcttag

SEQ ID NO: 21974 - DNA, 267 bp, Glycine max
  Clone ID: 700953288H1
gtccttcgtcagttaactgtgggctaatcacagttcaggaagcccaaaactattaaagtatgtatatctgctctctcttttttgtttgactgagcatagtattcaactcaaagatgatcactgtttctttctttctctatatctcaaaaaggaaaccgacaacacaaaggatttgcagaaagtgcagctacttagttccattttcatcctctctccattgactttcagtcaaaacaaaacaaaacctctttaggtgtgagattccac

SEQ ID NO: 21975 - DNA, 265 bp, Glycine max
  Clone ID: 700953291H1
gttttcttacttttcctatctcatttcttctctattctctcttcatgtcaaaatatttgtcaacagagtaccatgcatgttttcaccatctttgaatataagaaaattatatatttttgtgacttttgtttcctaaaagcacaaaaataataacaaagtaattaaaaaaacttataacatgtgaatgagataagggaaaattattagaatttttcttttttacctataaaaacacttaagaagaaacaataaaaaaagtaaataa

SEQ ID NO: 21976 - DNA, 264 bp, Glycine max
  Clone ID: 700953292H1
ctactttctctctctttgtaacttgtaagcatggagtcctcaaagatctatgcttacctcttcctttgcatgctcttcctctcctccgccactcccattctcggttgtggctactgtggcaaaccccccaaaaagcacaagcctggtaaaacaccaaagacacccacagtacccgttgttaagccaccagtcacaatccctcccattgttaagccaccagtcacaatccctcccattgttaatccaccagtcacaatccctccc

SEQ ID NO: 21977 - DNA, 122 bp, Glycine max
  Clone ID: 700953257H1
gttaaatttacctgcgaatcttgggttcactccaagtatgataaccctgctaagagagtgtttttctccaacaagtcatatttgccatctgaaacaccagaaggagtgaagaggttaagaga

SEQ ID NO: 21978 - DNA, 282 bp, Glycine max
  Clone ID: 700953231H1
ctcgcactcgcactcgcagccgcatctcctccgtcttctcctgggtccgacccctcaaacgctccaaaaccgccgacaaactctacaaaaaatacgtcctctcctacaaactcaaataatacatccccatgcatccaataaccaatttcattgcctgattcattgatatatacctatagaaattggaaaaaatgtctcagatcttggcaccgttccagttactggaactgaacgtgatttccgcccaggacctggctcctctgggtcgcaacatgcgtacct

SEQ ID NO: 21979 - DNA, 281 bp, Glycine max
  Clone ID: 700953232H1
cgttagtcacgaatataatcttaccatgaatacttggctagtagtatactaggggttcaaattcaaactatttcaattaggaggatctcaactcaactcatgtttttattaggactgtttcatattaatactgttaaagtttgaattaatttttacctgtccaaccgctatatagataaaataggttaccaaaacaaaatgtaagtttaggacacaatccaactgtacctcactcacatcagattgatcacttttttttcttaaaaaaaaactttgattat

SEQ ID NO: 21980 - DNA, 283 bp, Glycine max
  Clone ID: 700953233H1
gcgagatggggttctgggtcatgggtaatggtaatggattgcagaagctaaaatcacttacagttgcatcttgcaaaggagtaacagatattgggcttgaagctgtaggaaagggttgtccaaatctgaaaattgcacacctccacaagtgtgcatttctgtcagacaatgggttgatgtcattcgccaaggctgcttcatcacttgaaagcctacgattggaagagtgccacagaattacccaacttgggttttttggtgtcctttttaactgtggtgcaaa

SEQ ID NO: 21981 - DNA, 277 bp, Glycine max
  Clone ID: 700953234H1
gccaatttggtgcttattcatcagctcagcctaagttgataacagttgactcagaagaggtagaattcaagtatgaggaagaatctggattggtgactattgatttgagagtacctgagaaagagttataccaatggagcatttctattgatttttgaatcagagactttgtctcaagatgaaggggtttagagttatagacttgatgtatccatagttcgcaacaatatgatgagcgtatgtagaccaatggcaggaaatgttagaggttccctgt

SEQ ID NO: 21982 - DNA, 276 bp, Glycine max
  Clone ID: 700953235H1
cttcaaaacactcataacacaaagcacaaagcaaagctcatcctatgagttaaaaaatggcagcagcttcttccatggctctctcatccccatccttggctggcaaggccgtgaagctgggcccatcagccccagaagtgggaagggtgagcatgaggaagaccgtcaccaagcaggtctcctcaggaagcccatggtacggcccagaccgagtcaagtacttgggcccattctctggcgagcccccgtcctacctaaccggtgagttcccaggcg

SEQ ID NO: 21983 - DNA, 158 bp, Glycine max
  Clone ID: 700953236H1
tggagattcacaggtggaagctatgttggacaagactatatgtgccatgtctagcgtgttcattggagcacctggttccactttcactgaagacatcctgcggctgagaaaggactggggatcagcatccatgtgtgatgagtatctttgccaaagtg

SEQ ID NO: 21984 - DNA, 273 bp, Glycine max
  Clone ID: 700953238H1
ggaacataccaaacaaggatgattttgtgctttcttcatctcagaagactatggcttctctttttaacaaagaagataacataatttccagtacccattctccacaaaatgtttttcttcctaatggccaaagtggtgagaacttcagccctgttacaggttcaagtggttatgatccttggttacaaagtgctctcttcccaccattgtcaggtggcccttcagctcaggagggagccactcaaaatgaaactatatatggtagcccaagtg

SEQ ID NO: 21985 - DNA, 272 bp, Glycine max
  Clone ID: 700953239H1
ctagagcgatacaacagctacatcaggagactcaacagcaccaaactcctcaacgcctcctccaaactcctcttccgtgccactatcttagtcgcactcatcctcgtcttcctcttcaccttcaactaccctcccctcgccccagacttcacctcccaccgccacctccactcccactcccacttcctctcctcctcctcctccttcgcctcctgggagaagcaggtccgccactcctccatccctcgccgccccaacggcctcaccgtcat

SEQ ID NO: 21986 - DNA, 271 bp, Glycine max
  Clone ID: 700953240H1
cttttcaattttcaactctctttggtatttaacttccaccccaactctccttagacttgtgcatttcctgttggctcccatagagtgtggccgtcacatcccaggatcattatgagttgtggctgctttggagcctcaactctcaagaggaaaaggaatccttctcgtactcctaatgagattgatggctttccacttgataatgttaagaatttctctgataaagacctgagactggccactgataactataatccaagcaaaaagctag

SEQ ID NO: 21987 - DNA, 273 bp, Glycine max
  Clone ID: 700953241H1
attactactttctctctctttgtaacttgtaagcatggagtcctcaaagatctatgcttacctcttcctttgcatgctcttcctctcctccgccactcccattctcggttgtggctactgtggcaaaccccccaaaaagcacaagcctggtaaaacaccaaagacacccacagtacccgttgttaagccaccagtcacaatccctcccattgttaagccaccagtcacaatccctcccattgttaatccaccagtcacaatccctcccattgt

SEQ ID NO: 21988 - DNA, 272 bp, Glycine max
  Clone ID: 700953242H1
tctcgagccgaatcggctcgagagaagaaacttaatcgatcatcacttcacttcactaatacatcatggcagacgagacccagaacaagtatgagagctctgatgttgaggtccaggatcgtggtgtttttgactttctcggtaagaaaaaggatgaagaagacaagcctcatcctcaggaggaggtcatcgccaccgagtttcacaaagtcactgtctcagaccatggagagaacaagcacagcctcttgagacaagcttcaccgatctga

SEQ ID NO: 21989 - DNA, 271 bp, Glycine max
  Clone ID: 700953243H1
attcaacttaagagatcaatatggccaccaccactacccagcctccctctaatatctgttttttccttctgttgttgcttctagcacactttcatttgggcataagccaacttgagctgaattactactctaaaagctgcccaaaagctgaagagatcatcaaggaacaagtcacacaactatataacaagcatggaaacactgccgtttcgtgggtcagaaatctcttccacgattgcgtggttaagtcatgcgatgcatcattactgtt

SEQ ID NO: 21990 - DNA, 273 bp, Glycine max
  Clone ID: 700953244H1
gaattttctaataatggccaaagacgttgagcaggttacagagcaaggtgaatactccgcgaaggattaccatgacccacctccggcgccgttgatcgacccagatgagctcactaagtggtccttgtacagagccgccatagctgagttcatagcaacactccttttcctttacatcaccgtgttgaccattattggctacaagagacagagtgacaccaaaatccccggtaacaccgagtgcgacggcgttggcattttgggcatcgcttg

SEQ ID NO: 21991 - DNA, 276 bp, Glycine max
  Clone ID: 700953245H1
aaaaaacttcttcttgttctgttgtgtccatatgttatattttattttatgatatacatagaagcttgttcttctgatctaattttatgagatcaagtgttggttctttctccatctagtactattatttttcccctgtaatatatatatatatatattattctaattaaactaattcacaggctacttgatccgtttgttttgaagaagatcatcgcctgtttttggttaactgtttaatccaaatccagtttcattttacgtgatccgttaaat

SEQ ID NO: 21992 - DNA, 278 bp, Glycine max
  Clone ID: 700953246H1
aaagagaatccgaggcgaagagaagagaaaaattgagatggaggggaaggagcaggatgtgtcgctgggagcgaacaagttcccggagagacagccgattgggacggcggcgcagagccaagacgacggcaaggactaccaggagccggcgccggcgccactggttgacccgacggagtttacgtcatggtccttttacagagcagggatagcagagtttgtggccacttttctgtttctatacatcactgtcttaaccgtcatgggagtcgccgggg

SEQ ID NO: 21993 - DNA, 281 bp, Glycine max
  Clone ID: 700953248H1
gtttttgcattttgctgggtctatattgtaagaattatggcatcagaggagacaacaatttggaaggcaatgataaaaactccagcctccatagtgttgataatttacaccttcatatcaatgtggtttgtaggtggtctcactgccttccatttgtatttgataagtaccaatcagactacatatgaaaacttcagataccgatatgatcggcgagccaatccatataataaaggagtgttgaataatttcaaagagatattctgcatcagcattcccct

SEQ ID NO: 21994 - DNA, 277 bp, Glycine max
  Clone ID: 700953249H1
gtaataagggtcaatttacttcatcaaagaatcaggatggaactaatagttggggttcagatcaagagtcagggcaggatgctgttcaatctgaaaccttgtgcacacattgtggaataagttcaaaatccactccaatgatgcgtagggggccatctggtccaaggtcactttgcaatgcttgtgggcttttttgggcaaataggggcactttgagggatctttctaagagaaaccaggaacactctcttgcaccacctgagcaggttgatgaggg

SEQ ID NO: 21995 - DNA, 275 bp, Glycine max
  Clone ID: 700953250H1
attttggttcatttttattttttttgtgaaattagaacagctaaaattttggctatagattactttggctcttagaaattagaataatactatcaaaacatttcttttctgtatacttacgcctggacttttgaactggttcaaagcccacatggtgcatagaaaccaagatgttcaagcagcacaagcttggtatatgggagctgttaatttctttattgttcctctgacagtttggcatcagaaaatttatgatacaagtctggtggacttgg

SEQ ID NO: 21996 - DNA, 271 bp, Glycine max
  Clone ID: 700953251H1
atcattcaaaagtttttgaaatgttgtcaccccttcttctatttctatgcctaactcttcctttgtttttgttgtccttcttcacataccgtaaaaccttcaagaatccaccacttccaccaggtcctagaggccttcccataatagggaatcttcatcaactagatagtccttctcttcatgagcagctatggcatctctcaaagaaatatggtcctttattttcccttcaatttggattaaggccagccatagttgtttcctctccaaa

SEQ ID NO: 21997 - DNA, 273 bp, Glycine max
  Clone ID: 700953252H1
tgcttaatggttaagacttaagaagagtagttagttagtagtaattttgttcttgtctttgtctcattggactcaacagagagaacgatctttgcgtttccgtgtctccaagtcctctgttttacactgctgcgcgatacttcattttctgaatataaatacgcaactcaattacccaacccaactttcttttctttgacaaaaaaaataaaaatcccacttcctttttcttctttttttgttctttgttttttgtttgataagaaactgcga

SEQ ID NO: 21998 - DNA, 186 bp, Glycine max
  Clone ID: 700953254H1
gccttgggccgtttcttgctgctagtgccccagttggtagaagagcctatggaggccacttaagcagaaagtgctttcaaaagcaacttcacttccactcacgttgtgttgctttctcttcattcatatgttctgcaactatatcagtgatgccagaattagaagagaagcaagtgtttgatggag

SEQ ID NO: 21999 - DNA, 268 bp, Glycine max
  Clone ID: 700953255H1
agtttgggtgcttttgcaaccattaaccatcttcacttccaggcttattatttggctctgcccttcccaattgagaaggcccccactaagaaaattgcaagtttaaatggtggggtgaagatatctgaactgttgaagtatccagttagaggtctcgtctttgagggtggcgatacgctggaagatttatcaaatgttgtttcagatgcctgtatatgtcttcagaacaacaacatacctttcaatgttcttatctctgactgtggaa

SEQ ID NO: 22000 - DNA, 265 bp, Glycine max
  Clone ID: 700953256H1
ctccaacgacattacagcgttcaatctcgaaccttcaaacgacggtcacacacaacacaatccatgccattctgaaacgcttcttcttttgcttgaacgaccgtcgtttcgttccgaaatggggactctaacgagttgcagtttcatgcctctgaactcggagtttcgccgcgccttcagggagaggattcagtgccacaagctcacgcgcatgaggggcacctcctgcttcttctcacgcgcgcgagtacccaaatggggcaag

SEQ ID NO: 22001 - DNA, 280 bp, Glycine max
  Clone ID: 700953230H1
atcaattcgaagcacatttgttttgttgcaagagaaacagtaatgttggactagaaagtggaaaaccctggtttagattggtgttgggcttttgcgcaggaacatagtcaacactcaacataggatagatagtttgttcgttgcgttgccatgtcggcgtcggagattcttcgggaactggattcgctgaaggacgaaaagaccagaattgagcacaaaatctctgcgcttgaagctcaactcagagagattagtctccaaaacgacgccgcacctccca

SEQ ID NO: 22002 - DNA, 106 bp, Glycine max
  Clone ID: 700953202H1
gcgtatctgctctcgcaatatgtgctattttgcggatttaagctgcgactagacctgtaacttgggggttctagagtttgtttctgtttcttgcatatatatatat

SEQ ID NO: 22003 - DNA, 176 bp, Glycine max
  Clone ID: 700953203H1
ctttcatgtgtattgcaaatttcagaatgctttaggaatatatgtgactgttgtttaacttttttttaccatgtgcaatgtaaaatccctatgaagttatgttgttccacacaagattgatatagcttgactcaatatttttcatgctggtattttgtgtgcgttaaatttccatt

SEQ ID NO: 22004 - DNA, 282 bp, Glycine max
  Clone ID: 700953204H1
attaatgtgcacaaggatctttgttggttcctggaacattggaggcattacaccacccaagaacttggacatggaagactggcttgacacacaaaataattcagcagatatatatgttctggggttccaagaaattgtaccactaaatgcagcaaatgtactaggtccccaaaacagaaaagtttctatgaaatggaattctctaattggggcagcccttaacaatagagacaccaacaaaggttgttgaagacaataaaacagctgaacctcagaagatat

SEQ ID NO: 22005 - DNA, 279 bp, Glycine max
  Clone ID: 700953205H1
gcgagacagaggaacccacggttccagaaaacctcttgtcgctgaactcaagtataacattgatgagcgcacgcgctttcttggccgcgtgaggagtaccgtccgtcagaagcgaatacagcgaacgcataaccgaagcctccttggccagaacaccggtcacttccgcaccaacattaacacagagagccagcaaaatggacgcacagtactccttccctgagcgcgaagtagcagattgcaaaatcttagccaccaaaggcaacgcctctgctcgta

SEQ ID NO: 22006 - DNA, 276 bp, Glycine max
  Clone ID: 700953207H1
atcgaaaccctcgatttccgcatccgcatcgaggctcacgtcatccaaccgtgcctctccgcacggttacttgctgaaccgcgtcgccgaatacgctacagcggcggcggctgctaccgctcctccctctgctccgcctccgggcaagaaggaggttagcggcggacgggaagatcaccgatgagttcaccgggacaggctcgatcgggcaggtctgccaggtcatcggtgccgtcgtcgatgtcagattcgacgagggtttgcctccgatcatga

SEQ ID NO: 22007 - DNA, 278 bp, Glycine max
  Clone ID: 700953208H1
tcgagcattcggttttgaatcttttgagcgaaaatgcagtcgagtcctttgcttctggaggaacccataaggatggcctccatcctcgagccatccaagcctagtttctttccagcgatgacaaagattgttggcacacttggcccaaagtcacgatcggttgacgtgatttcacaatgtcttgaggcaggaatgtctgtggcaaggtttgatttttcatggggtgatcctgaataccaccaagagacgttggaaaatttaagggctgctatcaaaag

SEQ ID NO: 22008 - DNA, 77 bp, Glycine max
  Clone ID: 700953209H1
ggctcgaggttctagatcgcgagcagccgccctttttttttttggttccataataacctggtgctgtgagtagaagt

SEQ ID NO: 22009 - DNA, 216 bp, Glycine max
  Clone ID: 700953211H1
gggaactgaaaagaaatcttaatacaagattacaccttcagaagagtcttgctgaagtgtgtgcatggacaggtcatgatctttgtattctgaacagtattcagagtttgatgttgattgtgtagacttaggagtgaatagtttgatatatgcatggaaggaagagaagggataagttctggggttacagtgataggagcagaagctccatcagcc

SEQ ID NO: 22010 - DNA, 275 bp, Glycine max
  Clone ID: 700953212H1
ggtgattgaagaaatggcagatgcagcgaagggtacctacagagcctcaagatggtcccttaacggaatgactgctcttgtgaccggtggaactcgtggaattgggcatgccatagtggaggacttatgtgggtttggtgccactgtccacacttgttccagaaaccaagctgaattggataagtgtttgacagaatggcgtacaaaggttttttggtttctgggtctgtgtgtgatgtctcatctcaaccccacagagagaagttcattcagga

SEQ ID NO: 22011 - DNA, 281 bp, Glycine max
  Clone ID: 700953213H1
aacaaacctagctgttcattggttattagctcataatggaagtggaaagaatacaaaccttgtctttgaaccagctcaaggagcttccaccccagttcatccgtccagccaatgaaaggccagagaacaccaagccatagaaggtgtcattgtgcctctcatctcactgtctcagtcacatcatcttttggtgaaggaaatagctgaagctgcttctgagtggggattttcgtcataaccgaccatggtatgtcacaaacattgatccaacgtttgcaaga

SEQ ID NO: 22012 - DNA, 280 bp, Glycine max
  Clone ID: 700953214H1
gtaataagatgccaactttggaggagtatggtaccaatttgaccaagctagcggaagagggaaaattggatcctgttgtgggaaggcagccgcaaattgaacgtgtgactcaaattttaggtcgtcggactaaaaataatccttgtcttattggagaacctggtgttgggaagacagcaattgctgaaggtctcgctcagcggattgcaaatggtgatgtacctgaaaccatagagggaaaaaaggtcataaccctcgacatgggtctgcttgttgctgg

SEQ ID NO: 22013 - DNA, 142 bp, Glycine max
  Clone ID: 700953215H1
aaaagattaaaaaaaaaacaaagagactcaaaaaagagttctccgtcaactgaatctccatcatctttcccctttcccccctttcgcatcttcgtgttttttcttctctctcacttttgcttcttcttcatttcttcacgat

SEQ ID NO: 22014 - DNA, 284 bp, Glycine max
  Clone ID: 700953216H1
ggaagaaccaccactaccttatccatttccactcctcaccaagcgcaccatggcctcaaccaacgccctctcttcagcttccattctacgctctcccaaccgccagtctctgaccagaagagcgaaccacaacggaagagtaaattaccgtcaaccgaatagccgtttctccgtcaaagcctccgccaaagagattgcctttgaccagcattcccgctctgctatgcaggccggcattgacaagctcgccgacgccgtcgggctcactcttgggcccaggggga

SEQ ID NO: 22015 - DNA, 283 bp, Glycine max
  Clone ID: 700953217H1
aagaaatgggtagtcttgaagcggaaagaacaacagtaggattggcagcaagagacccttcagggattctctccccatacacctacaatctaagaaacacaggccctgatgatgtttacattaaagttcactactgtggaatttgccattctgatctccaccagattaaaaatgatcttggcatgtccaactatcccatggtcccaggacatgaagtggttggtgaggtactggaggtgggatcaaacgttagcaggttcagagtgggagagttggtgggagt

SEQ ID NO: 22016 - DNA, 280 bp, Glycine max
  Clone ID: 700953218H1
gcaaatcagcagaacatagtggtggcagatggcacagggcagaagaacatgcccacaggaatagtcctccataactgcgagatcatgccggaccctaccctcttggcagaccgcttgagcgtgaagacttacttggccaggccatggaaggcattctcaagggcagtgttcatcgagaatgttatcggggacttgattcagccagatggttatattccatggaacccaattgaaccaaacacacaggattgctacttcgctgagtttggcaacactggac

SEQ ID NO: 22017 - DNA, 275 bp, Glycine max
  Clone ID: 700953219H1
ctttttcttctctctcaacaacttcaccttcttcctcctcgatcatgtctcacttcaagggcaagtaccatgatgagcttatcgccaatgctgcgtacattggcactcctggaaagggtattcttgctgctgatgagtcaacagggacaattggcaagcgtttggccagcatcagtgtagagaacattgaatccaacaggcgagctcttagggagctgtttttcactgctcctggtgttcttcaatatctcggtggtgtcatcctctttgaggaa

SEQ ID NO: 22018 - DNA, 269 bp, Glycine max
  Clone ID: 700953220H1
caactccataacacaaggcagaaagcaagctcatcgtagagttttagaaatggcagcagcctcctccatggctctctcttccccatccttggctggcaaggccgtgaagctgggcccatcagcccccgaagtcgggagggtcagcatgaggaagaccgtcaccaagcaggcctcctccggaagcccatggtacggcccagaccgcgtcaagtacttgggcccattctctggcgagcccccgtcctacctcactggcgagttcccaggtg

SEQ ID NO: 22019 - DNA, 271 bp, Glycine max
  Clone ID: 700953221H1
attgctacttcaattctgattgcaaccacgacactactccaccttccaacatgggcggtatcagccttgaggaaatcaaaaacgaaaacgtcgatctggaaaaaattccagtagaggaagtgtttgagtcgctgaaatgttcaagagcaggtttaacatcagacgaaggagccagccggcttcaagtttttggaccaaacaaattggaagagaaagaggagagcgaattttgcagtttctgggtttcatgtggaacccttatcatgggtca

SEQ ID NO: 22020 - DNA, 275 bp, Glycine max
  Clone ID: 700953223H1
gagaatcaaaagtgtttagttttgattctatttggatgagtgcaaaatatcttttgaagtcccatataagtaatgatgggttataatcataagcaagaaattgaagcttgaagtgtcaatccagatgttattcaacttattttagaccacactataccgacaatagtgcttgcttaacgggtactcagtgagtactagcctaagctatttatgcaccttagtcaaatgtcatttgttcagcttctttcctaatggattcaaacagtggtgaagat

SEQ ID NO: 22021 - DNA, 277 bp, Glycine max
  Clone ID: 700953224H1
atctaaacaaattgacatgaatgagattccatcatatcacaatcttatttatgtcaatttgtttagtttaatttccatatgttattgttttttttaatattaagtcaggtaccagaaaatttgcatcaattcacactcatgagtcacctgaacaagagctagacccggttttattgtttgtatcactgtatgtaatatttaatgttttcggttcatacttttgttgcggttgtattgttgttgtgtatcatctgtgccattagtttatttgatgttg

SEQ ID NO: 22022 - DNA, 224 bp, Glycine max
  Clone ID: 700953225H1
ctctaaggttgtatgcaagatgaagctcacaaaggagcaagttgctcagttccgagaagcagttaagaaggactattatttccagatgtactatgatgacttgccgatctggggatttattgggacggttgacaaggaagggaaaactgaccctagtgagtacaagtattttctttacaagcacattcagttcgatattcattacaacaaagatcgagtcattg

SEQ ID NO: 22023 - DNA, 274 bp, Glycine max
  Clone ID: 700953226H1
tgaagaattgagcaaatctgatgccactaaaaagttggaactgatggatgactttctggaggtggagaaattggctcggttatcaaatgatttcagtggagtttcagttacttcaaacaatatggcaaatgaaactgtgaccaatgatgtatcagaggtcagtactgagaaagatgttccctctaacacccaagataatagtgagccaaatccattgcctagtgaggtttcttctgctgaggaattgtcagcacctgatccccaatctgatgtt

SEQ ID NO: 22024 - DNA, 271 bp, Glycine max
  Clone ID: 700953227H1
cagaatgaaggtcatcatcatcaattcatcatactcactgtcccaaattcctcttgggtcccaacccagtaactatgattccatcggaaaccgttaattttgctcgaaatttcgcagctatggtcagagttcgtggccctttctggtggaacaactctttcagcttctgggatgctcgtacctgataccctttgtgatgctcaagtagctgggtgtctctatggtgataactgtgaggatagggtgttggttgtgacggttgcttcagttg

SEQ ID NO: 22025 - DNA, 279 bp, Glycine max
  Clone ID: 700953229H1
cgcactccaccacaacgatggacaacgaccgcgtctcccgccgcaccgaggtcctcaccaaccacctcctccgccgcatttccccaccctccgcccttctccacccccacccctgccttagctactcccccccggagctctccaacaccatctccttcgacacgcgtgagatgcgaaaactaatggattgccacaatctggaggagcgcgactggatcttctctctcatcctccagagccccctcttcaacccccgccaccgcgccggaagggtgttcg

SEQ ID NO: 22026 - DNA, 286 bp, Glycine max
  Clone ID: 700953201H1
actagttctagatcgcgagctgccgccctttttcctccctccgttctactttcaaatctagggttctagaaggaaacatcgtgaagattgtttggattccgccagaatatggtgatgcagttgcgtgcatttctgccgatggaattgtgtcattgtgggaggaggtcgcagaagattcccagtctcttcagtggaagatgtgtaaaagctttggaaacagttcaagcaaagtccttgatgttcaatttggagtctctcttgctagtttgaaaatggttgctgcata

SEQ ID NO: 22027 - DNA, 244 bp, Glycine max
  Clone ID: 700953154H1
aaagcgcgagatacctcaccgcaaccagtggaactcaccgaattgaactcaagttttttctcttctctcggtttcatcgccatggatgaagaagtgcgcaagatcttcagcaagttcgacaagaacggcgacggcaagatctcgtgcgccgagctgaaggagatgatggtggcgctgggatccaaaacgacgtcggaggaggtgaagcgcatgatggcggacttgatcggaaggcgacggctac

SEQ ID NO: 22028 - DNA, 250 bp, Glycine max
  Clone ID: 700953155H1
gtctccatccataaaaactaataacctaagccaccggcttgatggacactggaacttgctatcctgcgcatgaaaatagtcccatctttttgttttgtttttgtttttgttttttttgtttttatcggcaagtattagttagttttagtcccatctaagtacatctttttctttctttccttttcttttattgaaaagaaattgaaagagaagaaatgatagatgatgtatatataaaagcattgatacc

SEQ ID NO: 22029 - DNA, 251 bp, Glycine max
  Clone ID: 700953156H1
acttaacaacagcacaaagcgggttactgtctgttcaagctaccatctctctctctctttcttagtgcctccttgccagaagttaaaatggcccaagaaactttcctattcacatctgaatcagtgaacgaggggcaccctgacaagctctgtgaccagatctccgatgctgtgctcgatgcatgcttggagcaggaccctgacagcaaggttgcctgtgaaacctgcaccaagaccaacatggtgatggt

SEQ ID NO: 22030 - DNA, 247 bp, Glycine max
  Clone ID: 700953157H1
acctacctctttttcttctctctcaacaacttcaccttcttcctcctcgatcatgtctcacttcaagggcaagtaccatgatgagcttatcgccaatgctgcgtacattggcactcctggaaagggtattcttgctgctgatgagtcaacagggacaattggcaagcgtttggccagcatcagtgtagagaacattgaatccaacaggcgagctcttagggagctgcttttcactgctcctggtgtt

SEQ ID NO: 22031 - DNA, 244 bp, Glycine max
  Clone ID: 700953158H1
ggataactattttgaggaagctttgaagatgaggaaccttcttgaagaatttcattctgatcatgggcttcgtcctccttctatacttggtgttagagaacatgtcttcaccggcagtgtctcatctctagcgtcatttatgtccaatcaagaaactagttttgtgactttagggcagcgagttttagcaaatccattgaaggtccgcatgcactatgggcatcctgatgtttttgatagaata

SEQ ID NO: 22032 - DNA, 249 bp, Glycine max
  Clone ID: 700953159H1
cggatattcggcttgcccggtgaagatgctcctactgagtcataaaatgcctcagttgtacaagccaaagtcttgctctggagtaaacagttgctacctgctattggtgcttggtctaaatatctatgatgagattggaaaagttaatgaaggtagtggtttctttgattattcagtcttgctcctcacatggcatgttgcgtatgtaggatggaacaaatgtactttcaggctttgtgcagcaacatt

SEQ ID NO: 22033 - DNA, 247 bp, Glycine max
  Clone ID: 700953163H1
agttaagaaagactcagaactccaagcttggtggaaggaagctgttgagaagggtcacggtgacttgaaagacaagccatggtggcctaagttgaacactcttcaagatctgattcacatttgctgcattattatatggactgcttcagcactccatgcagctgtgaatttcggacaatacccttatggcggtttcatcctaaatcgtccaactctaaccagaagattgctcccagagccaggaacc

SEQ ID NO: 22034 - DNA, 206 bp, Glycine max
  Clone ID: 700953164H1
ttctaaagaaatataactaatattctttagaataatcaaaaagaatattaaattcaaataaattttagatagaaaaaagacttaaaaaggaggatttgaacatgcgagatctaaaaacatatctttccgtggcaccagtagtaagtactctatggttcggggctttggcgggtctcttaatagagatcaatcgttttttaccagat

SEQ ID NO: 22035 - DNA, 89 bp, Glycine max
  Clone ID: 700953165H1
gattttgagcactatggcatccacacaatgcttcttgcaccaccatgccctcaccactccaaccagagcttcatcacagcgcttagttg

SEQ ID NO: 22036 - DNA, 77 bp, Glycine max
  Clone ID: 700953166H1
caaaagggttgatattctattggtattgccaactgatgctgctctttttgtagacccatgcctgaaggtatatgctg

SEQ ID NO: 22037 - DNA, 234 bp, Glycine max
  Clone ID: 700953169H1
cacatacactcacactctctctttcttccttcctgctgctacaatatggagcctctctcttccaccatacacaacaacaatctctccaagccttcctccctccacacggaggctccgccgccggaggccagtcccctccggaagatcatcgtggtggcctccatcgccgccggggtgcaattcgggtgggccctacagctctctctacttaccccttacgtccaactgctgggg

SEQ ID NO: 22038 - DNA, 88 bp, Glycine max
  Clone ID: 700953170H1
caggaagcttcctttccagaggttggttcgtgaaattgcccaggatttcaagactgatctgcgtttccagagccatgctgtgcttgca

SEQ ID NO: 22039 - DNA, 249 bp, Glycine max
  Clone ID: 700953171H1
aaaccaaacaacttctaacacatacactactctctctctctctcttattgtatggccgccaattccagtagccgagggatcaccgccttagggaagcgagtcgccaaccggatctggacttccaacgcacctcctctcacttcaaggaggggagcatacagtagcggctcagtgtacgacaagaaccctgatgatgagatccagtctgggcaggtcccagacgatgtgatccaggcggcaacacaatca

SEQ ID NO: 22040 - DNA, 92 bp, Glycine max
  Clone ID: 700953173H1
atctatcaccagaacaagcagcattagcaaccaagcaagagaatggcgacgacagctgccttgtgcggcactatgatgagcagctccttcct

SEQ ID NO: 22041 - DNA, 246 bp, Glycine max
  Clone ID: 700953174H1
gtgaggaagcccctggacaaccagttcaacacagtcaccgccgacggaacatcccagaagaacatggctacaggaatcgtgatccagggttgcaacatcgtcccagaagccgaacttttccctacaaggttccaagtgaagtcataccttggaaggccatggaagcaattctcaaggacggttgtgatggaatccaccgtgggtgacttccttcaccccgaaggatggtgcccatgggccggtgaa

SEQ ID NO: 22042 - DNA, 247 bp, Glycine max
  Clone ID: 700953175H1
atcaaatcaatggtttaaatttgacgatgaacgagtatcaaaagaagatccaaagagggctttagaagaacagtatggtggtgaagaagagttacctcgtataaatcctggcttcaaccactctccttttaaatttacaaaacactcgaatgcatatatgcttgtctatgtacgtgagagtgacaaggataaaataatttgtaatgtggatgagaaggacattgctgaacaccttagaatgagatta

SEQ ID NO: 22043 - DNA, 249 bp, Glycine max
  Clone ID: 700953176H1
ggaagaaccaccactaccttatccatttccactcctcaccaagccacaccatggcctcaaccaacgccctctcttcagcttccattctacgctctcccaaccgccagtctctgaccagaagagcgaaccacaacggaagagtaaattaccgtcaaccgaatagccgtttctccgtcaaagcctccgccaaagagattgcctttgaccagcattcccgctctgctatgcaggccggcattgacaagctcg

SEQ ID NO: 22044 - DNA, 248 bp, Glycine max
  Clone ID: 700953177H1
ggactggttaactgaaaaaatgcgtaacaataatttcactgtctcatcaatgcatggtgacatgcctcagaaagaaagagatgctattatgggagaatttcgtgctggaacaacccgtgtactaataacaactgatgtttgggcccgtggtcttgatgtacagcaggtttctctagttatcaataatgaccttccaaataatcgtgagctttacattcatcgaattggccgttctggacgttttggaa

SEQ ID NO: 22045 - DNA, 248 bp, Glycine max
  Clone ID: 700953179H1
gagaaagtggcatcgcttaggtacagatacagatacagacacaacctggaaaaaattccgaccccagcccttcactcttctctctgcagcggaggtgtacttttgatctagtacctgctatccctatgtataagcatggcaagtatttttaaacgttgtgacatccattcttgttaggagttgttataaagctattcatccctgctcaatattctacaccccaagacagagaaggacaatagagatca

SEQ ID NO: 22046 - DNA, 245 bp, Glycine max
  Clone ID: 700953183H1
gtagagtgaatcgttctcatcatggatcttgtaatcaaacatcacaggtgtgacaccctgtgcattcccaatgaggtcctttctgatgatcacaatggtgacaccagagggccccacattcttctgggccccagcatagataaccccaaaccttgtcgactccacaggcttggagcagaaatttgaggacatatcagcaaccaaaacaccactcttgggaacagggtagtccttgaactccaccc

SEQ ID NO: 22047 - DNA, 242 bp, Glycine max
  Clone ID: 700953186H1
tttgatgccaatggtggacccatctcgaaagagttgattcccaaactcagtgtggtgaagaataatttatcctctaaattgggggtagcgctaccagatattgatgcccggcaattcattgctaccatcatatttcttaagggggttggagggattttgtttgtgtttggaagcacatttggatctttcctactgcttttgcatctggcgattactactccacttctgtacgatttctataa

SEQ ID NO: 22048 - DNA, 243 bp, Glycine max
  Clone ID: 700953187H1
tgaagatgaagaacaggtggaaattgagaatttgaatgctagggtcagtgatgttgatgataaaggagacaatcagactagactgtctgaaacagctgatcgatctgttcaggaagctttagaatccggtgctactcaacatgcaagtgatgatgaccttgtcgagagttcttcagccattgcacctgggtatgtacccagtgaacttgatgaaagaattgttcttgagctaccgtcatcaat

SEQ ID NO: 22049 - DNA, 247 bp, Glycine max
  Clone ID: 700953188H1
ctttgtttgcttctcaagtctctcgaagcctctttctctctcttctagaagctatctgtgtttggtgttactaagtctccaacaagcaaagtacatggttgatttggaaatccaggtccccaccccattcgacccgtttgccgaggcgagagaatcggatgcccccggagcaaaggagtatgtgcatattcgaattcagcagaggaatgggaagaagagtctgaccacagtgcaagggctgaagaag

SEQ ID NO: 22050 - DNA, 245 bp, Glycine max
  Clone ID: 700953191H1
gtattgacgtcgatgatgaaaatgaaattggtgaaaacattactgcttctcctttgtgtgaaactcttctgttatgcagtgattggtgctcctcaaacttgtcctgctaacaatgaggataaatgcggcgattcagatgaatggaaaggggagtttttccctgacattcccaaaattaaatatgagggtccgtcaagtaagaatgtgctttcatttaaatggtataatgcagaggaggaaattct

SEQ ID NO: 22051 - DNA, 247 bp, Glycine max
  Clone ID: 700953151H1
aaagaaagaggtgaagtcaaatggtccttagttctgggagtgttgatgcttgagtcttgacggaacgaacggaaaaggggatctcaatggacaacaccaagccccttatcgaactggaactcgacgatgatggcagaatcagaagaaccgggaatgtgtggactgctagcatacacattataacagtggttgtaggggcaggggtgctgtctttggcatgggttatggcacaactaggatggttagc

SEQ ID NO: 22052 - DNA, 117 bp, Glycine max
  Clone ID: 700953192H1
tctgggagtgctttcgcagttttcactcactgttcagtagtagggtttttctttatccctttttcttctctcttctctctttcaccacttccacacaacatacgagcaagcgaaagg

SEQ ID NO: 22053 - DNA, 244 bp, Glycine max
  Clone ID: 700953193H1
cgccgccgtcgggatgctgcaacggagtgaagagcctcaatgccgccgccaagaccaccgccgaccgccagacggcgtgcaactgcctcaagtcggccgccagccaaatctccggcttcaaagccaacaacgccgcctcgctccccggcaaatgcggagtctccatcccctacaagatcagcacctccaccaactgcgctaccatcaaggtttgaagagaaagtcatggacgcaggaaaccgga

SEQ ID NO: 22054 - DNA, 246 bp, Glycine max
  Clone ID: 700953194H1
aacacagcaatagcttctggtgatctcgttttctcacattgctctcttccccctttctctctcctctttctctctcttccattgcttctccataagcaacgccacgcgaggtcaattgcgcaatcgccatgactgtgatgactcctgctcccattgaccagcagcaggaggacgaggagatgcttgtcccgcacacggatttagctgagaataatcaccaacccatggaagttgtggctcaacctg

SEQ ID NO: 22055 - DNA, 248 bp, Glycine max
  Clone ID: 700953196H1
ggagaacgggttggtcccaattgtggagccagagatcttgcttgatggtgagcatgggattgacaggacattcgaagtagcccaaaaggtgtggtcagaggtattcttctacctggctgagaacaatgtcctgttggaaggtattctcctcaagcctagcatggttactccaggagccgagtccaaggacaaggccactcctctgcaagttgctgattacaccctcaagctccttcacaggagaatcc

SEQ ID NO: 22056 - DNA, 249 bp, Glycine max
  Clone ID: 700953118H1
ctagaagcaataagatgaaaatgaaagtgcttgttttgtttgttgctacagttttggtagcatatgaatgccatggctcagactaccagaagttccctctccaaatgaaaactgggtttggtgggcaatacagcaatgaggtggcatgtgccagttggaggcttggcgtggaagcaaacaacgtagtcaagtggcaaactgttcctgcagcttgcggagagtacatagctgactacgttctaggagacc

SEQ ID NO: 22057 - DNA, 251 bp, Glycine max
  Clone ID: 700953120H1
ttgaaaactcctcctcatcctcacccccaggaggtatggggaagatagaaaaaaacaaaaacaccttattgacatcaccttttctatcatccttcaagtcatcatcttcttcctcttcttctttgatgatggctaccctcctggtcattctcttggccttgttttctccttcactaggccttcccttagcatctttccaaccaaaagacaatttcctcattgattgtggtgctgaaaacacagtgactctc

SEQ ID NO: 22058 - DNA, 246 bp, Glycine max
  Clone ID: 700953121H1
ggaagttgaagttgggttgctgcaacaatggaacctgctactaataacaatccttctccttctgctcatgcttcattacatgaaaccaaatatattgagagggtgaaacatgccctgatcgactttggagtcccagaagagctaaggttgtctgatcgtagcatctacaaggttccttgctatctccgaaaggtgaaggaagatgcctacactcctcagtgcatctcaataggtccaattcacttc

SEQ ID NO: 22059 - DNA, 253 bp, Glycine max
  Clone ID: 700953122H1
atcttcatattcatcaaactcatcaaaatgaatctgtaccactcctccaccaccaccaccaccaccaccatcttcaccgtcatattcctcctccttgcaatattattcactctcacaccccacaaggccaacggtgccacgtgtcaccctgaggaagaagcgggcctgttgggcttcaaatccggtatccgatccgacccgtccggcctgctcagtaactggatatcgggtacggactgctgcacatggaccg

SEQ ID NO: 22060 - DNA, 251 bp, Glycine max
  Clone ID: 700953123H1
agacgtggaagctgtgacattcggtgtgcgatctcggttcgaagttgtaagcgttcaacgataaggagccgtcgtcggaactcggaagtgggtttgcgtcgttgtgaggtttaacgagacgatgagggcgctgtttctgttcttcgttctcttctctttcagctatgccaccgaacaaatctttcctgctcatatcggtagcattttcggtggtggcggtggtggccgctctcgcgaacccaaatacaaga

SEQ ID NO: 22061 - DNA, 167 bp, Glycine max
  Clone ID: 700953124H1
ctcattgacagggaagaaatataatgcatttaattcaatatggtttgatggtttcgttattttttcgaagactaggaaatcactgcatcatttaatagatattcagtcacgccgagagtttcccaaagtttcaaaatgggaagccaaggttaaataaaattttggct

SEQ ID NO: 22062 - DNA, 245 bp, Glycine max
  Clone ID: 700953125H1
ctgtagttcagaagagcaaaagggaacaggaagatgagattagacagaagatggaagaattgcggaacgaacgtcagaggagaattgctgaaagaactgcatcctctggtgttggtcgtgccgcgacaaagaaagaccaaattgaaggtaaaacagcaaggatttctgccaagagtgacaagaataagggaatcagttctgtcaaggtcaggggaatttagcaagccacacagtaaagtgtgttt

SEQ ID NO: 22063 - DNA, 250 bp, Glycine max
  Clone ID: 700953126H1
gtactctcgcagtctagctagcctgcactacctaagtacttttgtgcccttaagctttgtctttgtaagttggttgtcatcgtgaagcacaccagcagtgtcgtcgtgaagcacgccagcagtttcatcattgtcatcaaccattctccatcattgtcgtgggtcattttccatcattgtcgtcgaccattctccatcactgtcgtgggtcagcttccaggtcatgttcctttctccctttctttcttat

SEQ ID NO: 22064 - DNA, 252 bp, Glycine max
  Clone ID: 700953127H1
ccaagctctgcaactttgcttctcaacatggagtatcgtctcctacccatttttactttactcaatattgcactggtggcaacccatgctgctttaccccctgaagtttactggaagtcggtgcttcctactacgccaatgccaaaagccatcactgatatcctttactctgattgggtggaagagaaaagcagctcagtgcatgttggaggtggaggcgtgaacgtgcatacaggaaaaggaggtggcagt

SEQ ID NO: 22065 - DNA, 254 bp, Glycine max
  Clone ID: 700953128H1
cagaatagttgaagtgaatggcataaaaatgcatgttgcagagaaaggagagggtccagtggtgttgttcctccacggcttccctgagctctggtactcatggcgccaccagattctctctctcagctccctcggctaccgcgccgtcgctcccgatctccgtggctacggtgacaccgaggcaccaccttcaatcagcagctacaactgcttccacatagtgggtgatctcgttgcgcttattgactctctgg

SEQ ID NO: 22066 - DNA, 252 bp, Glycine max
  Clone ID: 700953129H1
gtgagtgaccctgcaaaacttccgaagtggaactatgatgggtctagcacagatcaagctccaggggatgacagtgaagtcattctatacccacaagctattttcaaggacccctttaggagaggaaacaatattcttgtcatttgtgatgtgtacaccccagctggtgagccacttccaaccaacaagaggtatggtgctgccaaaattttcagtcaccctgatgttgctgctgaggaaccatggtatggt

SEQ ID NO: 22067 - DNA, 255 bp, Glycine max
  Clone ID: 700953132H1
caatctctctctctccaatggccaaagacctcgaaacggagattcaaagtgggttgcctcacaaggactaccacgacccaccccccgccccattctacgaccccgccgagctccgaaagtggtccttcttccgagccctcatcgccgagttcgtcgccaccctcctcttcctctacgtcaccatcctcaccgtcatcggctacaaccaccagacagccaccgccgccgagccctgcagcggcgtcggcgtcctcg

SEQ ID NO: 22068 - DNA, 251 bp, Glycine max
  Clone ID: 700953133H1
gttcattcgatgcaggtgggtttcgccggcgccggagacacggcggagaaaaacccgttcaccccaaaagccttcgcgattcggtattgggacaaagagatccgcagcgggttaccgaagccaccgtttcttgtatcaaaggcgtcgccgctgagcgcggcggaggcggcggcgttcttaaagctcgtctccgggaactcgctctccacgcggctgccggaattctgcgccgccgcgaactcctctgcttc

SEQ ID NO: 22069 - DNA, 252 bp, Glycine max
  Clone ID: 700953135H1
gagaaattcaaacaacacaacaaaacctcgagaagtaaaccaatttcaaaatccacaccattctcattccccttctccttctgtactttccgttacgaacttgcctaaaagcaactaaatgcttcaacttcactaacgctatagtatcgtgtcaacaatgccaatgcatcaccatcttcttcttcttccccttctcttctctcttgtttctccgatgacctccctcaactccgacggcctctccctgttagc

SEQ ID NO: 22070 - DNA, 249 bp, Glycine max
  Clone ID: 700953137H1
gaccattccaaattaatctgattctctattgtgcgttgccctgcttcagcttcatagggcttgttggcggtgtcataactcgtaagaaaacaaagctcatcgaatcgaagtccttcattttcattctcttccttgtcactgatcgtcatgtacagagttgcagcatcatcattcagaaggcatctcaagggccatggaggtaacttgggatccactaggttttcaacttcagccgcggtagctgcaagg

SEQ ID NO: 22071 - DNA, 251 bp, Glycine max
  Clone ID: 700953138H1
gttttctgattaactctttcttctcataactctgccgccgcaacagccccaaatccaatggcttcagagaagaaactttcgaacccaatgagggagataaaggtgcagaagctcgtcctcaatatctccgttggcgagagtggagatcgtcttaccagagccgctaaggtgttggaacagcttagtggccaagcccctgtgttttccaaagcaaggtacacggttcgttcctttgggattagaagaaatga

SEQ ID NO: 22072 - DNA, 249 bp, Glycine max
  Clone ID: 700953139H1
caagggtgcttctagcttcctctcagtggcaagctgtccaagaatactactaccatcttatggtgaggaggaccgttggatgtgctcctacagccaatctatttgtaaaaacttctcaggtggcagcaggttcacgagatcttgtgatgtttgatgacaattctgtagtcatggtaacagagtcagatctagaaggttacaacccaagtagtcaatcaggagccatggcaagtgaaatatgggcagatt

SEQ ID NO: 22073 - DNA, 250 bp, Glycine max
  Clone ID: 700953141H1
ccaaaacaaaagaaaacgaaaatccccaatcctgcgttgtgttgcgacttgcgagccatgagaggggtcgtgaaagcgtttgcggggaatctgttgttccatggaagaaagactcagactcagtgcattcgctcctacagtctgatcccaatggtgatagagcactcttcccgaggtgagagggcatacgacatcttctcgcgccttctgaaggagcgcattatctgcatcaacggacccatctccgacg

SEQ ID NO: 22074 - DNA, 247 bp, Glycine max
  Clone ID: 700953142H1
cggagatacctgcatccctttcaaattgtacctatcttaatactcttagacttgaccaaaaccaactcaccggtcacattcctgcaaacttgagtcagctcccgcggcttaagttgtttagtgttgccaataatcttttgacagggccagttccaccctttaaacctggtgtagctggtgcagataattatgcaaataattcaggcctgtgtggtaatcccttgggtacttgccaggtcgggtcttc

SEQ ID NO: 22075 - DNA, 248 bp, Glycine max
  Clone ID: 700953143H1
gcggaaagaagactacttcttgtgctgttggtttggcaaagacagtgttgaggaggaccaaacaacggctactaggttggccaatacaatgtctacctcattaaagggtagacctgtacagggtcgcatatttgaaggcaaagagccgccacagtttgttgctattttccaaccaatggtggttctcaagggagggttcagctctggatacaagaaactaatagcagacaaaggagtatcagatgaga

SEQ ID NO: 22076 - DNA, 251 bp, Glycine max
  Clone ID: 700953144H1
tagttatctactcttttctgcatgtttgttctctcaacgactcctccgcgaaagagtattattcaatattttggttgggttgaatcccggggttgaagcgttgcagacatcacggctattctaagagtgtctcgctccctcattcatgtccgatctgtacgacggaggacgggtagttgcgtaactgccgttaacccttcgccgcacggtgggcgtggtgctttgccttctgaaggtggtagcccttcaga

SEQ ID NO: 22077 - DNA, 249 bp, Glycine max
  Clone ID: 700953145H1
catgtacacgttcatgttcaattttgcgaaagagagaccagagttgggccgggatttgtttctggcatggactggatgggtatgtgtctggactgcactgttgctattcttgtttgccatcttaggggcttgctctataatcaacaggtttacccgtattgcaggagagttgtttggcatgcttattgcaatgctcttcatgcagcaagctatcaaaggactcgtggatgagtttcgcataccagagag

SEQ ID NO: 22078 - DNA, 250 bp, Glycine max
  Clone ID: 700953146H1
gtgcgatttttgtagatcttgagcccactgtgattgatgaggttaggactgggacataccgccaactattccatcctgagcagctcattagtggaaaggaggatgcagcaaacaactttgcccgtggccactataccattggaaaggagattgttgagctttgcttggaccgcatcagaaagcttgctgacaactgcacaggtctccaaggttttctggttttcaatgctgtgggtgggggaatggctct

SEQ ID NO: 22079 - DNA, 253 bp, Glycine max
  Clone ID: 700953147H1
tatcaacagcgcaaggattgataatgtaggtttagacccctgtaatgtccaacaccttctgaatctcattaaccctaatcacatcatggtatgaagaccttcttatctgaatagcacggtgatctttgtggtaagcgaggcagagagagcagagagcaccgttcatacaatctaagcaatacatgttgcactcgctcttgtgcgaatcagcgtgaagcttgcattgaacaaagaagctctctttgagaagagg

SEQ ID NO: 22080 - DNA, 250 bp, Glycine max
  Clone ID: 700953150H1
ctcgagccgcgggactttcactagccgcagcagcctcaggaggagaataaggatgtctcacagaaagttcgagcacccaaggcacgggtcactgggatttctccccaggaagcgtgctgctcgtcacaggggaaaagtgaaggcattccccaaggatgacccatccaaggcacccaagctcactgcattcttgggttacaaggctggtatgactcacattgttagagaggtcgagaagccaggatcaaag

SEQ ID NO: 22081 - DNA, 255 bp, Glycine max
  Clone ID: 700953114H1
ggagatcatctgtatgaagcatgggaacacatattaacttgcctctcccgaattgagcatttgcaactgttaggtgagggtgccccaagtgatgcaaccttcttcacttcaactaatcttgaaatggaggagaaagcactgaaaacattaggtttctcttcttttaagaaaggaacactccagaatccagccatggtggctgttgttcgtggtagttcatatgacagtacaagtattggggtcaatgcttctgca

SEQ ID NO: 22082 - DNA, 241 bp, Glycine max
  Clone ID: 700953071H1
cttggttgcataacttctgtagaagctggcatcaataacaaggtgaaccttttgagaacaatgctctcttgggaagagcaattgcgctctgaagtaagtttcatgcaagcaaagcatgatgcaaagctttatgatcttcatggttctcttggggaagtggtaattatatgttggcctcatggtgaaattttgaggttaaaggcgggtagcactgctactgatgctgctcaaagattggttt

SEQ ID NO: 22083 - DNA, 245 bp, Glycine max
  Clone ID: 700953072H1
aacactcataacacaaagcacaaagcaaagctcatccttgagttaaaaaatggcagcagcttcttccatggctctctcatccccatccttggctggcaaggccgtgaagctgggcccatcagccccagaagtgggaagggtgagcatgaggaagaccgtcaccaagcaggtctcctcaggaagcccatggtacgggccagaccgagtcgagtacttgggcccattctctggcgagccccgtccta

SEQ ID NO: 22084 - DNA, 246 bp, Glycine max
  Clone ID: 700953073H1
aataacggttttcgggttgggttggagttcgggaagaacaaggttttggagatgatttttacgaggagtggtgatgtttcggttgtcggtatttgcgggattggtgggtccgggaaaaccactcttgctagagaggtctgcagagatgaccaagtgagatgttatttcaaggagaggatcttgtttttgactgtgtcgcagtccccgaatgtggagcagctgagagagagtatctgggtacacatc

SEQ ID NO: 22085 - DNA, 206 bp, Glycine max
  Clone ID: 700953074H1
ggatgtcggctttgaaagtacaaactttgatactactcatgttagaaagaacatcgggatttggaagggagatgctgatgagttaaacccatgttgggctaagccatctgaagacaatgcggagactgaggggttttttaccttttcactaaccaatggcccagagtaccatatatctcagatagcagatgcagtgcttgttgctc

SEQ ID NO: 22086 - DNA, 248 bp, Glycine max
  Clone ID: 700953076H1
ctacgcctctcctctctctcaaaaatcgttctcttcgattttagcgttttgttttgctgctgcctccgttccccccttctcataaacaacgcgttttctcttctgcttcgtatctattctttgctctttggttttggttgattcaaggccttcacagcattcgttgcggcattttaatcgatttatccaagcaggactgaatgaactaatggagtctaaaggtgggaaaaagaagtctagtagtagta

SEQ ID NO: 22087 - DNA, 141 bp, Glycine max
  Clone ID: 700953077H1
gttttggttttggagttgggtttataatcttcaatcttgtttgggagagagagagagagatagagatgtacatagcttccatgggaatgtctttcaaggactccttgaaactgcttgaagctgatattcaccatgccaata

SEQ ID NO: 22088 - DNA, 240 bp, Glycine max
  Clone ID: 700953078H1
attttctttcaacaaacgcagtttctctctctctctctcgtagttcaattcaattcaattcaatatgatgcagagactctcttctgccactactactactactactcgctctgccttgctgcgctacggtggcggcgcacttcgccgggacgtgcttgctcccatttcctcttctcacttagcagctaagtcacaggcgggtgaaaatgacaccaaagcagctagatggttttcattatg

SEQ ID NO: 22089 - DNA, 129 bp, Glycine max
  Clone ID: 700953079H1
aaagaaaaccacacaccacacattgacaaataaacgtgcaaacttatgtgtgcataattttcttatgtatgcttaagttttgtaattggatgctatctagtttttcatatctaatagggtgttgtgtca

SEQ ID NO: 22090 - DNA, 235 bp, Glycine max
  Clone ID: 700953082H1
ctcttagcgcagatctctcagggcttgcatcttctcaggtaagttgtgaagatgtacacatcaaggaagaaaatccacaaggataaggatgctgaaccaactgagtttgaagagtcagttggacaggcattgtttgatctggaaaataccaaccaggagcttaaaagtgatctgaaggatttatacataaactcagctgtgcaagttgatgtttctgggaaccgcaaggctgttg

SEQ ID NO: 22091 - DNA, 241 bp, Glycine max
  Clone ID: 700953085H1
cacagattgaagcaccgtggtcctgactggagtgggctccaccaatatggtgataactatttggctcatcaacggttagccatagttgatccagcttctggtgatcaacccctcttcaatgaagacaaaactgttgttgttacggtgaatggagagatctacaatcatgaagaactcaggaaacaattgcctaatcacaccttccgtacaggaagtgattgtgatgttattgctcacctgt

SEQ ID NO: 22092 - DNA, 241 bp, Glycine max
  Clone ID: 700953086H1
tttgatgcaatggtggacccatctcgaaagagttgattcccaaactcagtgtggtgaagaataatttatcctctaaattgggggtagcgctaccagatattgatgcccggcaattcattgctaccatcatatttcttaagggggttggagggattttgtttgtgtttggaagcacatttggatctttcctactgcttttgcatctggcgattactactccacttctgtacatttctataac

SEQ ID NO: 22093 - DNA, 126 bp, Glycine max
  Clone ID: 700953087H1
aaaaatcatattttgttattgctgaagttattgttttagttgcttttgatttgtagaacaaggtccggcaaccatatacttttagttttggcctaaattatacaggaggacacgcaaatagttttt

SEQ ID NO: 22094 - DNA, 240 bp, Glycine max
  Clone ID: 700953088H1
gtgcatctcacaggatgtctggactgagcttggacgtccctgtggcattcatcaaaagcaggttgatcaaatggttattcattctgcttcagattttcggccacggacaactctctgtggtgattacttttataattattttactcgtggtctggacatcttatttgatggacagactcacaaaatcaagaagtttgtgttacacaccaacttccctggtcatgctgatttaattctcac

SEQ ID NO: 22095 - DNA, 139 bp, Glycine max
  Clone ID: 700953090H1
gaaagacaatgccgaagtctcaatttcgaaccccatttctggtttctcttccccttttgttattcatcttcaacctcaccccttcgcacgcactctatggagcatcctcacccgtgcttcatctcactccctctaactt

SEQ ID NO: 22096 - DNA, 150 bp, Glycine max
  Clone ID: 700953091H1
agacaacgaaaggagaagatgaaatgggatatgcagatggaggaaatcgaagcgattatggagaaaatttgggacctccacgataagctcagcgacgccattcactccgtctccagatcccactttctcacttccgtcaaaaccctcaaa

SEQ ID NO: 22097 - DNA, 240 bp, Glycine max
  Clone ID: 700953092H1
aaactagctgtggaactggaagcacattcacattcacatgcaaaaggaatagctgctaaatgatgaacgccgcaacagcagctaatagcagtgtttattcacagacacagtgcagactactttcctcggatcttcgaagttcgattcctttcttgaatgaacgcaagtcacggttggtggtaagggctggcggtcgtcctcctcaaaatatgggcaaggacgaggatgagaacagcagca

SEQ ID NO: 22098 - DNA, 235 bp, Glycine max
  Clone ID: 700953093H1
caagaagcttacccgtttcggcggtttccggtggcgcacgaagaggaaatggaccaatctaatgccgctggtcgtcgccctcgtcgtcgttgcggagatcgcgtttctcggaaggctcgacatggccaagaacgccgagatggttgacaccctcgctgtcttcttctaccgccctcgcgcagtggttgaaggcgacgatttggggctgggtacggtgggttgtggcgcggcggta

SEQ ID NO: 22099 - DNA, 98 bp, Glycine max
  Clone ID: 700953095H1
cagcttttccatggaaatcggctcccccgcattccttaccctcgaagactattcttccttcttcttccctgacatggatcccattcccaattccaatg

SEQ ID NO: 22100 - DNA, 244 bp, Glycine max
  Clone ID: 700953096H1
accgcttctggacatcagtggcggcgcgtggcgcgtgcctgccactcgtgctcaactgccagattgcgctgcttgggtgcaacttggtttgccacgtagcagtgctcttgttgcattttctaacaggagggtgtaacgggattggcgcgtgggtcttcaattccgtgctcaacggtgctattttgttgctgtttcttaatttttacgtgaggatgtatttagcaaggaggaggagcgtaagggt

SEQ ID NO: 22101 - DNA, 254 bp, Glycine max
  Clone ID: 700953102H1
aacccaacttatctctctcgccctttcttttctcatcttttagtaaaagggttatctcctagtttcatttttctcttgtttccaccatttttctaaggtgaccttggaactggtttaattcaaagacacttattccatttgacattagaggccgtgttcgaatacttcatcctccagttatgacttgtttcccattctcatttggtaagaaagtgcgctttgtggcaacacatgatccagatattgatgaagta

SEQ ID NO: 22102 - DNA, 252 bp, Glycine max
  Clone ID: 700953103H1
gtgttgcggctgctgttctttcaagtgctggctacaaggtggttgttcttgagaaaggaaactatttttctactcaggattattcatctctagaaggtccttccatgaatcaactatatgaaactggagggatccttgcttctgtggactcaagagtgctagttttggcaggatcaacagtgggtggtggctctgctgttaattggtcagcctgcattaagaccccacacaaggtgctaaatgagtggtctg

SEQ ID NO: 22103 - DNA, 252 bp, Glycine max
  Clone ID: 700953104H1
gtcgaaccagacacacttccacgtcaccaccaccgtggaaggtggcgcgtgaggctgtttccggcgacctataccggcggcgctgagtggtgatcaaggaaatgggtcagaggctaagctgcgtgcaacagcagcacgaggagcatggtgtgctcttcccagcacttgcaagtggagaattggaggttgttgaggccatggtggaggaagaccccactgtgttggaacacaccactggctgtgaccgccttt

SEQ ID NO: 22104 - DNA, 240 bp, Glycine max
  Clone ID: 700953105H1
tataagaccgatcttcctgaaaatgatcaactgaatgttgcctttgactgatgttggacatgctagcatgcaagtatgcattgctggatttaaaaaggggcagctgaaagtgttgtcccaatcatatgataggtccctaggtgggagggactttgacgaggttctgttcaatcattttgctgcaaagtttaaggaggagtacaagattgatgtattccaaaatgccagggcttgtctgag

SEQ ID NO: 22105 - DNA, 245 bp, Glycine max
  Clone ID: 700953070H1
cacaaacactcaactctctctttctttcttcctgctgctacaatatggagcctctctcttccaccaaacacaacaacaatctctccaagccttcctccctccacacggaggctccgccgccggagccagtcccctccggaagatcatggtggtggcctccatcgccgccggggtgcaattcgggtgggccctacagctctctctacttaccccttacgtccaactgctggggatccccacacttg

SEQ ID NO: 22106 - DNA, 241 bp, Glycine max
  Clone ID: 700953106H1
ctcgggaaaatcacagcgacgctcaggaaaaactctaaactgtgaaaaaaccactgcgatcaatggcaacgatcaaggccgtgaaagctcgccagatcttcgacagccgtggaaatccaaccgtcgaagttgacgttattctcagcgatggaagcttccacagagccgccgtgcctagcggtgcttcaacaggtgtttatgaggctttggaattaagggatggaggctcagactacctcgg

SEQ ID NO: 22107 - DNA, 255 bp, Glycine max
  Clone ID: 700953107H1
gtgcagaacacgactccgatttctgagcgccgaaaggccttgtttgaaccgttagaacccataatgaatattaatggccgacgacccttggctgagtctttacttcctccccctgactttgagtctgcaaactatccaaagggctggttgattggcaagaagagaaagcttgttaatgtcgatgttgttgaaagcatgcgaaggattgccatccaagaaatgaacagaaaggacagggaaattgatgggctaaat

SEQ ID NO: 22108 - DNA, 138 bp, Glycine max
  Clone ID: 700953108H1
ggaaaattaggagtgctgagctcgtattattattatttttcctgtaaattgtttccctcatgtttgtgttttattttcatcatagatattgcaaaccacttattcatttttaaaatttaaataaatatcctatatgag

SEQ ID NO: 22109 - DNA, 255 bp, Glycine max
  Clone ID: 700953109H1
gtgccaaaatcatctccgaggcaccaacatcggcagccacatatttctttatttattggtacagtattgtttttttcttcttcttcttcttcatttttcattaacatatatttctttttcgaagaatcaaaggtagaatctacaatattaaaaaaaactgtataagaaattaaaggtagtggtagtggagtgtgtgtgtgtgtgttaattatgtgtatgcatggtggaagctagagtaatagaggcgcaacatgg

SEQ ID NO: 22110 - DNA, 250 bp, Glycine max
  Clone ID: 700953110H1
gttaaagaggaagttgcaaatctttaccttgggtataggtggtgttggtctggtttcagcttatgtttcttattcccctgagattgcagctagctttggtgctggctttcttggttctttggcgtatattcgtatgctgggaagtagcgtggactcgctaaggactgatggtgcaaagggatttgtcaagggagcaattgggcagccaagattactggttcctgttgttttggtcatggtctataaccgc

SEQ ID NO: 22111 - DNA, 117 bp, Glycine max
  Clone ID: 700953111H1
cgcaaacagcttcacttcacactctactcccaaaatggcggctgctacgacgtcgtattcttccgcaatcgccgcatcgtccgataccctagccaaacctgcttccacacaacatac

SEQ ID NO: 22112 - DNA, 252 bp, Glycine max
  Clone ID: 700953024H1
cctcgaaggagagagaaattagagagagaaaggtgtgagtgtttgttttttagagagagaaagagtgtgagtgttgtgttgagtgcagtttctttctcacatggcctctatgccgttggggccgcagcaacagcttccaccgccgccgccgcaacaaccgccgccagcggagaatgacgcgatgaaagtggactctcgcggcggctccgacgcgagcaccgataaggaatgtcagcccctgtcgcagatggt

SEQ ID NO: 22113 - DNA, 130 bp, Glycine max
  Clone ID: 700953031H1
ggcatcttgtgttgtgtccctcttttaagctatttccttctcttaacacaattggttgtgccaattgccatagtcaccaaccaattaacacaggtatatatatcatcatatcatcaccaaatgacacata

SEQ ID NO: 22114 - DNA, 251 bp, Glycine max
  Clone ID: 700953033H1
gtttctcaatcgttagatctcatcttatactcaccggcgagtccatctcgcgccagctacgacgctgctccggccaccgctccggtcaccgcctttggttccctcactttctcgtccttcttcttctcagaaatatgccttctcagaaagttgaaacgggtcatcaagacacggtccatgatgttgcaatggattactatggtaagaggctggccacggcttcatcagatcacacaattaagtaattgggg

SEQ ID NO: 22115 - DNA, 250 bp, Glycine max
  Clone ID: 700953034H1
gtttctcaatcgttagatctcatcttatactcaccggcgagtccatctcgcgccagcgtcgacgccgctccggccaccgctccggccaccgcctttggttccctcactttctcgtccttcttcttctcagaaatatgccttctcagaaagttgaaacgggtcatcaagacacggtccatgatgttgcaatggattactatggtaagaggctggccacggcttcatcagatcacacaattagataattggg

SEQ ID NO: 22116 - DNA, 250 bp, Glycine max
  Clone ID: 700953035H1
cacgacttggagttggaatcctcttcttcccctctggtgttctcagtacggaggagtgaaccggagctggtggctccggccaagcccactccccgcgaaattaagatcctatctgagatagattctcaggcgggtcttcgtacccaaattccaatcatacagttctaccgtaacgacccatcattggcaggcaaggacccagttcaagccattcgaaacgctcttgcggaagcacttgtcttctactacc

SEQ ID NO: 22117 - DNA, 248 bp, Glycine max
  Clone ID: 700953036H1
ctcgagccgattcggctcgagggcatgcctttgagaaggctgtgctaaaaaggttgatgactgatgtgccctttggtgttttgctctctggaggtttggactcttcattggttgcagccgtcacggctcgctacctggcaggcacaaaagctgcgaacaactggggaactaaattacactctttctgtgtaggccttgagggtgcacccgacctaaaggctgcaaaggaagtagcaggtacataggaa

SEQ ID NO: 22118 - DNA, 249 bp, Glycine max
  Clone ID: 700953037H1
gggaaacaaaaccctcggacacttcctacctattcggacgagggaagttcatgacatcattcaatttttgttccataaatcaaaggcccaagagagcgtgaacctcaccgaagcgcttttgagtctttccaacaacgtaatatcgcagatgatgttgagcattaagagctccggtacagacagccaggcagagcaggcacggactttggttcgtgaagtgacgcagattttcggggagttaacgtgtcg

SEQ ID NO: 22119 - DNA, 124 bp, Glycine max
  Clone ID: 700953038H1
tcttgatccttcttttactccttgaactcaaacatggcagatgaggtgggtctgctagatttctggccaagtccatttgggatgagggtcaggattgcacttgctgaaaagggtatcaaatatg

SEQ ID NO: 22120 - DNA, 249 bp, Glycine max
  Clone ID: 700953039H1
gttgagaaaggaatacaagattaccaccacaaagcaatgggcggtatactttctgcgcttcttggcggcgacgcggcggcggcggcgtcttcgccggagagttctacttctagagtctcctccttccactcgtcgccgcgctggcagctctacttcaacgagatcaaagataccgataagctcgttgtgatagatttctcggcgtcgtggtgcggtccttgcaaattcatagagccacgattcacgcca

SEQ ID NO: 22121 - DNA, 243 bp, Glycine max
  Clone ID: 700953040H1
ctctctcccctgttcccccttctccttttctctatcaggtactctattgtaatgagcttttgtttgtgcaacatcattatcctttcctcaatcttgtagctgaggtgacattatatatttagctcagcatcactactggtttctcgaacctaagcagcgaaggagatgtgtggctgattcaattctaaagggaccagaaacaagcacatctgaatttcagttgttaatttaccatgtatacga

SEQ ID NO: 22122 - DNA, 247 bp, Glycine max
  Clone ID: 700953043H1
gggacggagtatcagggctccatttatgacgctggaccaacctttgagtcctatggagttccccatggctccgccgatttggttaaggctgttcctgatgatcacaagaaatttcttgctgatttggtttgggtccatgaagaggacgatgtctttgtgaacactgatgatggagttaaatgctgcaaattgattgctgttcatgctggtttggagaaaggaaaagatgtgaaagagcattaaaact

SEQ ID NO: 22123 - DNA, 167 bp, Glycine max
  Clone ID: 700953044H1
caaaacactgttacacacttgtcactgcctccatcaggtcgctgtcgcgctacctcgcacaaagcctcgataggccaaagcatattccaaacaaccatcaattggtgggacctccgttcctgcatgcttcttccccgtttctcctaccttctccgccaccctcctcc

SEQ ID NO: 22124 - DNA, 246 bp, Glycine max
  Clone ID: 700953046H1
cagaaacaaacccaccgggacaacctcctcctatcattacactaccgccatggtcgaaccaaagtcccgaaccgtgggcaacaccgagcgaactggtgccaagccgtccgcggtggcaccggcatcgccgtcctcgccctcctaacctcaaaaccccccgatatccccaagctccaaacctccctccgcaccctccaaacctcccacccaatcctcagttcccgactccaaaccaagcaaccacat

SEQ ID NO: 22125 - DNA, 245 bp, Glycine max
  Clone ID: 700953050H1
ctgaaactatgacttgtgaaaacccagaaaggaaaccttcggtgcgcgttggtagatagatagagagagattattgttgttgggatattctgagaaccgttgattgagaaatgaacggtggtgatgaggtcgtggcagctccggcgagtccaccgcagccgctggagtggaaattctcgcaggttttcggggaacgtacggcgggggaggaagttcaggaagtggatataattctgctattgaat

SEQ ID NO: 22126 - DNA, 244 bp, Glycine max
  Clone ID: 700953051H1
gctgaattcagctatggagatgctgtggtcactaagaatactcttgtaagtgatcatcagtcacaacaacgtctaatgattacagagcccaaacaggttcgtggaagggctgattctagacatggtcaagcgaagagaatttagttcatggagatgctatggtcactaaaaatcccattggaagtgatcaatgtctcaggattacagagctgaaacgggttcttggaaattctgattctagaaa

SEQ ID NO: 22127 - DNA, 243 bp, Glycine max
  Clone ID: 700953052H1
cgaagatgctttgggattgtttcgtagcatgggagagtgggggtgttaccctaatgagactacttttcttgttttgattaggagtctgtatcaggctgctaggttggaagagggggatgagatgattgataggatgaggtctgctgggtttggtgagtttctagataagaaggcttactatcagctcctcaagattttgtgtggcattgagagggttgatcatgctttgagtgttctgctatg

SEQ ID NO: 22128 - DNA, 249 bp, Glycine max
  Clone ID: 700953053H1
atgggaaccagtcttgtccacagtgcaagactagatacaagaggcacagagggagtcctcgagtggagggtgatgaagatgaagatgactctgatgatatccagaatgagttcaattatgcccaaggaaaagccaaggctaggcgccagtgggaagatgacgctgacctggcgtcgtcttctagacgcgaatctcaacagccaattcccctcctcaggaatggccagacgatgtctggtgagattccgg

SEQ ID NO: 22129 - DNA, 245 bp, Glycine max
  Clone ID: 700953054H1
gctgaaggaactacctcaactgttagatgcagaaatattacccttgattgttacaatttctggaagagttagctctgaaaccccaattaactgcgagttcagtggtttaagaggtgtaatagttgaagaaacagcagagcaacattttcttaaacacaatgatgctggttcctggatacaagattccgctttgatgctatcaatgagtaaagaggttccttggtatctggatgatggactgatcg

SEQ ID NO: 22130 - DNA, 247 bp, Glycine max
  Clone ID: 700953055H1
ggatatttggattggttttctttcaccggcggcgaaggtaaggtggtgcaaacaaacaaaaaaccctaattctcgaatatcagatcggcgatcggaggaagaatctgaagttgggcgaagatggttctcgcggagttaggagggagcatttcgcgtgctcttcagcagatgagcaatgcgacgatcatcgacgagaaagtcctcaacgattggcctcaaggacatcacgcgcgcgctctccaatccg

SEQ ID NO: 22131 - DNA, 242 bp, Glycine max
  Clone ID: 700953056H1
cctcattaaccgggatgtcaaatctgctctggcagtgattgatgatatgagagctgctggatatgaaccatcaaaagagatgctaaaaaaggtcagacggcgatgcacacgagaaatggacaatgaaagtgatgccagagtgcaatcactggctaattccttgaattaccaattgggttcagaaaaccgacgggacattctgtttaatcttaattacagtatgggttatgcttgaatgaata

SEQ ID NO: 22132 - DNA, 253 bp, Glycine max
  Clone ID: 700953057H1
gtaactcggcattcggttcgacgctgcttatgctcttgtgtcactgtcatcatacgctttgccactggtattctgttaggaatggctagtcgcgtcgtcaacactttgtggacaagcactacggtgcaaaagaatatgacatgatgggagtgtatcttcagagatcatggatagttttattcttaactgcaatctgtcttcttcccctgttgatcttcagaagcccaattttgactatcttaggccaagatgg

SEQ ID NO: 22133 - DNA, 152 bp, Glycine max
  Clone ID: 700953059H1
acgtacaggtagcctaagcgaccttcgtcattacaaagacttgaattaaacttcctaaggcttatcccgaatgccaagacccagcaacatgtcctcgtggcccaaagtttgaaccaccagggctactcttctggttactctgttggtaatac

SEQ ID NO: 22134 - DNA, 250 bp, Glycine max
  Clone ID: 700953064H1
gaaagttgaagctttttttgttgaggtgaaagtgaaatggttggcaaggataatctgagggctgaggacttgaacttgtgctttaagaagcttatgatggtggccgggagtgggaacagtgagaaaggggtgaacttgaaggttggggtgatcaccgagtggaaggatattcctgtggagcttctgatgcaaattctgtcccttgtggatgatcagacggtgatcatagcttctggagttttcgtggatg

SEQ ID NO: 22135 - DNA, 246 bp, Glycine max
  Clone ID: 700953066H1
ctttttcgtttactacgaggaaggaaaataacaataacagaggaagaaagaaaattacacagtttcaatttcagtatcagctacactttttagaaatggctactctatcaagcttcatcgctacgccgaagaatcccaatacccactttctctcaggttcctcattgacgatggacaaatgcttcttgaaaatcagctccagtgaacactttccaggttcctctttaaagactaagcaacacgtaa

SEQ ID NO: 22136 - DNA, 244 bp, Glycine max
  Clone ID: 700953067H1
caaaaccagacggttatctagtcttccaatcttccccctattccctgttcctattcctattttatcaatcaataacataaataacacttcttcttgccttttaatatatttttctctcttcccctcttgtttcacctttcaacacttaattagagacgacccactttccttgcagatctttttccagggaaaagtttggatgttttgtggtaagagttagatgttgagtgatagcggaaaggtt

SEQ ID NO: 22137 - DNA, 238 bp, Glycine max
  Clone ID: 700953023H1
gatcgagataactagaaacagtgtgatgaaaatgaaggtccttgttttcttcgttgctacaattttggtagcatggcaatgccatgcgtacgatatgttccctctccgaatgaacactggctatggtgcccgtactccggaggtgacatgcgcaagttggaggcttgctgtggaagcacaccacatctttggctttgagaccattcctgcagagtgcgttgaagcaacaaaggaatac

SEQ ID NO: 22138 - DNA, 245 bp, Glycine max
  Clone ID: 700953069H1
cgaaacttttagggcagatgctttactatgttctcactactggctcgggacagcaaaccctgggagaggagtactgcgacatcactcaggttgcaggaccttatggacttcctcctacccctgcgaggcgtgctcttttcgttgtatatcagactgctattccttatattgcagaacgaattagttctagaattgcttcgcgaggcattgtccttgctgactatgagtctgctggggttttggtg

SEQ ID NO: 22139 - DNA, 252 bp, Glycine max
  Clone ID: 700952985H1
ctctcacacactcaaccaaagacgaaggaagaagaagaattacaaagtaccaccaaacaggctgcgacgacgtcgttctttgcaacttccagttcttgttcttgatgaatatgacaccagtttgcccctttgtcaaagctgctcgccccgatgataacaatgcctctaagaaatctggcgaaaactctatgaaacatcaggctgagtctgagagtaaggtgaagaaagaggttaatgactcagctagtacct

SEQ ID NO: 22140 - DNA, 246 bp, Glycine max
  Clone ID: 700952986H1
caacttctttctttgttccgttctactttcccttcccaacaacaacaagaagatgccttctgcagaagcttcctccgaaaccatttgtgtcaccggcgctggtggcttcatcgccgcttggatggtcaaactcctcttggaaaaaggctacactgtccgaggaaccctcaggaatccagatgatcccaagaactggcacttgaacgagtttgaaggagcctccgggaggttgactctgcatagggt

SEQ ID NO: 22141 - DNA, 257 bp, Glycine max
  Clone ID: 700952987H1
acgagagacatagctggtgtgagattaagaatggttgtgttatggtcactgctcatgcagtattaggaaagaagttgttctgcatagagtggaagaaccaacggaagctagctatattcagtccagaggacaattcatggaaaatggtaccagttccattgacaggaagctcaagtattggtgttcgatttgggatactaggtggtaagttgttgctattccgtctggaatctgaaactgcttttcagacattgttg

SEQ ID NO: 22142 - DNA, 251 bp, Glycine max
  Clone ID: 700952988H1
ctcttctgccctctgcacctcccctcacacccttcctcattcgcaggaggtgaagatgtcgaccccggcaaggaagagactgatgagggattttaaaagattgcgacatgatcctcctgctggaatcagtggggctccccaagacaataatattatgctttggaatgctgttatctttggaccagatgacaccccttgggatggaggtacgtttaggttgacacttcagtttacagaggattatcctaata

SEQ ID NO: 22143 - DNA, 115 bp, Glycine max
  Clone ID: 700952989H1
tctcgagccgaatcggctcgagtgagcatagacccttcaccggagaatggctttccaagagtcttgcaaggtcaagaattctcgaccttgagaggcaattttgctgaaagtaatg

SEQ ID NO: 22144 - DNA, 256 bp, Glycine max
  Clone ID: 700952990H1
gcgttctgtgggtttgagaccttttgttggcttcactattctgatggtatcatttggcactacgagactcagtatgcacccatagagtacttcaaaaccaagatttccatgaagaacatatagtatgagatgctcagtagtacctctagctatacgttggagttgtaatgttatgtagcattacattagatgcagtgcgtaggtctgtaggtgcagaaagttattagggtaagaaaggaacaaaagtaaggtacgt

SEQ ID NO: 22145 - DNA, 255 bp, Glycine max
  Clone ID: 700952991H1
ctcatttatagtttactattgaaagatgggtttgaaaatggcaatactgatcctaggcctgctggccatgttccttttggtctcctcagaggtggcatccacgaattcaaaagaggtgacaaatggagttgaagatgccaaatatcctggtggaggctatggtgggggttacccaggcaatggcggtggtggctatcctggccgtggtggtggctaccctggtcgtggtggtggctatccaggtcgcggtggtgg

SEQ ID NO: 22146 - DNA, 102 bp, Glycine max
  Clone ID: 700952992H1
gcaaatcatccttggatgttcctttactaccgcagtggaatcaccatgaggagacagccaatatagcctctcatcattctaccagaaatgctactgtatccc

SEQ ID NO: 22147 - DNA, 256 bp, Glycine max
  Clone ID: 700952993H1
aaaatggcaagcaacaccaccatggtagacgagcgtgcaggggcggagatcgtgtatggcgcggaggaatgccaccgcagctccatggagctcctggaagagcttggattccccaaaggggtgatgccattgaaggaccttgtggagtgcggccgggttcgcgaaacggggttcatttggatgaagcagaaggagccaagccagcacttcttcgagcgcaaccaagaccctcgtgtactacgcggcggaggtcacc

SEQ ID NO: 22148 - DNA, 255 bp, Glycine max
  Clone ID: 700952994H1
gctttgtggaagtttgagacaacaaagtattattgcacagttattgatgcgcctggacatagggatttcattaagaatatgattactgggacatcccaagctgactgtgctgttcttatcattgattcgaccactggtggttttgaagctggtatttccaaggatggacagactcgtgaacatgctctgctttcattcacccttggtgtgaaacagatgatttgctgctgtaacaaaatggatgctactacaccc

SEQ ID NO: 22149 - DNA, 128 bp, Glycine max
  Clone ID: 700953001H1
ctcgtcttttcactccaccaaaatgctctcccaccgctcactttcctcatcggaattttgttgcaactcgaccatcattcatcgctggttccccactcttgattcggagaaatcatggaaggaaagct

SEQ ID NO: 22150 - DNA, 253 bp, Glycine max
  Clone ID: 700953002H1
tgatcttagaaaaatctatgttcttttgttttgaattcaatactcagtgctttgattgtgcattttgcatcagaagcaggcactgctgagtcacagtatggaggccaaaagctcaaaccagataaaagaggaaagcaatgattccaattatgataggaaagctgaaataaaagcatttgatgattcaaaaactggtgttaaaggtcttgtagattctggtgtgaaaaagatcccacgcatgttactttccggc

SEQ ID NO: 22151 - DNA, 253 bp, Glycine max
  Clone ID: 700953003H1
attggagatgacaatgagatgttgctagattccgaatccaatcgccgaaccctcaccgggcgacaacggtacattagctatggtgccctaaatgccaacaatgtgccatgtggtaaccgtggaagatcctactacaattgccagcagaggggtcgtgccaacccttacaatcgtggttgcaccaaaatcacacattgtgctagagacaccagctagatgaacaagtcatgaagctggagagggaatatatatg

SEQ ID NO: 22152 - DNA, 250 bp, Glycine max
  Clone ID: 700953004H1
gagcacagctgctggagatagggaaccagcttacaccagatgaggcaaggagttatgctatatctcaactcccacgcgaattgtcgaagcacaccggatttgcttttgattcacctggatacgaatccttctttgccgcacagctcggtgtatatgctgcacccattgcatgggatgtggcaagaagagctagcatgagatcacggtcaaagactgggcagcaaaaataatctggagtaggacattgtac

SEQ ID NO: 22153 - DNA, 254 bp, Glycine max
  Clone ID: 700953005H1
gttcggttccgatccgattggctcgtcttcagtgtgaaattcctcgctcatcgcgttccgaatcttcctctcttgttatccagcaaccggtttggcggcgcggcttttcacacgcgtctcacaattcgtccacgtttttgttttttttgttttttggataacgagaattctagatctcttgaacgcaccgtttttggcggttatagaggatcgggacgcgaggcggatgacggcgaggaggtttcggatgtggt

SEQ ID NO: 22154 - DNA, 251 bp, Glycine max
  Clone ID: 700953006H1
ggctgggcatatggacctgacattaaaagcctaagatggcctcctatttcttcacagttttcaacctaatcagcctctgatgttgtgcgtcgaaggcgatggattcgtacaagacaatctttgtctgagcaaggtacagaaagcttgcagggtggagcaagtactgtgcaacctggagcttctgctgttttatcatggagaagctcatcaaagaattctgaccaatgtttgcaagttcgacctaatttgat

SEQ ID NO: 22155 - DNA, 254 bp, Glycine max
  Clone ID: 700953007H1
agactgagaggaagagagagggagattctttgtttgctaccttctctcggaaaaatggttacgttcaggtttcaccagtaccaggtggttgggagggctcttcccacggaagcagatcagcaccccaagatctaccgaatgaagctctgggccaccaacgaggttcgcgccaagtccaagttctggtattttctgaggaaactgaaaaaggtgaagaagagcaatggccaagtgcttgccatcaagagattttt

SEQ ID NO: 22156 - DNA, 258 bp, Glycine max
  Clone ID: 700953009H1
gactggtctctgggcggtaaaatgaagaacacagaaagagaagaatctcttctctctcttggttgcttctctcctaacaatgggttccagagcaaggcttctccatggccaaactaccaccaccaccaccagggtaacaacaacaaagcctcttcttcatcatttcttcagtgccctaaggttgtggtagagttgcagaatggtggtgatggcaaagtattctctccctcttctgcaaatacagctgtgtcccagccc

SEQ ID NO: 22157 - DNA, 255 bp, Glycine max
  Clone ID: 700953010H1
gacaccaatgaaaaagtcacagcctctgctcatgatgcttttgtcggcagctggaagcctaccaagaatgacactatggagaatcgggttcctggatttggcactacaatgaacattctctatggggatggtgtttgtggacaaggtgatgtggactcaatgaacaatattgtttcccattacctgtattatcttgaccttcttggtgttggtcgagaacaggctgggccccatgacatccttacatgcgctgag

SEQ ID NO: 22158 - DNA, 199 bp, Glycine max
  Clone ID: 700953012H1
ctataggtctcgcccaatacctactctccgctcccaagagcacgcaccaccactattgcacttcttcctcgttctccctctttttcttcttcttcgctaaacccttttttctatctcactaacacaacaatgggagacgagaagaagggcaagcctgctgcttccggcgtgtggtccaccatcaagcctttcgtcaatg

SEQ ID NO: 22159 - DNA, 254 bp, Glycine max
  Clone ID: 700953013H1
gtgtggttgacagttaagaagtagcaaagatgtttccattcgggcacaagggtcaaaagataaaggggactatggtggttatgcagaagaatgtgttggatatcaacagcatcaccagtgttgacgggatcgtcggcaccggcttagacttcttaggcagtgcactcgatacagttacttttttagcctcctccatctccatccaacttattagtgctaccaaggctgatggtgggaaaggaaagttggaaagg

SEQ ID NO: 22160 - DNA, 200 bp, Glycine max
  Clone ID: 700953014H1
gagaatggctccatcgtggcactccacactccaataaagtcccacatccaagatggcttaccaccatcatgaccacaccaaccggaaatcccttttggacaccctatactgctccgatgcagaggaggactacggtcatttcctaaacaactcctcccctgcgtcccctcctttcttgctccaaagcgacatgttttcgg

SEQ ID NO: 22161 - DNA, 89 bp, Glycine max
  Clone ID: 700953016H1
ctctgttctctctccccctccccgattcgttttgcccctttcgttgccctaatttcaaccatgcctcgccgtagctccggtggaagatc

SEQ ID NO: 22162 - DNA, 251 bp, Glycine max
  Clone ID: 700953018H1
gtgattgaagaagagaatgatggggaattgaggttgtggtgaatgttggagttggagtaacccaataatggcattgagactgagactcaaagtgtcttcaattgggtcaccttttctgcagttaggttcttctgcaactgctgccttctcattctcccaaccatgctctcttcccaaacttgcttttcatccaccacgcttgcaactcaacaaaaattcacacccaataaggttccttgttcggctggtag

SEQ ID NO: 22163 - DNA, 255 bp, Glycine max
  Clone ID: 700953020H1
gagaacaaacttggttttaattggtataggcgtgccaaggtcttgttaattttgagcgttaagtgctgcaactaatcagatcccaagaccttggcctaccttgccatacagaaaaaaaaaaagcaaaaaaaaagccaaggtttggagccaacaaaaataaacacaaagcacaagtcatggaaagaataatggttggaagtgcaacaaaggttgctttcaccctcttggccactttcgccattgtcatccatgcct

SEQ ID NO: 22164 - DNA, 258 bp, Glycine max
  Clone ID: 700952984H1
taaaggggtgttttgagaagatggagcagaaacagaaatcatgctagaaggagaaagggagggctcatcacaatgcccttcatctttggtaatgaggtttgtgagaagctggctgtggtaggtttcaacacaaacatgattagctacttgacaacacagcttcacatgccattgaccaaagcagctaacaccctcactaactttggtggaactgcaagcttgacaccgttgcttggtgctttcattgctgattcttat

SEQ ID NO: 22165 - DNA, 253 bp, Glycine max
  Clone ID: 700953021H1
cttatcttagcaatagctaccctatcacaacaatactctattaggcaaaaacaccaaatgggagaggaaaaagagcagcctaagaatgaaaccgagaagaagcccgaggaggccgccgcagcccccaagaaagacgacggacccatccctgtcgtttacaaactcgacttgcattgcgagggatgcgtcaagaagatcaaacgcacatgtcggcacttccaaggtgtggaaaccgttaaggcaatctatcgtc

SEQ ID NO: 22166 - DNA, 233 bp, Glycine max
  Clone ID: 700953022H1
tagacatcacttttattaaacctttcagttttgttgtagttcaaatactctgtttgtttagctaatacactgtatttacatacactatttgtgtttagttggtcttgccttgactactgatacttattagaaggcaaatataggagtcactcacttttgtgcctgattgtgcacatagttggttatcgtgtccaagtgcacgactagattagacatgctaacatttgctgagt

SEQ ID NO: 22167 - DNA, 261 bp, Glycine max
  Clone ID: 700952949H1
aagcttctctgttaaaaaaaaattaggcgtctaaagggccaaagcttagaaagttgaagctttttttgttgaggtgaaagtgaaatggttggcaaggataatctgagggctgaggacttgaacttgtgctttaagaagcttatgatggtggccgggagtgggaacagtgagaaaggggtgaacttgaaggttggggtgatcaccgagtggaaggatattcctgtggagcttctgatgcaaattctgtcccttgtggatgat

SEQ ID NO: 22168 - DNA, 94 bp, Glycine max
  Clone ID: 700952950H1
atccagaaggaatcaacccttcacctcgtcgtccgtctccgtggtggcgtgcagatcttcgttaagagcctcaacgggaggactgtgacgctag

SEQ ID NO: 22169 - DNA, 260 bp, Glycine max
  Clone ID: 700952952H1
ttttggaacagaagtctggattatacacgtccccatttggtagaattgatgaattcaacaggggttctcatttcaaatttaaccttcttgaattctccattttggacaatccatcctgtatattgcaggtttgtcccccactgaaagattgagtttatatattattccttgttttccgtagttcaagtacttccattgcctttttaaaactgtgcaatagaggagctttcatgagtagggggagatttgagactgttttt

SEQ ID NO: 22170 - DNA, 258 bp, Glycine max
  Clone ID: 700952953H1
ctctcttacacaccgaagcactgctactactactactttctctctagatatgggttctggtgctgtgcaactgtttctgatcttggggctcttggctagctcatgcttagcccaagcaccaggtgctgcaccgtcacaaccacccactacaaccccatcaccaccaccacccagatcagcacctgcaccagcacccaccacaccagcaaccccaccaccagcaaccccaccgccagcagcaactccaccaccagcagc

SEQ ID NO: 22171 - DNA, 257 bp, Glycine max
  Clone ID: 700952954H1
atttgcctctttctgagagacacaacatagatatgataataagtgacacacttatctaaatggctgccacgtgctgtagcttcactcaatcgtcttctggtttcaggaaactccatgagagcattcagctgcagagctacttcacaaggtaccagcgaagatcaacttgcagtgttgaaaatatcttccatagggactatggaggaaggttgttacaagttgaaggatggcatcaacatcagtatttgttatgtgca

SEQ ID NO: 22172 - DNA, 260 bp, Glycine max
  Clone ID: 700952955H1
gaagctcacaaaacatctctaaacgcttgtgaagatctccatctcccattgatcctcctgaagtttttgtattcaaccatggctacctatagttggtcaactgagatattttcatttttggttctaacgttgttgtcgacaagcagtcacacaatggttgctggagcacgcaatcttctcgagtcaaccttgtcaaaaccagaagtgcgaacacttcccaaacctcatgggttgcgaccattgccggagatccctgaatt

SEQ ID NO: 22173 - DNA, 123 bp, Glycine max
  Clone ID: 700952956H1
ccaccacacaggctccacaaaacatctcatcgttcacccaacaaaatggcgctgcttctgataattcccatctcactggtcaccctctggctcggttacaccctatgccagcgattaagattc

SEQ ID NO: 22174 - DNA, 78 bp, Glycine max
  Clone ID: 700952957H1
aaagatttcacttttgtgcaaaaggttttgtctttacgaagtgtgttgtgtagtgagtcctgagacatcccatgggag

SEQ ID NO: 22175 - DNA, 136 bp, Glycine max
  Clone ID: 700952958H1
cttaaatcttcgcgtccagcaacttcattaccaaaccaaagaaggtttaggaagtgtagaagacttgttctctaacaatggcattggcaagggttgctagggccaacctgataagatcaggaggtgcttttggcag

SEQ ID NO: 22176 - DNA, 249 bp, Glycine max
  Clone ID: 700952960H1
gcgaatatatatcttgtttcgtcccttaattctctccttacaaactcagtggttcttttgctcaagatttctgaactcagcctctgattcccaggaaaaaaaagtataaaagcaaaaatcagagtccagaagtaataataagcggcaaacagaagacatagatcagcacaagaaaagcagaggaagatgggttttctaggactattgggggtggcgtctatgccggttattcaggtcctagtgatcggt

SEQ ID NO: 22177 - DNA, 255 bp, Glycine max
  Clone ID: 700952961H1
ggttgtggatagtggccccaatgatcatatatttatatactactctgatcatggcggtccgggagtgctagggatgcctactaatccatacatgtatgcatccgatctgattgaagtcttgaagaagaagcatgcttctggaacttataaaagcctagtattttatctagaggcatgtgaatctgggagtatctttgaaggtcttcttccagaaggtctgagtatctatgcaacaacagcttcaaatgctgaaga

SEQ ID NO: 22178 - DNA, 260 bp, Glycine max
  Clone ID: 700952962H1
tcaaaatcgttctcagatctatctcaaatgagtaatttgagtaatctgaaggagttgcaaaagcaagagagtcctttcaacaagagaagaagggttttgattgcatccaagtggtccagaagatcatctttctattcctggtccaacccacaatccatgcctcttttgcctgtggatgaggatcaggattatgattatgaagaggaagaagaagaagaagatgacgaagagaaagctagaaaagttccctctgcttcatc

SEQ ID NO: 22179 - DNA, 235 bp, Glycine max
  Clone ID: 700952963H1
atcggaggacaccaaatctcacgagttaactgagactcatgtgagttcgatgaacaagaggttggttctcaagttgccagatcgtgatatatccaggtccacaagtggttttggcgaccatgctgaggtggttggctcatcatcaaaaactggacaagaagctaccgatttgaatggggacgcgccgccatctagtgattcggctgtattgttctgggaggtacgagttgccctg

SEQ ID NO: 22180 - DNA, 269 bp, Glycine max
  Clone ID: 700952965H1
gcgtacgtgagctcgcggtaattctgctcgatgactaatctatgtttcttttgttttgaattcaatactcagtgctttgattgtgcattttgcatcagaagcaggcactgctgagtcacagtatggaggccaaaagctcaaaccagataaaagaggaaagcaatgattccaattgtgataggaaagctgagataagagcattagatgattcgaaaactggtgttaaaggtcttgtaggttctggtgtgaaaaagatcccacgcgtgttc

SEQ ID NO: 22181 - DNA, 92 bp, Glycine max
  Clone ID: 700952966H1
gtccgaggaacaaccacgtgtatgggaaggagttccagtccatgctggaaggactcgacgaagaacggtgcgtggaagaatcagggcgccac

SEQ ID NO: 22182 - DNA, 255 bp, Glycine max
  Clone ID: 700952968H1
gccatttactttcctcaacttcaatttctctagctagctactagttcagtgttcagcatatgtgaaatgaaatgagaagaaccatgtcaaatgcatcagcatgcttctttttctttgcttttgtagtattagtagcacttcataatgctgaatgccgttctcttcggcctagtgtttctgatggggttgatgcagttcaattacctcaagagtcttcttatctacaactcaaagaccaaagtgttgttgtcgagt

SEQ ID NO: 22183 - DNA, 250 bp, Glycine max
  Clone ID: 700952969H1
cagaagctgaagaccaccaccaccaccaccaccgattcggaatcgcaatcgcaggcgcttctgcgtctctacctcaccaacgccctcttcttcggggtgttcttctccgtcgcgtacttcctcctccaccgctggcacgagaagatccgcaccgccactcccctccacgccgtcagccacgccgagagcgccgccatagtgtccctcgtcgcctccggcgtctaactcctcggcttcttcggcgttgcgt

SEQ ID NO: 22184 - DNA, 256 bp, Glycine max
  Clone ID: 700952970H1
cgcttttgccaaatctcgctatgcttctcttctaacctctcaccctcgctctctttctctctagggtttcgttctcattctagattcccacatacaaactgtttctgcgttatttgattcttctcccaacctttccttgatccggattaagattcctggcacgtttttgaaccgatccacttcatatcggatccgaattcgaacattcaacatctgattccgcaattctctccgaattttgctttgaatttgcttt

SEQ ID NO: 22185 - DNA, 88 bp, Glycine max
  Clone ID: 700952971H1
gtgttcttgatttgtactcatggaactttaatgccagcaatggtcctgtggagccttaccaaaatcatggtggaggtgggcctaataa

SEQ ID NO: 22186 - DNA, 258 bp, Glycine max
  Clone ID: 700952972H1
atcgatcacaaggaatcagaaaacccagaaatccacacacacaggctttagcaagccgtgtgtgaaggtgtgtctggtctgtgatcgttattaattccttcactagacctcctagttaaattaaccttttaataaatgtcacactcgctcaaggttttttttgttttcactctcttgttccttgctgtggttgaagctaaacacaaaaagaagcacaaacacaaaatccgccatggtcctaaaccatttcttcccctg

SEQ ID NO: 22187 - DNA, 88 bp, Glycine max
  Clone ID: 700952973H1
cactgggctatgaagtaaaagggcaagaagaaaaagtcttgaagttgaagaaggcgttgtacggtctcaagcaagcactgagaccttg

SEQ ID NO: 22188 - DNA, 88 bp, Glycine max
  Clone ID: 700952974H1
cctccgagttgtgctctacacgcacattaacaccgaacccacgcgctcaagtcttaaatctcgcgctcttaatacgtgtcagtccatt

SEQ ID NO: 22189 - DNA, 257 bp, Glycine max
  Clone ID: 700952975H1
tagaattaatggtgaagcaattcaaagcaatcgagatctttccatgatccttgatgctcttctgaaaacaaaatctagagcagtgctgaatgatataattaacaaaaatgatgttacataacattatgaagcagtacaggcatgacttcaaaaagattccaatactacgaaagcttcttaaggtcttggagttcctagaagcaggcaagattttgacatatgaacatattaatggtggtcctccttgtcgtggaatg

SEQ ID NO: 22190 - DNA, 254 bp, Glycine max
  Clone ID: 700952977H1
ctcactttcacatcatcccattattcctcttccttgtaagcacttcctagctcactatctatccttaattcttaatgatcttgtgcaatgcttttcatgacaaactgcaagtagttgcagtggcactttagtttgacaagatcacatatatatacactgcttgtggttcactgttgttatcacaatcaccagtgaatgggtttatcttctttgcacgtctgcatggattcatcagatcattggttgcagggcac

SEQ ID NO: 22191 - DNA, 101 bp, Glycine max
  Clone ID: 700952979H1
atcgtgaatgcgtataaaaggaaaataaagaaattagcggcaaaatgttgggtgtgttcagcagctccatagtgtcgccgccggacgagctcgtgcgcgcc

SEQ ID NO: 22192 - DNA, 253 bp, Glycine max
  Clone ID: 700952947H1
gatttcccttcctttttgacttatagcctctgctccccttttgcggggtccttcaatctcacttggggaacctccgtgcattaacccaaaagagttcatggacccttaattaagaaatattttgcctagaaccagaacctgcccttactctataacatttaccaaccgggaattcttcctggacgttttgtgttttgattctagacacttggaagaagagtgagttgttttccttgttttgcaaagactaaga

SEQ ID NO: 22193 - DNA, 239 bp, Glycine max
  Clone ID: 700952980H1
gttatcctcttttgcctccaaaggttgttatggatagatagatagatacaacgctgctttcagtttcctcaactcaagaatggctgccaacgactcgtccaccgagattggtactaagaagctttcgaattgttggggaaatgctcaaatgcccttgacactccccactctcctctcttcggggcgccagcacctcgacacatcattcagcactgccgctgacaattttttcagatttc

SEQ ID NO: 22194 - DNA, 262 bp, Glycine max
  Clone ID: 700952981H1
tgaagagcttgccactgacccaagaaccgcatcttatgtccaaaagatggccaatgacaatgaatatgtcaaccaacagttctcaagggccataattttgttatcggagacaaatcctttaacaggagatgaaggagaaatcagaaaggattgtcgctacctcaatgccaattagatatataatataagcttgcatttgtgcatgataatatgtataattagcgtaagattataatgcacgagtgtgtcaaaataaagaggg

SEQ ID NO: 22195 - DNA, 259 bp, Glycine max
  Clone ID: 700952982H1
aagaaagatcatgttgcttcttccataaaagccgtccaaaccctttgtcatcccacaaattatgagaaagaatgcgaggaaagcgctatagctggggctggaaataccacagatccaaaagaacttatcaaaattttcttcaacatcaccattacaaaaattggtgataaactcaaagaaactaatattttgcatgaggttgaggaggaacccagagccaagatggcacttgacacttgcaagcaactcatggatcttt

SEQ ID NO: 22196 - DNA, 94 bp, Glycine max
  Clone ID: 700952983H1
gcggaaaaacctgaatttctctctcttcggcacaaggtctaggtttttcactttcttcctccatgctcgttccgtcacaacccaaccatggaag

SEQ ID NO: 22197 - DNA, 258 bp, Glycine max
  Clone ID: 700952905H1
taaaggggtgttttgaaaagatggagcacagagaagatcatgctagaaggaaaaagggatggctcatcacgatgcccttcatctttggtaatgaggtttttgagaagctggctgtggtaggtttcaacacaaacgtgattagctacttgacaacacagcttcgcatgccattgaccaaagcagctaacgccctcactaactttggtggaactgcaagcttgacaccattgcttggtgctttcattgctgattcttatg

SEQ ID NO: 22198 - DNA, 91 bp, Glycine max
  Clone ID: 700952909H1
tgagtagcagaagagaagagaagatgggatctgtatgtatctgagactgtgcatcaccccattccctgttgcggttgattcttgacgacag

SEQ ID NO: 22199 - DNA, 259 bp, Glycine max
  Clone ID: 700952911H1
cttgaaagccaaaacaaaacaaacggggttttggaaatggaacgagaaaatctaaactgggaaaagaaatgaaagcttaagcctttgagtctgagagagaagagtggggactggagaatgaatagggagtgttggcgaagtagatctgaaaggtgaagaatttgagtaggtaaaacccaaagttttcaactttgaatcaaagggtcatcaaatgctttaacgttttggttttttctgccttccgacactctaagaaaat

SEQ ID NO: 22200 - DNA, 257 bp, Glycine max
  Clone ID: 700952913H1
ggttcgaaggtgcaaagcaaggaagctgaaataactaaatgattctgaattcttgttccatgagtccacaacctctgtcacctcacaatttcagagacctcttcgattccgtcgaagcttttctcttcgactgcgacggtgtgatttggaagggcgacgaactcatcgatggtgttccgcaaactctggacatgcttcgcgccaagggcaagaagctcgtcttcgtcaccaacaattcctggaagtcgcgttctcag

SEQ ID NO: 22201 - DNA, 257 bp, Glycine max
  Clone ID: 700952914H1
catcaggctataacaattttcgagggtactaatactattacccattaacaattagtggatgataatattttgttcataaactcacgtgtgggatttgaaatgtgaatgcatcaatttgtgtttgtattattttttttttaattttaattgaagggagctagtggcaaatcatggtcttaatagatgagttcaagattaatgagtttatggtactcttcgctgtcttgatttgggtatgattgtgtgtgtctgtgaaa

SEQ ID NO: 22202 - DNA, 259 bp, Glycine max
  Clone ID: 700952915H1
caactttcgcccaacgtgactcctgtgaacgagtcttatgttccaccagagaggccaaagctgcaaagaaaactcagcatcttagatagaaccgaagctggtctaatacaagctagagctgcaattagtgaagcaagaaacggagatcgaacgcaagacaaagactatgttccagttggacctatgtacaacaatgctaatgcatttcacaggagttacttagaaatggagaaacagttcaaagtatttgtctacgaag

SEQ ID NO: 22203 - DNA, 259 bp, Glycine max
  Clone ID: 700952916H1
caaccagcaagacccatatatgctgagcaacttccagcaggtctacagacaatttcaaatattgtggctgtgtccagttgcaaggggggtgtgggaaaatcaactgtagcagtaaaccttgcttacactttggctgatatgggtgctagagttggtatatttgatgctgatgtttatggtccaagcttaccgactatggtctctcctgaaaaccgactgttagtaatgaatccagagaagaagaccataattcctactg

SEQ ID NO: 22204 - DNA, 96 bp, Glycine max
  Clone ID: 700952918H1
tgtagaataaactatggaactggatcaatatctggtttcttcagtcaagataatgttaaagttggcagtgctgtggtcaagcatcaggatttcatt

SEQ ID NO: 22205 - DNA, 260 bp, Glycine max
  Clone ID: 700952919H1
ctttcctcctcttccttgtgatttttgtttgcatcacagggagaaactgagacacagaagatgagagagataattagtattcatattggacaagctggaattcaggtggggaattcatgctgggagttgtattgccttgagcatggaattaaccctgatggcaccatgcctagtgatacctcagttggtgtagcacatgatgctttcaacaccttcttcagcgagacgggatccggcaagcatgtgccaagggctttatt

SEQ ID NO: 22206 - DNA, 262 bp, Glycine max
  Clone ID: 700952920H1
cgcgaacttcaccacttagacctgaccggcgtggtcattttggacgcccgaaagccctccgcactccgccaccttccgccacgcgttctcagcagaacaaacaccaacaccaatttgatttacacgaaccggttctcgggcccaccgaggcccaattccgcttcctcaacgggcctgtccatgataaccgtcgaggacgatatcgagtctcttttctccgagacgaactcggaggaggagcggcgcgtgaggaagcaaccta

SEQ ID NO: 22207 - DNA, 91 bp, Glycine max
  Clone ID: 700952921H1
cttttggagccactcaaagcggagtttcctattttgagctacgccgatttctaccagttggctggcgttgttgccgttgacgtcaccggtg

SEQ ID NO: 22208 - DNA, 259 bp, Glycine max
  Clone ID: 700952923H1
ggaggacttatggactatgcatttgagttcataatcaacaatggcggcattgattctgatgaggattacccataccgtggtgttgatggtagatgcgacacatataggaaaaatgctaaagtcgtttctattgatgactacgaagatgttcctgcctatgatgagttagccttgaaaaaggccgttgcaaatcagcccgtgagcgttgctattgaaggagggggcagggaatttcaattatatgtatctggtgtattca

SEQ ID NO: 22209 - DNA, 96 bp, Glycine max
  Clone ID: 700952924H1
atccgttttgcccccattggccaattcggccactcttctctgaaaaaggctccagcctccttcttcatccatcttccctctccaccaaaatcctcc

SEQ ID NO: 22210 - DNA, 93 bp, Glycine max
  Clone ID: 700952925H1
ccctttcttaggttaaaagttggaactgagtgattacccaactaatgttatgatcagttggaagcgctggcaagaaagagtacgtaatagtgg

SEQ ID NO: 22211 - DNA, 93 bp, Glycine max
  Clone ID: 700952926H1
gcatgaaatggtgcattcctcgcaccgtgcagaagagtagtctcagagccacacttttggaggctacggtggaaaggcagaaggttcagttgc

SEQ ID NO: 22212 - DNA, 257 bp, Glycine max
  Clone ID: 700952928H1
gcacttgcaagtgaggtgttgggagagcaagcttcaagcagagatagcccttaattaggaataatgataaactattaatgtgtagctaaaaacttatgtattatgtctgtgatggttttcgtgcactctggtgttttgtgttaaacaaacatccttagaataaagtggtcatgtcttgcctttcagcaagttcaagtgttttggacttgtgatgggtgtgttaagctcatggttgcttcttttttttttttttaaat

SEQ ID NO: 22213 - DNA, 137 bp, Glycine max
  Clone ID: 700952929H1
tatgcagataaggcgtacatagagtttcatgatgaatgctggggagttcctgcttatgatgacaagtaagttctaagcactgaatagtactcccttcattttaattcatgagctttttaaaagttttaagattttat

SEQ ID NO: 22214 - DNA, 254 bp, Glycine max
  Clone ID: 700952930H1
gtggcctagttgttgtttttctcaatgagaagggtttccactatgcattgcgcactttggcgcttctgtgttcccttgttgctacttgctagcttcagttatgctccttttgttttggccactgaaatttcagggaatgaagtgagcactgatggaaaggttttaaatgaagagttagcaaaacctaatctacaaggacatgatgaagaagcaaagtttaaaggatttattccaaagcgcattcccatagtgaa

SEQ ID NO: 22215 - DNA, 210 bp, Glycine max
  Clone ID: 700952931H1
aaattaatggttaacttctccaagttaatttgattttatggaaaagttaatttttagattaattattagttacttggttttgccatatatgtacaatatcatcactaggtcaggtttctcttgcttgggatatttatttctttctctaacaggtctagctagtactaatggaaatgtggtagcccctctcagcattttgaaggctttggt

SEQ ID NO: 22216 - DNA, 263 bp, Glycine max
  Clone ID: 700952932H1
cacctccaccgcttctctctctcgggttcggatctccgatcgccgccgcaccgcgaaacgagtttccaaactcagaatccagatccctacttcaacaaacaaacaaacatgattgcgattccgtatttaaccgccttaaccacctacttcagctacgggttgctcttcgcctttggccagttcagggatttcttccggaaaatcttcgactggtgcagcgccaacactctccagggttacgcgccgatctgcttagggctcga

SEQ ID NO: 22217 - DNA, 96 bp, Glycine max
  Clone ID: 700952933H1
catatctccatttccatttcctctctctcagtttccaagaatcttaagctatgggaaagtcttacccaaccgtgagagcggactaccaggaggtgg

SEQ ID NO: 22218 - DNA, 210 bp, Glycine max
  Clone ID: 700952934H1
actctctctctcactgcaattgcaaagcaacaacattccttttctccacttcgaagcaacgcaacattctctctttgcgaggttgaagtcgtcgtctttcgatatccgccctaactctttagatgacttggcaacgttgtgtgggaagtaaaagttgagagctcagcacaacaattaccagaaccataattgaacgggtcaggacaggtt

SEQ ID NO: 22219 - DNA, 85 bp, Glycine max
  Clone ID: 700952935H1
ctacaatcagcggtgatttttgtttataataggaggatctgacgtactcgctcgtggatctcagctgtattcacgatcatgatgg

SEQ ID NO: 22220 - DNA, 251 bp, Glycine max
  Clone ID: 700952937H1
cggggaatcaagtcaagtattgggcatgtcacgaattcgctgtattctgcgtggtttggatgtgaaaacctatatattcatgtttgctgttatcccaatgtgcgtctttggattctatatacacgggcagaagatctcctactttctgcgaccgctgtgggaaaaagcacccaagcctttcaatgtcatccctcattactataacgaaaacatcaccatggagaatctctgcagacttcatggctggggag

SEQ ID NO: 22221 - DNA, 259 bp, Glycine max
  Clone ID: 700952938H1
ctcgagccgaatcggctcgagacaaggcagaaagcaagctcatcctagagttttaaaaatggcagcagcctcctccatggctctctcttccccatccttggctggcaaggccgtgaagctgggcccatcagcccccgaagtcgggagggtcagcatgaggaagaccgtcaccaagcaggcctcctccggaagcccatggtacggcccagaccgcgtcaagtacttgggcccattctctggcgagcccccgtcctacctc

SEQ ID NO: 22222 - DNA, 257 bp, Glycine max
  Clone ID: 700952939H1
ctctttgttcctttcttcctctcactctcaccatgattacagtaagcgtaagatggcaaaaggacattttcaaagatgtagaacttgacactacccagtctccttatgtttttaaatgccaattgtatgatttgactggtgtgcctcccgaaagacaaaaaattatggtcaagggtggtcttttgaaggatgatgctgattggtcaacagtaggggtgaaagagggtcagaagctagtgatgatgggtacagctgat

SEQ ID NO: 22223 - DNA, 94 bp, Glycine max
  Clone ID: 700952942H1
tcgaggcagcacgaaaggccattgaagaagcacctccagttgttaaggagactcctgttataattcaaggtactgaggaggttagttcattatt

SEQ ID NO: 22224 - DNA, 257 bp, Glycine max
  Clone ID: 700952943H1
gggagattgtttttctgttccatttctacgaactcagacccttcaatcccaaccgagaaaaaaatcatgaagctgaagacatatgcgggtcttagtatcattgcaactctggctattatatatcatgcatttaacagtaggggccagttttatccggcaatggtgtatctgtcaacttccaagatcagtttggtgcttcttctcaacatgggtttggtctttatgtgtattctatggcaattaaccaagaagttgtt

SEQ ID NO: 22225 - DNA, 262 bp, Glycine max
  Clone ID: 700952902H1
cacttgttctgcattgaccatagcttctctctttctttcctaattaatccttccatgcaaacaaacgctgtctctcatactcgtagtgacacacacagcttagtttcgttgtattgtatgtgtcctttctcaattctcatcatatatctgttcaagtaccattatctttctatgttgagtgtcggcattttttgagtttctcactaccacttgttctttttttctgatacatgcatatatatacgtccaggtatacagtcta

SEQ ID NO: 22226 - DNA, 205 bp, Glycine max
  Clone ID: 700952945H1
cggatataaacaataaaataaaataaaacagaagagaaggaaacagaagtaggaaaaaaataaaatgggttacacaagatcttctcttctgtccgtggctcttgtcttggcattctgttcaagcattcagggtttggacatcaccaaattgttgggcgaatatcccgaatgtgcacagtagaccaaatacctaactggaaccaag

SEQ ID NO: 22227 - DNA, 258 bp, Glycine max
  Clone ID: 700952946H1
ctcgagcgaatcggctcgagggaggcactgcaatcatgggaactctcatgtttggtgactggcactttgtctcagataacattgaatatgccaccaggcacatttgcttccaaagttgcattgtggacaacagttattaacccgttgactaaatatgctttgttgatgaacccactggcaaggagtctagaggagttgctgccagatagaatttcatcctcatattggtgcttcattcttcttaggacaacacttgtt

SEQ ID NO: 22228 - DNA, 242 bp, Glycine max
  Clone ID: 700952865H1
ggcaatttgtggggcttgctgagatgattggtcctgttgattttaacaagagtgttgagtattggcagcaagacaagtggaatggttgctttcctcttaagtggcacattgttaaggatgttcctaacaatttgttgaggcacattaccttggacaacaatgagaacaaacctgtcactaacagtagggatacacaagaggttatgttggagcctgggctgaaattaattaaaattttcaag

SEQ ID NO: 22229 - DNA, 243 bp, Glycine max
  Clone ID: 700952866H1
ggtttcaatttggagcacatccctgcttgcgtcgttcctttctttctctaccttttcggtctctctctctctctctctttccaagtacctgtataatatgcaaagagacagaaagaagggcagtaagtatcctcccggggagtcttctaatcctcaatcatcagaaaaagatgatcacaataatgatacaaatcttgctgaaggatctagtaaaccagagctgagtaacaagaatactccaca

SEQ ID NO: 22230 - DNA, 237 bp, Glycine max
  Clone ID: 700952867H1
atacatagctatctatttatctatagcaagtgcgtcaagagacacgtggtaccctagctagagtgccattctgtggtttctttctttctttctttctgcatcacatcacaatttgcattgcctcgtgtcctttttcttctttgctctccaaaaatctcacacacacaggtatctagcaaatgggttctcaccaacaagaaccatggctattggagaatgggaaaccaagggttttga

SEQ ID NO: 22231 - DNA, 237 bp, Glycine max
  Clone ID: 700952868H1
aagacatataaggaagtttatgatgaagttctgcatatgagttctgctttacgagcatctggtgccgaaccaggcactaaaattggaatttatggatctaattgcccggaatggattgtggcaatggaggcttgttctgctcaaagctttgtttgtgtgcctctctatgacacccttgggcctggtgctgtaaattttatcatagatcatgcagaagtagattttgtgttcgtccaa

SEQ ID NO: 22232 - DNA, 226 bp, Glycine max
  Clone ID: 700952869H1
gaacttcccacgagtggctttaactggtctggtctggtctggtcggacacacaaaaatattagtatggcgaaggtgagttttgtgaagaatggagagcttagattgcctccggggtttcgtttccacccgactgatgaggagctggttttgcagtacttgaagcgcaaggtcttctcctgccctctgacagcctctatcattcctgaggttgatgtttgcaagtct

SEQ ID NO: 22233 - DNA, 241 bp, Glycine max
  Clone ID: 700952871H1
ccgagcttactggagtatgcatgagacttgaagatgaaagtgatgcaaacagcttggagattaaacagatgacagaaagagtctgtctactggaaagtgaaattggaggactgaaagggcagttatctgcatataatccagtcattagttcattgaaagaggattttgcttctttagaacacactgccctagttcggataaacaaaatgcctgttgaatgcaatcaagaacaaaaggatgc

SEQ ID NO: 22234 - DNA, 242 bp, Glycine max
  Clone ID: 700952872H1
atttcatgtcacggaccagcaaggaaaaaagataacagatagcaaaaccatcgacctcattgaaaaggctctaggaccaaagagcaagagcacagaaggggtgaaaaattggccgagcaaacacgttggagtgcattctgttggtgattatacagccattgagctaattggcagagaccgcccaggtctcttgtctgagatttcggctgttcttgccaacctccattttaatgtttttgcag

SEQ ID NO: 22235 - DNA, 236 bp, Glycine max
  Clone ID: 700952873H1
ctgaattgtgttgtgttgcaaacagaaaggaaaaaagaagaaaataagagaaagaagaaaaatatgagttacttgaatcgtgtttggatggcggcaacggtggcggtagcgcaaggccacaccgatcccggccacaagtgcaagacggcgctcaactccatccaccacaaccggagccgcctcttctccggcggaccctgtctgatctccggccgctgtccggcgtcgttggacct

SEQ ID NO: 22236 - DNA, 235 bp, Glycine max
  Clone ID: 700952874H1
gctctctgagcacacctccactctgttcctcagattcatcaccaccttgcgttgcgccaatgggaaaagcattcgacatcggagccgttccgttcaacgccgaggggtggggtccgccggacagcaccaccaccggcagcaacatcaacctccctctgaacgtccccttcgcccccttctcccgctccgacaaattgggccgcatcgccgactggactcgcaacttcaacaaccc

SEQ ID NO: 22237 - DNA, 233 bp, Glycine max
  Clone ID: 700952877H1
ttcgttattctttgttaagttggtgaagtcaagtttgcttgcatgatttggggaacacaatgagatagacttttgcctcatagcctcctcccattcattttgttcacttccaaaagatttttaggtgcaaaaaagagtttttttttttatattttttttggggggcggcggggggtaaggaatgactgtgacaaagaaaattttcacaatttacggttaagatgttaccgtag

SEQ ID NO: 22238 - DNA, 233 bp, Glycine max
  Clone ID: 700952878H1
gactccttcaactagtactgcattctttcttttcttcaaatggtagcaagaggcatcaagagcaaaagacattgttaatttcggagatggcgagttacgaggctattaagaactttgatgatgatgatgatgaagatgtggagatggcactcctccataaccagatctctgaatcaagatctgccactgtttctcccaccattgcccaaactaccccgcttcaccttcacatc

SEQ ID NO: 22239 - DNA, 224 bp, Glycine max
  Clone ID: 700952879H1
acatggcatagtattttgctattcaccaatcaccatcttcagtcactgtttttatagctaggggaataatataactaatacatatttggaggactggattatgtaccaaatagaactcagtttgacatgtccaagagcaaattatttaattcagaactggaggaatgaattttaatttgatatgatgtctgtctattattggtaacatttgcatgttaaaagaa

SEQ ID NO: 22240 - DNA, 236 bp, Glycine max
  Clone ID: 700952880H1
caattccctccccttccgttcgatgttcattttctccactctctcctcagatctactttctctgcatcgcatccatgccttctcattctcgcatcctcaaccaccgccatcgctctctccctctccacctctctcgccgcaaacgcctctctctccctccaaccacgtccctcgtctactctccccgttcccgcttcgattgcgctagtctcgagttacatccgttgattattccg

SEQ ID NO: 22241 - DNA, 224 bp, Glycine max
  Clone ID: 700952881H1
ctcactactgatagattttcattcctccgaggaaaaaaaaaacatgtcggatgctttgatcaatggattggccggagctggaggagggatcattgctcagctcatcacatacccacttcaaactgtaaacactcgccaacaaaccgagcgtgatccgaagaaagacacgaggagtcaaggggccctcgaacgaatgtgccaggttgtaaaagaagaggggtggg

SEQ ID NO: 22242 - DNA, 227 bp, Glycine max
  Clone ID: 700952883H1
cttcctctctgcagagtgcagagctttctctccccgttgcttcactcattctcaacaacaaaccaatctttcttagaaaatgagggggggcttgtggcaacttgggcaatcgatcactcgccgtcttgcccatggagataagaaggctgttgctcgtcgatgttttgcctcagaagctgagctgaaaaagacagtgtttcatgacttccatgttgctcatggtggga

SEQ ID NO: 22243 - DNA, 210 bp, Glycine max
  Clone ID: 700952884H1
gtttagcttagcttcaatggcctctgtttcagcaacttctctcagcttccaaccctctctcaagttgtctacaaggactagccaggggtgttacaaaacttcaagtttggaggtagtttctgtgggatggaataggagaacctttccctctttgagatcctcccgtttctgcatttgtgcagtcaaggcacaaccggagacagtgcagaa

SEQ ID NO: 22244 - DNA, 230 bp, Glycine max
  Clone ID: 700952885H1
tggagtttgttctaaattacctaaatgccactgccattggagttctttctataaccctcttctttttgtttttgtataatcccttcaaatttgcattaggtaaaaaagaggctcccaaagttgcaggtgcatggccaatacttggtcacctaccactattgagtggttcagagacacctgatagggttttgggtgctttggctgataagtatggacccatattcaccatc

SEQ ID NO: 22245 - DNA, 237 bp, Glycine max
  Clone ID: 700952887H1
gtttcttcttcttcttcttcttcttcttcttctactactactactactacttttcctccacaaaatgatgctcagaatcaagagggttcccactgtcgtttccaactaccaaaaagacgacgctgcagactctcctcgtcccgtcggaggttgtggtcggaattgcctcaaagcttgttgccttccagatgcaaagctgcctttgtatgctttcaagaaggctaatggaaaggattt

SEQ ID NO: 22246 - DNA, 236 bp, Glycine max
  Clone ID: 700952888H1
ggaataaagtcctccaagattctccttaatttctaaattaaaggattaaaacaagaaattactcgcgagtattacttaataatataccttaacctcgcaaaatatcaaacttatcttacaacatttcttttcacatctatcaaagaacataattgatgtataaaatatttagaagatcattatagtgttgcgggtatgtttaagtgtgaagtatcttttcaataaaaacaattatt

SEQ ID NO: 22247 - DNA, 227 bp, Glycine max
  Clone ID: 700952889H1
cgaggggcaccctgacaagctctgtgaccagatctccgatgctgtgctcgatgcatgcttggagcaggaccctgacagcaaggttgcctgtgaaacctgcaccaagaccaacatggtgatggttttcggagagatcacaaccaaggccaacgtggactatgagaagattgtgcgtgacacatgcaggaacattggttttgtctctgatgatgttggtcttgatgctg

SEQ ID NO: 22248 - DNA, 231 bp, Glycine max
  Clone ID: 700952890H1
gcttcagctacagctgctatatcagaagggcttcatcctgcattaccatcaaagaacaagggtaagcaccagcagtctgaagatgcctcttcattaattagtagtatgaatcccacacagactcccaagtctgttgaagatgacttctttactacagccactgatgcattcagccatgctcatgttgatgccgagtccaatgtaattgatttcagttaccttgaaccacct

SEQ ID NO: 22249 - DNA, 228 bp, Glycine max
  Clone ID: 700952893H1
cttctcataataaacttggtgggggtggttgctggcatctcctatgccatcaacagtggctaccaatcttggggacccctctttggtaagcttttctttgcattttgggtgatcatccatctataccctttcctcaaaggtctcatggggcgccaaaacagaacaccaaccattgtggtggtgtggtccgttctgcttgcatccattttctcactcttgtgggttaga

SEQ ID NO: 22250 - DNA, 229 bp, Glycine max
  Clone ID: 700952894H1
caaacgacgaaagaatacatgaagatgccagcattaacaaaagaacaaggttaaacccattattatactcacttgaagatcactttccacctcaaagggactctgacatgagcacttcacaccaaagcaatggccaagattcgtgtggtcaatcctcccaaagcaagcttcatgaagaatttgcaaacttacttaagcccgttagcataggcaataatcacttacaaca

SEQ ID NO: 22251 - DNA, 232 bp, Glycine max
  Clone ID: 700952895H1
aattgattacaaaagtttatgtagaaggctagacagagaattggacaaactcactatggaatatgaaaggcagcagaaggtatttgaggatgatattgaaagattgaccacagaagcacaacattgcatattagaggcccaacagaattattcggattcgttggagaaggaaagattgaaataccagaaagactataaagaatcaattaagaggcttgaagagaaggtaatg

SEQ ID NO: 22252 - DNA, 232 bp, Glycine max
  Clone ID: 700952896H1
agctcactctcttccgtttctttccctataaaattaactccttaccttcctccaatatttctcttaatcatacttaacgtgcactcaaccacattcatcacaactcacacccttcataagctttgtgttttttcgtagaaacaaagatctgatcatgacgatgatgagcagcagcaacaacaacgttggagaatttggagacaccactctgaccaaggtttttgttgggggc

SEQ ID NO: 22253 - DNA, 262 bp, Glycine max
  Clone ID: 700952901H1
aacacttggtgattggacccggagtctcaaagtcaagttctcagagtgttgccagccaccggacaacggcaagagtggacttctaagagctgaatacttgcaaggagatagaagtccgagtactctccctaaagttctaattgacggtccgtacggagcaccagcccaagactacaagcaatatgaggtggttttgctagtggggctaggaattggagccaccccaatgattagtatacttaaggacatagtgaataacatg

SEQ ID NO: 22254 - DNA, 229 bp, Glycine max
  Clone ID: 700952864H1
tgctatccttgcggccttctacatttatgaggaagcttccacctaagcgtggtatcacacaatatcacccaattcgctgaaaaggggatttatcaatcgttcactattttcttgaatgattatcactctccaagggtaattttttagagtagagacaagtcagtcttctatgttcggtggcaaagcttgtatgctttgtctctagaacattatggtttagttttgcgat

SEQ ID NO: 22255 - DNA, 246 bp, Glycine max
  Clone ID: 700952830H1
gtggtttcagtgagtgatcggtgttcacttgatccttcataagtcgtcatcatcatcatcatcatcaccgttgattgaagaagatgccgatcagaaacatcgccatcggaaggcctgaagaggctactcaccccgacacgttgaaggcggggttggctgagttcatctccaccttgatcttcgtgttcgccggttcaggttccggcatcgcctacaacaagctcaccgacaacggcgccgccactc

SEQ ID NO: 22256 - DNA, 247 bp, Glycine max
  Clone ID: 700952831H1
ctttcgaaagattttatccaattgaaattttaaaaatgactgggataaacttaagaattcaattattgaaattgaataagtaaacaatttaattggattggtcgaatggtatcaaaaaaatggagtactaactcccatttcttatttattattgaattaaccgatcaacttgctttgttatcgaacatttctttttgatttcaaaaattttccggaaaaactttgaatctatttttatatgcgaatc

SEQ ID NO: 22257 - DNA, 247 bp, Glycine max
  Clone ID: 700952832H1
caacaccacacgaagcctttgttgcattcttctggctccatgttaccctccaaggacaaggagctttctgtttctgccagaaaactcgctgctacactgtgggaaatcaatgatttgcccccttcgagggtgaagaaggagttcgaggttgatccaatgagaggctgcaaggagaaggttagaagcagagagaagaagggtgtgggtttgtccagatcgggcttgttaaggccacagatgtcagatc

SEQ ID NO: 22258 - DNA, 249 bp, Glycine max
  Clone ID: 700952833H1
ctcgagcgaatcggctcgagatcgaaaggttgttaattttcacctcaatggttcttcactcaggttttgtttccatattgatactttttggcatggttttggtagttggggtgaatattgtcccaggggttgaggcaaaggcaagggctttctttgtatttggagactcactggttgacagtggtaacaacaattacttagcgaccactgcacgggctgattcccctccttatggcattgactatccaa

SEQ ID NO: 22259 - DNA, 257 bp, Glycine max
  Clone ID: 700952834H1
atgctatgctggatctgactgctcccagtttttatctgattgtcctgccaacgctgatggtggtgatccatattttatggagccattttggatgcaacatgcagcaagtagtgccattctagtatcaggatggcatagaatgagttattcttatagcgatggatcagtcatctcacaactattggttgagtacataaaaaaagttcatggcatcgttgggaatgcaatcaccgaaggaaagtacatcgtatttggaa

SEQ ID NO: 22260 - DNA, 249 bp, Glycine max
  Clone ID: 700952835H1
ggaaagcataatcaaatcaaccatggctacccttattgctcccatcaccttttcacctggtttagatgcagaagctcttagaaaagctttccaaggatgggggaccgatgagaaaaccgttattgcaatactgggtcatagaaatgttcatcagaggcaacaaatcagaaaggtttatgaggaaatttaccaagaggacctcattaaacgcctggagtctgagctctctggtgactttgagagagctgt

SEQ ID NO: 22261 - DNA, 247 bp, Glycine max
  Clone ID: 700952836H1
gagaaatgtttgcttattatcatcaaatggtttacaaacgagtttatctgaaatttctcaagatcaacattattggagcacttgttctactctttgcatttctcttcctcagttgtgtgtatgcacaagacacaacaacccttgtgcctgcaatcataacttttggtgattctgctgtggatgtagggaacaatgactatcttcccacccttttcaaggctgattaccctccttatgggagggactt

SEQ ID NO: 22262 - DNA, 248 bp, Glycine max
  Clone ID: 700952839H1
ctgttctctatatgtctctatttcttttctctctctataaatacgcagccttacaactcttcttaatcccatcaaatcgaaccctttttaaacgctcaaatacaaatttctggcaccaaatccttcccactctcctcaattccattcatttcaactcaacaatctctcagatccgtcaaacaaaatataaaagatagaaaaccctagttctgtaaatatataaaggaaaaaagctttttgctggtttt

SEQ ID NO: 22263 - DNA, 246 bp, Glycine max
  Clone ID: 700952841H1
atttaccatgtatccttggggatgcattgcatgaaatgtatgatggatgacatgtaaaatgggcagttgtggaaattaacgaaattttgggtccattttttttatatattatttcttttataggttcatcatcatcatcaaattgggacgttgttctcaggaaggtccaaaaagtcagtgcagcgaaaacggacgatccgaagaatacccttttcatctctctctacaataatcatcctcttcctc

SEQ ID NO: 22264 - DNA, 249 bp, Glycine max
  Clone ID: 700952842H1
cgtctcgagccgaatcggctcgagcgcgctcgagcttttgagcgaaactgcagtcgagtccttacgcttctggaggaacccataaggatggcctccatcctcgagccatccaagcctagtttctttccagcgatgacaaagattgttggcacacttggcccaaagtcacgatcggttgacgtgatttcccaatgtcttgaggcaggaatgtctgtggcaaggtttgatttttcatggggtgatcctgaa

SEQ ID NO: 22265 - DNA, 243 bp, Glycine max
  Clone ID: 700952843H1
aaaaaattaggcgtctaaagggccaaagcttagaaagttgaagctttttttgttgaggtgaaagtgaaatggttggcaaggataatctgagggctgaggacttgaacttgtgctttaagaagcttatgatggtggccgggagtgggaacagtgagaaaggggtgaacttgaaggttggggtgatcaccgagtggaaggatattcctgtggagcttctgatgcaaattctgtcccttgtggatg

SEQ ID NO: 22266 - DNA, 243 bp, Glycine max
  Clone ID: 700952844H1
gaggcattgaagcaagtgcctgagaaaaaccgaaagccatttgtgatctacatcaaggaaggcgtttaccaagagtatgttgaagttacaaaaaaaatgacccatgtggtgtttattggtgaaggggggaaaaagacacgaatatctggtaacaaaaacttcatagatggaacgaacacttatagaactgccactgtcgctattcaaggagatcactttgtggccatcaatatggggtttgag

SEQ ID NO: 22267 - DNA, 241 bp, Glycine max
  Clone ID: 700952846H1
tgctcgtggacagcagggttcatatccaatcaaattgttttatacctccaacatgcccatcattcttcagtctgcccttgtttccaatctctacttcatctcccagctgctccaccgtaagtacagcggaaacttcttcgtagatctattgggaaaatggaaggaatctgaatatggaggtggtcagtctgttcctgttggtggcattgcatactatatcactgcaccatccagcttagct

SEQ ID NO: 22268 - DNA, 242 bp, Glycine max
  Clone ID: 700952848H1
cactgaggcagattctttgtaaatgtttggatgtcaatccaggaaaccggccagatgtggtggatgtaaggaaatgcattcagaatatgttagtcaaaccgcaatttgattttctgggcaacttggaggtcacgataagtagggactacacaggaatctgcttggttctaggggagttgtgtttgttgcctaagcaaagttctaatgaactgattgaacatgagttgtgggagacagaaatt

SEQ ID NO: 22269 - DNA, 247 bp, Glycine max
  Clone ID: 700952850H1
gcaaaacccacaaaactaacagtgtatcaaaatttttgaacctgaaaattgttattttgatagggtttacagcaaatgcagcatagcctgcctcgtcacaaaatactgaacgccgcagctctgtggttgatcgacgcattcttcacttcaatcccacaatgtctataacgcacagcctcaccacttcactctcttcttcttcctctgctttcttagctccctcttccttcaattccagaggacaggt

SEQ ID NO: 22270 - DNA, 246 bp, Glycine max
  Clone ID: 700952851H1
ctctttctctctcttcaattcagcttcttcagcttcagcgaaatcctgttctaaccgtagatcgtgccttttcttttgtgcctgagaagccacttctctacttgcggttcttcttcttcttcttcttcaattttattcgattcgcttgctggaaaattctttgagtgagggagaggatgtctggtggcacacagaagagtctgagaaaagcacttggagcccttaaggacaccacaacagtctcgt

SEQ ID NO: 22271 - DNA, 242 bp, Glycine max
  Clone ID: 700952852H1
caagaatccccatagaaccaaaaagtaataaatcaaagcttcgttatcttcttcaaacccctggctgaatgaaatgtcgcaggtgaatgagcaccaccaccacgcaccctccacgccagggaaattgaagccagaaaaatccccatacaaccgcctccgtatccactcctctctctccaaactcactctctggtcctccttcttcctcgcattcatcctcttcctcttcattctgtcaccgc

SEQ ID NO: 22272 - DNA, 244 bp, Glycine max
  Clone ID: 700952853H1
aattaacatcagccctcactccttcgcacaccaaacccttccttcctatctctcactaatctaatggaatccgcagcactgtcgcgcataggcctggcgggcctggcggtgatgggccaaaacctagccctaaacatcgcagaaaaggggttcccgatctccgtgtacaaccgcacggcctccaaagtggaccagaccgtagatcgtgcccgcaacgagggctccctccctctcacgggccaat

SEQ ID NO: 22273 - DNA, 246 bp, Glycine max
  Clone ID: 700952854H1
ctagccttcttcaagtgttcttcctctttaatttctctatagaatacttacccttttctcaagactaacctctcgatccttctcaaaagaagaaaattaaaatggcaactgaaaagcttagaggttgtgcaaagttttttgcaagctctaaaccctacttggccatgatctctttacaatttggctatgctggcatgaacattatcactaaggtttccctcaaccaaggcatgagccactatgtcc

SEQ ID NO: 22274 - DNA, 245 bp, Glycine max
  Clone ID: 700952855H1
ctcgagccgaatcggctcgaggtttccctttcattttccctcactttctcgctcgccaaacgcccctctctctcctccactggccgaccagctcaccgacgaccagatcgccgagttcaaggaggccttcagcctcttcgacaaggacggcgatggttgtattactactaaggaacttgggactgtgatgcggtcactagggcaaaacccaactgaggcagaactgcaggatatgattaatgagg

SEQ ID NO: 22275 - DNA, 81 bp, Glycine max
  Clone ID: 700952856H1
catcccttgtattgaagaacaccctctttggatacccgtttgttaaagccaagacttttctcagttttgagaagaagaaga

SEQ ID NO: 22276 - DNA, 243 bp, Glycine max
  Clone ID: 700952857H1
caaagttgcagccccggttatttttattatgtttattccgatcatcatgttgcatagagaaaaagcaaggaagaataataagggagagagagtgagaggaagaagggaaaaccaaagacacttcctagttacttccctctgcagccataatagaataaccagcaccaccaaaggtgaatcatggttatttgcttgaagctcataataatgtggaatgtggcactgcttctggttttttctcta

SEQ ID NO: 22277 - DNA, 240 bp, Glycine max
  Clone ID: 700952859H1
tcctaatccagttatccataatttcataagcataaacgagaaattgagagagaatgtctcgtatctctacactctatcttctcgcttacaactcctttcaggccattggatggacgatttccttaactaagattttgtacaatcttctcgtcactgcatccatcaaaggaacctatgcttccgccgccagcttaatctgttttctgcaatgcgctgcattcttggaagttatacacggag

SEQ ID NO: 22278 - DNA, 247 bp, Glycine max
  Clone ID: 700952829H1
ctcgagccgcggcttctgtttcctcttctatctgcaacagaatatacaacctttccttcacacacccttccctttcactcaccagcagcaacttccctcaaagacccgtatctcaaaaaccactcagtctcaacctcgagtcccaaagtttcgctctttcctttctcccacttcaccgtcttcccccacctttcgctgcctttgatgggttggaagtagctcaagataccacagagtcccaacaaga

SEQ ID NO: 22279 - DNA, 239 bp, Glycine max
  Clone ID: 700952860H1
aaaagagaccagtgtgcagtgagaaagagattgctcacttcttgtgtgggtttgttttgttctttgtgttggaatttgttcatgggtgaagaaggagaagaggtgtcaagagacaaggaacaatacatgggagtttatggaaatgagtggttgtattgtggttgctctgcaaattggcgccgtttaagacaccagaattcctgttccatgccttttttcaagtgaaaaaaaaaaacaat

SEQ ID NO: 22280 - DNA, 240 bp, Glycine max
  Clone ID: 700952861H1
acgttgtttgccctaaccatttcacattccccgatttccctcaccggtttgtgttgagcagatagagagagatgaacccgctaacactagtgaagcgcactcagaacatcaatgccagagaagctgcactcggcatcggcgagcaagcctcctggcacaccaagtacaaggattccgcttacgtcttcgtcggtggcatccccttcgatctcaccgagggtgacctcctcgccgtttttg

SEQ ID NO: 22281 - DNA, 240 bp, Glycine max
  Clone ID: 700952863H1
ctcactccatatatatcaccaccctcaaccaaaccatagtggctcaagcactctatagcatatacttgcctttgtgaaattgaaaagatgaaaaaaccaaacactagtactagtggttcaccaaaacttgatcgcaaaactatcgaaaggaaccgcaggattcacatgaaatctctctgcttcaagcttgtttccactattccttccaatgacctcaaacccaccaaggacatgctttcc

SEQ ID NO: 22282 - DNA, 267 bp, Glycine max
  Clone ID: 700952786H1
ctctctaacacggagtgatggctgtgcagctgtgggaaaccctgaaggaagccatcgtagcctacactggcttctctccttccaccttcttcacggtgctggcgcttctttttgccgtttactacgtcgtcacgggtctctttggctcctccgacgatcaccatcaccgccaccgccacgtcgaggaggaggaggagatgccgcctctgcgccccccggttcagctcggcgagatcacagcggaggagctcaaggcctacgacggca

SEQ ID NO: 22283 - DNA, 268 bp, Glycine max; identical to SEQ ID NO: 21304
  Clone ID: 700952788H1

SEQ ID NO: 22284 - DNA, 264 bp, Glycine max
  Clone ID: 700952790H1
gccagtgcctccgcctggaacctacgtcatcaagatccctaaggaccaagtctatcgcgtccctccgccggagaacgctcgccgctacgaccaatacactcgccgtaaacaccgccggagccgatgctgctgctgcttcagctggctcatcggaatcctcttcattctcgtcgttttcctcgccatcgccgccggcgtcctctacctcgttttccgtcccgaggagccgaaatactccatcgaaaacatcgccgtcagaggaat

SEQ ID NO: 22285 - DNA, 263 bp, Glycine max
  Clone ID: 700952791H1
tccatcttcaacttcaacacttaaactccttttagtttcaataatccacaccccaaaccccaaatctttccctatttattttcatcttagttttccctaggaccatatattataccatatttatatatcttcacatacttaataatatataataatgggtgttgtacggacgtgggagagcaggagggcggactggaggcctttcgccggagcctggtggcagccgccggcatccagcggcggaaagacgatgagggggggag

SEQ ID NO: 22286 - DNA, 264 bp, Glycine max
  Clone ID: 700952792H1
gtgctggtagcaacccattagaaatacatgggactgtatacactgtaatatgtatagattgtggatattccttttgccggagcttgtttcaggaccagttgaaggcccttaatccaaagtgggcagaagcaattgataacttggaccatggaaaccctggatcagataagagctttggcatgaaacaaagacctgatggtgatattgagattgatgaaagattttgggaggaggattttatcatcccaacttgtcacaagtgca

SEQ ID NO: 22287 - DNA, 251 bp, Glycine max
  Clone ID: 700952793H1
cttggtggaaaacagattgtgcatctaattccaaattcacccataaaaatacttccttttgctcaccagccatatattatgatggagggagatgagaatattcaagcatcatcaaagggaaaatatgttgaaagcttcaactgctcggaggcaccaaggaagaaaagcaagaagatagaaaacaagaggaggtttagtgatgaacagataagatcactagaatgcatatttgagtcagagtcaaagcttga

SEQ ID NO: 22288 - DNA, 262 bp, Glycine max
  Clone ID: 700952794H1
atcggaacaaacagggaatataagagagaaaaagatgggtttcataatggaattcgcggagaacttggtattgaagttgatggaggatccgaaggaaagggatcggaggttccgggagcacgtttatagagtgaaggacaggtgcgagaagacgaaggagatgtggagctaccctatgcgaccctatgggttttggactttcgaacgccacaattctcagcttgcttgggatgcacagattagccaagtggctgggaggagg

SEQ ID NO: 22289 - DNA, 264 bp, Glycine max
  Clone ID: 700952795H1
aaatagcccacccataaaccctctcattctaaaaccctctctttcgtttcattcagtgggaacctttctcaaacaccatgagtgcattcccgaacggttccaactcgagcctcgacaacctcctcctccaaactatgatgggcaggctccagctgcgagctccgataaacaaccccttggtcacacagtccctcgaggactttttattcaacgacctcggcgacgacgacgacgacggcggtgacaacgaggacagcgagaaag

SEQ ID NO: 22290 - DNA, 262 bp, Glycine max
  Clone ID: 700952796H1
ttgacatcctaaaactaagtaggccttttctagacaggctgaagatgtctcttcacgggatctgaaaccaatgcaacttactgatgaggcatttccaggtggtcctgaagatgtctcttcacaagatctgaagccaatgcaacttactgatgaagcgtttccaggtggtcctcaagacttgtccttgcttagatcctttaggaaccatgttgccacacgcctatggataggagaggaccgtcacgagttgaaggtggttaat

SEQ ID NO: 22291 - DNA, 261 bp, Glycine max
  Clone ID: 700952802H1
agctctcactctcactctcactccacataatataaatttctggttacaactcaacaagtccacaaacattttccaatctcaaatctctcatacttcttacgccacatacacccttctcttcatttctcactctccggaacatttttttttttaaaaaagaaaaggggaaaatagaaagaaaagaaaaagggagaaggagtgagaataacatgaacaaacaactcacgctgctctgtctctttatcctcttctcatttctca

SEQ ID NO: 22292 - DNA, 268 bp, Glycine max
  Clone ID: 700952803H1
catgcagctgcagctctttctccgagaagcaagaaaaaaaacgtgattcgctcttctcttcgaataaaccccaaaaccaacaaacgagaagaggagtgagagaagatggggttgtcgttcacgaagctgttcagcaggttgtttccgaagaaggaaatggggattctgatggtaggtctcgatgctgctggtaagacaaccatcttgtacaagctcaagcttggagaaatcgtcaccaccatccccaccatcggatttaatgttgaga

SEQ ID NO: 22293 - DNA, 256 bp, Glycine max
  Clone ID: 700952804H1
caaaaccacaatctaagtaagtgttgagagaagagtgcgtttgtttgtttgaaattaagtagtaaagatgtttggaatcatcggaggaaacaagggtcacaagataaaggggaacttggtgattatgcgaaagaatgtgttggatatcaacagcatcaccagtgttaagggtgtcattggaaccggcattaacatcattggaggtgtcgtcgacaccgttactgctttggcgtcccacatctccatccagctcatc

SEQ ID NO: 22294 - DNA, 255 bp, Glycine max
  Clone ID: 700952807H1
tcaagttgaaacatttgaaagatccgcttctgggggatgaagtatataaattgatgtgtgaattttggatgctgcctgcttctcaagtattagataagcgattgcattgaaacagtgcagacagtacttattgaccatcattgtgttgttgcttctaatggatattggtggtgacaaaatattatttaccagaaaattctgaaaaatctatgtagcttagatgaagtggatattattgaagtcctcaagtcttgg

SEQ ID NO: 22295 - DNA, 250 bp, Glycine max
  Clone ID: 700952810H1
aacaaaaccacaatctaagtaagtgtttgtttgtttgaaattaagtagtaaagatgtttggactcatcggaggaaacaagggtcacaagataaaggggaacttggtgattatgcgaaagaatgtgttggatatcaacagcatcaccagtgttaagggtgtcattggaaccggcattaacatcattggaggtgtcgtcgacaccgttactgctttggcgtcccacatctccatccagctcatcagtgccac

SEQ ID NO: 22296 - DNA, 247 bp, Glycine max
  Clone ID: 700952814H1
ctcgagcgaatcggctcgagtgcaccaataccagatctaaaacgagaaaattattgtgtttgggcaagtcatcaagggagaggatgttgtccaggaaattgaagaagtggatacagatgaacattacaagcctaaagtatctatcgggatacttgatgtgactcttaaacaaaaggtctgaaggttctctgctagatcaagatcataattagctgtgatacttagtcataacctgttttcggggaca

SEQ ID NO: 22297 - DNA, 248 bp, Glycine max
  Clone ID: 700952816H1
gattaatgcagatggcattatagagaaatcatttttgcccggaaagtactccattgagatgtcttcatccgtctacaagaattgggttttcactgaccaagcattaccagctgatctcgtcaagagaggattggcaattgaagatccctctgcaccccatggccttcgccttgtgatagaggactacccttatgctgttgatggacttgaaatatgggatgctattaagacatgggttcatgaatatg

SEQ ID NO: 22298 - DNA, 255 bp, Glycine max
  Clone ID: 700952817H1
gagcaatgggtgtgaactcttactccaacagcatgaagatccaagccgagatacaaatgccacccttagaaatccacaaggttcgtttgccaccagaacgcaccaccttgcagaaactcagacacagactctctgagatcttcttcccagatgatccactccacaggttcaagaaccaaacatgcctcatcaagctcctccttgcacttcaatactttttccccattttccaatgggcccctctctacaaccttt

SEQ ID NO: 22299 - DNA, 251 bp, Glycine max
  Clone ID: 700952818H1
caattattgtcgtaactattactcactctaatattctcatactcacagctactttatcatttttctccctttcttttcttcttctgttcagcttagacactcatttttattagttttgttgctgagtgtgtgtgaaactgtgaaagagagttatggcaggaggtggtggagctccagcacctaagattgatgagccacaacctcatcccccgaaggatcagttaccgaatgtttcttactgcagtacgagt

SEQ ID NO: 22300 - DNA, 254 bp, Glycine max
  Clone ID: 700952819H1
agctacttcaccactccaaacccaccacaccaccattattcatatctcattctctaacctttcactctgccttactcactctctactttgctcatcatcgtagatgaaccaacacttctagtctctcttactttataaccatgtaaaaatgagtcacctaatgaaaaattagtagcttcttgttgtgctttttattttgtttgtgttgagataaatttgtttgtttgtttggtattgttttgtgttttatgaat

SEQ ID NO: 22301 - DNA, 253 bp, Glycine max
  Clone ID: 700952821H1
caacttttcttcattttctctcttcctctcaccgagtcacgcactcgcctcgactcgtacggactccgatcccccccgagtcacactcagccagcaccaccgcccgatccgacgatgtctcgcgcctcttccgccgcctccgggagatcatgctgttcggggtcagagtcgtcgtcgattcgatgaggaagagcgtcagcatgaacaacctctcacagtacgaacatcctttagacgccaccaccaccaacaa

SEQ ID NO: 22302 - DNA, 254 bp, Glycine max
  Clone ID: 700952822H1
cgactgagtcgcggtctcttcccaactcggaactcagtccattccgcatttctcttcaaaccaaatttcttctgaagaaggagatttgaattcagaattgagtgagaagaagagaatagaaatgggctccgaattgattttcagaggccacgaggctcagcccgtggacgactcgtactcgccgaagccccacaagccctggttcaccgtgactcgcccgattcactacatgctccgcgagcagcgactcgtct

SEQ ID NO: 22303 - DNA, 254 bp, Glycine max
  Clone ID: 700952824H1
cggaatttcccacctggcctccgacaccgttcattacgaccctacagatctctattcctgggtccaaagcatgttaaccgaactcaaccccgaacccaacaacaacctcgatccatcttctttcttgatcgacaacaacaacaacatcatcaacagcacagcccctgtttttcgcgacgattccgaatatgacctcagagccattcctggcatagcagcctaccctcctcctcttcctcaagacaaccacctcg

SEQ ID NO: 22304 - DNA, 248 bp, Glycine max
  Clone ID: 700952825H1
ggagattcatgtggtggaaactcaacagtggtaagaaagcctctgtgcttagatgttgaaggacctttcaaatatgggatctaccaatgggcacttcctgtcatatccagcaactctttggctgtaaagattctttatcccattttttggggtttgatgaccctcagcactttcggaaatgatcttgaacccacaagccactggctagaagtgattttcagtatatgcatagtactcagtggactatt

SEQ ID NO: 22305 - DNA, 247 bp, Glycine max
  Clone ID: 700952826H1
ctcgagcgctttttacttcccctatggctcgtcactccttgctcttagccctcctccacttcgccgccgtggccaccgccgcgatggcggtgccgcgtccgacgccgacgacatcctgatccgtcaggtggtgccagatgttggcgaagcgaaggaggaggacaacctgctgaacgccgagcaccacttcgcgagcttcaaggccaagtgcgccaagacctacgccaccaaggaggagcacgatcat

SEQ ID NO: 22306 - DNA, 268 bp, Glycine max
  Clone ID: 700952785H1
gtttccattcccaattcccaatcgtgttgggtggccatggattctctactggcgaactatgcctcttcagatgaagaagaagatcaacagccatccccaccaaaaacgacgacgttttcctcccttcctcaacccaaactttctctgtttcaatcccttcctcaacccaaatcttctctgtttcaatcccttcctccacccaaacaaccttccaccgaaagctcttccctccctaaccctaaccctaaccctgaccctaaaccccaaa

SEQ ID NO: 22307 - DNA, 271 bp, Glycine max
  Clone ID: 700952752H1
ggtttctatgcatttgaatcagaggatgacgtagatccttcgattagatatgttggaaccaattaccctcatgttaagcggcgtaagaacttgcctgaccctgtagaaaaagagaaaggtgtcagtctttggtcaatgattaaggataatatagggaaggatctaacaaaagtttgccttcctgtttattttaacgaacctctttcctccctgcaaaaatgttttgaagaaatggagtattcatatcttctggaccaagcatatgaatggg

SEQ ID NO: 22308 - DNA, 273 bp, Glycine max
  Clone ID: 700952754H1
ctatgccacacatggaagtggacaaatggattcagctgccacaccagaaaactcatcaatatcaattggagatgatgattttgagcagagttcccaaaagtgtaaatcaggaggggatgaatatgatgaagatgaacctgatgccaaaagatggaaaattgaaggtgaaaatgagggtatgtcagcccctggaagtagaacagtgagagaacctagagttgtagttcagacaaccagtgacattgatatccttgatgatggctataggtggag

SEQ ID NO: 22309 - DNA, 267 bp, Glycine max
  Clone ID: 700952755H1
cttaggtttgtcccacaagtagtgatgctaagcctatgtttgacatgaatttcatactacttatctatatggcactctcagttgctggttcattttgtgttttgctgcgagccatgatggtgttaaatgctggactttggacagcacagacacttttcacaaagatgttgcatagtgtgctccgtgcccccatggcatgttttgattctacaccaactggaagaatattgaacagggcttccacagatcaaagtgtgctagacttgg

SEQ ID NO: 22310 - DNA, 270 bp, Glycine max
  Clone ID: 700952757H1
ccatttctcttctcgcgtctcactctcccaccgattcagtttcggacactcactcccactcgctccgattaccgcaccattctgcgtcgccatttagggtttcttcgctcctctttgttggatcttcctcactttgcatcgttctcttcgattcgtaaaatttttcttgcttctcctgtcttggctcgagatccgggccaagcacagaagaatccgtttctgatttgcattttgtactcactggtttggcttgtttttgtctctttgtag

SEQ ID NO: 22311 - DNA, 271 bp, Glycine max
  Clone ID: 700952759H1
aaaatcgaatcccattttaattctcagatccaagcttgggagacagagaaagagaaagagaatggacgccattgattctgtgttcgatccgctgagagaattcgcaaaggacagcggtgaggctcgtgaagcgctgccacaaacccgatcgcaaagaaattcctccaaggttgccgtccgtattgcaattggttcgtcgtgaatggaatccgccggttcctccgtgagctcaatttcaatcccattaaccacatcattgtcggatctgggt

SEQ ID NO: 22312 - DNA, 266 bp, Glycine max
  Clone ID: 700952760H1
atttttcagtttctcagtttcttattcgttagatctcatcttacactcaccgtcaagttcgtctcgcgccaccgtcgacgcagttccggccactgcctttggttccctcactttctgtctcttcttcttcttctcagaaatatgccttctcagaaggttgaaacgggtcatcaagacacagtccatgatgttgcgatggattattatggtaagaggctggccacggcttcatcagatcacacgattaagataattggggtgagcaa

SEQ ID NO: 22313 - DNA, 267 bp, Glycine max
  Clone ID: 700952763H1
caattctcccactccttccctaagctgccgaatcagcacttcgtcatcgattccaatacggcgccgttttccttcgccatcaagcgcaacgcataacaatcgtcagcgccaccatttcccttcggttcccaagaatcaatggcgactcgtgcgttgctcggagcaatcaagaaacgcaccgtttcgttccccgcattccgcggccattccatttatcgacacggtagcacgcttgtggtggcggaacacgaaggtggttttatcaaa

SEQ ID NO: 22314 - DNA, 267 bp, Glycine max
  Clone ID: 700952764H1
gtggaagttcatgaaggtgagtgggataaatctggcaatatcaaggtgcttacattcgctgatggggacactgttgagaccttaaaggagagagttgattttgatgatgaaaacaagaagataacctacaccatattggagggtgtcatgttgaagtactataagagctacaaggttatcgttcatgttttaccaaaaggtgatgagcacagccttgtgaagtggactttcttgtatgagaaggtggatcacactgcccctgagcca

SEQ ID NO: 22315 - DNA, 269 bp, Glycine max
  Clone ID: 700952765H1
cttttcttcccaacactcttgggtgaggaattggacacccagacgaattgaatggccatggaaaatcaaaattttctagagtattgggttttgccactacttatgatgcttttgttgggtcattggatctctgttcaagctgccccttcaccctctctcatcactcaactccctggctttaacgccaatttcccatccaagcactattccgggtatataagtattgatggaaatgctgaaagtgggaagaacctgttctactactttgt

SEQ ID NO: 22316 - DNA, 265 bp, Glycine max
  Clone ID: 700952766H1
ggaagagagcagaaactggagaagagaagccataaaaaaatcacagatctaaccaaactccgatttcgattccgattccgggaatagactaccaacaagagcaaacctaaggagaaggaatgtgcagctagatgactaccattgtccattttgttcgtgtcatgaggaggaagcgtcccacatattttttggttgccaaagaataatgcctttatggtgggagagccttgcatggacagaggttgtaactgtgttccttgcatca

SEQ ID NO: 22317 - DNA, 270 bp, Glycine max
  Clone ID: 700952767H1
acaaagaccctgtttaggcttgggttggaacaacatcaaaaaagagaaagcaaactttcttttctcttttgtagatcgagatcgtagaaattaagaaaggcatgaatagaggtgttttgcaaagctcaccggtgcaacaaatgatggccagaaaccctaacaactggtggaacatcaacaccatgcgccctcctcctccttctcaagcttctgcacctttcttctccactccttccaactttctaactccttataaccccacttctcttc

SEQ ID NO: 22318 - DNA, 265 bp, Glycine max
  Clone ID: 700952768H1
catatccccccctagctacagagcagccaaaggggaggaataataataagcctatattctaaggccggaaaaataaaaaaggaataacaaaaatgtctggaaaggtaattatctcggctgtttctctcatcctggtggttggagtggccataggtgtggtggtggccgtcaacaagaagggcgaggatcccacacttcaatctcaacaaaaatcagtaggggttatctgccaaaacactgatgaccagaagctctgccacgaaac

SEQ ID NO: 22319 - DNA, 268 bp, Glycine max
  Clone ID: 700952770H1
tacagatcaggatatggagaagggcaggaagggcagtggatagagccactgctgagcatctctttgaggtcatcaactcaagggaggatgtgttgaggaggttgatccgccgttgcgcttatctcaagtatgttgaggcaaggcttggtgataggacactctttgcagatgagattctcaaagatggtttttgcttgaacatgattgaaacaccactttgtcctttgaaggttgtcacaaacttgcaagaagctgtttgggatgctga

SEQ ID NO: 22320 - DNA, 260 bp, Glycine max
  Clone ID: 700952771H1
ctttatgttattttatttattttctatttttatgcttgcagttgcgtcaatgtgccttgtttagtaaaccttgtgaatttttaattaggttggaactcttgctatacttgactcgctgttgaagtcaagactttatttaattatgcataatatttaatttaaccctctgatactgctttctttctagtacggacaaaagcttgtccaatgtgtttgtcttataataattgcctgtttgtgtctttctagttttttcatga

SEQ ID NO: 22321 - DNA, 267 bp, Glycine max
  Clone ID: 700952772H1
gggaaagatactgagtctgatgtgctgactaattttgataaggatcttggaattcggtttagctcggccttgaactattttgtccgggttggctacattcttcatttgatacttgttttccctgttattcatttctcgctgcgccaaacagtggatgcgctagtgtttgagggatcacatcctctatcagaaagtaggaagagatctctggggttgactgtggttctgttggtcctcatatatattggctctaccatgattccaagc

SEQ ID NO: 22322 - DNA, 267 bp, Glycine max
  Clone ID: 700952773H1
gtggagttgaattctttaccctcaagtaatcagaataataagggtctggttgcaaagtttacaagtaatgctcctgcagctaattctcttgtagcagagtccaagcccagagagatggcgtcacggaacatgttcaaacagccagatactaatggagttgttaatggagagttggctaatgtaaaagtcacaaatacaagtttgaatagacaggtgactggttcttcacctgaaagtacatcaaaccaatcaagcagagcagctcct

SEQ ID NO: 22323 - DNA, 267 bp, Glycine max
  Clone ID: 700952774H1
gtcagcccggtctctgttgcacacttctcgcagtacaagctaactatgttactactcaagcgacttgaaaacctaggcttccaaatatgtgcgcctgaaagtttggaaggaaatgaacagtcttgtgagaaaaaaataatgatgggccatgagtgtgtttccattgatgccagcaatgactttgtaacagtaactgcatcttctatcattaaagggaagcgtgtagaacagaacattcactgtaacatccttattggtacagatggt

SEQ ID NO: 22324 - DNA, 263 bp, Glycine max
  Clone ID: 700952775H1
ctttcttttccctctctcaattccaagtgggttttatcttctactttttttctttctccaaaagtgttaaaattttaactttgttttgccttaatttgattgttttatgcagagtagacagtagatttagacacccttttggaaaaggaagtgttttttgagggaaaggagggaattttttgtgtgggagggtggaacccggaattcggtttggttggggtagagaggatgaagattcagtgtaacgtgtgtgaggctgcgga

SEQ ID NO: 22325 - DNA, 264 bp, Glycine max
  Clone ID: 700952778H1
ttattctagtaatacatttctgggttttgtttgccttgtgtgtatctttctattgacgagaataatggaatgttcccaattctctgttttttttgcttttgtccatttttgtgggaatttgtttagcttctactgaggaacaggaaagggacaggattgccaagctgccaggacaaccagaaaatgtgctatttgcacactactcaggctatgtgactgtgaatgaagaagctgggagagcattgttctattggctggttgaga

SEQ ID NO: 22326 - DNA, 264 bp, Glycine max
  Clone ID: 700952779H1
agaaaacacaaagtgtgctcactttattgttttctcaatgtcttcgtttacgggtgcacgttccaaagcaaatgctaactctgaaatgaccaaagctaacgacactaacctttgccccatcaacacaagtaccattacatcaacctcgccagatacaagtgccaagaatgataagaaaaagaagtctatccttccaaagattttcggatcaaagcgaaatgggagaggttcagacgaagagacactcaaatcatcaagtgcaga

SEQ ID NO: 22327 - DNA, 264 bp, Glycine max
  Clone ID: 700952780H1
cactgctggaattgatcactttagtgaattgagtcaggttaggcctcaaaatggcataacatccatatctcctaaaaatgtgagctctcctctgtccttgtcacctcttggtcgtaaattctcggaaagaataaaaactgctggaggatgtagggatgttgttgaagagataaagaattgcaatataacttcaaggagtatagaacaatcacttgacaattccaattcacgtctcatgttaaattataaggatgatgattccag

SEQ ID NO: 22328 - DNA, 267 bp, Glycine max
  Clone ID: 700952782H1
gaagaatcatcaccccaaaacccaaattaaaaaaaaaacccaaataatacaactgaagttattttaattttcttagtaaaaaaaaaaaagagaagaaaaatgacttcgattcatttgataaacactctcgctgctccgcttcgttctttttctcctccgtcgctttttccgcaatgccattctcctctccgttcttccgctgccccgaaacggggtcgtttcgctaactcctctgggttccgccttgcttcaagccaaaccgtgaat

SEQ ID NO: 22329 - DNA, 265 bp, Glycine max
  Clone ID: 700952784H1
gcaaactggtagtctctactctgattgggatcttctccctccaaagacaatcaaagatcccgaggctaaaaaaccagaagattgggatgacaaagaatttattcctgatcccgaggataagaaaccagaggggtatgatgacatcccaaaagagctcccagatcctgaagccaagaagcctgaagattgggatgatgaggaagatggtgagtggacaccccctaccattgccaaccctgattacaagggcccatggaaggcaaag

SEQ ID NO: 22330 - DNA, 270 bp, Glycine max
  Clone ID: 700952751H1
ctcacctcccaactcgccctcgactcacatccttgtccgattccgcgaacgagtcgagtgaatcgggttggtaagatctattctgtttcttcgtcatggcaaccggacaactattctcgcgtactacacaggctttgttttacaactacaagcaacttcccatccagcggatgcttgattttgacttcctttgcggcagggaaacaccatcagttgctggaataattaaccctggttctgagggatttcaaaaacttttttttggtcagg

SEQ ID NO: 22331 - DNA, 275 bp, Glycine max
  Clone ID: 700952720H1
ttgggcgctgatgtggacttcacctatgcttctcacagaggctgttgatgaatacaaggaggccgaggcgcttggactggataccgttccgggcctcgttggccctgttacatagctgttgctctccaagcctgccaagggagttgagaaatccttttctctcctctctctccttcgcaaggttcttgctgtctacaaggaagttattgctgaccttaaggcagctggtgcttcatggattcagtttgatgagcctgaccttgtcttggaccttg

SEQ ID NO: 22332 - DNA, 272 bp, Glycine max
  Clone ID: 700952721H1
ctcttgtctttctctctctcccgaagataaggcagagaagagaaggagagaggcttgtacctggagagaaaagaggagacaataatacatggggaagcagggtctaaacacggtggagcaacaatctgtggcaccgacagcatccaagtttccgttgagcttttgggaagccacggtggcttcaacggtggcgctggtttttgcggtgggtcttctcggcgtgtacctcaccatgcccgattccgattacagcttccttaaactccctcgta

SEQ ID NO: 22333 - DNA, 276 bp, Glycine max
  Clone ID: 700952722H1
gattggtcccattgattccgaagagaaaagaaaagatgtttgagccacaacagctatacactcgcgcgaagaccgaggaattcgacctcgaatcaggagaaaccctctacccagggctgagcgtcggcgagaaccagctccgatggggtttcatccgcaaggtctacggcatcctctccgcgcagatcgtcctcaccaccctcgtctccgtcaccaccgttttctatactccaatcaatgacctcctcaagggcaattccaccctcctcctcatcc

SEQ ID NO: 22334 - DNA, 275 bp, Glycine max
  Clone ID: 700952724H1
cactcatcgattccgtgttctccgaggcccttgaaagatcggttcgtgcttcggtcttctaaagtggagcaaatatcgtttacggaatctgagaactcactcatcgaagcccttcttggcatccaaggacgcggacgttcttcttctcgtcagcagctcaatgctgttgagcgtgctgttcaagtcctggagcggttagggggtgtacctgatccgacaaaatcaaacttgatcgagggtcgctggcagctaattttcaccacaagaccaggaac

SEQ ID NO: 22335 - DNA, 273 bp, Glycine max
  Clone ID: 700952725H1
gtgagcagccgagatctgttgccggtggcatcaaggaaagtaagagtttagagtttgaactctgtttatccaatgcacaaagcgtagatctctgtgttataatggaatacaggaaaatcaaagacgaggatgaagttagggatgcgggcgttgaggacgttggaaaatcatttttgctgtcagtcccagataacgatttgacttccgagggagaaaccaaaattgacagccacagggagaaagtaaagtggaagcgcaagtcagttgttacac

SEQ ID NO: 22336 - DNA, 272 bp, Glycine max
  Clone ID: 700952726H1
atgtgaactaaatttttaaccagcttctttggcaggcttgcatttacatcatacaacaaacgtaatcaattctattctgttacttttattctcttaaaacacacctttctttgaagctacttgatggagtttttctgttgaatttatagaacatactttgtgtcgaagctataaaacagcaggtttcacagttttacctaagatcatccaacagtcatcatggttaaacataacctccactaaaccatagggatattatagaatttctgcca

SEQ ID NO: 22337 - DNA, 273 bp, Glycine max
  Clone ID: 700952727H1
aattcactctctattttgttgttaatcgaatttctctctcctttctttctctcttctcttgacgttgaaaatattacgagagagaaacgcaaggagagagaggaaaaccaaaaaatggttgtttccaaggtggttgtttttcttggtctgattctcgccgcccttatgtcagtggcttgctcccaatccgctgctccggctcctgctcctgctcccacaagcgatggcacctcaattgaccaagctgtagcgtatgttctaatgttggttgcc

SEQ ID NO: 22338 - DNA, 271 bp, Glycine max
  Clone ID: 700952728H1
ctaatcaggaatggggacattgatgttgcatttggtaaattgcgtgaatggtatccacagattgttgaggacaatatatcagctacatgctttctgcttcattgtcaaaagtttatcgaattagttcgggttggagcacttgaagaggctgtcaaatatggaagaatagaattgtcaagtttttatgacttgcctgtctttaaggatttagttcaggactgtgttgctttgctggcatatgaacggcctctggaatcctccgtaggttatc

SEQ ID NO: 22339 - DNA, 271 bp, Glycine max
  Clone ID: 700952729H1
gagaaagggaagaggagagagagacgaagaagaagagtgtttctcacatcacatggcctccttgcccttggggcaccaccaccaccaccacaaaccggcggcggcggctatacatccgtcgcaaccgccgcagtctcagccgcaacccgaagttcctcgccggagctccgatgtggagaccgataaggatatgtcagctactgtcattgaggggaatgatgctgtcactggccacataatctccaccacaattggaggccaaaatggggaa

SEQ ID NO: 22340 - DNA, 270 bp, Glycine max
  Clone ID: 700952730H1
gggagaccaaatgctgattctgaaaatcctgtcttgaaagaagagcaagatgcccaagttggtaaggggtcacgaggtgatgttaccatattgcctactctagttgtcaataatagacagtatcgaggaaaattggagaaaggtgctgttatgaaagctatctgtgctggttttgaagaaactactgaaccagctgtttgtttgagcagtgatgtggagacaaatgagtgtttggagaataatggtggttgttggcaggataaagtagct

SEQ ID NO: 22341 - DNA, 270 bp, Glycine max
  Clone ID: 700952731H1
gcagcattgggagatagaaagagagagagaaagagagagagagaaagacccttacccttctctatcgctcgctttcctttgacgcttctgacccttgctttgtctgcgtcttccttctttctttctttctttctctgtgtgtcgtaatggctctcccagactcttcttcccgtcgcaactccctgatcccctccttcatctactcctcttcctccaaaacgctccctctccaccacatgctcaacaccgcctccgctgccgccgccgccg

SEQ ID NO: 22342 - DNA, 272 bp, Glycine max
  Clone ID: 700952732H1
acaatgttctgggctttggctttggtaagcctctgtggccagctaccttccaatgcccaagcacctgcaactgcgccggcaaactcaccacctacaaccccagctgcaacatcaccatcttccggcacgccactggcggtaacactaccaccaacagtggtggcatcccctcccaccacaagtacaccaccaactacatcccagccacctgcaattgtagctcccaaacccgcacctgtgacaccaccagctccaaaagttgcacctgcttc

SEQ ID NO: 22343 - DNA, 273 bp, Glycine max
  Clone ID: 700952733H1
ctggctcagaaggaacgctagctatatgcttaacacatgcaagtcgaacgttgttttcggggagctgggcagaaggaaaagaggctcctagcgtgaaggttgcttgtctcgcccaggaggtgggaacagttgaaaacaaagtggcgaacgggtgcgtaatgcgtgggaatctgccgaacagttcgggccaaatcctgaagaaagctaaaaagcgctgtttgatgagcctgcgtagtattaggtagttggtcaggtaaaggctgaccaagccaa

SEQ ID NO: 22344 - DNA, 272 bp, Glycine max
  Clone ID: 700952734H1
acgagatggagcaaataaagcacagaacagttgaagtgaatggcataaaaatgcatgttgcagagaaaggagagggtccagtggtgttgttcctccacggcttccctgagctctggtactcatggcgccatcagattctctctctcagctccctcggctaccgcgccgtcgctcccgatctccgtggctacggtgacaccgaagcaccaccttcaatcagcagctacaactgcttccacatagtgggtgatctcgttgcgcttattgactct

SEQ ID NO: 22345 - DNA, 279 bp, Glycine max
  Clone ID: 700952737H1
cgagtgaaggtgggaatccacgaccatgcagacaaaacgcacctacatgatccagatgggacgagaccaccatgccctcgaacgttcaccgaccacctcagctggttcgacgcctccctcaaatcagcgtccccctccgcggagattctctacacttacaaacacgtggcccatggcttctccgccagactcagtcccaaggacgtagacacacttgcaaaacaacccggcatcctctccgtcatccccgaactcaaatacaaactccacaccacaagg

SEQ ID NO: 22346 - DNA, 273 bp, Glycine max
  Clone ID: 700952738H1
tctctctctacaaaacttagctctgtttttaattattccttgcattctcttgtattaagatggaagcaactaccatcaccaatgggagccaaaacggttcgttttgcttgtccactactaagggaagtagtgatccgttaaactggggagcggcggcagatgcgatgaaggggagccacctggacgaggtgaagcgcatggtggccgagtaccgcaagccggtcgtccggctcggcggagagacgctcaccatcgctcaggtagccgccgtag

SEQ ID NO: 22347 - DNA, 279 bp, Glycine max
  Clone ID: 700952741H1
tccgagcaacacggatggtaagatgaacataaccgtgaatcctgattacgtggcacccaaggaactctacagaacagcgcgtaacatgggcacaaacgccactctgaacaaaatcagcaacctgacttgggagttcccggttgattctggcttcacttacgttctcaggctccacttttgcgagcttgaccccaatattaataaagatggtgacagggtgttcttcatttacatagcgagccagttggctgagaaccacgctgatgttatgcaatggag

SEQ ID NO: 22348 - DNA, 270 bp, Glycine max
  Clone ID: 700952743H1
ttggtttgtttggggtcctgtggctgcacatatccaaccttaacttcggccgtcgaatctttctggtcattggttgtgtttaattctttcaaaaattcaaacacaacccaaaatctcttgggaattgctagattcactgcttctcctagcagcagattttgggttcttctgacccaattattcattttccccaacttggtcttgttgaatttttattggggttgtaaattccttgttgttgagtttgaaagttatttcctttttcccctt

SEQ ID NO: 22349 - DNA, 271 bp, Glycine max
  Clone ID: 700952746H1
aaaggaccaaccatgtcgcctagtttcgtcttcgacccgcctagcgacgaagaaatcgaacactctgaacacgaagaagaagaagaatccgaagaagaaccagagtcaggatcaggaacaggatcagaatcagagtcagaaggagaaggagaagaagaagaagggcacgaagaagcgcgggttccgaagaagaagaagaagaaaacgcagtctccatgggactttgctaaatacacggaatcagtggcggaggaacacgctcgcaggagca

SEQ ID NO: 22350 - DNA, 270 bp, Glycine max
  Clone ID: 700952747H1
ctcaccgattgctagaatggaatttcgatgctcagtcatctcttttaccattctcttctctcttgctcttgcaggagagagccatgtccatgcatcgctacctgaggaagattattgggaagctgtttggccaaacactcccattcccactgcactgcgagagcttctaaagcctctccctgcacgtgttgaaatcgatgaactccctaagcaaattgatgatacacagtacccaaaaacattcttctataaagaagaccttcatccagg

SEQ ID NO: 22351 - DNA, 269 bp, Glycine max
  Clone ID: 700952749H1
cctctttctaaacaatagtatcttttcgcttcaaatttcatttagatccaaaatttctgaatcagtgaagaatcttagattctgtgggaaaagcttctcaatctttgacgaagataaacaacaatgtcttcacttgcggctgctagagcagacaacttttactatcccccagaatgggaaccgaatcagggttcgctgaacaagtttcatggtcaacatgccttgcgagagagggcgagaaaattagatcagggtatcctgattataag

SEQ ID NO: 22352 - DNA, 271 bp, Glycine max
  Clone ID: 700952750H1
gcccaaatcgcttatcgctcttcaacacccaaacgcttcttctttctcgccccatccccgtccatgcgattcaagaatgacattgcctgtaatgaagtttagtggtcaaatttcttatagcaggacttttgatgctgtagagaaagctgcaacaaagctcttacaaattctccaagaaaaaacgaccgacatgatgcaaactgcaattggatttgacattgagtggaaacccaccttcagaaaaggtgttcctcccggaaaggtagcagtg

SEQ ID NO: 22353 - DNA, 275 bp, Glycine max
  Clone ID: 700952719H1
gtggatggagagcacgtatcaagcccaatgttgtggttgccaaggatggctctggtcagttcaataccgttgctcaggctattgcttcataccctaagaataaccagggtaggtacattatctacgttaaggccggtgtctatgacgagtacatcaccgttcccaagactgcagtcaacattctcatgtacggtgatggccctgctaagaccatcatcaccggtcgcaagaactacgtcgaaggtgtcaagaccatgcaaactgccactttcgcc

SEQ ID NO: 22354 - DNA, 249 bp, Glycine max
  Clone ID: 700952678H1
caaaagtgactcagaaagtattctttgacgtcagtattggaaatccagttgggaagcttgtgggacgtattgtgattggactgtacggcgacgatgtcccccaaacggccgagaacttccgtgccctttgtactggagagaagggctttggctataagggctccaccttccatcgtgtcatcaaggatttcatgattcaaggaggagactttgacaaaggaaatggcactggaggcaaaagtatatatg

SEQ ID NO: 22355 - DNA, 252 bp, Glycine max
  Clone ID: 700952679H1
ccttcagaaagaaagaacttgctctgctctctctttgctttgctgcttctccctataatctctctgcaaacttgttcagcaagaaaccactttagaatcagcataaagttgggttatttcaagcttctgattccaggacgacaacaacaacaacaacaacaaaaagtggttccttttatttttcctcaataaaataccaaatatcttactgtatcaaatataatcacctcctgtgatttatacttttggttc

SEQ ID NO: 22356 - DNA, 248 bp, Glycine max
  Clone ID: 700952680H1
ctcggctcgctaaccccagctacttctccctcatccactcacaaaatgtgccaggccctctccgccccatcgcctccgtgtacggctcttctctccttccttttcttcctcctcacggtggtgggcccggtctcggtctcggcatggcggcgtggcccagaaaaacaatatgaacaccaccgattacgccttcggggactccaagaaatacgaggggtcctcggagttcgtgaagctgaggtaccaca

SEQ ID NO: 22357 - DNA, 258 bp, Glycine max
  Clone ID: 700952681H1
ctcgcactctcactttgggactcactgcttcgtgctattcttcttgttctttcccctcttatcggaaaactagctgcattgacgccgccggcttagattccgatggccgtgaattcaaaacccccgaggtcatgtggagggaacaggcgggtgaccctagcaagaagacccagtggtatcgcgacggcgtctcctactgggagggtgttaaggcaaatatggatggggtattgggagggtttgccaatgtgaacgagc

SEQ ID NO: 22358 - DNA, 271 bp, Glycine max
  Clone ID: 700952682H1
cgcataattagggcccatgctcggttcggtaacaaatgggtcagcatagcccgcctcctctcggtccgtaccgataacgtcatcaagaatcactggaagtcgctgtgataactactagtgtagttataatactctttctcgccgttaagaatttggaaatatcttcatttaccatggattggtgtcaaaatcaaaacggaagttttaaaagtacagatgcactatgtattgcggcagaagctgatgaggaggaacttgatttcacaaaggt

SEQ ID NO: 22359 - DNA, 215 bp, Glycine max
  Clone ID: 700952686H1
tggaggaattggaactgtgcctgtgggacgggttgagactggtgtcttgaagcctggaatggtggtgacttttgcaccaactggactgacaaccgaagttaagtctgtggaaatgcaccatgaagctctcacagaggctcttcccggtgataatgttggattcaatgttaagaatgttgctgttaaggatctcaagcgtggttatgttgcctcga

SEQ ID NO: 22360 - DNA, 240 bp, Glycine max
  Clone ID: 700952688H1
caaaagagcaaaatcttttttattgcatggtctccttcggtagcccgcattcgccctaagatgctatatgcaacatccaaggacaggttcagaagggagctgcagggcatccattatgagattcaggcaacagacccaaccgagatggatcttgaagtcctcagagagcgtgcaaactgagcacctacacaagagggttgtgtctaggtgatgtagttaagatatctgaagcctcaggga

SEQ ID NO: 22361 - DNA, 241 bp, Glycine max
  Clone ID: 700952690H1
agaaaatgaaagtccttgttttctttgttgctatagttctagcagcatggcattgccatggctcagaccatgaccatgaccatggccacacctaccaaattttccctctgagaatgaaaactggccatggtggccactacattccggagggatcatgccaaagttggaggcttggtgtggaatcacacaacgtcattgactggaacaccgttcctcaagattgcgagggatatattgggca

SEQ ID NO: 22362 - DNA, 246 bp, Glycine max
  Clone ID: 700952691H1
tacgttaccttacatatgccatttgtctctgatcttccaacaccttattcctcagagaagagacaaaatggatcaccatttcacttcagaaacctctctcattattcttctcctcatcacatccctctcgtcccttgccaccgccaccaacatcgatatcctccaccacggactcgaatccgacatcaacgaattctgcaggagaaccagcaaccccggcctctgagccgagaccatgccttccca

SEQ ID NO: 22363 - DNA, 239 bp, Glycine max
  Clone ID: 700952692H1
attttgaaggaaaactaagagaggcaaatgcattgtagtaacgagttggatatgcaagaaccgagcattgagacggataagcttagttacgaaatcttctccattctcgaaagcaagtttctcttcggctacgacgatccaaagctctggttccccaagcaaatacctcccaagccggaatctcagactccggcagctaccggcgccgttgactgcgtctccgcagtcaagaaccaacg

SEQ ID NO: 22364 - DNA, 243 bp, Glycine max
  Clone ID: 700952693H1
gtcgaaaagttcatctctccctctctctcacacatcccagccatgagcctcttcggtataggcagaaaccagagaacattccgcccgaaaaaaagtactccttctggaagtaagggagctcaacttagaaaacatattgatgccacgttgggtagtggaaatctgagggaagcagtaaagctacctcctggggaggatttaaatgagtggctagctgtcaacactgttgatttcttcaaccag

SEQ ID NO: 22365 - DNA, 248 bp, Glycine max
  Clone ID: 700952694H1
tcatcatcgaagcccgtcgcgagaagaagctgcttcgtcgcggttcccaaaatcgcgtttcccaagctccgtttcaaacccgtcgctatggctacgctcggcgctcgcatggtggccgccgcacccaccgtcactccgccggcctcgctcgacttcgaaacctccgttttcaagaaggagaagattaacctcgctggacacgacgagtacatcgtgaaaggagggagggatttgttccctctgttgca

SEQ ID NO: 22366 - DNA, 101 bp, Glycine max
  Clone ID: 700952695H1
gcatttgcaaatttttcttctacacgggatataaattccttgagccatggggaaaacggcactaagtagttaaatatacatggccatgccaattgcatatc

SEQ ID NO: 22367 - DNA, 245 bp, Glycine max
  Clone ID: 700952696H1
gtcaagctaccaaggatgctggagtcattgctggtcttaatgtgatgcgaattatcaatgagcctactgcagctgccattgcgtatggtcttgataagacggccacaagtgttggtgagaagaatgtgttgatttttgaccttggtggtgggacatttgatgtttctttactaaccattgaggagggtatcgttgaggtgaaagccacagctggtgacacccatcttggaggtgaggattttgat

SEQ ID NO: 22368 - DNA, 277 bp, Glycine max
  Clone ID: 700952701H1
ttctgaatgttgttggtaatgctgtgaagttctcaaaagagggttgcatttccatcactgctttcgttgcaaagcctgaatcctttagagatgctagaattcctgactttcttccagtgccaagtgataaccacttttatttgcgagtacaggtaaaagattcaggatcaggaattaatccacaagatatcccgaagttattcactaagtttgcacaaaaccaatcattaacaagaaatcctgctggaagtggacttggcctggcaatttgtaggag

SEQ ID NO: 22369 - DNA, 278 bp, Glycine max
  Clone ID: 700952703H1
ttttgataataggttggacagattaaagaaaaatacatataagagaaatgctacaacaactacaacagccttatctgtctaagtgaggtttgctatatggatcccatgatatatttgggcttgattaataaccaaattttcaaggatattattcaccatgagatccccttttacagtttcttccagtgtccttcgtggtttccctctatatcactttaaatgaggttaaaaatcattttatctactatccttaggggttctaatataaattagaattg

SEQ ID NO: 22370 - DNA, 278 bp, Glycine max
  Clone ID: 700952706H1
gccatggctgctctgcaatacttggaatcgctgcgcaacgcgatcctgagctctccgattggtacaattcgctggcggatctataccagaacaagctctggcaccagcttaccctcaagcttgagcagttcgtggctctcgccgtcttccaggccggtgatgcattaatacaattatatcacaatttcatcacagactttgagaccaaaatcaaccttctcaagcttgcgcatttcgctgttatagtttctcggcagtatgctgagaaagaagctgcg

SEQ ID NO: 22371 - DNA, 280 bp, Glycine max
  Clone ID: 700952708H1
tgggggttgttattattcttcataatggttgcaacagctgctacggcgtcgtttctccctgtgccttcgccggacgctggaaaagggaaacccaagggtggtggtggcggcggcgtttctgtgaacctcggaggactcaaagagaagcaaggtttgtgcggttgcttgcaggtcaaggcaaacgcacaagcccctccgaagaccatggagaaggttgagaatgatttgccatggttgccgtcgtcgtcgatttcgcacgccccgaggacttttataaatc

SEQ ID NO: 22372 - DNA, 275 bp, Glycine max
  Clone ID: 700952709H1
gtcagattgacactttcttaaactttcaagagcttgctttcgcgtttctctttctgtgtgttgacattcatctctcattcctttatctcttcctcgattttgtgttcaaggttagtgaaccttttctatttggaatcaaagtcttcaactttggctatttggagaccaaaagcaatgctgcctttgttcttctcagtggctttctctgctgttcctttgatcctctatattccaccactcagaagcttaaacctctttgtagagaccattgaaga

SEQ ID NO: 22373 - DNA, 275 bp, Glycine max
  Clone ID: 700952710H1
cattggtgggaatcggcatgaatggcgaggggagtgaagcaatgcaagtggagaaggagagcttggtgtacatgtggggttacctgcccggagctctgccgcagaggacgcctctgttgacgccgcttcttgttagggttccgccctctggttacttttggaaggatgtctgcggcggtggttgtggattcgccatggctatctctgagcctggaaagctcataacatggggttcaacagatgatttaggccaaagctatgttacatctggcaaa

SEQ ID NO: 22374 - DNA, 273 bp, Glycine max
  Clone ID: 700952711H1
cccaaaccctctcattctctctctcaccttcccagaaaaccctagaaattaattaaaaccatccaatcttcttttctccatttccccgattttgttttttcatttctatttcaatcgcaacctcctcctccttccaagtcaacgcggatttcagaattctcgatccatgtcgtccgagatcgaggttgtcgaggaggtgcagtcccgcgacgagcaatcgggggcggaggagagcctccgtaatgacgtgtacacggcggcggcttacgggga

SEQ ID NO: 22375 - DNA, 273 bp, Glycine max
  Clone ID: 700952712H1
cacaaactcagggtagggcagagagagagagagagagagagagagagagagagaatgggagggtgcgctatcgcggtgcatggtggcgctggtgtcgaccctaatctcccactcgagcgccaagaagaagcgaaacaacttctcacgcgctgtctcaatcttggaatctctgctctaaattctaatcttcccgacatagatgtcgtcgaacttgtggtgagggaattggaaacggatccgctgttcaattcgggccgtggatctgccctgaca

SEQ ID NO: 22376 - DNA, 272 bp, Glycine max
  Clone ID: 700952713H1
cgcagtgttagggtttctgtagcctccaaccagaaagagagggaaatggctcccaaacatcctagtacgggtttgtttgttggattgaacaagggtcacgttgtcaccaagaaggagttgcctccacgcccttcagatcgtaaggggaaaacaagcaagcgagtgcactttgtgaggaacctcattcgagaggttgccggctttgcaccttatgaaaagcgaataactgagttgctcaaggttggaaaagataagagggcactgaaagttgc

SEQ ID NO: 22377 - DNA, 275 bp, Glycine max
  Clone ID: 700952717H1
aagtgacaagaccattgacggaagaggagttgatgtctaccttgctggtggggctggtattaccatccagttcatcaagaatgtgatcatccatggagtcaagatttttgacattcaggttggtaatggtggacttattatagattctgagaaccactatggtttgaggactatgagtgatggagatggcatttccatctttggctctagcaatatttggattgaccatgtttccatgagaaaatgcaaagatggattgatagatgctattcagg

SEQ ID NO: 22378 - DNA, 248 bp, Glycine max
  Clone ID: 700952676H1
tgacttcaggtgtcattttttgcccgttggtatgcttagtaatgacaataggcaactcagctatcatacatggtctttggcccatacattgtatttggacatattactgtgtagtgagatctaaaaaattaggacctgcactgaagtttgttacatgcacatgtatactacccttggtgttgattttatggccagtggctggcattgttgggagtgttataggtggagctgcctatggattttttgca

SEQ ID NO: 22379 - DNA, 266 bp, Glycine max
  Clone ID: 700952634H1
caaggcagaaagcaagctcatcctagagttttaaaaatggcagcagcctcctccatggctctctcttccccatccttggctggcaaggccgtgaagctgggcccatcagcccccgaagtcgggagggtcagcatgaggaagaccgtcaccaagcaggcctcctccggaagcccatggtacggcccagaccgcgtcaagtacttgggcccattctctggcgagcccccgtcctacctcactggcgagttcccaggtgactacggctg

SEQ ID NO: 22380 - DNA, 250 bp, Glycine max
  Clone ID: 700952637H1
cttctctctcacgttttccgcttcagttttctcgggaaaatcatggtgaaaggtccaggcctctactctgacattggcaagcgagctcgcgatcttctgttcaaggattatcagaatgaccacaagttcaccatcaccacttgaactgccaccggagtggagatcacttcaactggactcaggcaaggtgagctatatttcggcgatgtcagcactaaggtgaagaacaataacatcgcgactgatgtca

SEQ ID NO: 22381 - DNA, 255 bp, Glycine max
  Clone ID: 700952641H1
gaagaattgatcaatgggcaagtctgtagttgagaagctactttggatggcaattgtgtgcttggtgctgggtgtaatttccattactcccaaggcccaagcagcagtgacatgcaaccaggtggtgagcaacctcaccccatgcatttcttatgtgctcaatggtggcaaaaccgtgcctggcccttgctgcaatgggatcaagaccctctttaacctcgctcactccacaccagaccgccaaaccgttggcaa

SEQ ID NO: 22382 - DNA, 194 bp, Glycine max
  Clone ID: 700952642H1
tagaggttgaagcagcggcttcttagtgagtgcttgtctgagattcaatggcgttcattggtgcagtcaaattcttgctgcagtacttagttctattatgcctcctcaactatctacctctttctcaaggtaagcagaactggaatgaagggtacccatttataaggagagcaagttcattgggttataatggg

SEQ ID NO: 22383 - DNA, 251 bp, Glycine max
  Clone ID: 700952645H1
atggctcgtcactccttgctcttagccctcctcctcttcgccgccgtggccaccgccgcgatggcgtggcgcgtccgacgccgacgacatcctgatccgtcaggtggtgccagatgttggcgaagcgaagaggaggacaacctgctgaacgccgagcaccacttcgcacgcttcaaggccaagttcgccaagacctacgccaccaaggaggagcacgatcatcgcttcggcgtcttcaagtccaacctccg

SEQ ID NO: 22384 - DNA, 251 bp, Glycine max
  Clone ID: 700952646H1
caagattgacaggcgatccggcaaagagcttgagaaggagcccaagtttttgaagaacggtgatgctggttttgttaagatgattccaaccaaacccatggttgttgaaactttctccgagtatcctccacttggtaggtttgctgttagggacatgcgtcaaactgttgctgtgggagtcatcaagaacgttgagaagaaggatcctaccggagccaaggtcaccaaggctgcccagaagaagaagtgaa

SEQ ID NO: 22385 - DNA, 253 bp, Glycine max
  Clone ID: 700952647H1
gaaaagcataacaagcagagcacattgtttagtgctagcatttccaggtcaaggccatatcaatcccatgcttcaattctccaagctattggagcgtcaaggggtgagaataacacttgttactactcgtttctattccaagaatttgcaaaacgtgcctccttccattgctcttgaaaccatttctgatgggtttgatgaagttgggccccaagaggctgggagccccaaggcctatatagatcgcttgtgc

SEQ ID NO: 22386 - DNA, 258 bp, Glycine max
  Clone ID: 700952648H1
gaagtgcaaaaacagtgtaacaaaaaggaaaagaaaaccaatatgaagttcactataatcacaatatttttctctttatttctacttgactttggttttgcacaacagggggatcttgacatatcaagatttgaggaaaaccaaatacaaaatataggccaggctttcttaagtgcctggactcaagcatgtgcatcaccaactgctgtcaaaattgtgattccagctggcacataccaaatgggtgcagttgatgtc

SEQ ID NO: 22387 - DNA, 256 bp, Glycine max
  Clone ID: 700952652H1
agcgatccagagcctgagcttatcccttaagagaaatcctctctcttatccatttcccatttggcttgctatgagtcatccatcccattcttctatgaccctatgaagtgtaaaatctttcatggctgtgagagacaactccctctgttggagcgtagcagtcaaaacccttggaatttacattcgaaaactgatcaagatgtgtaatatcaacaaatcaaccatgctccgccctgttagggttccgaaatggcag

SEQ ID NO: 22388 - DNA, 102 bp, Glycine max
  Clone ID: 700952656H1
caaaagagtaagatcgttctcagtacatggtctccttcggtagcccgcattcgccctaagatgctatatgcaacatccaaggacaagctcacaagggcgctg

SEQ ID NO: 22389 - DNA, 254 bp, Glycine max
  Clone ID: 700952657H1
caaggatacttgtcgtcgtttctcaaatccaaaacctcgcttgactcgattgggcgtgtgccttgtcgtcgtcgtcgtcatggcgacgctgctaagaaaactgtgcgaatcggcgacgatgaagcgatccggctctcactctcaccctcaccctctcccgtcctcggaacaagcacgcccatcctcccctcttggcgccttcgaccctctccctgccgacatcctcatgcaaatcgtccgcctcttaggcccca

SEQ ID NO: 22390 - DNA, 251 bp, Glycine max
  Clone ID: 700952659H1
caatggccaaagacctcgaaacggagattcaaagtgggttgcctcacaaggactaccacgccccaccccccgccccattctacgaccccgccgagctccgaaagtggtccttcttccgagccctcatcgccgagttcgtcgccaccctcctcttcctctacgtcaccatcctcaccgtcatcggctacaaccaccagacagccaccgccgccgagccctgcagcggcgtcggcgtcctcggcatcgcttgg

SEQ ID NO: 22391 - DNA, 251 bp, Glycine max
  Clone ID: 700952660H1
cagacttgggagtgaactgaaaaagcataaagtatggcttcgacggcagcgtaccttgctcggcgcgcggccagaaggagagggttcggatcctctaccgccgcgccctcaaagacactcgcaactgggccgtacatcgccacctcttctacgacgacgcttcaaacctccgcgaaaggttcgaggagaacagacacgtggaagaccctgataccattgacacgctcataacggatgctgaagcttcctac

SEQ ID NO: 22392 - DNA, 250 bp, Glycine max
  Clone ID: 700952661H1
ccttactgcttcctactgttctaaaagcaaaatcaatgacaccaacttctgctctccaatatctatgtaacttcctagaacgttcttttttgtaaaattaagtctttgcctatgttgatcttaatggagtgtgcgttagttttctcttctcctttaatatttgcctcgcttccatgttatataccttcaaattgagtgatggcaccaagagtttcgagtttagaagcagcccagaaagccataaactcaa

SEQ ID NO: 22393 - DNA, 253 bp, Glycine max
  Clone ID: 700952662H1
gagaagcattagcaaaagcaagaagaactagtctaagcagaaatggcctcttcagtgatggcatctgtggccctcaaacctgcccctttcactgttgagaagtcctcagttagaggccttccctccctctcaaggaactcctcttcattcagagttgtggccagtggtggcaagaagatcaagactgacaagccttatggaattaatggtggcatggctttgagggaaggagttgatgcatctggcaggaaag

SEQ ID NO: 22394 - DNA, 254 bp, Glycine max
  Clone ID: 700952663H1
ctccattcgaaaaccaaaacagaaaaatcatggcttcctcaatggctctgtcttcccctgtttcactctttcaactttgcatgcgtctgtttgcattctgcttgttcttctccttctccacttcctcctcggccaaactcaaccctaccaccgactcactctcactctctttccctctcacctcactccctctctccacagcaaaacctctaaatactaacccaaaactcagaaccctttcatcttcttcttca

SEQ ID NO: 22395 - DNA, 257 bp, Glycine max
  Clone ID: 700952664H1
gaagagaagaaaataaaagctaataccattcattccatttccttcattcattctctcaacaaacaaaactctctctctctctctcaatctccttctcttgcaagcaccctcccacacactgtccaacgctaaccgatcaaaaacccatctctgtctagctttatttgatccagagttggctcacattaacgtgaaaactttgcattcgcgtgagattttcctcgaccgatagcgagtgcatttcaggaatcctgggt

SEQ ID NO: 22396 - DNA, 260 bp, Glycine max
  Clone ID: 700952666H1
agtttgttgtgagctataagctagtttatcgtgaggagaatatgaagttgtttgttttctttgttgctgcagtagttttggtagcatggccatgccatggcgcaggctaccaaagggtccctctccgaatgaaaactggctatggtgagcgttcttcggaggtaaaatgcgcaagttttaggcttgctgtggaagcacacaacatccgagcctttaaaaccattcctgaagagtgcgttgaacccacataggactacatt

SEQ ID NO: 22397 - DNA, 253 bp, Glycine max
  Clone ID: 700952668H1
gagacatttagggctcgttataactcggtgaagggtgcaaaagttgtcattgataggctaactggccggaccaagggatatggctttgtaaggttttcagatgagagtgagcaagtgagggctatgactgagatgcaaggggttctttgctcaacaagacccatgaggattggacccgcctctaataaaacccccaccactcagtccaagcccaaagcttcatatcagaattctcaacctcaaggttcacaga

SEQ ID NO: 22398 - DNA, 253 bp, Glycine max
  Clone ID: 700952669H1
cacaaccaggtccctgaatgctttttagagagagaaagagtaataataataaagtggaagaaaaagaattaggagagtgaaacaagaagaagaagaagaagaagaagaagaagaagaattgagaagatggtgtttgaggaaactgagctgatgctgggactaggactatgtctccctggaaatggaaccacggcaacaactgaagctgctgctgcggaattaggagtgaggtagagacggttctctgagactg

SEQ ID NO: 22399 - DNA, 244 bp, Glycine max
  Clone ID: 700952671H1
cttcaatatttaccgccccgccggagaataagaagaaggatccgagtcacagtcactgctcatcgccatgtctcgggttgataacagaaattcctcagccaccaagcgtgctaggactgatggtagtcgtagggaagatgattggacatgccccagctgtggtaatgttaatttctctttcaggacaacttgtaacatgcgtaattgcactcaaccaaggccggctgatcatcattctaaatct

SEQ ID NO: 22400 - DNA, 252 bp, Glycine max
  Clone ID: 700952672H1
ttgatctctccctctctgttcttttctgtctgtctctttctctatctctctcttcggggagcgagatcaatcagctacagcttccccccacaaaaaccaaaaatcagataacccagataaaaacaactcccaaaaacaccaaaaaataattaacacaattacaaaaatatctagagttctgaataacaaaattccctctacgttagttgttttctttctctttcaactttttccttcccaccaaacacacac

SEQ ID NO: 22401 - DNA, 251 bp, Glycine max
  Clone ID: 700952673H1
gcgtgcttttgtgggggcaaatagtagatagtagatctgtcgcagagcaaagaatcgtcggcgacggcgaggctgcactataaccgcgattaactatgattatccttcgccggagcgtaaacaagatcccggcgaaatcgaagcgatttaaatgccgattggtgaagttcgaggagctgccggagtacttaaaggacagcgagttcatattggactattaccgctctgaatggcccgtgaaggaagccttg

SEQ ID NO: 22402 - DNA, 243 bp, Glycine max
  Clone ID: 700952674H1
caatagtcatggaaactagcaagttcagtttgctattcttttacgtaatttgtcttgctatattccctacccttaacgctaacataggtcacttcgatcatgtctggcataggcgattaaaagaagcaagagaagccgcaaaacaagcttacaagccgaaccccatgaaagttaccgctgagttcaatacacatgtcatcagggcaatgagaggctccaacaactcaagaaagggcttatcaa

SEQ ID NO: 22403 - DNA, 247 bp, Glycine max
  Clone ID: 700952675H1
aagaagagagagaaggtggatagggtgatacagattacagagtttgtgtatccatcttcgttcgtcgcttggcttgttcgccttcactctccgacattcacatcattcatcagagactggagcctgcgaagaaaagaataatttatggaggacggcgcaggaagaggtttggaatgccagaagactatggatgggaaggtgagtaacagtaatgggccagagaaggaaattccttcttgttgtctga

SEQ ID NO: 22404 - DNA, 263 bp, Glycine max
  Clone ID: 700952633H1
ttgactccagatcatgaactcaacaagaatccaaggatatcagacacaataccagatacggtaatcggactcactgggttttcaactactggatgcgatacggaagcagctcgatatattgatgagtgccaaccgtatcggcgaagtccgagtcgtcaatcgcaagtgactacgatcgtgacggctgtcgtctctacctcgacggtctctggactcacgaactctcccaggtcctgaaaatggatataggccctggcactaag

SEQ ID NO: 22405 - DNA, 251 bp, Glycine max
  Clone ID: 700952592H1
caagaaaataaagtttatcaataacaacatggacatgaagttgaatattccagcaattaatgttttattcttattgctagctatttctagtacaactcaatcggttgacattaatataaaaaaatttggcggaggtgcagatataacacaggctttgacaaaagcttgggaagaggcatgcgcagcaacaagtgcaagcaaaattgtgattcctggtgggtcatacaagatggcagcagttgatttaaaag

SEQ ID NO: 22406 - DNA, 228 bp, Glycine max
  Clone ID: 700952593H1
gaactttaaaggtgttgcaaattacaatcgttggagaatgctttggacctatggccattttacacggaagagcattgtacacgttgcttatgtatttatgtaattcttcgtatatagttggacttgcgagtgagacaaacctgtggaattgtatcaccggtgcttcgtcaaaatgcttgcgttcagctgctgctccagtaattgggttttctaaaaaaaaaaagaaaa

SEQ ID NO: 22407 - DNA, 232 bp, Glycine max
  Clone ID: 700952594H1
tctcaacatgcagagattgtcatcgtttgagtttaatgctggaagtgcttgatcaagaagcagcagctctatattcattcaaatcacaagctcagaggcttgaagcacttcatcaatttaaatcgggaaaggtttctatacttcttgcaactgatgttgccagccgtggtttggatattcgtacagttgaccttgttatcaattatgatgttccaaggtttccacgagttta

SEQ ID NO: 22408 - DNA, 252 bp, Glycine max
  Clone ID: 700952595H1
cgcaagaaaaagaaagaatcccaggcgaggagaaagatggaggggaaggagcaggatgtgtcgttgggagcgaacaagttccccgagagacagccgattgggacggcggcgcagagccaagacgacggcaaggactaccaggagccggcgcgggcgcggttggttgacccgacggagtttacgtcatggtcgttttacagagcagggctagcagagtttgtggccacttttctgtttctctacatcaccgtc

SEQ ID NO: 22409 - DNA, 257 bp, Glycine max
  Clone ID: 700952596H1
gcagctccctcctaaatgattactcccgctcggcgtgcatcgccgccgattgagctcaacaacaacaacaaaatacaccataagactcaccgtagcgcaccacagccaaacgcgatctcaacgatgaccagcttctgaaattccaacttcgcccttcatcttccgtatacttttttatttccggtgaggtgagttccatgcctaggtccaagagcagccgcagcggccagatcgagagtcaccggcagtgaaggtcg

SEQ ID NO: 22410 - DNA, 273 bp, Glycine max
  Clone ID: 700952601H1
cgctcttcttctcatcaagcacagagttacagactcaccgatcttccgattctctttcgtcttggtttatgagctcgaaggagagacccactcttggtggcacgcggattaagacccgcaaacgaaatattgctgcgccgctggaccctgcagcattctcggatgcagtggtccagatttatttggataatgctggtgatctggaacttattgctaagagtattgaatcttcagaccttaacttttcaagatacggtgacaccttttttgagg

SEQ ID NO: 22411 - DNA, 267 bp, Glycine max
  Clone ID: 700952602H1
cgagccgcaaagaccacaaaatcagaatctactggaacatttaccactacgccgttggatactccaccataatcatcagtatcatcaacgtctttaaacggtttgatgcattggagacttctgtacgggatcgctacaatgactggaagcatgcttacattggcatcattgcagctttgggtggcattgctgtgcttttcgaggcctacacatggattgttgtgttgaagaggaggaactcagagaacaagacagcacatggtgtca

SEQ ID NO: 22412 - DNA, 261 bp, Glycine max
  Clone ID: 700952609H1
ggaaaagcttctctattagctgcacttgacgacgatgttggcttgcatagggacatcttcatctctgcttccccaggaaatatgcacaatgcattggttggacaccggacatacttgaacttaaagactataaggccaaatatggcattgatgggtcagcttttcctgaataaaaccatagagtggtcagagtttcaggatgcagtggttgaaggtcaccaaaatagacaaggggaactaaggcagaggacgccaaaacaa

SEQ ID NO: 22413 - DNA, 256 bp, Glycine max
  Clone ID: 700952611H1
cttttagggtttcctttttgtttctcctttccagatctgcatcttccatttcttaggattaagcggtgagattcgtgaatctgagaaatgtcggattcttctcgggaggagaatgtttacatggcgaaattggcggagcaggccgagcgttacgaggagatggttgagttcatggagaaggtagcaaagactgtggaggttgaggagttgacggtggaggagagaaatcttctctctgtggcttacaagaacgtga

SEQ ID NO: 22414 - DNA, 243 bp, Glycine max
  Clone ID: 700952614H1
gatacattcaatctcaaaaattgttttaaaactggcaatggcagcccaagccatggctcaattccgtttctctcctctatcttctcattaccgttaccattaccagtacaattaccattccaccccttctttcccgtccccgcgacgtcacccccgcaaccaaaggctccacctttccttctccggcggagacagaggcggatgcggcggcggcggaggaagatgagattccgatgaggagga

SEQ ID NO: 22415 - DNA, 254 bp, Glycine max
  Clone ID: 700952615H1
cggatgcaggctgatgcaacattacctgctgctcagcgccgaaattacactaatgccttccatgcactctatcgaattactgctgatgaaggggttttggcgctttggaaaggtgctgggcctactgttgttagagccatggcattgaacatgggcatgcttgcatcttatgatcaaagtgttgagttcttcagggattctgttggtcttggtgaagctgctactgttctaggtgcaagttccgtttctggatt

SEQ ID NO: 22416 - DNA, 259 bp, Glycine max
  Clone ID: 700952616H1
ctttcttccatcttcttctcttttcacgtcattatcctaaacttgcagattttcacatcccaagcaacatgaaggggaggttcatgtttctgtcggtgctcctttgtgccacctttcatgtctccttctccattactgacggcttagtacaaacggcaacttcgagctgggtccgaagccctccgccctgaaaggaactgtggtgattggtggcagccactcgatcccagaatgggagatctctggcttcgtggagtac

SEQ ID NO: 22417 - DNA, 269 bp, Glycine max
  Clone ID: 700952617H1
cagaaaggagagagagaagctgcgcacctcttcatactagtgctgattgctgaaactgccatcgctcgccatttgcacaaagatcccaacaacacttgaaagttgaaacagaaaaacaccaatccctcatcgtactgttccgttatcaattctcgtgtttaaggacacaatttgcttgatacattttcaagttttcatctacatgttttgattttgaagaataaggagtatgcaattgactactacagatatggttttactataagtgg

SEQ ID NO: 22418 - DNA, 266 bp, Glycine max
  Clone ID: 700952618H1
atagtaaaaaaaggacattcattcatctatggctacccttattgctcccagcaagcactctccccaagaagatgctgaagctctcagaaaggcttttgaaggatggggaactgatgagaacactgtcatagtaattttgggtcatagaactgtgtatcagaggcagcaaatcagaagagtttatgaggaaatttaccaggaggatcttgtgaagcgcctagagtctgagatcaaaggagactttgagacagccgtgtaccgatgga

SEQ ID NO: 22419 - DNA, 265 bp, Glycine max
  Clone ID: 700952619H1
ctgcattggagctggctatgttggtggcccaaccatggctgtaattgccttgaagtgtcctgagatcgaggtggtcgtggtggacattgctgcaccgcgaatcaacgcgtggaacagcgaccacctcccgatatatgagcctggccttgatgatgtggtgaagcagtgcagggggaagaatctcttcttcagcactgatgtagagaagcatattgccgaggctgacattatctttgtctcggtgaacaccccaacgaagactcag

SEQ ID NO: 22420 - DNA, 242 bp, Glycine max
  Clone ID: 700952621H1
tgcatcatctatctatctatctccctttccttctctcccaaagctaaacactaaatcaaaaaccatcctttagctccatcgcttgtcgttgtccttatcccggctttcttgtcttcaatcgctttcaaagatcatttgaattgaagcaaaatggggagtcatatgagcaagaagatccctgagacttcttcgattggcctcagcaccgacttgcactaaaatactgagttgagttcctatga

SEQ ID NO: 22421 - DNA, 207 bp, Glycine max
  Clone ID: 700952624H1
aattcactctgtacaattcttcgttcgtgctctgcagttatatccttgttgcgcgtcaatggcggacgctgaaaccttcgcttgccaggctgagatcaaccagcttctaagtcgcatcatcaacacattctccagcgacaaggagcctgtcttgcgtgaactcatcagcaatgcttctgatgctttggataagattcgattcgagag

SEQ ID NO: 22422 - DNA, 257 bp, Glycine max
  Clone ID: 700952625H1
gccgcagcttgaaacagagcagaggaccttgaagagctatggctgtcggaaagaataagaggatttccaagggaaagaagggtggcaagaagaaagccgctgatccctttgccaagaaagactggtacgatatcaaggccccttccctcttccaggtcaagaatattggcaaaaccctcgtctctcgtacccagggaaccaagattgcatccgaaggactcaaacatcgggtttttgaggtctcattggctgatctc

SEQ ID NO: 22423 - DNA, 249 bp, Glycine max
  Clone ID: 700952626H1
gtgtctgtctctgtgtttgcggctgaggattccgaacgagcgaccttcttcgtttctcgcaaagtttaagtcatcatgggtaaggaaaagactcacatcaacattgtcgtcattggacatgtcgactctgggaagtcaactaccactggtcatgtgatctacaagcttggaggtattgacaagcgtgtgattgagaggttcgagaaggaggctgctgagatgaacaagaggtcattcaagtatgcctgg

SEQ ID NO: 22424 - DNA, 251 bp, Glycine max
  Clone ID: 700952627H1
taaatgattccttccttatatttgcatcacatggtttatgggaacacttgagtaaggctgacgcgggggatatggttcacagcagtccacgcgcgggtagtgccaagagacttgtcaaggctgccctacacgaagcagcaagaaagcgtgaaatgcgatattcagacctttacaagattgacaagaaggttcgtcgccattttcacgacgatataactgttattgttttattcttaaaccacgaccttata

SEQ ID NO: 22425 - DNA, 254 bp, Glycine max
  Clone ID: 700952629H1
gaagagaaagattatgggtatcgtggaagaggctcacaacgtgagaatagtagggaaggggaatgaaatcgtgattcttgctcatgggttcggcacggaccaatcggtgtggaagcaccttgtaccgcatctggtcgatgattaccaagtgatcttgtacgacaacatgggtgctggtaccacgaacccagactacttcgacttcgaacgttactacacgatcgatggttttgtctatgacctactcgccatct

SEQ ID NO: 22426 - DNA, 256 bp, Glycine max
  Clone ID: 700952630H1
ttttcttttcccctccctctggcaggaagggcagggaaaacggcaatttaagagagacccttttcctctttctctccacattccaagtttccaacctaacaagaccttgtccatctaaaatatgagttccaaagcgtggcttgcgttccttctcctggcactggccatggtcgctgaaacatatgccacaatagatgaatttgcaactacgttagaagaatttgaccctattatctctgatggtgatgctgatctc

SEQ ID NO: 22427 - DNA, 258 bp, Glycine max
  Clone ID: 700952631H1
gattcttcttcctcctctggcagcaggagtcaaagttgttgttgcgcgccatcgttccaacgaagaaagatgcttctatcttccgccgccatcgttgccggaaccttgtgcagcaattcagtcagcggagtcagtttggcagctgaattcgccgatatgccagcgcttagagggaaggattatggcaagacaaaaatgcgatacccagactacactgaaactgaatcaggactccaatataaggacttgcgacctggg

SEQ ID NO: 22428 - DNA, 165 bp, Glycine max
  Clone ID: 700952632H1
ggaggcttttattcttggatgaaacaaggtctccgtatcaaggaactcaaacctgagacagcactttccatcctcaatgaggaagctgaagcaattctggaggatgttagtccttctccttggcaacttttaggttatggtacagtacttattgcagggcggtag

SEQ ID NO: 22429 - DNA, 247 bp, Glycine max
  Clone ID: 700952591H1
atcgaagaaaagagaatgagtagacgctcgagcagaactgtctacgttgggaatctacctggtgatatccgtgaaagagaagttgaagatttgtttctgaagtatggacacataacacacattgacctaaaggttcccccaagaccacctggttatgcatttgtagagtttgaagatgctcaagatgctgaggatgcaattcgtggtcgtgatggctatgattttgatgggcacggttacgggtgga

SEQ ID NO: 22430 - DNA, 251 bp, Glycine max
  Clone ID: 700952545H1
ctcttattttggttgtgtgtgccgtggccatttcaattgaaagtaccatggaagccacttctacctcttcaagctgcagcaatggcttctttagtctccgatcaacaaatagtggcgaatccagggtccgtggttgcggaaaatctgatggtgtggccatgtggttcatcaatggtgtcacaaccgctttctttgcctccttggaacgttgctgcatccgaattgccaccgaagaagacgtcgaagatggc

SEQ ID NO: 22431 - DNA, 72 bp, Glycine max
  Clone ID: 700952547H1
cgaacatatttgatgcgagaaggaattgacgccacagagatggtgacagtatcagtgagctggattatgtcg

SEQ ID NO: 22432 - DNA, 256 bp, Glycine max
  Clone ID: 700952548H1
cgagataactagaaacagtgtgatgaaaatgaaggtccttgttttcttcgttgctacaattttggtagcatggcaatgccatgcggtacgatatgattccctctccgaatgaacactggctatggtgcccgtactccggaggtgaaatgcgcaagttggaggcttgctgtggaagcacacaacatctttggctttgagaccattcctgaagagtgcgttgaagcaacaaaggaatacatccatggcgaacaatata

SEQ ID NO: 22433 - DNA, 264 bp, Glycine max
  Clone ID: 700952549H1
aagtaatctataagtttctaaaatcattggaaaattatgggttaatagtgtgaagcattggatcccagagaaagatctccaaaatgcgcgaggcagcatatatggacttgatggattagtatcaggtagggtgacctcctgtgaagctccatcaaggatgcctcggtcacgctctgttcaaaattgagaggccatttgtgtgtgctgtcgatgattgtcaggcaagttacagaagaaaggaccacctgactcggcaccttctac

SEQ ID NO: 22434 - DNA, 251 bp, Glycine max
  Clone ID: 700952556H1
atagtttaaaaaaaaagaagaagaaaaagttaaaaaagttttcctcatgaattgttgcttctcatatagttttttcttttcccactttcaagttagaatacacagaattatgagctgtgaactcttattattcatttaatgttcatatgatcatctgggtctttcttgattatggagtctactaccttctgtcgataatgggaacgaatctcagcactcccaaaactgagaagtcttctgatgatggtgaa

SEQ ID NO: 22435 - DNA, 244 bp, Glycine max
  Clone ID: 700952557H1
ccaaaaggtactaatgccgtggagtcggcaaatcctggcaagttgaggttacttgacttgactgaaaatgatagagtgttcaatattggtaagtacagcaagaatgaaaataaatctgatgcccacagaatggtgaggactggtcttcaaaaagaaggatcaagagtgatttttggtgttcctaaacctgggaagaaaagaaaatttatggaagtaagcaagcattatgttgcatatgggacgc

SEQ ID NO: 22436 - DNA, 76 bp, Glycine max
  Clone ID: 700952558H1
ctcagaaactggatcccatagactggcttacgtatgagccatatctctgggagaatgagagacagtcttacctacg

SEQ ID NO: 22437 - DNA, 76 bp, Glycine max
  Clone ID: 700952559H1
ctcttcttcagtggtggaagctactagaacactagtttgttgcgcactgcgatgacgaagtggacggttgcttccg

SEQ ID NO: 22438 - DNA, 100 bp, Glycine max
  Clone ID: 700952560H1
gctcgcgagattcgcgctctcaggtcttccaatgtggtgcttcttcgtgggttgggagtgccttagttttctaagcctgcacagcctgatgcattgtaac

SEQ ID NO: 22439 - DNA, 252 bp, Glycine max
  Clone ID: 700952561H1
ttcacgcttcctctgtttgctcgcacacgtcgtttttgtctttttgttgcttcggagccaactcaacaacaacgccgtgcctaatccttaagaataacgaattacaacaaccaaccatgttgcattgtctcaacacttcctgttcggacatcacagtcttggaaagacaacgggaagcaaccatcaagtgccagaaccaccaaccagcctacttaacggactttaacgccgtcttcccttcttcttcttctt

SEQ ID NO: 22440 - DNA, 262 bp, Glycine max
  Clone ID: 700952565H1
tcaaaattcatgtctccctcttccctccacgcgctcctcatcattctcttcctaggttccgcacacgcgctcaaggtccccttccgagtcaacgatgttctccccgttctcccccacggaatctcctggccgctcctcaacaacctccacagcgccgtcgacttgctcccttccttcgtcgccgccgtccctcccgataacgattccgttcagtggagagccgcatgcttttacgataatcaagcctccctcgaattcaccg

SEQ ID NO: 22441 - DNA, 262 bp, Glycine max
  Clone ID: 700952566H1
ctctgctcgtgcctctagggttatcatatctccatttccatttcctctctctcagtttccaagaatcttaagctatgggaaagtcttacccaaccgtgagcgctgattaccagaaggccgttgagaaggcgaagaagaagctcagaggcttcatcgctgagaagagatgcgctcctctaatgctccgtttggcatggcactctgctggaacttacgacgtgagctcgaagaccggtggtcccttcggaaccataaagcaccc

SEQ ID NO: 22442 - DNA, 250 bp, Glycine max
  Clone ID: 700952572H1
ctcacactcactgcagatctcaatccatggctaccattgttagcatcaaggcccgccagatctttgacagtcgtggcaatccaaccgtcgaggtggatttgacatgctccgatggtacttttgctagagctgctgttccaagtggtgcatccactgggatttatgaggcccttgaattgagagatggaggatctgactaccttggaaagggtgtatcaaaggctgttgacaatgtgaacaccattattgc

SEQ ID NO: 22443 - DNA, 227 bp, Glycine max
  Clone ID: 700952573H1
aaatatatcatcaattataagcatgggtttgtggaacacaacgaatgcagtgtcttgccgctttcacaagtttggtgatgaccaaaagaatctggtcttccaaggtgatgccacgtcttcttccaggggcatagaactcacaaagttagacggtggaggaaaaccagtgggtggcagtgtggggagagtgttatactcttctccagtgcacctttgggaaagctcta

SEQ ID NO: 22444 - DNA, 252 bp, Glycine max
  Clone ID: 700952574H1
caaatgggtctgcacctgtgtatccggcagccgttacgcaacgaagtggtcggtgaaacttggtttgaagtagggcaatttaagacgtataccccaacagctgatgacattggacatgtccttaaattcgagtgtactgtagttgatgcagaggccagagagagaaatggaagaagcatcatgtgtatgcttagttgtcatactgatacttgctctaacattggcatggagggtgctgaactggttatggct

SEQ ID NO: 22445 - DNA, 240 bp, Glycine max
  Clone ID: 700952575H1
tgagagtggatgcagttggtaatgttgatgttaaggtcaatgttgttgcaagcgaaagtgaaacagaggcaattgaaaatttttcgtgcacctgtgaagtagttgatgtcaagtgtgataaccgtgcttctgaaggactaagcggtgacaaagagacagctggcaagtctcctgccattcgcatgtcgtcggactatgtaatagcaacagatagacccccaatcttgggggcttttgaaa

SEQ ID NO: 22446 - DNA, 251 bp, Glycine max
  Clone ID: 700952576H1
caaagatatcattgttttgtggaggaggaggattgaacatgtaccctggtgctgaagtttttccaatcatgaatcatcatcatcaaccatggtctatgactatgccacatcatcatcaccatcatcaggttcatgacccttttcttgtccctccccaaccttcaccctatgcaagcttgttcaacagaagaggtccttctcttcatcagtttgcatatgatcatcatggttcatcttctgaccatcttagg

SEQ ID NO: 22447 - DNA, 231 bp, Glycine max
  Clone ID: 700952577H1
ctctctctctccaatggccaaagacctcgaaacggagattcaaagtgggttgcctcacaaggactaccacgacccaccccccgccccattctacgaccccgccgagctccgaaagtggtccttcttccgagccctcatcgccgagttcgtcgccaccctcctcttcctctacgtcaccatcctcaccgtcatcggctacaaccaccagacagccaccgccgccgagccctg

SEQ ID NO: 22448 - DNA, 253 bp, Glycine max
  Clone ID: 700952578H1
aagggcatatcaaagagcaaactcgccgctgacttcaacttgaacttgtcgttcaaacgtggcaagctggcagccacaaaggccatagccaacactatcctccaccgctcccaaaacgacgacgccgtttacccgcgcgactacgagttcagctgcagcaacagccccgcgctcttccacgtcatcaagcgcagaccaataagcaccgtcaccaccaccaccgctgcaccaccaccaccaagttcccccacca

SEQ ID NO: 22449 - DNA, 261 bp, Glycine max
  Clone ID: 700952581H1
gagccattgaactttgactataatattcagagttcagattactcactctaatcttctaagttttcattttggggtttaagtttctgaaggaaaaaaaaatgataaagtttgttctatttttgttctgctttgcctctgcactgaccctttcagtatcggagtccaaatcagcttcagtgcaacctcatgctgctgaatctttctctgttggatatattcagatgaagactgcagcgaactgttcttacctggtagttatat

SEQ ID NO: 22450 - DNA, 257 bp, Glycine max
  Clone ID: 700952582H1
tgtggttgaaagttaagaagtagcaaagatgtttccattcgggcacaagggtcaaaagataaaggggactatggtggttatgcagaagaatgtgttggatatcaacagcatcaccagtgttgacgggatcgtcggcaccggcttagacttcttaggcagtgcactcgatacagttacttttttagcctcctccatctccatccaacttattagtgctaccaaggctgatggtgggacaggaaaagttggaaaggcta

SEQ ID NO: 22451 - DNA, 255 bp, Glycine max
  Clone ID: 700952583H1
cttcttcttcttttgtttctttttttttctgcgtaggcaaagcgagagagagaaaagcgtgaatcatgtcggacgaagagcatcacttcgattctcaggcggatgcgggagcgtccaagacgtatcctcagcaggctggtaccattcgcaagaatggctacatcgtcatcaaatccaggccttgcaaggttgtagaggtctctacgtcaaagacaggcaagcatggacatgcaaagtgtcactttgttgcaattg

SEQ ID NO: 22452 - DNA, 240 bp, Glycine max
  Clone ID: 700952584H1
atcaattcatcatactcactgtcccaaattcctcttaggtcccaacccagttactatgattccatctgataccgttaatttatgctcgattatttcgcagttatgtcagagttcgtggcccttgtctgttggaacaactctgtcagcttctgtgttgctcgtatctgatatcctttgtgatgcttaagtagcatggtgtctctatggtgatatctttgaatatagggtgttggttgtgac

SEQ ID NO: 22453 - DNA, 251 bp, Glycine max
  Clone ID: 700952585H1
ccgtaacggcgtccaaaggggaagcgccaagttcgatcgcccgctcaagccccgcccccgcccctcttccccctctccgggatccgcccttcgccgccccaacgccgccgccagaaacggcgacgccggtgagtcccctccaaaacctagacagacacaaatagagtgtgtagtgtgttttgtagagagagtgtaatgaagctctaactagtaagtatctacgattaggacgccataatgaagctcgctag

SEQ ID NO: 22454 - DNA, 76 bp, Glycine max
  Clone ID: 700952544H1
atttttgcttctttaatccctcgcctatatcttcagaaaattagatctgcttcagatctagggtttcccttttcca

SEQ ID NO: 22455 - DNA, 252 bp, Glycine max
  Clone ID: 700952586H1
gcactttggtaaggtgagagaataggaaaaagggaaatatggcatttgcaggaacaactcagaacgtgcaaccaaggtatatgatccctttgtgtgagctttaaatagaggggaagagcagaacaaatgaagaagagaggagataaggatcatataccttggttgcactttggtaaggtgagagaataggaaaaagggaaatatggcatttgcaggaacaactcagaagtgcatggcttgtgacataacagt

SEQ ID NO: 22456 - DNA, 232 bp, Glycine max
  Clone ID: 700952588H1
tggagctctcactctctccaacttcacatcgagttccttccacaattcccactttgaattccgctaaactatcatccactaaggccaccaagtcacaacaacctttgttcttaagattttccaaacacttcaactcaattgggttgcaccatcacagtcacagatgctgctcaaatgctgttcccgagagaccccagagacccagttccataagggcttgcactggagttgg

SEQ ID NO: 22457 - DNA, 249 bp, Glycine max
  Clone ID: 700952589H1
ccaacatattcttcagttagctcccccaacctatacacttcaccaccacaccacaaccctaccctctctctctgtcatggtcattggaggagccttccctcgtttcgacccaatcaccaaatgtagcacccaagaccgctccaaccagaccatcgcctcggacctcgatggcaccctccttgtctcccggagtgccttcccctactacttcctcgtcgccctcgaagccggcagcgtcttacgagccct

SEQ ID NO: 22458 - DNA, 250 bp, Glycine max
  Clone ID: 700952590H1
gaatcttctcagcatcaagctacaagtgtaccaataaaaattaagtccaatagtcttatttttgagccaccaaaggatagtctcacaattgcagagcagaatagggatgcaaatgttggtgcactttctacagcaaaggggaatggagcagctgttcaggtgcttaaaaagcctactggtgcttttggggcactcctggggagttctgcttcaaagaggaagcttggtcctggtaagggcaaggaagaga

SEQ ID NO: 22459 - DNA, 254 bp, Glycine max
  Clone ID: 700952514H1
gtccaggatcgtggtgtttttgactttctcggtaagaaaaaggatgaagaagacaagcctcatcctcaggaggaggtcatcgccaccgagtttcaaaaagtcactgtctcagaccaaggagagaacaagcacagcctcttagaaaagcttcaccgatctgacagcagctctagctcttcaagtgaggaggaaggagaagatggagagaaaaggaagaagaagaagaaggaaaagaaagggctgaaagagaagat

SEQ ID NO: 22460 - DNA, 242 bp, Glycine max
  Clone ID: 700952516H1
cgaaatctctggaacaattgatttcattttcggatactccaccaccttgatccaaaactcgaagatcttggtgaggaagcccagggcaaatcagcagaacagagtggtggcagatggcacagggcagaagaacatgcccacaggaatagtcctccataactgcgagatcatgccggaccctaccctcttggcagaccgcttgagcgtgaagacttacttggccaggccatggaaggcattct

SEQ ID NO: 22461 - DNA, 258 bp, Glycine max
  Clone ID: 700952517H1
gttcttgtgggttgttctgtccctttctttggtccttggagtggccaatagctttgattttcacgacaaggatttggagtccgaggaaagcctgtgggacttgtacgagagatggaggagtcaccacacggtttcgcgaagcttggtgacaagcacaagcggtttaacgtgttcaaagcgaatgtgatgcatgtccataacaccaacaaaatggataagccttacaagctgaaactaaacaagtttgctgacatgacc

SEQ ID NO: 22462 - DNA, 259 bp, Glycine max
  Clone ID: 700952518H1
atttggaacaaacaacaatagaggggttgtggtgctctgtgtgctgcaatttccttttgagcttgtgtttgattcatcaaatcatcaaagatgactgtaggggcaggaatatctgttgcagatgggaacttgatggtgttggggaacaaagtgctgagccatgtccatgacaaggttcttgttacccctgcatgtggtggtgctttgctcaatggggcattcattggggttcaatcccatcacaagggtagccgcacag

SEQ ID NO: 22463 - DNA, 258 bp, Glycine max
  Clone ID: 700952519H1
gtgggcacttatctgaattgagcggggaaatggaaaaagaggaggaggagcagcgcgagtggaggctatacgaaggctacaatgagctccacgcgctggcccaggacttgcacacgcccttcgacgcccccgccgtcttggtcgtcggccaccagaccgacggcaagagcgccctagtcgaggccctgatgggcttccagttcaaccacgtcggcggcggcaccaaaacccgccgccccatcaccctccacatgaaat

SEQ ID NO: 22464 - DNA, 255 bp, Glycine max
  Clone ID: 700952520H1
gcctctctctctatctttttcttttccttctcctagccctcttccctataggagaaggaataacaaaaacaaaaatacacaatggctttcactttcaccagaatcctaattctctttgtctccctctcctctctcaacctcgacacccacgcagcccgtgcgccccgcaccatccagacccgcctctacagcctctgcaagcccaccaccaacatggacctgtgctacaagaccatccttccggaggtggtgggc

SEQ ID NO: 22465 - DNA, 248 bp, Glycine max
  Clone ID: 700952521H1
aacacaacacaaagtgtcacaaacacacacagttccaaactcaaatctcgcctcaaacctctcttgttctcgtttccccactccctcattttccttcctctacccgcatttttctctaaccacccctcacacacttcacttatagagagagagaaagttcagtgcttttgtatagaatcaccaccccattaccctgcatacaccatttaatgcattgattccatctgggtcagtcacaataacagaag

SEQ ID NO: 22466 - DNA, 255 bp, Glycine max
  Clone ID: 700952522H1
attatttaaccttgcaagttccgaatcattcatcggcgtgaactacggacaagtcgctgacaacctgccgccgccgtcggcgacggcgaagctgctccagtcgacggccatcggaaaggtgcgtttgtacggaaccgacccggccataataaaagctctggcgaacacggggatcggaatcgtgatcggagcggcgaacggggacattccggggctagcctcggaccctaacttcgcgaaaacgtgggtgaacac

SEQ ID NO: 22467 - DNA, 254 bp, Glycine max
  Clone ID: 700952523H1
tagtaaatgacaccaaattccaggtcttagacatatgagtaaagactatgaagatatatagttataataatggggtccttgggtaattctttgtgactttaatgctattctttatgattatgaaaagaaaagtggatctaaaaatgtaactcatagggaaactcaagcttttcgtgggcagtaaaaataagtaacttgatcttgtacaaatcttcattgttttgagcttgataatgtcaggtaagtacgttatt

SEQ ID NO: 22468 - DNA, 255 bp, Glycine max
  Clone ID: 700952524H1
cacagaacaaaaacttggtcttcagggaagtaaactggagaaagtagaagttaatgtaggaccaacctctgggttccgcagcatgtctcctgatgagtcaaaggagataaagaatatatatattgactcttctggagggaagccagttactttacagagatcagggtctttaagttcaacaaaagtagatctcccagaggaattcaaggaaatttgcaacttaggaacaatgaagcagagtcctgcaacaggagc

SEQ ID NO: 22469 - DNA, 251 bp, Glycine max
  Clone ID: 700952527H1
ctcgagcgaattcggctcgaggtacccgtgagccatgcaccgacagttggattacatctcttagttttgtccgtggaaggagctttttccgcagcatttggcagggcgtgacgtgagggcgattttgctcacaccgatatctagagtggtccagctccaaacccgaacgaggctgcagtacgcaacaagaagaagcacagtcgtttagggagaaagagagaaaaaaaggctaaaggtacacctacatacac

SEQ ID NO: 22470 - DNA, 252 bp, Glycine max
  Clone ID: 700952528H1
ggcagtccgcgttccacgatttgctcggcgaaggcatcttcaactccgacggcgacacgtggctgttccaacgtaaaaccgccgcactggaattcaccacgcgcactctgcgccaagccatggcgcgttgggtgaaccgagccataaagcacaggttctgccccatcctagccacggctcagaaagaaaacaaatcagtggatcttcaagacctcttgcttcggctcacttttgacaacatatgcggcttgg

SEQ ID NO: 22471 - DNA, 254 bp, Glycine max
  Clone ID: 700952529H1
ctcccgggaaaaaaagtaggtaaaaaaatatgctaagtataaattgtctactgatgaaatacgaaagctgatgatattgaaaaaaaaagaattgtaaataaggttcaggttcgacttccatagagaatatagatgatattgtctataatgatagaaaaaaataaaaaactttcgaaagattttatccaattgaaattttaaaaatgactgggataaacttaagaattcaattattgaaattgaataagtaaaca

SEQ ID NO: 22472 - DNA, 77 bp, Glycine max
  Clone ID: 700952530H1
caaacccttggcggctgcgagacccgttgtgtgctctctactctctctttttgttcactagccctctcttcttcgcc

SEQ ID NO: 22473 - DNA, 256 bp, Glycine max
  Clone ID: 700952531H1
ctttttggaattttccagataccctcatttatggacataatcactgacctcgccatgttcattactccgctatggattgcggttatcgtcggcgtcgtcgtgggctgggcgtggaagcccaaatgggcctttcaccccaaagacgctcttctcaagtttcgctctcctcgccctcccaatccccaaaacgacaccgcttttacctactccgccaccagttcctccgcgcgtgagaaagacgcgagtgggagtcctg

SEQ ID NO: 22474 - DNA, 254 bp, Glycine max
  Clone ID: 700952532H1
ctcatttatagtttactattgaaagatgggtttgaaaatggcaatactgatcctaggcctgctggccatgttccttttggtctcctcagaggtggcatccacgaattcaaaagaggtgacaaatggagttgaagatgccaaatatcctggtggaggctatggtgggggttacccaggcaatggcggtggtggctatcctggccgtggtggtggctaccctggtcgtggtggtggctatccaggtcgcggtggtg

SEQ ID NO: 22475 - DNA, 84 bp, Glycine max
  Clone ID: 700952533H1
gttttgcagaagattccaatcggagctcagaaaagaaagagacctaatcgccgatcgcgtcgaaagttcgttgttgtgctgtga

SEQ ID NO: 22476 - DNA, 263 bp, Glycine max
  Clone ID: 700952534H1
tcgaactggtgcacaggcaccacgagcgcttctccggcggcggcggtgacgtggatcaggtcgaagcggtgaagggtttcgtaaacagggacggcctgcggcggcagaggatgaatcagaggtggggtgttagtaattacgacagaagaagaaaaggcttggaaacaacgacgacgacggaggtggaaatgccgatgcgcgcggggcgcacgatgccctcggcgagtacttcaccgaggtcaaggtcgggagccccgggcaac

SEQ ID NO: 22477 - DNA, 258 bp, Glycine max
  Clone ID: 700952535H1
ttcatctccctctttcttcttttcagctactttaggtctctctctctctctctctctattttctctctctctttcttcctttctttaatacttattaattcatcttttttatctttctttctttctttccccttttgtatttctgggttcgatattgttatcggttatttgtgcactgcttccgccggggctattcaggaatcatggctagggttttggctcagtctgttaatgtccctggtctagtggctgagcata

SEQ ID NO: 22478 - DNA, 253 bp, Glycine max
  Clone ID: 700952536H1
gggttttagcgcagttcttctagatttaaggaagatgggtaaggaaaaggttcacatcagtattgtggttattggccatgttgactctgggaagtccactaccactggccacctgatctacaagcttggaggcattgacaagcgtgttattgagagatttgagaaggaagctgctgagatgaacaagaggtctttcaagtatgcctgggtgcttgataagcttaaggctgagcgtgacagaggaatcacaatt

SEQ ID NO: 22479 - DNA, 254 bp, Glycine max
  Clone ID: 700952538H1
aggggagcttatgcagtaagtgtgaccactgaccactatgatctcttttgagtttatagatctattttgataaatgtcagtttccttctcaatgtaacaaactcaacacaaaaccagggattaggcttgcatgggaaactaagctgatttaatatggtatttgtgggggagcttgtgcagtaagtgtgaccactgaccattatgatctcttctgagttcataggtctattttgataaatgtgtcagtttccttc

SEQ ID NO: 22480 - DNA, 254 bp, Glycine max
  Clone ID: 700952539H1
cacaaggcagaaagcaagctcatcctagagttttaaaaatggcagcagcctcctccatggctctctcttccccatccttggctggcaaggccgtgaagctgggcccatcagcccccgaagtcgggagggtcagcatgaggaagaccgtcaccaagcaggcctcctccggaagcccatggtacggcccagaccgcgtcaagtacttgggcccattctctggcgagcccccgtcctacctcactggcgagttccca

SEQ ID NO: 22481 - DNA, 254 bp, Glycine max
  Clone ID: 700952540H1
ggcaaatgcgaacaaaggtaaggtgaaatgtgctgatagctccagtttgggctaaggctatggccaatattgcagcctttcttcaatcagtcattgcattgcatatatttgcaagtccaatgtatgagtatttggataccaaatatgggatcaaagggagtgccctggcttttaagaacttgtcatttcgagtcttggtaagaggtggctacctgactttgaacacatttgtatcagctctattgccctttctt

SEQ ID NO: 22482 - DNA, 78 bp, Glycine max
  Clone ID: 700952541H1
cccaccttcctctccttcttacgtactgcttaaggtctacacaagtactctgcttcttctcgccctattgagctttgg

SEQ ID NO: 22483 - DNA, 262 bp, Glycine max
  Clone ID: 700952542H1
gcgatattccgcgcgagcaaatgggtctgcagctgtgtatccggcagacggtacgcaacgaatgatggtgaaattggtttgaactagggcaatttaagacgtgtaccccaacagctgatgacattggacatgtccttaaattcgagtgtactgtagttgatgcagaggccacagagagaaatggaagaagcatgctgtgtatgcttagttgtcatactgatacttgctctaacattggcatggagcgtgctgaactggttat

SEQ ID NO: 22484 - DNA, 252 bp, Glycine max
  Clone ID: 700952543H1
aggaaattgctacctttgcttctggcaaagagatttccgagttggctaatcacgtgtcactctattcaggatgttcacaccatggacaccaaatattattggccaagagattgataaaagatggaactaatctttggaaggtgatgtctccaaacaatcaccacattccttgggagaatgcagtgtatgagattcaagagcaattcatgaagattgcttcttgttgttcaagatctctctcacctcaggacc

SEQ ID NO: 22485 - DNA, 255 bp, Glycine max
  Clone ID: 700952513H1
ggccttaggaaaagaggcacctgagtcaatgctggtcagagacacacacccctccccagcaaactctcacacactcacacacaaacgctggcgtttcgccaaatcccaaacgtttctcctttggacaccataaaaagcacagcctctccaaaccttcaccctctctctccctgcgctactgcgccatggaccagcgccatggaccccaacctctcccagagtcagacaccataggaaacgattctcacccaaaaa

SEQ ID NO: 22486 - DNA, 150 bp, Glycine max
  Clone ID: 700952468H1
ctagcagcagcaatttgtttcgtgagcacttgcagcttcggtttcttcactcttcttcgctagggtttttgaagttgacgatggcttcgcctcctcatttcgacgaagactttgattttggaggcggttttagcggaacgcattcagata

SEQ ID NO: 22487 - DNA, 256 bp, Glycine max
  Clone ID: 700952469H1
taattatcaaacctaaccagtaaaaatggtgaccgtggaggaaatccgcaacgctcagcgttcccatggacccgccaccatcttggccttcggcaccgccacgccgtccaactgcgtctcccaagccgattaccctgactactacttccgcattaccaacagcgaacacatgactgatctcaaagaaaagttcaagcgcatgtgtgaaaagtccatgataaagaagcgatacatgcacctgacggaggagtttctg

SEQ ID NO: 22488 - DNA, 253 bp, Glycine max
  Clone ID: 700952470H1
taacgatttctattgtgctgagtttgacggtgaatcagaggcaggcgtacgtatacgtgtagtagggtgattgagagatggacgctcccctgctgctggtgaacggcgacggggcggcgctggtggcggagaatggtgactacgtggcggtgaaggagctgaaggaggtgaagaaggtgttttggattgagaccaagagagtgtgggagattgcgatgcccatcgttttcaacatatggtgtcagttcggtgt

SEQ ID NO: 22489 - DNA, 247 bp, Glycine max
  Clone ID: 700952471H1
ctcttcctcaccgattgctagaatggaatttcgatgctcagtcatctcttttaccattctcttctctcttgctcttgcaggagagagccatgtccatgcatcgctacctgaggaagattattgggaagctgtttggccaaacactcccattcccactgcactgcgagagcttctaaagcctctccctgcaggtgttgaaatcgacgaactccctaagcaaattgatgatacacagtacccaaaaaca

SEQ ID NO: 22490 - DNA, 252 bp, Glycine max
  Clone ID: 700952472H1
tagggttctcctgaatccgcaatggccgtttcaaccactttctccggtgccaaattggaggctctattgctcaaatgttcttcctcctcttcctcaccaccgccttcaaggtcatcattcaccacttttcccggccaaaacagaagaaccctcattcagagaggggttattcgctgcgacgctcagccctctgatgcatcatctgttgctccaaataatgccaccgctctctccgctcttgagcagctcaag

SEQ ID NO: 22491 - DNA, 236 bp, Glycine max
  Clone ID: 700952473H1
ctcgtgaaaagggaccatggaggcaaattcaggtgccagcgaccgaatttcgagaatcgccggccacctccgcccccagagagaggatgatgtttgtttgaagcgtacgcttgccgtgcaaaaggtggggtctccggattcaaggtggccatattgggtgccgcagacgcatagggcaacctctggcgatgttgatgcagatgaatccactcgtatcacttctccacctctacgat

SEQ ID NO: 22492 - DNA, 244 bp, Glycine max
  Clone ID: 700952474H1
tctcgagccgattcggctcgaggcattttccaccactgatggattacctctggatgtctttactgttgagggatggcctaatcgaggaaactgaggagctgaaaggtgtgttggaaaaggaaattttcaaggttaaggagcaaaatttgtcaaatcagggttaaacattatgctaccaacgaacaataccaggcaaggatggaaccctcgcctcattgcattcaaataccatctgatggagctg

SEQ ID NO: 22493 - DNA, 70 bp, Glycine max
  Clone ID: 700952475H1
caattctgattgcaataacaaccgtaccacgccttccagccataggcggtattaggcttgagcgatatca

SEQ ID NO: 22494 - DNA, 247 bp, Glycine max
  Clone ID: 700952477H1
tgaagcttagacatgatattccacgacacgaagtcaaacaggtgatttgttcactttgtgggactgaacaagaggttcagcaaaactgtataaattgtggtgtttgtatgggaaaatacttctgtggaacatgcaagctttttgatgatgatatatctaagcagcagtaccattgctgtggctgtggaatttcagaactggaggaagcgaaaatttcttccattgccaacaagtgtggttgttgcta

SEQ ID NO: 22495 - DNA, 252 bp, Glycine max
  Clone ID: 700952478H1
caccaacacgtgtggaaaatggtactcctgggaagcaatacatgatcaaacatgatgccaatggaaatacacacgtttctgatctcacagtagtggatgttcagagtgtaaaagaggttgcatttcttttaaatcaagctgcaagtagcagatctgtgggaaaaactcagatgaatgaacaatcttctagaagtcattttgtattcactcttcgaatatatggtgtaaatgagggcattgcccaccaggtac

SEQ ID NO: 22496 - DNA, 254 bp, Glycine max
  Clone ID: 700952480H1
tgatgatggcctatgagttccatcaggacaaatccatggtggcatgctctttcaattctcaattgaaattcccccaaagccaccttcttttgattcaataaatcaacacccaattttcaaaattccaacttgtaatcaatttttctttccatttgacacaccataccaatcaaccaaccttgttgcttcttgtgatcactcctgaaccacactaatggatattgatgagtgggagtttctctctgatgatggct

SEQ ID NO: 22497 - DNA, 248 bp, Glycine max
  Clone ID: 700952482H1
caacagttctgtatcctacccttggagggaacatacatacttttagggcaataactccctgtgcaatctttgatgtgttgtctccaccttattcctcagaacatggaagacactgcacttacttccggaaatcgcagaggaaggatcttccaggtaatcttcagttgaatggagttacagtttctgatgtgacctggtgggaggatttccaacttcccgatgtttgtgtgatccgtagagggatttac

SEQ ID NO: 22498 - DNA, 143 bp, Glycine max
  Clone ID: 700952483H1
actaggtgaacaacatatactctgtgcttctcatgatgatagtgtagctgaagctgcttctgctgcagcattggtgatttggacacaaaaaaagtttcaggcttttcggtcctctgagcttctggtttgtcattttgaaggag

SEQ ID NO: 22499 - DNA, 199 bp, Glycine max
  Clone ID: 700952484H1
ctcgttgaaatgaaaatgggttcttctttgtggactttgtgtctaattttggcttcactagcctcttctgcattctgtgcctttccacggaggccagtggatgttccattcggcagaaactacgttcccacttgggcttttgatcacatcaaatacttcaatggaggttctgagattcaacttcatcttgacaagtaca

SEQ ID NO: 22500 - DNA, 254 bp, Glycine max
  Clone ID: 700952485H1
tttcaacaatgcactggcttacaaccctaagggtcacgatgtgtacaccgtggcagagctgcttctgacgaggtttgaggagctgtatcggccgttgcatgagaaattcgaaggtagcgtaggtcatgatcgcgaatctgaggaggaattgcaagccagttcgtggagccacgttgagccagagagggtgaagaaaaaggagaatccgataccacctcctcctcctcctccggagaaattgcaacaagagcctc

SEQ ID NO: 22501 - DNA, 254 bp, Glycine max
  Clone ID: 700952486H1
gagcgttatgggttgccatctcacacaccctctcctatatattgtagcattttcctggcatagtctctaagatcatccatccatctactcataagctttacttaattagcaaatccaaatatggcactttcttcttcatcatcttcaacatccatatttgctttagctttgttcactcttttgcttataggaagttcttcagctcaactctctgagaacttctatgatagtaaatgtcccaaggttttctatgc

SEQ ID NO: 22502 - DNA, 251 bp, Glycine max
  Clone ID: 700952487H1
gaaaacattcttgtggggtaggtactctttggaaatgtctgctgttatttacaaggattgggttttcaccgatcaagcattgcctaatgatcttgtcaagagaggagttgctgttaaggatccatctgctccccatggagttcgacttttgatcgaggactatccttatgcttctgatgggctagagatatgggatgctatcaagtcttgggtggaagaatatgtctcattctactacaagtcagatgagg

SEQ ID NO: 22503 - DNA, 233 bp, Glycine max
  Clone ID: 700952490H1
caacacccaagaattgtgctttagctataataaaaaaaattaagaatgatttaattataaattaagatgtgatctaaggggagataagaccatgtgaggggtcctctctgattttgctccaaaaccttccccttcttctgatttgtagagactaacccaagaaagaaccaaccaaaaacaagtgcttcttagagcttggaactctaggcataattgggattgatctaactata

SEQ ID NO: 22504 - DNA, 253 bp, Glycine max
  Clone ID: 700952491H1
gtggcaatcaattggaagcggtatcattcttgcacgtatccgctgcatatatggattgtggtcgactacaccactgtgtttgttttccgggtattgatgtttgttgataacgggctttctgcaggaatgggtttgtaaggcctcccatccatgttttaatataaatattttggttttcttcaatttacattggttgtatgcactaatttaattgaaattagagtatgatggataaggtttggtgtttcaccat

SEQ ID NO: 22505 - DNA, 251 bp, Glycine max
  Clone ID: 700952493H1
caagcttggttctagtagttttagtagctctcacagttcaaattttctacatttcacccatagatccagttttgctggatataaaacctgctccttcaaccaaagacaatcaattacagaatatcattaagcttggagaaggacttttgaaggaaccagaagatgttgttgtagataaagaagggactctctatacagctactcgagatggttggattaaaagattgcgcaggaataatggaaaatgggag

SEQ ID NO: 22506 - DNA, 218 bp, Glycine max
  Clone ID: 700952494H1
ctctctcaagtctcaaccatgtcttccggaaccctagaaaacgagcaacctcaagtggaagaagaacaagcccaagctgaagacaaccacaccaagcaagaagataattcggagatgaaagacgacgatgacagaggcgaagaggaaagggatcaggtagaacaagagaaggatgtggagaaagaggaggaaaaggaggaggaagaagaagaaaagga

SEQ ID NO: 22507 - DNA, 254 bp, Glycine max
  Clone ID: 700952495H1
tctcgagccgaatcggctcgagagtctccatacatcaacttgggaccttaaagagacggcaacgttgtgctgtccgccttgaccgagccagagcttcgtcttggccctcgattttgccctgtaaaactaatcccagtcacaacagaaataatcaatggcaccgaaacagaccaaggctgagaagaagatcgcttacgatgcgaagtgtgcgacctaatggaggagtacggccaaatcctcgttgtaaactccga

SEQ ID NO: 22508 - DNA, 269 bp, Glycine max
  Clone ID: 700952501H1
ctaattctcatttcttcatcgttcgattcttctcctcctaaagatgcagatcttcgtgaaaactttgaccggtaagaccatcacccttgaggtggagtcctccgacaccatcgataacgtgaaagctaagattcaagacaaggaagggatcccacctgaccagcagagacttatctttgcgggtaaacagcttgaggatggtcgaacccttgccgactacaactccaaaaggatcccactctccacctcgtgcttcgcctcaggggtgg

SEQ ID NO: 22509 - DNA, 244 bp, Glycine max
  Clone ID: 700952503H1
aaaagattttggagaagcaatttctcactcctgaaaatctcatcctcttcttctttacatttgttttggataaaacattttgctgatactgaattttattttctcttgttttcgtttcttttcgaccttgtttttttttctgcttcgttgttttcatggagaaagggataggagtagtaaaagaaagtgcattcggtttggttcttcgcctcgggactcgaatcttcgatgccgctcggttttg

SEQ ID NO: 22510 - DNA, 254 bp, Glycine max
  Clone ID: 700952509H1
aagagtttgatcctggctcagaaggaacgctagctatatgcttaacacatgcaagtcgaacgttgttttcggggagctgggcagaaggaaaagaggctcctagcgtgaaggttgcttgtctcgcccaggaggtgggaacagttgaaaacaaagtggcgaacgggtgcgtaatgcgtgggaatctgccgaacagttcgggccaaatcctgaagaaagctaaaaagcgctgtttgatgagcctgcgtagtattagg

SEQ ID NO: 22511 - DNA, 250 bp, Glycine max
  Clone ID: 700952510H1
cctcaatccacggaaatcgaataaagaaacccaaatccttcgctactaccgttatccaaaaccaaaatgcagagtcatttattcacagcatgatatcaatcgataacttcttcatttcacaaaattcagggtagcgttcacattttcccccttctttcttcccttcctcaacaacatactctctactcgcgcggtgccgttacgtgtctcatcgttttcggcgttagtttccttccttctcatgtaacag

SEQ ID NO: 22512 - DNA, 126 bp, Glycine max
  Clone ID: 700952467H1
atatagcccaagccctatacaaccaaaccctaacacacacccatttgattcagtttccatggctagcctcaaggttgcatttttggctgcagtgctctgcatggttgtggtgagtgaacccaggga

SEQ ID NO: 22513 - DNA, 253 bp, Glycine max
  Clone ID: 700952512H1
gcaaaactgtttattttgggcaagcttcagaggcatatgagttctttgcacaagctggctttccatgtcctgctttgaggaacccttctgatcacttcctcaggtgcatcaattctgactttgacaaagtcaaggccacccttaaagggtccatgaaactcaggtttgagggaagtgatgatcctttggacaggatcactacagcggaagctatcagaactcttattgacttctaccgcacttctcagcactc

SEQ ID NO: 22514 - DNA, 258 bp, Glycine max
  Clone ID: 700952435H1
acgctctctctctccttctcgctctttcagctttgacttttgttggaaactaaggcctaatcaaaatggtgaagttcacagctgaagagctacgtcgtattatggactataagcataatatccgtaatatgtctgtcattgctcatgttgatcacggaaaatcaaccctcactgattctcttgtggctgctgctggtattattgctcaagaagttgccggtgatgtccgtatgactgatacccgtgcagatgaagctg

SEQ ID NO: 22515 - DNA, 255 bp, Glycine max
  Clone ID: 700952436H1
acttgccacaccaccgccgccgcaggagacaacaacaacaacaacacgttccattctcgaggagagagtggttgggttcgatggagaaggagttggtggaattgtacgaagcggcgaagaaggcggcggatgctgccatctccggcgacggcaaacatgaggaaagccgatgcatcgatgcgctcgagcagctcaagaagtttcccgttaattagaagatcctcgtcaacacccaggtgggtaaacatcttaaag

SEQ ID NO: 22516 - DNA, 113 bp, Glycine max
  Clone ID: 700952437H1
ggcttcgaagttgccaccaggattcgaaagtttagaagtggaaaccggcctatgacagtcgccttcgactgcaactgcagacgaacatttgtgggacagatgcatgcaagttg

SEQ ID NO: 22517 - DNA, 257 bp, Glycine max
  Clone ID: 700952438H1
gtgtgagcattcacatttgacggaaacagggtagcgtgagagtcgagtcacctgccgaaatcctatagcaccattttgaccaaggcgatatagctaacagctattcgcccccccatactttctttaattttctccttctcccatggtgtaattgctccaactatggccgtggacctcatgacgaccggttacacccgaaacgacaacatcagtagtttcacaaccaaagccgaggaaaatgccgtccaagaagccgc

SEQ ID NO: 22518 - DNA, 258 bp, Glycine max
  Clone ID: 700952439H1
aaagagaatccgaggcgaagagaagagaaaaattaagatggaggggaaggagcaggatgtgtcgctgggagcgaacaagttcccggagagccagccgattgggacggcggcgcagagccaagacgacggcaaggactaccaggagccggcgccggcgccactggttgacccgacggagtttacgtcatggtccttttacagagcagggatagcagagtttgtggccacttttctgtttctatacatcactgtcttaac

SEQ ID NO: 22519 - DNA, 151 bp, Glycine max
  Clone ID: 700952440H1
ggagagagataaagagagaggtagagaaaagcgaagagtctctctcttcctatctctctctttcaatgtcagggcacaaatcttccacctctacttcttcttcttcttccttctaacctatatcagaaggaaacgcgaaaaaagaccaaaa

SEQ ID NO: 22520 - DNA, 258 bp, Glycine max
  Clone ID: 700952441H1
ccactccatggtcaaaaactgctgagaactttggcaactctactggtgaacaaggctaccctggaggaaaattctttgaccctttgggatttgctggagctatcaaggatggcgtttacattccggatgccgacaagctagagagactgaaattggctgagattaagcatgctaggattgctatgttggctatgctgattttctactttgaggctggccagggcaagacaccccttggtgctcttggcttgtaagcaa

SEQ ID NO: 22521 - DNA, 244 bp, Glycine max
  Clone ID: 700952442H1
ctgtaagggaggctaaaaatgaaacttcttacggcggtcgtggtggtggccgaggaggtggaagaggatttggacgcggccgtggtggcggcggtggctttggccgtgatttttccaatgatgataactcatcggcccctgctaaccaaggatcttttgaaggagattctgggaatccctcagaaagacgcggttatggtggaccccgtgggcctaccttggtgcggcaatggcgtggtctcgt

SEQ ID NO: 22522 - DNA, 245 bp, Glycine max
  Clone ID: 700952443H1
caccgattcacctatgaggtacgtggacattggaattcctgccaacaacaagggcaaacacagcattggttgtctcttctggctccttgcaaggatggtgttgcagatgaggggtaccattcgccctggcctcaaatgggatgtcatggttgatctgttcttctatagagaaccagaggaggctaaacaaacaagaggaggaggaagctccggcggttgattatgccatcacggatttcaatgca

SEQ ID NO: 22523 - DNA, 257 bp, Glycine max
  Clone ID: 700952444H1
gaatggtctatttttttattatggattctcaacaccatatcatctctcctttcgccggtacatcctctctgccgtgcgcctccggcagaggcgatttccgacggctgtgccgccacttttatttttcctccctccacaattttttttctacgatcccctatttctcctccttccttgacttgatttttcaattccaatcaaacaaacgcaattgccattgttcccaatgatctctcagaccatagtggctttggctc

SEQ ID NO: 22524 - DNA, 256 bp, Glycine max
  Clone ID: 700952445H1
ctgaaagtaacgatcctcatcagcggttttagaggggcgtggttcacaacgtatccacactgctgaggttttgaattttaaaactcagtgtcactttgtcgtccacgtggcagtcaccgacgcgcattcttcctttcccctttgtttctctcttactcctttgagtggccgtccaatttcctcagaaccttccccatgctctgctcggcccagaccggaaaatccggtctgaactggctcgaccgcctccggtcca

SEQ ID NO: 22525 - DNA, 148 bp, Glycine max
  Clone ID: 700952446H1
ggttcgtgcagatccccgtgggagtagcggggccattattgttggatggaaaagaattcaccgtgcccatggccaccactgaagggtgtctggttgcgagcaccaacagaggttgcaaagctatatacgtctccggtggggcctcctc

SEQ ID NO: 22526 - DNA, 214 bp, Glycine max
  Clone ID: 700952447H1
ttcaagttcaagttcaattcccacaccaaggaaactctctcatctctcaaacccaacaaaaaaaaaccattactttacttcactttacatgtcgaactccgacgccaccactaacggcgtcagtaacggcgccatcattgatgcgcagagacagcaggccttagccgttaagaagccgccgtctaaggaccgtcacagcaagtggacggccagg

SEQ ID NO: 22527 - DNA, 248 bp, Glycine max
  Clone ID: 700952449H1
ggttttgatttgcctggccaccaattgggggcggtagatcaaaatcaagttctttcatttttacacttttgagtttttccaacctgaaatctctctcttctggggttggatgctcgttccaaaacatccaatccagaaccacaataactttcaaaactttttcttcctgtgttgccttcaacgttagttctaattcatttacaacaccaagaatacatcatttgattgattcaaacattgtcctggag

SEQ ID NO: 22528 - DNA, 239 bp, Glycine max
  Clone ID: 700952452H1
cgcaacaaaaagaaagaatcccaggcgaggagaaagatggaggggaaggagcaggatgtgtcgttgggagcgaacaagttccccgagagacagccgattgggacggcggcgcagagccaagacgacggcaaggactaccaggagccggcgcccgcgcccgctggttgacccgacggagtttacgtcatggtcgttttacagagcagggatagcagagtttgtggcgactttccggttct

SEQ ID NO: 22529 - DNA, 253 bp, Glycine max
  Clone ID: 700952453H1
ctccttgtcagggaagatctgaagcagcgctagtagtcacgtcctgtaatggacgcatactcctccggcgaagaagtggttgttaaggttagacttattgtggtggtatatggggaaagtttctcgtgaaagggagttagtaaagttttgtactgttgtctgatgattagttaagtggctttttgcagacgagaaaaccatatacaatcactacgcaaagggaacggttgacagaagaggagcataataagtt

SEQ ID NO: 22530 - DNA, 257 bp, Glycine max
  Clone ID: 700952454H1
gtcatagaccacaaatctctccgctagtggatcgtgatgtggtgcagccatctttagatacatcaaatggtgtcttagatgattcagaagatgtaacagtcaccaaaagttgccttgttttgaatgtgcctgggtcatctaatgaacctgaacaaggtgagaaaacttgttcagccatggaaaacgctgagcatgttatagatatttccaactcggttgtgggaaattctctagactcaattacgaagtgtgatgat

SEQ ID NO: 22531 - DNA, 256 bp, Glycine max
  Clone ID: 700952455H1
gtggttatagttctcatatggacacttgttacgtctcctttgcttgtattgggagggattgctgggaagaatagcaaggctgaatttcaagctcctgttcggacaactaaatatccaagggagattccacctctgccttggtatcgtggaacaattcctcagatggcgatggcaggatttttggctatcagtgctatatacattgaactttactatatatttgccagtgtttgggagcacagaatttacaccatct

SEQ ID NO: 22532 - DNA, 257 bp, Glycine max
  Clone ID: 700952456H1
aacgtttcgaaattcatttttttttactagcatacttaaagagagagagagagagagagagagaggggagggttgcaaattccatgagagcagaagaggtgcctcttactcgtctcgtctttcaccgttacgagtgagttcgacccctcctcttgctcttccttctcttctcttctcttctcttctcatatcaaagcaataaccctagaacatggaagagagcttcgtttcccagtggagcgtcatcagatctctct

SEQ ID NO: 22533 - DNA, 254 bp, Glycine max
  Clone ID: 700952457H1
atcgctgtggttatcatcttcttcttcctctttcttagatctcttctttctctacgccgcacgccgaaaccatggccggaaaaggagagggtcctgctatcggaatcgatctcggaaccacctactcttgcgtcggtgtgtggcaacatgaccgcgttgaaatcatcgccaacgaccaagggaacagaaccacgccgtcttacgtcggattcactgacaccgagcgtctcatcggtgatgcggccaagaatcaa

SEQ ID NO: 22534 - DNA, 253 bp, Glycine max
  Clone ID: 700952458H1
gtaaacataggatccacgatcaactcgattttatacttttgtttctatttctctggaggcagctagctagggtcatactcatggggagcttgaaaggagacagtggacatgccaatggcgaaaatcttaccgaagctcttttgccaacacgagatgcacaacaacaacatcaaacagacgacgaggaacaaagatttggtgacaagctctggcttgaaacaagaagttatggctcaatgtgggggcctctata

SEQ ID NO: 22535 - DNA, 256 bp, Glycine max
  Clone ID: 700952460H1
atttactctctccactctctttgtgtctcccaaggtgctgtgttgtgttgcttggtgcaattaaagctttctactttctacctcaaatctctatagcctaatattctacccgctgaggtgagtcttatattttattttatctccaagggaacctgctagtagtctcatttccattgaatatgaattcctaccaatttttttcttatccttttctctgtggtttttccctatgaaaaaagtgattactaaactattc

SEQ ID NO: 22536 - DNA, 120 bp, Glycine max
  Clone ID: 700952461H1
caccattcaagctgatgaaaaaaaaaaaaagctgattacggaaaactctactaattctaataagtcaggttccacgacagattattacccctgaacgcagatatggtgcgcaagttgcaa

SEQ ID NO: 22537 - DNA, 255 bp, Glycine max
  Clone ID: 700952462H1
aaacagttctccaccgtgttgtttcaccagttatagcaccgtgaagttcatgagcatgaacatattggactgcacgcactataccagtgtgtttaacacggataatttgaagggtgttggccctttggactgggtttatgggatcaagctttctttcagtgtgcctgatactggatgtcaaagttgcaaagaatctggtgggacatgtggctttgatactgatacggaaggtttgctttgtctttgctcaagttc

SEQ ID NO: 22538 - DNA, 253 bp, Glycine max
  Clone ID: 700952463H1
atctaattggtatagaatagtgttttagaaagagtgtctagcattttgaataaatatgtgatccaagtccatgaataggccagattgttatggggtggttggattcagtgtggggaagaggacgaaagtttattaaaaggaaagacagtgatgctgccgatccaggtaaacccctggaggaccccagagctcctctctacaatgacatccgaacatcagaaggagccaagcgccaacagcaaagatattgtgg

SEQ ID NO: 22539 - DNA, 259 bp, Glycine max
  Clone ID: 700952465H1
ccgccgtgtctttattatggacaactgtgaggagttgattcctgagtatttgggctttgtcaagggtattgttgattctgaagatctcccactcaacatttcaagagaaatgttgcaacagaacaagatcttgaaggtcatccgtaagaacttggtcaagaagtgccttgagctcttctttgaaattgcagagaacaaggaggattacaacaagttctatgaggctttctctaagaacttaaagcttggtatccatgag

SEQ ID NO: 22540 - DNA, 258 bp, Glycine max
  Clone ID: 700952434H1
gaagaagagaacgattctgaacccatcactcgttcctccatcaaccccttcgacctcctcaacgacaacgattctgagcccgaagaccagggagatgagttgatgtccaccaatgaaaggttggcgagttatgatgatgaagaggagtcatcttcattgaaacctactgctgaggtttctacatcaaacccaaaatcgaagaagaagaaaaagaagaagaacaaggatagtgctgttgcgaataaaacgggagaagat

SEQ ID NO: 22541 - DNA, 268 bp, Glycine max
  Clone ID: 700952402H1
aaagaaaagatggaaaccatttccaaatttccctgttcacatcaacctgtaagatccattagtttccctcctagggtacaccccgtttctcaaagagttgaagcacttctaaaccacctaaaacctcatcattctcagcctatctcaatcactaactggtttagactctgacaattcagagcgacttagttgtgcttgctgagttgtacaactgcatggaagaacttttccattctccacaaaccaaacaaactcttctacgctacca

SEQ ID NO: 22542 - DNA, 265 bp, Glycine max
  Clone ID: 700952404H1
aaactttttgaaacatttcttctgaattttagttgtcaacaccacccatttttaaagctttgaagcatcatcatcgctgtgttctagttagcttccaataactaatggtacttttgacagagaaacttgcaaaacgttacttcaacttcaagctggagaatcgccaccatgccattacacatcctcaaccagaggagttatcatcttcacttcttgcgtttaaatcctatgtgtccaaattcatttgaccaattagcattggatt

SEQ ID NO: 22543 - DNA, 256 bp, Glycine max
  Clone ID: 700952405H1
gaccagaattttatgatccccgtgttaggttccgcgatattgtgttgttagggttttcaattcttatcaaaacctgcttgatcgaacagaaactatcaatgaagggggaagtgcagcttcagcctccagcggttatgcaaaaccctagtgattcggaccctttgctccataaccaggaggaggaggaggaggatgagtcaccgggaagctctggtgagatcaagaatgaggaagaagacgttgaggctggattact

SEQ ID NO: 22544 - DNA, 89 bp, Glycine max
  Clone ID: 700952407H1
caccaaggtgcaactttgctgttgtgctagggctcgccctcagtgagtgataattttatttacctttttggtcattccacacaacatac

SEQ ID NO: 22545 - DNA, 260 bp, Glycine max
  Clone ID: 700952409H1
ctatagtaaaaaaaggacattcattcatctatggctacccttattgctcccagcaaccactctccccaagaagatgctgaagctctcagaaaggcttttgaaggatggggaactgatgagaacactgtcatagtaattttgggtcatagaactgtgtatcagaggcagcaaatcagaagagtttatgaggaaatttaccaggaggatcttgtgaagcgcctagagtctgagatcaaaggagactttgagaaagccgtgta

SEQ ID NO: 22546 - DNA, 258 bp, Glycine max
  Clone ID: 700952410H1
tcacaaccagtgatggccgtacagctgtgtcctacaatgttgcccctgctggttggtcctttggccaaacctacactggtgctcaattccgctagagagggccttaataattgtccaacagttgaagttccaaatatttagatacactacatatagtatatgctataatttctcaatttaagtgttagtatatgactccaaaaaaaagactagtatactaaggtattaatatagtatgctactggtggaggagggggg

SEQ ID NO: 22547 - DNA, 229 bp, Glycine max
  Clone ID: 700952411H1
ccacattcaaatccaaatggccctttacattacactaataattggcctcctagtaaacaccctagtactctataaatagcatttgcatgcaccttagtcttcaccaaaatactcctcttggcatcttgtgttgtgtccctcttttaagctatttccttctcttaacacaattggttgtgccaattgccatagtcaccaaccaattaacaaaggtatatatatcatcata

SEQ ID NO: 22548 - DNA, 256 bp, Glycine max
  Clone ID: 700952412H1
ctttacttcattttaggaaatgggtcttaaacaactgcggtcaacccttgccaattttgaattctcgtgtaactgaaactgcttctgctgcggaagcttctttctttgggggccacaaggattctcgtgtaactaaactccaatgatgaacaaaactcttctcacttatttctacttgttcatctacattttgctttcttctggagtcattttgtacaacaaggttgtcactcctgttaaaatgacatttgaaatt

SEQ ID NO: 22549 - DNA, 258 bp, Glycine max
  Clone ID: 700952413H1
cccatccaatcctcacatgcatgctgtctctgccaaagtgccaagtcacataacatttccattgttaccattctttctttccatcacaaccacttatcaagcctctgatcctcactttctctcacacaaaaacacactcaccatgggatatcggaaaccaatggtaacccacttcctccgatgctggcccaaatccacaaaactcgaagaggagccttcttctagttatttgcggcttgctattactctcttccctgg

SEQ ID NO: 22550 - DNA, 255 bp, Glycine max
  Clone ID: 700952415H1
caaaggttgaagctattattggaaagaatgaagaggccattatgaattttgaaaaggcccgttcaattgatccatacatcataacatatatggatgagtatgcaatgcttctaaagctaaagtctgattatccaaagctgaacaagttagtgcatgatttattgaatattgatcctgcaaggcctgaggtttttatagctttgctgtttgtgggaaagggaagatgagaaaaaagcttacaatatgtgagcagag

SEQ ID NO: 22551 - DNA, 261 bp, Glycine max
  Clone ID: 700952416H1
aactaaacttcaattataattctcagacaccacttgctcatcattataccttcctgtctacgtgaaataataataatacattaaaccaaaccaatgtcggactggtactttttctacccttttcctttttctccctaaattcttttcaaaattttcttttgctttgcttgcccaaattcctcttgccagatcccaacttcacagcaaaccgtgaatctgatcaagacccaccttccaaaaatgcaacttgggaaatgggtt

SEQ ID NO: 22552 - DNA, 135 bp, Glycine max
  Clone ID: 700952417H1
attatttttctgtgtttccatttcaccactttctccctccgatttctccagaacagcaagggagaatcaattcctcatcgctgcaattcttctttcactctctagtttctcttctttctttcttccaacctcttc

SEQ ID NO: 22553 - DNA, 154 bp, Glycine max
  Clone ID: 700952418H1
gagaattttgacttcacgcctggaatgatctccatcaatcttgacctcatgagaggcggaaacttcaggtaccagaagactgctgcttatggacattttggaagagatgatccggatttcacatgggagacagtgaagatactcaagcctagtg

SEQ ID NO: 22554 - DNA, 243 bp, Glycine max
  Clone ID: 700952419H1
ggactacccagaaagggtgggggaacctccgtgtcagtattatttaaagaccggaacctgtaaatttggtgcatcttgtaaattccaccatccaaaaaatggaggtggatatttaagccaagctccactaaatatttatggatacccgttacggctgggtgaaaaagagtgctcctactatttgaaaacggggcagtgcaaatttggtatatcttgtaaattccatcatcctcaacctgctgg

SEQ ID NO: 22555 - DNA, 154 bp, Glycine max
  Clone ID: 700952420H1
caaagatatacacatatagggagaggctgaaggaggggcatcagatccctactttgtataaatggggttgtctttctaaacaaccccatcacatcattaagagggggggatcgatccttgatttgtgaatttgcttgcattagcaagatcatat

SEQ ID NO: 22556 - DNA, 259 bp, Glycine max
  Clone ID: 700952422H1
ctttcgttattctcttattcatccttctcttctgaataatccagatctctttctgcccttttctccgtcacgcttttcgtgaccggatctgtatggatttgatccagatctacacgccgatggtggttttggccgggtctttcatagatctggtgcgtagaggctcagatctacggtaccgaggtacaacagagaatcgatgacaagaacgcagatccgacggtagatccagccgattccgcttgttcgatcgctacag

SEQ ID NO: 22557 - DNA, 258 bp, Glycine max
  Clone ID: 700952423H1
gcccaatctgtgagtaatgggagtttgcctgtgatgtttggatattcacctgttcagcttcctatgttggagaaggacaactcatggggtttggtttctcgtcctcaacagttacacccttcctttgttggcagaggtccaactaactcagctgcactacaagtaatctcaaacaatatatccgaggccatgccttatgaaggaaggccgttagaacgaaccaaaggagacggtaaacagcgtgtcactgaagaaggc

SEQ ID NO: 22558 - DNA, 259 bp, Glycine max
  Clone ID: 700952424H1
cccaaaccatttccattcactaccacaccaaccgcttcttacctcaacccgatgtcttcattcgcacttcccacggaacacgcattccagcccacgccggcattctggcttccatgtcccctgtttttgacaactttatagatcgcccacgtaagcatcggagctccgagagaattatccaaatccacggcgtcccctgcgacgccgtcaccgccttcgtcggattcctctactcctccaggtgcacggaggaggagat

SEQ ID NO: 22559 - DNA, 258 bp, Glycine max
  Clone ID: 700952425H1
caaatatgatgatgacagtcacaaatatgacgatgaagatgaagttgatgaagagtatcgagaggatgagcatgatgaccttacttcctcctacaaatctgattctgataatgaaccagacttgtcagataatccttcttggttagagaaaatacagagaactgtgcggaatatttttcaggctgttaatttattccaggctccagtgaaccagtcagatgctgctcgtgttcgcaaggaatatgatgaatcaagtgc

SEQ ID NO: 22560 - DNA, 261 bp, Glycine max
  Clone ID: 700952426H1
gttgcagctctagctagggtttcgcaagtgcgatcgaagaagaacaacgacgatggcgatggctgcagctctgcgtcgcgaaggaaggcgtttgatccaaccaatcaacgccctccactcttctctcaaattcctccctcatctctcaagaccaagcccctcatggcgcgcgctccatttccactcaagttgtgaggaaccgaatgaagagtgtgaggaatatccagaagatcaccaaggccatgaagatggttgccgcgt

SEQ ID NO: 22561 - DNA, 260 bp, Glycine max
  Clone ID: 700952427H1
caaaagagacactaacaaaacaaaccccgtgaaagcaaagcaccccaccgcgctctttgcctaaccgactcactcccatggaatccgatctaaacgacgccgtttttcccgaagaagatctcgacgacgacgacgaaactccagaggatgaagaggaggaggaggacgacgacgtcttagatgacgatgaaaccgaaccccctccctccgtcatcgccgtcgcgccgcccgcttcccaaacgctcgacaccgcgttaatt

SEQ ID NO: 22562 - DNA, 257 bp, Glycine max
  Clone ID: 700952429H1
gaggaagtggtgtatgaaactgaaaagaattttgctgatgagaagcctgcaggcgaggaagatgcacctgaaggtgtgactttgtgacatttttgtctttaattactttgtattaagctccatgaataaccaatttcttctcctaacgtgtgaaaaaaacctgcctccaatatttataatttgtaaggttattagttgcttctattctaaccttttaccattttggtggcctaacaaacagaaatttaatttagtaa

SEQ ID NO: 22563 - DNA, 251 bp, Glycine max
  Clone ID: 700952430H1
tgcacgacacagacggcaactaacctgcacgcgccgtcgtcgtcgctatgacccaaccccaagatcccttctcttaccctcccattgacccagtcaacttcgatctcatcatcgtcggcaccgccctatcggaatccgtcatcgccgctgccgcctccgccgtcggcaaaaccatcctccacctcgaccccaactccttctacggaagcaatcggttctctctccctccagaacttcacttcctacctctt

SEQ ID NO: 22564 - DNA, 258 bp, Glycine max
  Clone ID: 700952431H1
caaagatttcatcatgtggaaattccaggctcaaaggaacctcaattatggaatgatgtctggaagttctttgagaaagcatctgttcttgaatttgatgatagtaaaatgcagaagacttatgagacaatttcattcaaggaagtccatgatgaaattgttgagctcaagggattgtgtgatctactcaaatctcctgtaatttttgctcacaatgacttgctttctagaaatataatgatgaattgtgaagaagaa

SEQ ID NO: 22565 - DNA, 264 bp, Glycine max
  Clone ID: 700952433H1
attcaaaagcagcacgttggttctcaccatctaagttttttcatggaactgattggattgaggttactggaattccttactttcctggcgtgccgaaacaccataggcacaaaaagacaatacttaattggcaataaaagtaatgagttgcgaaagcagccatattaattaattaaaaagtaatgattgtgcttctttattctttaattatttttatttcattacttaactttagagttagctacatttttttatctcaaggaa

SEQ ID NO: 22566 - DNA, 269 bp, Glycine max
  Clone ID: 700952401H1
atccttgcaacacacattgtcttgtcggcaaaatcttccaccaacaacacaattcctggcaggctcaaacattctttctcactctccttcccttcccaaaacctacagccactccttaaaccaaaacgcgttatcccaaaagcttttttttctgcccctcaaattcaaagccaccacaaaaccacgtgctctcagagcggttctctcgcagaacgctgtcaaaactcggtggaggacacaaagaacgctcattttcagcactgtttcac

SEQ ID NO: 22567 - DNA, 264 bp, Glycine max
  Clone ID: 700952360H1
gggtagtagaattgtagaagcttcacttcactctcatcaactcagagttgcatagaaatttgtctctatttttgttattttctctcttctttgtggacttttagcaactatattgtttccaatgtccaagatgttgggagtgtttgtgggacttttgttggtggggttggctgcctctgccaagtttgatgaactcttccagcccagttgggctatggaccatttcatccatgaaggagaactcctcaaactcaaacttgataa

SEQ ID NO: 22568 - DNA, 254 bp, Glycine max
  Clone ID: 700952361H1
attcaacttaagagatcaatatggccaccaccactacccagcctccctctaatatctgttttttccttctgttgttgcttctagcacactttcatttgggcataagccaacttgagctgaattactactctaaaagctgcccaaaagctgaagagatcatcaaggaacaagtcacacaactatataacaagcatggaaacactgccgtttcgtgggtcagaaatcccttcacgatgcgtgggttagtcatgcga

SEQ ID NO: 22569 - DNA, 271 bp, Glycine max
  Clone ID: 700952363H1
cactctcccacttcaaaattcatgtctccctcttccctccacgcgctcctcatcattctcttcctaggttccgcacacgcgctcaaggtccccttccgagtcaacgatgttctccccgttctcccccacggaatctcctggccgctcctcaacaacctccacagcgccgtcgacttgctcccttccttcgtcgccgccgtccctcccgataacgattccgttcagtggagagccgcatgcttttacgataatcaagcctccctcgaattca

SEQ ID NO: 22570 - DNA, 254 bp, Glycine max
  Clone ID: 700952365H1
ctcgggaaaatcacagcgacgctcaggaaaaactctaaactgtgaaaaaaccactgcgatcaatggcaacgatcaaggccgtgaaagctcgccagatcttcgacagccgtggaaatccaaccgtcgaagttgacgttattctcagcgatggaagcttccacagagccgccgtgcctagcggtgcttcaacaggtgtttatgaggctttggaattaagggatggaggctcagactacctcgggaaaggtgttctc

SEQ ID NO: 22571 - DNA, 271 bp, Glycine max
  Clone ID: 700952366H1
ctttctctacttctttccctttccccaacccctcatacgttactctttaaatacgcaccacatcttcacgtgcctctcggttcttcagtccaaacaatggccatggttgagctctggtggattacgtgctttctctaactactgttttccacacttaacgaaccacaacacagtgagaaagacataatggcggtggagtacacatgctgctcaacggccttcttcgttcacatactggtcatcgtgctgctcgtgcttttcgcgggcctca

SEQ ID NO: 22572 - DNA, 272 bp, Glycine max
  Clone ID: 700952368H1
ggcatacatgcagcgagatgctgcaattgcagaacgtaataatgcaatgttggaacgagataatgcaattgcaactcttcagtatcgtgaaacctccttaagtagtggcagtatgccatcatgccctccaggatgccaaatttcacgtggtgtcaagcatgtacatcatccccaacaacaggtgcaccatatacctaacatgggtgatgcctcttacaacacaagggaaatgcacacaacggaggtcctccctgcagcccccatcccttctg

SEQ ID NO: 22573 - DNA, 268 bp, Glycine max
  Clone ID: 700952369H1
cgtgtttgagagaaaggttgagctatagcctaaagggagagacacataaatagtttctactttctattcatagatagatggctggcccaattatgagacctcagattgtgctatttggctcctccataattcaaatgagcttcgacaatggtggttggggtgctattctagctaacttgtacgctaggaaggcggacatcatcttaagaggatactctggttggaattcaaggcgggctttggaggttttggatgaaattttccccaa

SEQ ID NO: 22574 - DNA, 270 bp, Glycine max
  Clone ID: 700952370H1
gcagaaagcaagctcatcctagagttttaaaaatggcagcagcctcctccatggctctctcttccccatccttggctggcaaggccgtgaagctgggcccatcagcccccgaagtcgggagggtcagcatgaggaagaccgtcaccaagcaggcctcctccggaagcccatggtacggcccagaccgcgtcaagtacttgggcccattctctggcgagcccccgtcctacctcactggcgagttcccaggtgactacggctgggacactg

SEQ ID NO: 22575 - DNA, 267 bp, Glycine max
  Clone ID: 700952374H1
aattagttcattctctttgcgcagttccctacctctcctttcaagatgcagatcttcgtcaagaccctcaccggaaagaccatcacccttgaggtggaaagctctgacaccatcgacaacgtcaaggccaagatccaggacaaggaaggaattcccccggatcagcaacgtctcatcttcgccggaaagcagctcgaggacggccgtaccctcgccgactacaacatccagaaggagtcaacccttcaccttgtccttcgtctccgt

SEQ ID NO: 22576 - DNA, 264 bp, Glycine max
  Clone ID: 700952375H1
agattttatccaattgaaattttaaaaatgactgggataaacttaagaattcaattattgaaattgaataagtaaacaatttaattggattggtcgaatggtatcaaaaaaatggagtactaactcccatttcttatttattattgaattaaccgatcaacttgctttgttatcgaacatttctttttgatttcaaaaattttccggaaaaaatttgaatctatttttatatgcgaatcaatcctactacttctggtcctgagg

SEQ ID NO: 22577 - DNA, 265 bp, Glycine max
  Clone ID: 700952376H1
tggtggttgcaatgatgcttatatttcttctaatttctacgcaaatggagagcgttgagcccgatgctgcagattgcttggatggttgcactactgcctgtgttcaaagcgactcgaggcttcaagcacggtgtgatcgcaagtgcagcattagatgcggtccagattccacaatcaaggaggacatgggttgagtatgtaaagtcacagcgcaagcaagcagtgtctgcttgaccaacaccgtgtcttttttagtccttgctta

SEQ ID NO: 22578 - DNA, 267 bp, Glycine max
  Clone ID: 700952377H1
attacatgcagtgtagccgaaggcaatgagttccaaagagagttgcagaagtgaacttcgcattgcgatccgccaactcagtgatcgatgtctctactctgcttctaaatgggctgcagaacagttggtgggtattgagcaagaccctgccaagttcactccctcgaacacgagatttcagcgtgggagttcgagcattcgcaggaagtacaagactcacgagatcacgggatacccaatcgcgggtgtttcgtatgttgccacgct

SEQ ID NO: 22579 - DNA, 266 bp, Glycine max
  Clone ID: 700952379H1
gctgcctgtcaaaactatgatttaccccgagccaggattcgaactacaccgcaggcaaggagacacccaaactgctcaaatgtacacagatgttggagtttattatgcaccaggtcctgttcttaggggtgaggtatttgatggggcagaagcagtgcgtaaaatggagaactggttgattgaaaatcatggttttcagccacagtatgctgtgtcagagctgtccgagaaaaacttctggaggatgtttgatgctggtttatatg

SEQ ID NO: 22580 - DNA, 272 bp, Glycine max
  Clone ID: 700952381H1
tggatcagtttttgtggaaggtgttgcctttgcttacaatccttgtttcctttggagtgttcttctacttgcaggattcttacacagcacagttatttcctctcataaagttaccgcgggataagtgcagccttcttccccatcgccacttctggatatccagcaaacgtattgtgaccccacaagggatcatttctggttcagtggagataaatgatgggacaatactatctgtcgttgagggacatgctattcaggggaagcctaagcaa

SEQ ID NO: 22581 - DNA, 270 bp, Glycine max
  Clone ID: 700952382H1
attttgttatctcttcttccacaaactttcggagttttctttcgttaattaataaaatctttgcttaattaatttgtccttcctggaggggcaattaattaattaatctctggtgagtatttataaatatggagagcctggaagaaagagtgtttatgttcatggatgaacaatattatttttccaattccaatgaatcagagctgcatatgcatcatcatccctctgtgtctgtggagaacatatcgtgggaaaacaacaccgacttcg

SEQ ID NO: 22582 - DNA, 217 bp, Glycine max
  Clone ID: 700952385H1
ggagggtatacctacgtgtgagcacaacacttggctccacatcagcgtgcttaccacgtggtgacatgagaaattctaggagttgtgtattgaagtgagcaagctgctgctggtgctggagtttagggatgagggtttattttattggcagggttacatgagtttgtgatgatgtgttattgtgtttctttaggtttgaataaatgatatttacttt

SEQ ID NO: 22583 - DNA, 262 bp, Glycine max
  Clone ID: 700952387H1
cttccaactcgccctcgactcacttccttgtccgattccgccaacgaggccagtgaatcagatctatctgcttcttcgtcatggccaccggacaactattctcccgcactacacaggctttgttttacaactataagcaacttcccatacagcggatgcttgattttgacttcctttgcggcagggaaacaccatcagttgctggaataattaaccctggttctgagggatttcaaaaacttttttttggtcacgaggaaat

SEQ ID NO: 22584 - DNA, 109 bp, Glycine max
  Clone ID: 700952388H1
cttctattagaagtttgtggccattttttttataagacaaatcacattttgaatcaacccgaacttttgatttgccatctatgatgtcggccaccgcaaccagcctagt

SEQ ID NO: 22585 - DNA, 268 bp, Glycine max
  Clone ID: 700952389H1
gcagcagggagctctgccgcctccaacaaaacagagttcagaacacaaaccctcgaaccgaacgtttttgagggttgatagagcacgatggttcagtacaattttaagaagattaccgtggtgccaaatgggaaggatgtggtcgacattatcctctctcgcacccagcgtcagacaccaaccgttgtgcacaaaggatatgcgatttcacggctgcgccaattctacatgcgcaaagtgaagtatactcagcagaattttcacgaca

SEQ ID NO: 22586 - DNA, 264 bp, Glycine max
  Clone ID: 700952390H1
atcatgttacccagcagtatcataaagccagaaaatgttggtttgtctctctcatatggcttgtcattaaatgccgtgatgttctgggctatatacatgagctgtttcattgaaaacaaaatggtatctgttgagaggatcaaacagttcacaaatattccatcggaagcttcatggaacattaaggatcgcctgcctcctgcaaattggcccggggaaggccatgttgatatcaaagacttgcaggtcagatatcgtccaaac

SEQ ID NO: 22587 - DNA, 264 bp, Glycine max
  Clone ID: 700952391H1
gaacactgcactgagtgctgctttgaatacacaatttctctttcaaattggtatcttcactgctgtgccaatgatcttgggcttcattcttgagcaaggtttcttgaaggccattgtcagttttgtcacaatgcaattccagctttgcactgtctttttcacattttccttgggtacaagaacacattattttggtcggacaattcttcatggtggtgcaaggtatcaagcaactggccgcgggtttgttgttcgccatatcaa

SEQ ID NO: 22588 - DNA, 267 bp, Glycine max
  Clone ID: 700952393H1
ctaattccgaccatggaagccacggcctccgcaatgagcttcgcccttccctcaacaaaagcccaagcccaagcccaactcctgacccggcccaccaatccattcaccattccctcccgcagcccagcccaccgccccccgccgcgcctccccaccatccgcgccgcaattccccgcacaaagaaagaggcaacggtggagactgtgcgggagcagctcgagaactgttacctcctcgccggcatcaactacaagggcttcacggtg

SEQ ID NO: 22589 - DNA, 265 bp, Glycine max
  Clone ID: 700952394H1
cttgttcttctttctctattgtctatagtcatctccattgttctcttcattacccacacacacaaaagaaacaacactccaagaggaccaccaggtcctccacctcttcctctcatcggcaaccttcaccaactccacaactcatccccacatctctgcctatggcaactcgccaaactccacggtcctctcatgtcgtttcgcctcggcgccgtgcaaaccgtcgtggtttcatcggccagaatcgccgaacaaatcttgaaaa

SEQ ID NO: 22590 - DNA, 213 bp, Glycine max
  Clone ID: 700952396H1
caccgaccaggttctgtcaattctatttcgcgaattgaccaacaaccaagagaaaatggttttcctcggcaacaacgagcagaacctggtggtggctgcgccgaggaagctatgcggttacatgccggaggcgaagaaagtggcgttgcagaagctcgaggacgtgctactggagccgccaagagcgtcttcagggaagtcacgaaagtactt

SEQ ID NO: 22591 - DNA, 265 bp, Glycine max
  Clone ID: 700952359H1
ttaaagcatcaaattttggtccaattgcaactgcttaaatatttttactatacaccatgtttgctttgggaggagtgtaacaagtacctgatgcgcatgtgtttagtaaaagaatataatagcattactactattatatttgttatgtgtctatttgatttcacatccattctattaagaaattaattttgagtttagaatgaaaaaaaaaaaaaaaactgcaaaaaaaaaaaaaaaaaaaaaaaaaaaaaaaggggggggcccc

SEQ ID NO: 22592 - DNA, 271 bp, Glycine max
  Clone ID: 700952328H1
tcacaaccttgaagattgaaaagaattctgaaaagaaatattaaactaagaggttccctttttgcagttagtggcactgcatgtgataaggaatcactcagtttaactttatatatgcatatcacccctcggtcatctatcatataccccttctccttccctccttataacatcactgatttctcagcacttgctaaatccctctccatcttttgcatgtcctagaacttttttccaaattcagaataacaatttggcatttcatcagtct

SEQ ID NO: 22593 - DNA, 269 bp, Glycine max
  Clone ID: 700952329H1
ctcctttaccttctcttcatgagcttcgaaatccctctcgctttcagagccgaaaacggggtcgttttcctcaccgacgcattgcccatgcccatgccactcatgctcgaagaatcacgcaacagtgtcaaaatcagagcacccacagggttaaagttggagaaagtttccaccttgaggttcaacgagagcttcacggagggttcggagctgcacaaggtggcgcggcaccgtgggttgccggggagaagctctggggggaagtggag

SEQ ID NO: 22594 - DNA, 269 bp, Glycine max
  Clone ID: 700952330H1
gaaaatgaaagtcattgttttcttcgttgctataataattttaggtgcagaatggcaatgcaatgggtcagagcatgagcatgagcatggccacagctaccaaattttccctttgcgaatgaaaaccggccccggtggccactacattccggaggtatcgtgcaaaagttggaggcttggtgtggaagcacacaacgtcattgactggagaaccattcctcaagattgcgagggatatataggaaactacatgcttggccaccaatata

SEQ ID NO: 22595 - DNA, 274 bp, Glycine max
  Clone ID: 700952332H1
gctatttccttacaaagaatggtgggtagtacctgccaaagttgccttcgatcaaactgcatggtctgcactttggaacagcatatattatactgttgttgcattactgcgtcttgatcctcctatgagtattttaaatgaattgaaggcaacgtttttccccatgttgacggccggatggaagctatggccatttgcccatctcattacttatggtgtgataccggttgaacaaagactcctctgggtggataccattgagcttatttgggtg

SEQ ID NO: 22596 - DNA, 271 bp, Glycine max
  Clone ID: 700952333H1
ctcgagccgaatcggctcgagcacctgtttcgtgcaaaaacaattactgttgtctctccacagtccctccctcacattctcactctagctttttagagagagagagagaagaagaagaagacatggagatcaagaagaggtttggggtgttgatgtgtgcagaggattcggagtacgtgaaaaaagtgtacggagggtattctggggttttcgtgaaaatgctggcggaggaacggaaacatgggacgtgtacaaggtggcgcgtggggag

SEQ ID NO: 22597 - DNA, 276 bp, Glycine max
  Clone ID: 700952334H1
ctttcttttctttgccaacactccttcgattaggggtttcgatcccaaattacaaattggtcgccatgaacgcaacctcatactctgctcttccttctacgttccgcagtctccatcatcggaatttctcagcgttttgttctgatatccaaaatcctggctatgttgattgccattcaaattgtaataagtctacatctcaagcgtctttgtttttgtgttccgactccaacagtagaagaaatggtgtttttggtagaccactttgtgtgaacc

SEQ ID NO: 22598 - DNA, 270 bp, Glycine max
  Clone ID: 700952336H1
agctgtgttgcgtgttgaagagggaagaagatgtcgggtatgggagacgggtacgtgggcaccgcccaagacgcggtgaggattcgacggttggagaagcagagagaagcggaggttcgcaaaatccaagagctcaaaaccaagtcgacctccgccaagggccaacccggtctcctccaattcggttccagcacttccgagattcttgagactgcctttaagaaggaaactgtgggtttggtcactagagagcagtatgtagaaaagagg

SEQ ID NO: 22599 - DNA, 267 bp, Glycine max
  Clone ID: 700952337H1
gaaagataaagcattccatagcctcccataaaaatgaagaatactatcttctctgctctctttctactttgtgccttcaccacctcatacctaccttcaaccaccgcggtggtcgataccgacggtgatattcttcagaatcctggcacatactttatcttgtccgtttttcgacccggcggcggagtagaattcgccgccactggaaacgaaacttgccctctcactgtcgtgcagactctcttcgggaggggctttccagcaata

SEQ ID NO: 22600 - DNA, 271 bp, Glycine max
  Clone ID: 700952339H1
gtcaagttgacttgtctaagatattgaaccgccaagcttatgataccgcacgtgccacacaattagaggcattgttagaagaaagtcgttctttgtctaccaaaaagcttcatgatagtgacgtgagaaccatatgcatttgtgagacacggatgattaattttgataagactcggatatggcttgaggagattctctgggagaagaaatatgatatggatgtataccgttgcaaaggagtgttaagtgttcaaaattctgatcaacttca

SEQ ID NO: 22601 - DNA, 272 bp, Glycine max
  Clone ID: 700952340H1
gtcaaaactttcatctttgtcatccacttaacccaggtgtaaaaatgtcagcagtgaacatgtccactatgagacttccaagagcttccttgtctggaacaacaccagctaggagatcatgtgctcttacaaagagtccatcatctttgaggtctgtgaagaatgtgtctaaagtgtttggatttgaatcatcttcctttagagtgtcagcaatggcggtatataaagtgaagctgattggaccggacggtgaagagaatgaatttgaagcc

SEQ ID NO: 22602 - DNA, 254 bp, Glycine max
  Clone ID: 700952341H1
gagggagtccactctctccaatcccgcaaaatcacccctcatcgacaatttcaaaggcctcggtgtcaatcattggttaggagatctatacgatcatcaaagtttggtgagtgctataaagcaggtcgatgtggtaattgctactgtaggtgacctgcagatatgctgatcaagataagatcatttctgcacttaaaggagcatggaatgttgacaagttctatccatctgagtttggtaatgatgtggtccgg

SEQ ID NO: 22603 - DNA, 269 bp, Glycine max
  Clone ID: 700952342H1
cgagctcgagaattttatgaggacaatgacaatggagcccacacttcccatgttgaaaagagttcctgatgtctgtcagaaaaatgagtgcccaagattgggagaatggattgcagaaaaaattaatgaattcaaatactaagtaatttcaacaagcagcgatgggagctgatatttgtttcatgactttcattataaaggccatacatcagatggcaaatatatgcaatggaatatgactatgatcaaggtcctgtctgtaatgatga

SEQ ID NO: 22604 - DNA, 267 bp, Glycine max
  Clone ID: 700952343H1
gtgctctgctcgtgcctctagggttatcatatctccatttccatttcctctctctcagtttccaagaatcttaagctatgggaaagtcttacccaaccgtgagcgctgattaccagaaggccgttgagaaggcgaagaagaagctcagaggcttcatcgctgagaagagatgcgctcctctaatgctccgtttggcatggcactctgctggaacttacgacgtgagctcgaagaccggtggtcccttcggaaccataaagcacccct

SEQ ID NO: 22605 - DNA, 266 bp, Glycine max
  Clone ID: 700952344H1
caagaagggaaaaaaatattcgaacttcaaagggaaatgattcagcttacaatgacgctctttaagtttgctttcattccaggttacaggtttctgccaacgcataccaacaggaggatgaaagcaattgacaaagaaatacgagaatcacttatggtaatcatcaaccgaagattaaaagcaatcaaagcaggggagcctactaacaatgacttgttaggcatactcttggaatcaaattacaaggaatctgaaaaaagtagtgg

SEQ ID NO: 22606 - DNA, 269 bp, Glycine max
  Clone ID: 700952345H1
ttctcaggtcccaaccgcatcaagcgtcgctgatccatcttcttctgtcgttgcatctcttgctgtccccgaaaggacgtaccttatccaaatctctacatatcatatcttccccaaaagctacgccctctctctctctgatctgattcaattgaatgggccttaaccttttcgttctccctccatggcaatggctaactctttctctgccgtgatcctccaccgctctcccatcaccgccctcgatcttctcctcatcttcctccata

SEQ ID NO: 22607 - DNA, 267 bp, Glycine max
  Clone ID: 700952346H1
aaagaatggctgccaacacattgatgagtactgctatctcagccttcccatctctcctttcttcctcaaaatccagatttgccaccgcagttcctctttctagctttggtgtcaccaatgcctcttcttctcgcttttctatgagtgctgactggatgccaggccagcctagacctccttaccttgatggttcagcacctggtgactttggattcgaccctcttcgtcttggtgaagtaccagagaatcttgagaggttcaaagagt

SEQ ID NO: 22608 - DNA, 267 bp, Glycine max
  Clone ID: 700952347H1
ctcgcttctggctcccgctgtgtgctctgcttcacactactgtatctcatccactccctatcgctgcaatttgggataccaaagatacccgtagatcatcagagaaaaattcaattgaagaagaggttgaaacttaaactgctgaaacgcaaagattttctagcaaaaaatggggaagaagagaaagcacagtgagacaactcatgatgaggcacagccccaaaaggaagatgtcgctccagggagaccagctaagacccttttggg

SEQ ID NO: 22609 - DNA, 271 bp, Glycine max
  Clone ID: 700952348H1
actttcagagagtgagctccagcaatcgcaatgggttggatcggcgagactgttgattccgtcaaatctcttcagatccgtcaggtcctcagccaggctgtgagcctaggcatgattgttacgtctgcactgacaatatggaccgcattggtgtgcgttactggcagtgaatctcccgttgttgttgtcctctctggaagcatgggacccggattcacgcggggagacatcttgttcttgcacatgagtgaagatcctattcgggcagggg

SEQ ID NO: 22610 - DNA, 251 bp, Glycine max
  Clone ID: 700952350H1
ctccctttcattttctctgcatctgtactctccaaaatgccgtccttagaggaggagctcttcccttcaaccccaggcaagttcaagatcgagcgggcccaccacatgaaccgccagctctaccgctgcttcgcctccaccagcaacatgttcctgtgggccctcctttttaatcgccctaacggttccaaatccaagcttccagggcttcgttgattccggaagcggtaacttttcggcctcctggggcg

SEQ ID NO: 22611 - DNA, 191 bp, Glycine max
  Clone ID: 700952354H1
gttccacaacattgatgagcagcagaatttttagccctggcctgatcatcagcaacaccagttttattgattaatgaaactggtgttgctgatgatcaggccagggccaaaaatcaataaaaaaaatctcaaaattgttgattttggacactataaaatgatttgaggttgaagaaaagttatgaaaagta

SEQ ID NO: 22612 - DNA, 269 bp, Glycine max
  Clone ID: 700952355H1
ggaaaagtatttatccaaacctataaatgagctggacctttctaactgcgaccagtgcactcctagttaccgcctcttaccgaaaaattacccaatacctgtagctagccagaaaacagaacttggtgccggagtgttgaatgatcactgggtgtctgtcacttcaggaagtgaggattattccttcaaacatatgcgcacaaatcagtatgaagagagcttgtttagatgtgaagatgacaggtttgaacttgacatgttgttagagt

SEQ ID NO: 22613 - DNA, 270 bp, Glycine max
  Clone ID: 700952356H1
gtggttactctaccaataggaacccctccacagcatcaacaaatggtgttggacacaggaagccaactctcatggattcagtgccacaacaaaacccctccaacggcgtcgtttgatccatcactctcttcatccttctatattcttccttgcacccaccctctctgcaaaccccgcgttcccgattttaccctcccgacaacctgcgaccagaaccgcctctgccactactcatacttctacgccgacggcacctacgccgagggcaac

SEQ ID NO: 22614 - DNA, 269 bp, Glycine max
  Clone ID: 700952357H1
ggcgcgtggcctttaattggtcacatccacctcttaggtggctcaaaaccaccccatgtcacgttgggccacatggcggacaaatatggtcccgtcttcaccttgcgtctgggtgctcaaaaaaccgtgggttgtgagcaattgggaaatgggccaacagtgctttaccggccaacgacaaagcgtttgctagccgtcctaaatcagtgtcctttgaattgttgggatacaactattccatgattgggttcatcccttacggttcttat

SEQ ID NO: 22615 - DNA, 270 bp, Glycine max
  Clone ID: 700952327H1
accccagctacttctccctcatccactcacaaaatgtgccaggccctctccgccccatcgcctccgtgtacggctcttctctccttccttttcttcctcctcacggtggtgggcccggtctcggtctcggcatggcggccgtggccccagaaaaacaatatgaacaccaccgattacgccttcggggactccaagaaatacgaggggtcctcggagttcgtgaagctgaggtaccacatgggaccggtcctcacgaccaacatcactgtt

SEQ ID NO: 22616 - DNA, 259 bp, Glycine max
  Clone ID: 700952296H1
ttctcttcttatttctatttctctctccccaaaagcttttgtttctctctgcttatggaaggcccttaaactttcgctctctctgcttcactttctcgcttttgcattttcttgtgaaaaaaaaaatcctcagaacaaaaataggtcttcttcttctctgatctaccaaagcttcaaattctccttagtttggtttgtctgtgagtttggagtgtaatgtcgccgccgacgctggtaacggaggaggaggggcggacac

SEQ ID NO: 22617 - DNA, 278 bp, Glycine max
  Clone ID: 700952302H1
gtaaattatgtggccgacaagctatgcttgatatgcttaagaaggctgagagagaaaaactcagtcagttacaatgaaaatgctttccttgtcacaaccaaatccatgatgtatctattaagaaagccaccaaagcattttgaagcactggtggaagagcactttagaaaatgctcccaacatatacttcttgcttgcaaggcttatcttgaaggagcttctattggatgtgcttttggtagtggaaaaactggacatgaaaaccagaaggggacttc

SEQ ID NO: 22618 - DNA, 269 bp, Glycine max
  Clone ID: 700952304H1
caggtgtcttcttatcttcctaatcatctgtcgcaggctaggagggtccctcctttcatatttgatggggctctctgtcccgctaaggaattgtcaagttgtatgagagatgtgtcattgcatgtgccaattatcctgagtattggatacgctatgttttgtgtatggaagccagtggaagcatggatcttgcaaataatgttcttgctcgggcaaccccagtctttgttaagagacaaccagagatacatattttttgtgctcggttc

SEQ ID NO: 22619 - DNA, 265 bp, Glycine max
  Clone ID: 700952305H1
gttagaagaagaatgatgatgacctctggtgaagctgtcaagtacaagagctccttggatgcattcacacagatcctcaagaatgagggtgccaagtccttgttcaagggtgccggtgccaacatcctccgtgccgttgccggtgctggtgtgcttgctggttatgacaagttgcaggttcttgtgttcggcaagaagtacggctctggtggggcttaagttctaatgctgagtcagtactattatttgtttttagatggcgatg

SEQ ID NO: 22620 - DNA, 275 bp, Glycine max
  Clone ID: 700952306H1
atacttagaaacagcaactatgtctctcatgcagcttactagctcccctgttggctcactggtccgtttcattgtaatatttgctttatggtacagaaccatggctttggccaagttgccaccaaacgcttcatcagttccagcagttttagcgtttggagattccatcgtggacccaggcaacaacaacaacataaaaacattgatcaagtgcaacttcccaccttatggaaaggattttcagggaggaaacccaacgggtcgattttgcaatg

SEQ ID NO: 22621 - DNA, 208 bp, Glycine max
  Clone ID: 700952307H1
tttttatctctatctttcttcacatcttaaccttgttcttaccagatggctgcctcagttaaactcttatttttgtcctttctctcgttgttcatctctttctccatagctcaaacctctttcagaccaaaggcacttgttcttcctgtaaccaaagatgtttctgcctcagttcctcagtatgtcccacaaatcacacaaagaaccc

SEQ ID NO: 22622 - DNA, 272 bp, Glycine max
  Clone ID: 700952308H1
acgaagtgacccaatttggtttcagtttctcgaattctgggaacgtgtctccgccctctggtctcttccccttctccgcaagcaaaaccccaatttcttcttcacgaaccctaattcactcttcccattccaaatctcaatcacctttctgattcaatctttctctcctcgccaatctcttcgttcacctcgcaaatcaaggtgagggattcgaattgaaacctcaagatgccagccacagcaggaagggttcgtatgcctgcgaaaaatag

SEQ ID NO: 22623 - DNA, 272 bp, Glycine max
  Clone ID: 700952309H1
gtatagtagcagtagcagcagcagcagcttgtcgcgtgcgtgcctctccggcgaggccgtaacaatccacaaacaacaagcttttaaatttctccttcgtttcgcttccaatggcatcaaatagccattcaccatctctcgagatattagttcgaggaccagaggatttctcgctctggaccggaccccccttcgcgaacgatcaaccaagcgtcaagctcgagaaagtgaactgcatcaatgcgaagttcagcgtagacggatccaatctc

SEQ ID NO: 22624 - DNA, 272 bp, Glycine max
  Clone ID: 700952310H1
attcattcaccaccctatccaacatggctgaggagactccaaaccagacaaccacaccaccccctcctcaagagtcagtggtgcaagtggaggaagtggtggtaaccgatgttccacagcccgacaaaacaacaactacagttccagttgaaagagattcgcaacctcaaccttatgagccagagaagaagaagcccgttgaggaaaccgtcactctcgagactcacctctccaaacccaacaatgctgaccacaccaacaacatccctgaa

SEQ ID NO: 22625 - DNA, 270 bp, Glycine max
  Clone ID: 700952311H1
atttcaaaggacattcggctcagagcttcagctggaaattgatcatgaggtaatagcatacatactcgcagctgcttggttatcagacaagaaaaatgcagtggaggattggattgaacatgttcttggcaaaggcttcgttgaagctcagcagaagtaccatcctgcagctcaatatgtagtgaaactggttaattgtgaatccatttttgtggaagagcaagcccctgatgtatgccttccagctagaattaacatggactaaatttt

SEQ ID NO: 22626 - DNA, 269 bp, Glycine max
  Clone ID: 700952312H1
cacaattactggtacaacaacttccagttccatccatctgtcgtttctcgatctccacagttctccactgttccaactccaaccaaaccagcttctgactaatttccctctctccgcgtttacgacaccgcgtttcgtcagatctgaaattgcaatggtcgcatgagcgggaccggcgtcgtttcgatggatcacgtgcttgtggcgctgggggagacgaaggaggagagggaggttcgtattcggagcctgttcaacttcttcgacgc

SEQ ID NO: 22627 - DNA, 270 bp, Glycine max
  Clone ID: 700952313H1
tttatagttacacacaaaagcttagccctaagctagcattttcccagcaccaatttatttgcttggatcggaactagggttttgaaattgatgggtacagagagaaagaggaaggtgagcttgtttgatgtggtagacgattctgcggcgaagatggcgaaatccaatggcggcgccgctgctaataatctcaccaatcattggaccgcaaggccttactcccaaaggtacttcgagattttggagaagagaaagaccctccccgtttgg

SEQ ID NO: 22628 - DNA, 271 bp, Glycine max
  Clone ID: 700952314H1
ctctgctagagcctagaagccagaaaactgctgtttctcgacccacacttttgaacttgaaaacttaaaccctagttctctctcttgtctttcttctgcatcttcaaccatgtcagcgatgctgcaacctcagatcattctgttgaaggaaggcacggacacttcgcaagggaagccgcaggtggtgagcaacatcaatgcctgcaccgccgtcgccgacgtcgtccgcaccaccctcggccctcgcggcatggacaagctaatccacgac

SEQ ID NO: 22629 - DNA, 226 bp, Glycine max
  Clone ID: 700952315H1
gtacattgggacatggctaaattttttagcacatgtacttgttaatggttagcttagatttgatcacatttggtcctggagttcattttagttttacaacagctactctccaggaccaaatgtgatcaaatctaagctaaccattaacaagtacatgtggtcctggagattagctgttgtaaaactagaatgaactccgttgcaaaaatggtcaattcttttggcc

SEQ ID NO: 22630 - DNA, 275 bp, Glycine max
  Clone ID: 700952316H1
ctcgcagttcccttctcctcgactcggatcggagcaaagctctcctctgtccacaatcctccgtttcactctctctaaaatcctaacactccgaaatgcccgaaccggaatcgcaaaacggacacgagcaagacccggagccgcagccagaaacagaaccagtgccaacagagcaaacacaaccacaattggagccgaaatcgaaatccacgcccgaaccagaaccaaatccgcagccagaatcggagccagtgccaacagagcaaacgcaagca

SEQ ID NO: 22631 - DNA, 276 bp, Glycine max
  Clone ID: 700952317H1
attttgctctagctttgcaagcctcttcttcatctaaaaatagtaggacttgctttaatgtcaaagctttgaacttgaattctttgaattataatgccaatattgctagtgaaactgaaattaggagtgtaaatgcaaagggtaaggaaatttcagctttggatagggatgattggaatggtaagtttttcccttgtgatgatgagctttctagcattgattatagtaaggagttaactgtgagtgcttctcctttggtggatgatgagaaggcaa

SEQ ID NO: 22632 - DNA, 274 bp, Glycine max
  Clone ID: 700952319H1
ctttcttctccttcactttctccatccatttttagcgttcagtgcttttgatgcttctgctgtccttccagatcttgcacatcattcagttcttctgcttcttcttcactcagatttctgtggggtgttcctcatgtcacggaagtaaaggcaaaaggaggtttctcttcttacctatatgaacttttggtgttgaatttggttggtgtttaaattattgaagagtgtattggaagattgtggagaaggacgtgttgaagttgattgtggagtt

SEQ ID NO: 22633 - DNA, 277 bp, Glycine max
  Clone ID: 700952320H1
ccaccccagaaatagagagtaagcctgagatcatggaaaaagttggtgtggctgtaaatagcaaaaatcaagaatccaaagcaacttccaccattaccattaagggtttcatgagccttctaatgaaaagtgtagatgagaatggtgatggtagcaagagagttatttctctgggtatgggtgacccaactctcaccacttattttcccatctcaaatgtagctgaaaaagctgttgctgaagcacttcagtcacacaggtttcgtggctatgctcc

SEQ ID NO: 22634 - DNA, 272 bp, Glycine max
  Clone ID: 700952321H1
gaaaaagcaattaactaagcatatatagcgtgtaagacagtgagaaaaaaagtgttgtgtagagagaaatggctaggtggtgcatcttggtggttcttgcccttgtcgtggttgcaagtgccagaaacatgcccaatgacgcaggtttggaggaccagaagaacttcctcgggtatgggttctctggagttggcaacaatgggcttccctttggaggagtgggttctgggtttgatggtaatatgggtgggccttctgggctcggtggattt

SEQ ID NO: 22635 - DNA, 271 bp, Glycine max
  Clone ID: 700952322H1
cttcttcttcttctttcccttttattcctcattctctgtcggtacttcagagtctcaacttcgatcttctcctcaaaatggctcatactcttttgttttagggtttccacggtttctgggtcaccttcaagttcgtccctttcggtgttttccgcccccattctgcagtgcttgctaggtcttgaacccgctagcgctggagttagtttcaagtgggggcgtggcaaagggaaaaaaggggtcgtcgcattgtgtttgtcagaagagaggg

SEQ ID NO: 22636 - DNA, 275 bp, Glycine max
  Clone ID: 700952323H1
ctcgagccgaatcggctcgaggttaaacttcctttagagggtcaactagatactttatctttcaagaatatattagccaaatttcctagcgaatgcaatgctgctgcaacaattagcgacatctctcctcatttgtgcttcatatgtctattgcatttggcaaatgagaaaggattgagcattcaaaactcctccaacttggatgatcttgccatacggtttccacaagttgctgattctataaggggaacagtttagattcctcttcactcaat

SEQ ID NO: 22637 - DNA, 274 bp, Glycine max
  Clone ID: 700952324H1
caaaacacaagacagagtcattcagcaaggcttgaaacgagaagcgaggatgcccatcagatgtattctgcattggcaaccgaaccaaggaagcgttgtgaacagccaagtcctgaatgagatctcgcagtgcgtcgaaagccttaacggcgtcaaagaaggaagatgcaaagcctccctcactttctacagacccaatttacgagaccaatcggtgaccatcgattttcctcgcgattttctggggatatcgatgctggagcagccgaacaaa

SEQ ID NO: 22638 - DNA, 272 bp, Glycine max
  Clone ID: 700952325H1
tgtccattgatgatgctcgtctttgcaaaccgggaacacttgatcctaccaaagtaaagggaaaaatactagtctgccttcgaggtaataaattaacttcagccagtgagggtgaacagggtaaacttgctggcgctgtggcagttctagtgcaaaatgatgacccaagtgataatttacttctggccgagaatcatgtattacccgctgcaagtataagtggaacgggaagtcataatattaaaaacggtacaggcaacaatggcaataac

SEQ ID NO: 22639 - DNA, 245 bp, Glycine max
  Clone ID: 700952293H1
catccatggcgtgaaaccctagttaatagttagtaccaaatgtcaaggctattctattacgatgtgatgtcccagcccacactaaagtagagtcagtgaggcttgttgagttcatgtaaagaaaagttcggagtgtcttggtggtgttatcggtgttggggggagtggagggacgtcactcttgtcgtctcccttcgcctctctcccaattggggttggtggcagggcgatggagaatttggtta

SEQ ID NO: 22640 - DNA, 242 bp, Glycine max
  Clone ID: 700952257H1
gaacagtcaactcagaactggtacggacaaggggaatccgactgtttaattaaaacaaagcattgcgatggtccctgcggatgttgacgcaatgtgatttctgcccagtgctctgaatgtcaaagtgaagaaattcaaccaagcgcgggtaaacggcgggagtaactatgactctcttaaggtagccaaatgcctcgtcatctaattagtgacgcgcatgaatggattaacgagattcccac

SEQ ID NO: 22641 - DNA, 244 bp, Glycine max
  Clone ID: 700952258H1
ctcacatgtgcggcgcgccggtggtgctcaacatgttaaccaacgcgaactccccgttggagaaaccggttcagatcctcaccgccggatcgccgcctcctgcggcggtgctcttcagaacagaggctttggggtttgtcgtgagtcacgggtatggtttgactgagagcagaggattggtggtgtcatgcgcgtggaagggggagtggaacaagttgccggcgacggagagggctcgactgaa

SEQ ID NO: 22642 - DNA, 170 bp, Glycine max
  Clone ID: 700952259H1
cccgccactactcctctgaccgatggcgccgcgtctcttgtcatgcttccgcaacaagcacgccggcgggtgcagccaccacgacgagggcatgcggcgcatcatcggatgtgtcggctgctgtggtgaccgaatgagcagtattggggtgtgttctgcgtgtggatgtt

SEQ ID NO: 22643 - DNA, 242 bp, Glycine max
  Clone ID: 700952260H1
gattcctaatacaaacatggcaatgaagaagctcttgtgggttgtcctgtctctatctttggttcttggagtggccaatagctttgattttcacgacaaggatttggcgtccgaggcaagcttttgggacttgtacgagagatggaggagtcaccacacggtttcgcgaacctcggtgacaagcacaagcggtttaacgcgtttcgagcaaatgtgatccatgtccatgacactagcacgat

SEQ ID NO: 22644 - DNA, 249 bp, Glycine max
  Clone ID: 700952261H1
agcaagatgagcctgaagaagaagtccaaacacatgcttgaaacaatcactggattcaacagggcaagctaggattcagtgggtccaaaagaactacatgatttacaactactgcactgacactaagcgtttcccacagggccttcctcctgagtgcacaatcgcatgaaaacaaaactatttcatattataaacctctcatacctcatgaattcattttttttttttcttgtcttgtgtaaattaata

SEQ ID NO: 22645 - DNA, 263 bp, Glycine max
  Clone ID: 700952263H1
ctttcttcttcttctcttaaaagagcctttgctttttctttaggcctttccgaattaagtacttgtttcattttctctcgaagcaagaaaaatgttcatcgagagtttcaaggttgagagtcctaacgtgaagtacacagagactgagattcagtccgtgtacaactatgaaaccactgaacttgttcacgagaacaagaatggcacttatcagtgggttgtcaagcccaaaactgtcaaatatgaatttagaaccaacaccc

SEQ ID NO: 22646 - DNA, 262 bp, Glycine max
  Clone ID: 700952264H1
atgcacgatttctgcttcacgatcccctacggattgatgttagtgggtggtggactgttcgcctacataagcaaagggagcatcgcttctctcgccggaggtcccggctccggtttgcttctcatcgtcgccggctatctcagtctcaatgctttcggcaaacgaaaaaactcttacctcgctctctttctcgagaccgtttgtgcagccatactaacttgggtcatggggcagcgatatttggaaacatccaagattatgc

SEQ ID NO: 22647 - DNA, 239 bp, Glycine max
  Clone ID: 700952266H1
cctttctctaatccaaacatctctccgttaatgctctcaccacaaacttcaatagactagccaaaagctaacaccaactataggccaaatcaccaataaatattatttcccgttcttttggcgtgttggccacccactgaacacatttgcactcacacatagaagcagagagaggccattggttggtttcagagatgggaagcatgcacatagaaaccccagaaacttttgctgatggt

SEQ ID NO: 22648 - DNA, 239 bp, Glycine max
  Clone ID: 700952267H1
gacattttcctgatcttctgctgtgccaagaaagcagtaatctccatgagcttctattgaattgatactttgatcaagatggatgggaaaaactctcttcaaataactagaagtggtattggtgcttatgatgatgatggacatgccaaaaggactgggaatttgcagagtgctgtagctcatatcattactgctgttattggttctggtgttctttctcttgcatggagcacttccca

SEQ ID NO: 22649 - DNA, 236 bp, Glycine max
  Clone ID: 700952269H1
tttgattagtgtggcctagttgttgttttctcgatgagaaaggcttcttccactatgcattgcgcacttctgcgcttttgggttcccttgttgctgcttgctagcttcagctatgctccttctgtttcggccacaactgaaatttcagggaatgaagtgaacacagatgggaaggtgataaatgaagagttagcaaaaccaagtctaaaaggacatgatgaagaagcaaagttcaa

SEQ ID NO: 22650 - DNA, 226 bp, Glycine max
  Clone ID: 700952270H1
ctctcagctcaggagtgtataatctgagcgatgtcagatcttgaggctcccttgcgccctaagaggacatacgtttgggtggactatttcgttcagtttcgatggatccttgttatttttgtggtccttcccatctcgttcaccatttgtttccttacataccttggggatgtaagatctgagtggaagtcctataagacgcgtcagaaggaacatgatgagaatg

SEQ ID NO: 22651 - DNA, 234 bp, Glycine max
  Clone ID: 700952272H1
atgggcaattgttgaacttctctggctgtggaaatacattgaattgtaaccatcctgtggtcatggaactaattcttgacagcctaagacactgggtcaccgaatatcatgtggatggatttcgatttgatcttgcaagtgtcctttgtcgaggaattgatggctcccccattaatgcccccccgcttattagggcaattgctaaagatgcagtattatcaagatgtaaaatta

SEQ ID NO: 22652 - DNA, 242 bp, Glycine max
  Clone ID: 700952274H1
gagaaagtgaaagaaattgtggagattaagcaacgcagtcgtggcagaagagaatcagaaaacaatggaagttttgaaagaaagggaacaggcactgcaagatcagttgcagcatgccaaagacagtgtttctactatgcagaaattgcatgaactcgcacaaaaccagttgtttgaactctgcgcccaatctgaggaagagagggcatctaagcaatcagaggtcaatcttctgatggatg

SEQ ID NO: 22653 - DNA, 242 bp, Glycine max
  Clone ID: 700952275H1
atcctatcctatcgtagcaaagaaagaaagaaagaaaaccctagcttaccttttcaactttcaagatgcaaatctttgttaagacactcactggtaagacaatcacccttgaggtggagagttcagataccatagataatgtaaagtccaagattcaagacaaggaagggatcccaccagaccagcaacgtctcatttttgctggcaagcagcttgaggatggacgtacacttgctgattac

SEQ ID NO: 22654 - DNA, 244 bp, Glycine max
  Clone ID: 700952276H1
cgagaggtacttgctcacagatatatttttttttttgtctccatcattttctcgagagctttcagtttctgtggttcatctttcttcttcttaatctttccccccctctctgtaacatcccgcttctctgaatccctttctgctaatcatctgtctttcaagctaagattttctggtttgtcttttaattcaccaaaaagcaaacttagaaggatttttcgaaagccaggtgttttcagaaacg

SEQ ID NO: 22655 - DNA, 247 bp, Glycine max
  Clone ID: 700952278H1
gatcaggagatataatgatacatcatatctcgttgttttattacacctagcttcttcgccttgggtttggtacagaactgccgatgatgacattgaagaatcagtaccatttgatttgctggatgatgatgatccttggatcagaaccactgattttactcctagtggggcaattggtcgatgcaatttttatagaatttcaatcccacctcgccatggtgcgaaattgatgaaggccatgctttat

SEQ ID NO: 22656 - DNA, 257 bp, Glycine max
  Clone ID: 700952279H1
gacagattcatagacataccagatgaagttcttgatgtttacaagctttggcgcccgacccctctcattagagccaagaggctggaaaagcttcttgatacgccggctaggatttactacaagtatgaaggtgtaagccccgctggatcacacaaaccaaactctgctgttccacaagcctggtataatttacaagcaggtgtcaagaatgttgtgacagaaactggtgctggacagtggggaagtgcattggcctt

SEQ ID NO: 22657 - DNA, 253 bp, Glycine max
  Clone ID: 700952280H1
ctccgcattcggctcgagtgattttgcacccttcatggttttgattattgccatactcaatgatggtaccattatgactatatccaaggatagagtgaaaccatcaccacttcctgatagctggaaactgagggagatatttgctactggcgttgtgctaggaagttacatggcactaatgacagtagtatttttctgggcaatgacagatagcaacttcttctcgaacaaagttggtgtgaggccattgaga

SEQ ID NO: 22658 - DNA, 250 bp, Glycine max
  Clone ID: 700952281H1
tcggctcgagcgatgatgaacacaaatgttggttccttcaagattcctcctgcttccctctcaagttttgatgtgataagtgttattgtctgggtccctgtctatgacaggattattgttcccattgcaaggaaatttacaggcaatgaaaggggcttttcagagttgcaaagaatgggaattggcctttttatttcagtcctgtgcatgtcagcagctgctatagtggagattgtgcgtctgcagcttg

SEQ ID NO: 22659 - DNA, 235 bp, Glycine max
  Clone ID: 700952283H1
gcctgttatccttatggtgatggttcagcaatgttgacggtgagtgatgatgaattctgggagggagtttcgcctgtggaatttggcgatttgcctgctctgcaagatgctgtaactgttgtgggatatccaattgggggtgacacaatctctgtgacaagtggtgttgtttcacgcatggagatactctcttatgttcatggttcaacggaacttctgggactgcagatagatg

SEQ ID NO: 22660 - DNA, 234 bp, Glycine max
  Clone ID: 700952284H1
ccttcttttctctctctctctctcgtgttctgagctgctagaagcaatggagaggaaaagaagccatgcttctttcaccatgtttgcaatgcttgttggattgctctctcagagccttgtcattcctgtaatatccaccactgttgcagatcagaagaactactacaccccagatccacatgctggaagtccccccacaggctcacacaatagtagtcctccatctcatggcca

SEQ ID NO: 22661 - DNA, 232 bp, Glycine max
  Clone ID: 700952286H1
gagggttgcatgaagggagagtttgattcctttgggacagagagtgagattaattaaaatattaggtagttaattaatttcattaaaaggaaaggtgaaggctcctgcgatggagcaagcagtgtcactgattggtgccctgaacctggtttctcgcaacctccctcttcccccagacctctttgacaccgtttcttctatctatcaccgatctaatcctctctcttccgag

SEQ ID NO: 22662 - DNA, 167 bp, Glycine max
  Clone ID: 700952287H1
tactcgagccgattcggctcgagccaaccaccaagcctatattgtctatcgacttttctttctctctctagtctcaggcacacaattccactctctctctctctctctgattcagcttcagcgaaatcgagttctaaccgtagatcgtgcttttgcgtctgagaagc

SEQ ID NO: 22663 - DNA, 192 bp, Glycine max
  Clone ID: 700952289H1
gctgattttaggccttctgcagcaagtgatgatgaccttgatggtatgcaaagttcgcctggaaggtcacaacgagggcacccgagagaggatgttctcatgactgatcaaactgaggatgatcgagatgatgatgattttgatgatggatatgagatgtatcatgttcaaggaacacttagagagtggggt

SEQ ID NO: 22664 - DNA, 239 bp, Glycine max
  Clone ID: 700952290H1
tgtgcttctcgcacggaattctgcgttttcttttccaccacaaacgcgttttacaatcaagagaatttcgcacatcgtaacaagccaattcatttaaagtaggtatgctcctctgtcatttaacatttcttagacttagactcaataattgctcatcacttggcagattcaccaataccatttatattttctgtaggttgctcacacttacagttctagttcaattcaattcttcacca

SEQ ID NO: 22665 - DNA, 238 bp, Glycine max
  Clone ID: 700952291H1
ctcttggcatcttgtgttgtgtccctcttttaagctatttccttctcttaacacaattggttgtgccaattgccatagtcaccaaccaattaacaaaggtatatatatcatcatatcatcaccaaatgaaaaatattgggttgttttttcttgtggtggtggctacttttgtggtggcagccacagctggtagcttttaccaagactttgaaataacgtggggtggtgagcgtgccaa

SEQ ID NO: 22666 - DNA, 239 bp, Glycine max
  Clone ID: 700952256H1
aaatgaaggccatagtgataacgaggccaggaggtcccgaagtgctccaacttgaggaagtggaagatcccctagtcggagacgacgagcttctcatcggagtccacgccacttcccttaacagagccgatacctttcagaggaaaggctcctaccctccccctaagggcgccagccttgacctcggtctcgaatgttccggaactgtcctttccctgggtaaaaacgtttccagctgg

SEQ ID NO: 22667 - DNA, 250 bp, Glycine max
  Clone ID: 700952225H1
ttcacattcaatcaatgatggctcagcttctccacactcccttcatcccttcctcctcctccgcgctccgccgcgccgccaccattccccaccgcaaaacgacctctcgcctcgtcgttcgggccaagatccgggagattttcatgccggcactgagctccaccatgaccgagggcaaaatcgtctcctggaccaaatccgaaggcgacaagctctccaagggcgacagcgtcgtcgtcgtcgagtccga

SEQ ID NO: 22668 - DNA, 251 bp, Glycine max
  Clone ID: 700952226H1
cattggtgtggcctagctgttttctcaatgagaaagccttcatctctaaaaagcgcacttttgcagtttggggttcccttgttgcttgttatcaccttctgttatgctacttctactgctgcagcaacaactcaagtttcagggaatgaagagctgccaaagacaaacctacatgggcatgatgaagaagcagaattcggattttttcatcataaaccaatattcaagaaacatattccaattccagtata

SEQ ID NO: 22669 - DNA, 250 bp, Glycine max
  Clone ID: 700952227H1
caaaaggccagagcacagaaggggtgaattgttggcaaggcaaaagggttggagtgcactcaattggtgatcacacagctattgagctcatcggtagagaccgccctggtcttttgtctgagatatcagcagtccttgccagcctccaattcaatgttatcgcagctgaagtttggactcataacaggagaattgcttgtgtcctttatgtcaatgatgctacaaaccaagccatggatgactcaaaaag

SEQ ID NO: 22670 - DNA, 256 bp, Glycine max
  Clone ID: 700952228H1
cttacttcgagtcatagcagcagggaatataagaactttatgccatcataggctcaatcttctagaacagaaattcaatcttcatttgatgctaaatgcggatagagaatttcttgctcagaagagtgctccacatcgagacttctataatgttagaaaagttgatactcatgtccaccactcagcatgcatgaatcagaaacatcttttaaggttcataaagtcaaagctgagaaaagagcctgatgaggttgta

SEQ ID NO: 22671 - DNA, 257 bp, Glycine max
  Clone ID: 700952229H1
catctgctacgttgtgttgagctttgagatctgtctcgccaaaattcatgatttcgtgttgaatgcatcatcagagttaggtttattttttgacatttggtgtacaatgggggtgccaacttggagaaaaccagtgatctactggggttgcctattcgtcattatcgatgtatttgtactgattagcaatgcattttatcttccgggaagctacatgcatacttactcaaatggagatccgatatatgccaaggtta

SEQ ID NO: 22672 - DNA, 251 bp, Glycine max
  Clone ID: 700952231H1
ggcagaggaaggggcagagttttggagtttgaaagagaaaatattgattgcagttgagttctaatgagtaacgaatacgattacctgttcaagcttctcctaatcggagactcttccgttggaaaatcctgcttgcttctcagattcgctgatgactcctatgtcgacagctacataagtaccattggagttgatttcaaaatcagaacggtggagctggaagggaaaaccgtcaagctgcagatttggga

SEQ ID NO: 22673 - DNA, 251 bp, Glycine max
  Clone ID: 700952232H1
cggctttaattatcgtcactgtttggcggttcgctatcgaaccgggcgagggggtgggccatcccagagcgaaccggatatggatccccagcagcgtccgttaatgtcggaccgggtcaccgttaacggctccgtcacgccgcttgctcttctcgccgacggccgtctatggtggtctgagggaatccaacggtgtttgtcgatcgaaaaggacgtcctcgggatcgttgccagtgggccctacataaaaa

SEQ ID NO: 22674 - DNA, 246 bp, Glycine max
  Clone ID: 700952233H1
atttgctggtcgaccatagtcaactgaagtgaaccttgttgattggctgaaaatgatggttggaaacaggagatcagaagaagtggtggaccccaacattgaggtgaagccatccaccagagctttaaaacgggctctcttaactgctttaagatgtgtagatccagattctgagataaggcccaagatgggccaagttgtacgaatgttggagtcagaggaataccctttaccaagagaggaccg

SEQ ID NO: 22675 - DNA, 245 bp, Glycine max
  Clone ID: 700952235H1
cattattagtgcagtgctaaccagcagggcaattttccaaaggatgaagaattatactatctatgcagtgtcaatcaccattcgtatagtatttggtttcatgtttattgcattgatttggaaatttgattttgcacccttcatggtgttgattattgccatactaaacgatggtaccatcatgacaatatccaaggatcgagtgaaaccatctccaatgccagacagctggaagctgagggaga

SEQ ID NO: 22676 - DNA, 244 bp, Glycine max
  Clone ID: 700952236H1
tagttgctttcagataactgatagttgtgtgcaattatttgaattcaagaatgtctcaacccgactcgttggtggctgagattgaggtgaaaacctctgctgatcacttttacgacaccttgaagggtaagaaacagcatcgtattcatgatgttgcccctcatcatatccataaggtggaagttcatgaaggtgagtgggataaatctggcaatatcaaggtgcttacattcgctgatgggga

SEQ ID NO: 22677 - DNA, 172 bp, Glycine max
  Clone ID: 700952237H1
ggcttatggtggatacctaggcacccagagacgaggaatggcgtagtaagcgacgaaatgcttcggggagttgcatataagcgtagatcgcggggattcccgagataggtcaacctcatcgaagtgccgccggatccaggggcaagcaagatataagctggtgaactgaaac

SEQ ID NO: 22678 - DNA, 243 bp, Glycine max
  Clone ID: 700952238H1
gttccacgcgccgtcctcatggatctagagcccggcaccatggactccgtcagatccggcccctacggccagatcttccgccccgacaacttcgtcttcggccagtccggcgccggaaacaactgggccaaaggtcactacaccgaaggcgctgagctcattgactccgttctcgacgtcgttcgcaaagaagccgagaattgcgactgcttgcaagggtttcaagtgtgccattctcttggt

SEQ ID NO: 22679 - DNA, 239 bp, Glycine max
  Clone ID: 700952239H1
atttcgccttaccaaccccagggaaactccgaatacaggcctagatcgtttgtacagacagacttttagggtgctaagatccaaagtcgagagggaaacagcccagatcgtacgctaaggtccctaagcaatcacttagtggaaaaggaagtgatcgagcgatgacaaccaggaggtgggcttggaagcagccatcctttgaagaaagcgtaatagctcactggtctagctccatggca

SEQ ID NO: 22680 - DNA, 242 bp, Glycine max
  Clone ID: 700952240H1
ggtatgacgaaggaggatttgataaagaatttggggacaatagcaaaatctggaacttctgcatttgttgagaagatgcaaacaagtggagatctcaatctgattgggcagtttggagtcggcttctactctgtttatctcgtggctgactatgtcgaagtcattagcaagaataatgatgataaacagtatgtatgggaatcaaaagctgatggagcatttgcaatttcagaagatacatg

SEQ ID NO: 22681 - DNA, 246 bp, Glycine max
  Clone ID: 700952242H1
accatgttcattattcccattgtctacgtttactgtttataactgaatctaagacaacataaatttaacatcgtgtttctcgttttgatcttgttcctgtggttagagtttagaatttgaagtagtagctgcattccatttttctccccttggaagcacgaggtgaaacagatggcattgactttgaaagaggaagacgcagctgactgggtttacagaggggaaggagcagttaatcttgtgctc

SEQ ID NO: 22682 - DNA, 248 bp, Glycine max
  Clone ID: 700952243H1
cgcagaacctaaccctcacgaaaacccctttcgattccgataactctcgttgtgccgaaaccctaaccttaaccgggttttctcgttggttgggattgaattggcatcggagggaggcgatcgattggaaaattggtagtagtagtttagcgttgaagaacgatgtctgctgctgtgtgcggaagcaagacatctttcttcgaagagcttcctccttctccgccactctccaagatgctccgttgttc

SEQ ID NO: 22683 - DNA, 179 bp, Glycine max
  Clone ID: 700952244H1
gtttctgtctctgtgtttgcggctgaggattccgaacgagcgaccttcttcgtttctcgcaaagtttaagtcatcatgggtaaggaaaagactcacatcaacattgtcgtcattggacatgtcgactctgggaagtcaactaccactggtcatttgatctacaatcttggcggtattga

SEQ ID NO: 22684 - DNA, 239 bp, Glycine max
  Clone ID: 700952245H1
cgagaaaggccactggtaagtactaccaccatagcagctggaaagcaagagaggaacatgatgaaagttgcacctacgagtccgcttcccacgaagcacgtgcggattctgtttcaccgcacgtgccttgagcattcaataattaccaccaactcgccaaagtcacttaattataaacgcggaacgatttcaccaggagaagcagaaccatcgctcaagctcacactcacagtaaaatc

SEQ ID NO: 22685 - DNA, 237 bp, Glycine max
  Clone ID: 700952246H1
ttctctctcacataacactgtttatcgatgatgctctgaactctttatctatatatgcctctctgatgccgatgggtgcctccagttttccggcaagcttcaaacttcccttcgccggccccgattttgatcacttttccggtatgaatcgtttgcgacacccccattgttgatttagaaatgctagatctattcgtcgcatcacacgttcgatccaaaacctggttccacaagagg

SEQ ID NO: 22686 - DNA, 265 bp, Glycine max
  Clone ID: 700952247H1
caatctcagcatatgaatgcatgaataagagagaaagtgcaaatttaaggaaattccagctgcttgcttcagatgttgtgtctgtttttgatcttctccttcgttaccaatctccgatgatttctctctcagtaaaatccaaaggaaaaaccaaaaataacatcaaaactttttcatccatttcaatttccttctctgatttgcttactcttcagattgccattttgcttctgatttttgggtcgtaccttcatacccttttctc

SEQ ID NO: 22687 - DNA, 288 bp, Glycine max
  Clone ID: 700952248H1
cgtacgtaatctcctcgatcctcaagttccaccttgtgacatctatttccaaaagagagatgccgatatttttgggaagccggaagatctcaccaccctcttatgtcaattatcagattagaaggtcagaatgctctctgcaaccaaggaacatgaatatcacaagactacagggaggtgtgaatgtcagcagtagtgacaatcccaaacctaaaagtttaggtccagacagttcaaatggttcagcccatgtggatcatccatctagagagttccagattgcagtta

SEQ ID NO: 22688 - DNA, 187 bp, Glycine max
  Clone ID: 700952249H1
attcggctcgagccgcattcgcgccctcctcggcaagctggaacatgaattggaggaactcgaacgcagcgtggaaccgtcgtggccaaagttggtggaaccgttggagatgatcattgaccagttatctgtagtttggggcatggttaatcatctcaaggctgttaaggatagttcggagctacgt

SEQ ID NO: 22689 - DNA, 238 bp, Glycine max
  Clone ID: 700952252H1
tggaaccacaatatttactgccgtgcaaggttcatctatcacatgctaaaatgcatttaatgttcatcaacattggtgtctaggatgttgtatcacttattataatcctagggaataatctctagtcgccactggcaccaagtctaacaagaggctataatatatggatgatatgctgaacctatgaactatgtctactaaattatgagtttttcaatctctaaattctctctaaaag

SEQ ID NO: 22690 - DNA, 240 bp, Glycine max
  Clone ID: 700952253H1
cttggtttccaattgcgtgcacccatgtcctcttttctctccttatcactctctgcgccctccctccacgattcttccttcctccatggaacaaagctctttcccttttctcgaagagtggcaccacgccgcttcaactcttcctctgccaagtgctccctcgaccacatccccaaacagttcagaaaggagaatctcaaagatggattgatggaaaactacaagaatgcacctcaatct

SEQ ID NO: 22691 - DNA, 238 bp, Glycine max
  Clone ID: 700952254H1
cattgttaaaagtttctttatttcaagtgaagttagttagttatatttatatacacaatcatgtcaatgagatcaattggtacaagccttagccttatggtatggcttgtaattgcaacatcagcattagcaaaatctgataaccccccagtcctagacacacaaggcaaccctcttgagcctggcaaagattactacatcaaacctgccataaccgacgttggaggccgcgtcactt

SEQ ID NO: 22692 - DNA, 248 bp, Glycine max
  Clone ID: 700952224H1
cccaaaccatttccattcactagcacaccacccgcttcttacctcaacccgatgtcttcattcgcacttcccacggaacacgctttccagcccacgccggcattctggcttccatgtcccctgtttttgacaactttatagatcgcccacgtaagcatcggagctccgagagaattatccaaatccacggcgtcccctgcgacgccgtcaccgccttcgtcggattcgtctactcctccaggtgcacg

SEQ ID NO: 22693 - DNA, 130 bp, Glycine max
  Clone ID: 700952178H1
ctctgttctcgttttgtacaatatctttgttggtttcagatcagggacacaaaggaagatattttacaaaacgagaacagagtccctacattagaggatcagaatatctttctttgtttcttagatctgc

SEQ ID NO: 22694 - DNA, 243 bp, Glycine max
  Clone ID: 700952179H1
acccaatccaatcctcgcacacatgcatgctgtctctgccaaagttggggccaagtcataactacatttccattgttacgattctttctttccatcccaaccacttattaagcgtctgatccaatttctttctctcaccatggatcatcgcaaaccattgttacccacttcctctgacgatgctccaaatccacgcactcggaaggaccttgttctaatgatttgcggtttgctcttgctctc

SEQ ID NO: 22695 - DNA, 249 bp, Glycine max
  Clone ID: 700952182H1
ccttcaagtccaagtgattcaatcaaaccgttcatgcttaatcaagttgggaacaacaaaaaaaatcaaaacaatgtttctgggtttcggtttcatttcatcaagatgatctgtttatcttttttttttaattttaatttaaagtctttgtattttgtatgtaaagatgtaaaattatgattattaggtggtgcatgtgttgcgtcatgggccaatgttatcctctgcttttatattggaagaggccca

SEQ ID NO: 22696 - DNA, 250 bp, Glycine max
  Clone ID: 700952184H1
agaagaggtgctaccaacgagtgggaatacctagtcagtcagttgttagacacaatagtcaggttcattacaaaaagcgccggcctcacccttccttaccctccgtttctcaatctcgccgccggcgcaactgcttcatctctccggcgaacgcaaccgaattcttttcccatggcagagaatctgatagcgccgaagcttcccgtcgaaggaaagcgcaacattctcatcaccagtgccttgccttacg

SEQ ID NO: 22697 - DNA, 250 bp, Glycine max
  Clone ID: 700952185H1
tcattcttcaatggccaccctctccgcatgcgcttctcctccatggccaaaccctgattctcccaattcaaatccaaaccctaatttcctccccgaccaatctcaaaccctcgacttcgactccctcatgcctccgcaacccgaatccccaccgcccaaccatcaccactcccccgacgcctctccaccggaatcctccccgtcgccgccgcctccgtcgatcctctacctctccttcaaccaggaccag

SEQ ID NO: 22698 - DNA, 244 bp, Glycine max
  Clone ID: 700952187H1
aacaacagcaacgaagaattcgaagagaaatcaaatcgaatctcatttgatctgtgtgtggttgcggcggcggcaatggcggagcgcttggcatcgatattcgggacggagaaggacagggtgaactgcccgttctacttcaagatcggcgcgtgcaggcacggcgaccggtgctcgcgtctccacacgaagccgagcataagccccactattctcctctccaacatgtaccagcgccctgaca

SEQ ID NO: 22699 - DNA, 131 bp, Glycine max
  Clone ID: 700952188H1
tgtaattacctaaacggcgtcgctactcccttacccattctctcagccatcgttgttcctttcaaccattctctccctcacctaaatggctcacgcacctcaacctcacgcaccttacctaaattttggtt

SEQ ID NO: 22700 - DNA, 242 bp, Glycine max
  Clone ID: 700952189H1
cagaaatttaagtgaggagctagagaatgatgatgtagtctgctatgtgtgcagtggtggttgtagcacttcttcttctggcggatgtggggcccattgctgaggctgtgacatgcaccccaacagagttgagtccgtgtcttccagcaatcacttccggtgctaaaccttccaatgcttgttgcacgaagctgaagcagcaaaaaccatgcttatgtggctacctcaaaaacgctagcttg

SEQ ID NO: 22701 - DNA, 239 bp, Glycine max
  Clone ID: 700952190H1
ggagttgctgttaaggatccatctgctccccatggagttcgacttttgatcgaggactatccttatgcttctgatgggctagagatatgggatgctatcaagtcttgggtggaagaatatgtctcattctactacaagtcagatgaggaacttcaaaaagaccccgagctccaagcttggtggaaagaacttgtagaggtgggtcatggggatttgaaggataagccatggtggcaaaa

SEQ ID NO: 22702 - DNA, 237 bp, Glycine max
  Clone ID: 700952192H1
attttgctcccaaaaatttcatctctcgccattgccgtaggagagcacttcaattttctctccaataagacaattcgttctttcccttctcaatttccggcgagttctcccaatcttcgattttgttctgcaacatttatcgcttccagaatccagatctggatggacatgaaccatcgtttgcatttggggcaaccttgatttgggttttgaagtgctttatggaaactggggtct

SEQ ID NO: 22703 - DNA, 240 bp, Glycine max
  Clone ID: 700952195H1
ctcgtccttcatggggacgcgcctcctggaggcccactccggggcggggcgggtgcaggcccggttcgggtttggcaagaagaaagccgccgccccgaagaaagtttccagggggtcgggctctagctccgataggcccctgtggtatccgggcgccaaggcgcccgagtacctggatgggagccttgtcggagactacggattcgacccatttgggctagggaagcccgccgagtacct

SEQ ID NO: 22704 - DNA, 266 bp, Glycine max
  Clone ID: 700952202H1
gcggctgtagactcggtttaagtgaggagctagagaatgatgatgaagtctgctatgtgtgcagtggtggttgtagcacttcttcttctggcggaggtggggcccatggctgacgctgtgacatggaccccaacagagttgagtccgtgtcttccagcaatcacttccggtgctaaaccttccaatgcttgttgcacgaagctgaagcagcaaaaaccatgcttatgtggctacctcaaaaacgctagcttgaagcagtatgttaa

SEQ ID NO: 22705 - DNA, 211 bp, Glycine max
  Clone ID: 700952203H1
ctcggaattatgctcgagctcgagccgtgacaactagcaccatcacgtataacatggtgaaattcaggccaggaatcacgtcactttgtgtttttctttctcaacatctacagctgcatctccgtaatagagagcctcatgatggttgtagcttcacttgttccaattatttcttcttgatcatagtaaatgaaatctcaattatttcttc

SEQ ID NO: 22706 - DNA, 251 bp, Glycine max
  Clone ID: 700952205H1
tttgctttactcaccgaaagtaacggagggatttccttaacccacaaactctcaaataccctctctctctcaccgaccactatgttgcagagacctagacgccgctgcgagggcactgccatgggcgccatcgttctcgatctccgtcccggtctcggaattggacccttctccctcgggatgcctatatgtgaagcatttgctcagatagagcagcaacctaacatatacgatgtggtgcatgtcaagta

SEQ ID NO: 22707 - DNA, 242 bp, Glycine max
  Clone ID: 700952206H1
cctcaaagcaacacaagaacactctcttgaacattcatggatccagtgagcgtgtggggtaacacgcccttggcgacggtggatcccgagatccatgacctcatcgagaaggagaagcaccgccaatgccgcggcatcgagctcatcgcctccgagaacttcacctccttcgcagtcatcgaggccctcggcagcgccctcaccaacaaatactccgagggcatgcccggcaaccgctacta

SEQ ID NO: 22708 - DNA, 249 bp, Glycine max
  Clone ID: 700952207H1
atggacttctcacgacaagaaaatatagatgatccagaggacgaggaagaatacaagaatgtgcgtagagctgtgaaggagtaccgagggacaatgaatgaatattataaagcagcagttgattcatttgcaaagggggatcaaatgaaagcagaaaaactgttagaacaggggcaattttttctaagaaaggctcacgatgctgatgaagaatctaacaaaatgattcttgaaaccagaaatactgaa

SEQ ID NO: 22709 - DNA, 250 bp, Glycine max
  Clone ID: 700952208H1
ctttctctacttctttccctttccccaacccctcatacgttactctttaaatacgcaccacatcttcacgtgcctctcggttcttcagtccaaacaatggccatggttgagctctggtggattacgtgctttctctaactactgttttccacacttaacgaaccttctacacagtgagaaagacataatggcggtggagtacacatgctgctcaacggccttcttcgttcacatactggtcatcgtgctg

SEQ ID NO: 22710 - DNA, 251 bp, Glycine max
  Clone ID: 700952209H1
atctcgagcgaatcggctcgagtgaataaagtgacaagaagactacctaaaattcccgaagaagtcagggcagagataagctcttattttgtggattctgctccagttgtgccagaggataacagaaaactaaccaaacttgatgattcagctaatttcattcgcactggtttaagtcccagatggcatgatctagatgtgaatcagcatgttaacaatgtgaagtatgttgggtggattctggagagtgc

SEQ ID NO: 22711 - DNA, 260 bp, Glycine max
  Clone ID: 700952213H1
tgggagaagaggtcgagtttcacagcagcaatggtgtacgtcaaggctcagaaatcaaaagcctacttcaagagatatcaagtcaagttcaagagaagaagagagggaaaaaccgattaccgtgccaggattcggttgattaatcaggacaagaacaaatataacactccgaaataccgatttgttgttcgctttagcaacaaggacattgttgcacaaataatatctgctagcattgctggcgatattgttcttgctgc

SEQ ID NO: 22712 - DNA, 262 bp, Glycine max
  Clone ID: 700952214H1
acaatccaaatttgaacacaaggacacatgcagatgaagaagctgagttctcaggaattcttgatatctttgtccatcatgccaggaatattcataacatatgcatctatgacaaccaggatgtctatgctaagttctctctcacttacaaccctgatgagactctctctacaagaatcatcaatggaggtggcaaaaacccaacattcaatgaaaacttgaggttgaagatcacccaaatgaatgctgttctgaaatgtga

SEQ ID NO: 22713 - DNA, 253 bp, Glycine max
  Clone ID: 700952217H1
cccttcttccctttctcacttaccactctcccccttctttccaaaacactccctttccctttctattcacttcccctacccttccgtgatgatgtagatagagaataaaaagagaccagtgtgcagtgagaaagagattgctcacttcttgtgtgggtttgttttgttctttgtgttggaatttgttcatgggtgaagaaggagaagatgtgtcaagagagaaggaacaatacatgggagtttatggaaatga

SEQ ID NO: 22714 - DNA, 269 bp, Glycine max
  Clone ID: 700952218H1
cacgggattcggctcgagtctgcttaatcgaactattcagattctaaaaaatgagttggtggtgggctggagcaatcggtgctgccaagaagaaattcgaggaagaggaaccgccgcgaagcttccagagcgtgggcctggtgatcggcgtgacgggcatcgtgggcaacagcctcgccgagatcctccctctcgccgacacccccgccggtccatggaaggtctacggcgtcgcacgccgcccccgtccgccgtggaacgccgaccat

SEQ ID NO: 22715 - DNA, 247 bp, Glycine max
  Clone ID: 700952219H1
gatgaatctgggccagctatcgttcatcggaagtgcttctaagttgggtcaagagctggatggtgatcaagttcttcatgcacccagtcctgtgccatatttcagtcaagtttggttgacttatttgatatttgaagctttgggtttttaatagatatatctagtttaatgaatggatttgtaagttgagtatgttataagtttctccgttaggtccccttggaagccagacttttttatgcaattg

SEQ ID NO: 22716 - DNA, 246 bp, Glycine max
  Clone ID: 700952220H1
tgctgtatcacagggtctgattctagattgaggttgtgggatgttgaatctagctgcaacacacttgtgaactttgaaacagttcgtctgcaaataaacaaacctcttcaactagccaccactcaagattcagcccttgtttttgttccatgcatgagatctgtgaaagcatttgacatgtggtctgggaacacatacacgatattgcgtggtcactatgaatgtgtgaactcttgctggtttaat

SEQ ID NO: 22717 - DNA, 246 bp, Glycine max
  Clone ID: 700952221H1
gcagaagcgtctccattttctttcgcgatggccgcgcgagccctgttgaccagagaaaccctagccaccgttctccgcaacgacgcgaacccatactcggagctggcatagctgcagctactcattctcgtgggttgcacgtgtacacgctccccgatctggattacgactatggcgctctggagccagccatcagcggcgaaatcatgcagctgcaccaccagaagcaccaccagacttacatca

SEQ ID NO: 22718 - DNA, 242 bp, Glycine max
  Clone ID: 700952222H1
tgaatatcgagtttgctctttagagatctgtttccctctagacaacggtctgtgtgacctgttattttagttgaatcgaagccgcgaccaaatcttcctgatctttgcctgaggtgatggcatcggcgggtgtagcacctgcttctggagtaagagatgtgaatgcaaattcggttgctgttgaaaggttgcctgatgagatgaatggcatgaaaattagggatgaaagggaaatggaagca

SEQ ID NO: 22719 - DNA, 242 bp, Glycine max
  Clone ID: 700952177H1
attaaagagaccaaaccctatctctgcatattcacttaatttcattccaaaatcttcatattcatcaaactcatcaaaatgaatctgtaccactcctccaccaccaccaccaccaccaccatcttcaccgtcatattcctcctccttgcaatattattcactctcacaccccacaaggccaacggtgccacgtgtcaccctgaggaagaagcgggcctgttgggcttcaaatccggtatccg

SEQ ID NO: 22720 - DNA, 169 bp, Glycine max
  Clone ID: 700952142H1
cattttccttcttcagcgctgattcatttataaacttgaacagagatctcatctcacttctcagagattctcaccagtgattggtgatggctcagccgcttgtgaatagagacgatgactgcgacgacgaagatgactattcccactttcttggaattgataaggggcc

SEQ ID NO: 22721 - DNA, 246 bp, Glycine max
  Clone ID: 700952143H1
actgaattaaaatctgttccaattcattcaattgatcttcagttgtttcgagttgagtccattcttctcggggagaaaattgtgaccgaaacctctctggttcaaacaacacagatagcagatggagatgtgtgccgcaatatgacgctgcctatttatgtaatagtaccgcgccttttgacctgtccaacaactttagctggtcccttctcagttgagttcaaagttgccattgttataagcttc

SEQ ID NO: 22722 - DNA, 247 bp, Glycine max
  Clone ID: 700952144H1
ctcgagccgctcgagccgattcggctcgagtggaaaacactaagaagcttatagaagacactcaaaactagcttagaaaagatagaaaaagatgcgcttcaagcaaaagaagaggctgaacgtgtgattctcaaaattgaagagatggagcaggacattgtaagtgaagctagtattgaagccaaggcacaacttgaggctgaaaaagccatgcttacagaagcgctttcggagtctgaattcgtta

SEQ ID NO: 22723 - DNA, 246 bp, Glycine max
  Clone ID: 700952145H1
cggttcctccaccgtggactcagccacttccaagcccgcccatcccccagcaaagtcagtccgcatcgcgcggcttggtgccaatggaaaaggcggcggcgggccagtcttcttgggggaggtgttcagcttgtgcgacctctccggaacggggctcattgccgcttccaagcacttcggcattcccttcatttcggaaagaacccctgagtggctgaaaaaaatatttgcaccgatcaccaagag

SEQ ID NO: 22724 - DNA, 246 bp, Glycine max
  Clone ID: 700952146H1
agacaatcccatattctcttgtctatttgattgcccttgtgttccctttacaatttaaatttcttttacttgttttaatcattttccattcacaacacatatcatcatcaacatgcctgaggctcctggagactccaccaaagactatgttcttgaagagaagaacaagaaaattttggacttcatagaggatgtgaccaacaacgcagatgaagtccagaagaaggttctctctgaaatcctgtc

SEQ ID NO: 22725 - DNA, 245 bp, Glycine max
  Clone ID: 700952147H1
ctgcaattcactctgtacaattcttcgttcgttctctgcagttatatcctttttgagcttcaatggcggacgctgaaaccttcgctttccaggctgagatcaaccagcttctaagtctcatcatcaacacattctacagcaacaaggagattttcttgcgtgaactcatcagcaatgcttctgatgctttggataagattcgattcgagagcttaaccgacaagagcaagctcgatgctcagcca

SEQ ID NO: 22726 - DNA, 250 bp, Glycine max
  Clone ID: 700952148H1
ggcagaggttgggaaggccccacggccgggccagggcggttacgaagcgcacggcctgagcgaggaggaggctcgtgtacgcgccatcgcggagatcgtgagttccatggtggacctctcccacaaaggccagaacgtggacctgaacgcgctcaagtccgcggcgtgccgcaagtaccggctctcacgcgcgccgaagctcgtggagatgatcgctgcgctccccgacgccgagcgcgagacgctcctc

SEQ ID NO: 22727 - DNA, 258 bp, Glycine max
  Clone ID: 700952149H1
agagacctcaacatcttttgtggttcagcttggaagaaatgaagctgataacaaagatgcttgtatgagatattgggactttgagaaatggatgcgaaaggaatgtctaaatttctcagtactttctgcaatgaagtttgggaagaagtggtgccaccaactgcagtccatatgtgatttgtgccttcatgcctatttctctgggggagctccatgctcttcctgctgtagaaccttcagtgcttgtaagagcaaccc

SEQ ID NO: 22728 - DNA, 257 bp, Glycine max
  Clone ID: 700952150H1
aaaaaatgaaatgaatcatttcatattgatagtattgctatgcttagtgtgcgactcgttagttttttagaacggttccaatttaacaaatttataaaccggttcatcgtataaatgaattaaaaaagaactaataaccaacgcatcgcttcggattatctagatctaaagaactagtcaaaacaaaaaaaaatataaaaaaagatatattatagcaactgaactattgtgaagcataaaagaacaaaaatcttatt

SEQ ID NO: 22729 - DNA, 256 bp, Glycine max
  Clone ID: 700952151H1
ccagactgagaggaagagagagggagattctttgtttgctaccttctctcggaaaaatggttacgttcaggtttcaccagtaccaggtggttgggagggctcttcccacggaagcagatcagcaccccaagatctaccgaatgaagctctgggccaccaacgaggttcgcgccaagtccaagttctggtattttctgaggaaactgaaaaaggtgaagaagagcaatggccaagtgcttgccatcaacgagatttt

SEQ ID NO: 22730 - DNA, 253 bp, Glycine max
  Clone ID: 700952152H1
aaagaaggcgtcttcataaacgcctttcttctccgtttccgtttcctcgttcgaattcgctttttgatctgcgaaaatgagagagtgcatctcgatccacattggtcaggctggtatccaggtcggaaatgcttgctgggagctctactgcctcgagcacggcatcgggcccgatgggcaaatgccaagtgacaagacagttggcggtggtgatgatgctttcaatactttcttcagcgagactggtgctgga

SEQ ID NO: 22731 - DNA, 252 bp, Glycine max
  Clone ID: 700952154H1
ggagaaaggagagctgtcatcacatggacttgtctttctcttactctgacggggtccttccttttcttcttctccttcatattttctctctcaccattctcttcttcttctccctttcttagattctccctcttttctctctgccctccgccatgactgaggataaggagatgtcttcctctgtcaccaatggcgatgattccctcactggtcacatcatatctacaactattggaggcaaaaatggggaac

SEQ ID NO: 22732 - DNA, 246 bp, Glycine max
  Clone ID: 700952155H1
gccagatagctggaagctagcagagatatttactactggagttgtgcttggaagttacttggcaatgatgacagttatattcttttgggcggcatacaaaacaaactttttcccgcgagtgtttggagtcccaagtcttgaaaaaactgctcatgatgattaccggaaacttgcctctgcaatctatcttcaagtgagcactattagtcaggctcttatatttgtaactcgatctcgaggttggtc

SEQ ID NO: 22733 - DNA, 247 bp, Glycine max
  Clone ID: 700952157H1
ccagagtagagtagtgcggaagaaaagaaaaacgaaatccctcgctttgagaaatgggtgtattactcttccggtgggttctgccactgactctgttgctcacttgcgcgttaggtttccaatcggacgagcttctcctcgacgaccaagagttacggcatcgagggaggacgagcctccttcgattccgattcgcacccatctcccacctccaccttgaggaagagcttttctgactcctcctccg

SEQ ID NO: 22734 - DNA, 147 bp, Glycine max
  Clone ID: 700952158H1
ataaacctacttctacttcacccctttgctctcaaaccttatcacctaatccttatcctcccaaaccagaaaaccatgtctacctccgcagcttccctcgcactcccaaccctcactctccgaacccgacaacctctatgttctccc

SEQ ID NO: 22735 - DNA, 245 bp, Glycine max
  Clone ID: 700952159H1
tccccactaggtttcccaagaagcccattggagaggtggtgaattgtgctctacactcccccccagtgacccattttccaaaccaacccttcacaaaaacactccaaattaccaaagaacctacctacccccccgcggaaaggcctcagtggaacccattccaaaaagccgccgccaaggccctcgacatgttcgagagcgcgttgctctcacgcgagctcagccaacccctccccaaaaccact

SEQ ID NO: 22736 - DNA, 243 bp, Glycine max
  Clone ID: 700952160H1
acaaaacaacgatggcaagccaattatataccttagtggacaaggattcttaccttcacgccctgttgctaatgagattggggatatcctcaagagtcattatactgatccctggtcatcatggaagaagataccaattatcacaagagacttgtggctcggagagtttttgagaaagttttctatttgtccaccggattacaattgggcaaaaaagaattttgaaatacaaggtgcagcaat

SEQ ID NO: 22737 - DNA, 242 bp, Glycine max
  Clone ID: 700952162H1
ctcgagccgctcgagccgctctctctctgtctctgcgatggagtttcgcgtttccgtcatttggagccttctcctcattgtctctttattctctcctgaaatcaagggtgaggcttctggttccgtcttcttcgtcgatagctccagtaatcaattccttcgcgctagatcatccaacgatgagcaaccttcaatgttgcttcaagaagttggtgctgctgtgtcagtcttgcttggttttg

SEQ ID NO: 22738 - DNA, 249 bp, Glycine max
  Clone ID: 700952163H1
tagaggcatagggtcctcatctctgcggccatcgcggtggcctccgccgaccacgctcacgagttgaagcgccggagagatggaatcgttgagcgcctttacgcggccagttcaccgccgccgctgtgtcggaactgcgacgccggcgacgggggagaaatcaggacgcagagcagtccctccgcggaggaggaaaaggatccctacggaggcttgttcgacgacgagcaacggaagattctcgacatt

SEQ ID NO: 22739 - DNA, 248 bp, Glycine max
  Clone ID: 700952164H1
tgaagagctctttactcaaccgtatgaaaaggttaattggaagaaagcacgtaaccaatgtgcaaaggaagatcgttatcatcctcattctttgatacaagacctggtatgggatagtttatacatatttattgagccactacttactcggtggcctttcaacaagctagtaagagaaaaggcccttcaggtaacaatgaagcatatcctttacgaagatgaaaatagtcgatacataaccattgggt

SEQ ID NO: 22740 - DNA, 256 bp, Glycine max
  Clone ID: 700952165H1
ctcgagccgttcagataactgatagttgtgtgcaattatttgaattcaagaatgtctcaacccgactcgttggtggctgagattgaggtgaaaacctctgctgatcacttttacgacaccttgaagggtaagaaacagcatcgtattcatgatgttgcccctcatcatatccataaggtggaagttcatgaaggtgagtgggataaatctggcaatatcaaggtgcttacattcgctgatggggacactgttgaga

SEQ ID NO: 22741 - DNA, 112 bp, Glycine max
  Clone ID: 700952167H1
caccaactttaaagcctggtctaagtcagtgttgtatttctatatgtaccacttgccatacctacctacccctcatcataattcatgttatgtctatcattatttgagattc

SEQ ID NO: 22742 - DNA, 149 bp, Glycine max
  Clone ID: 700952170H1
aaacaaccttctttctttttctgtgagcctttctttcaggttcttaacttgatcagtgtgcagtgtccaaatcataagggtagttgcaaattgcaatggctaagcatgatgttgagggtggttccttctctgcaaaggactaccatgat

SEQ ID NO: 22743 - DNA, 245 bp, Glycine max
  Clone ID: 700952174H1
cctaggtagagagctcttcctcactctcattcgcaatggccgcagcagcacgtcctctcgtcaccgtgcaggccctcgacagtgacatggccaccgacgcctccgccaccgtccctatccctgacgtcatgaagtcctccatccgcccggacatcgtcaacttcgtacactccaacatctccaagaacagccgacaaccctatgcagtcagccgccgcgctggccaccagacttccgccgagtcc

SEQ ID NO: 22744 - DNA, 239 bp, Glycine max
  Clone ID: 700952175H1
ctctcaccttctttctttcttccttctcatcacaaagacacaagctttcttcctcaactaccctacccaacttcttattccactcatcacttcctttgaaattgaaaccaccaaaattgtgtttttttttctccttcactcgtagtaatattttgaaaagagttgcgctttgggttgagaattgtggcagggcctaatgggtaactgccgagattctcctgccaaggttgatgcagctc

SEQ ID NO: 22745 - DNA, 238 bp, Glycine max
  Clone ID: 700952176H1
caaaacactcataacacaaagcacaaagcaaagctcatccttgagttaaaaaatggcagcagcttcttccatggctctctcatccccatccttggctggcaaggccgtgaagctgggcccatcagccccagaagtgggaagggtgagcatgaggaagaccgtcaccaagcaggtctcctcaggaagcccatggtacggcccagaccgagtcaagtacttgggcccattctctggcgag

SEQ ID NO: 22746 - DNA, 250 bp, Glycine max
  Clone ID: 700952141H1
atttcttcctctttccatttcacctctctctctcttcttttttcccttctacactgagactccctcgccccactgggtgctgacgtgggcgcaccctcgccgcttctcgttccatggaggccacggctgccgttgccactgccgccgccgtgcgcggtgcctcgctccagatgccgcctccttcgcgcaaagagtggcgcgctgtcgccgagcaccatcattctgcccgaaaccccgacgacgaggagtt

SEQ ID NO: 22747 - DNA, 254 bp, Glycine max
  Clone ID: 700952110H1
aaaaacactcaatcaacacacatgattgaagtgcaagcaaatgccatggagcagagttggtgggccaatatgcctcacgagcttctcagagaggtcctcctccgaattgaatcgtcggagtccacgtggccgctgcggaggagcgtcgtggcttgtggcggagtgtgccgcacctggaggaggctcatcgtcaaggagattgtcaagccacctcaattctcttccaacataaccttccccatctctctcaaaca

SEQ ID NO: 22748 - DNA, 249 bp, Glycine max
  Clone ID: 700952111H1
gaaaacatgttttaaggattgataccacaaaagttggaaatggtgaagcctttgtggcagatgatcctctgagatgtcctgtggacaagctcattgatggggttcagctggtaggcacacatgatggggaggtgactgatttgtcgatgtgccaatggatgacgtatcgattggtatctgcgtcacaggatggcacgataaagatctgggaagatcgcaaggcacatccacttgcaattttgagaccac

SEQ ID NO: 22749 - DNA, 250 bp, Glycine max
  Clone ID: 700952112H1
agaaataagaagtttctctgctatttcttctacctataccgtgttactgttagttaaggcttactgagttgcaagattcacttcaaattatgcgtttcgctgatcggcttctcatcaaatcaaacgacgtcgcagttccttgattatttccttttgttgatccgtggaatcgcgcacacggtgttggtgtgtgctgtgaggtagaaagaagaatcctaaattgtgagcagcatgaattaccttcttggag

SEQ ID NO: 22750 - DNA, 252 bp, Glycine max
  Clone ID: 700952114H1
aagaggggcagtagccgagattccgtgagttgcaaaaatgaagacgattctttccaccgagaccatgaacatcccggacggcgtgagcatcaaagttcatgccaaggtcatcgaagttgagggcccccgcggaaaattggtgcgagacttcaagcatttgaatctcgattttcagctcattactgacgaaaacggtaaaagaaagctgaaaatcgacgcgtggtttggttctcggaaaacatccgccgccat

SEQ ID NO: 22751 - DNA, 249 bp, Glycine max
  Clone ID: 700952115H1
taaattttgaagccacacatactgacaaccgtgatattctgaagatatttgcagctgaaggtgttgagttccttttatcttgtgaagggaaggtacccgtgtcagaatgcaatgggaaaattatctgcctatttttcactgcaaactggtgcagaccttgcagagctttcgttccccgtcttgttgaactttatgaaacactgagaaagaggcgaataaatctagagattatcttcatctcctttgacc

SEQ ID NO: 22752 - DNA, 251 bp, Glycine max; identical to SEQ ID NO: 22502
  Clone ID: 700952116H1

SEQ ID NO: 22753 - DNA, 264 bp, Glycine max
  Clone ID: 700952117H1
ctgagcttcgggggaagagatccagcagcaatggtgtacgtcaaggctcagaaatcaaaagcctacttcaagagatatcaagtcaagttcaagagaagaagagagggaaaaaccgattaccgtgccaggattcggttgattaatcaggacaagaacaaatataacactccgaaataccgatttgtggttcgctttagcaacaaggacattgttgcacaggtaatatctgcgagcattgccggcgatttagttcttgctacagca

SEQ ID NO: 22754 - DNA, 260 bp, Glycine max
  Clone ID: 700952118H1
gctagaaataagggtatgaaagcttcggagcaggattactttgaacagctttcaagctcattcaggtgcttagtggatttgatcccagctgaaaaatgtaagtttgatggggtgaacgacaaagtggtagtggatgcagctaatggggttggtggagtgaaacttaaatatttagggaaattgttgaatggtttgattattgaggttcggaacagcagtgaagatggaggtgtactgaatgatggagttggtgctgatta

SEQ ID NO: 22755 - DNA, 258 bp, Glycine max
  Clone ID: 700952120H1
gtgcttcaccgccttcaccacctctaccgccaccacgtccggcgccggaggtgcggacatagcttctccggctaccagatccggcatctccgcgcgtccactgaagagatcttttcccgaggaactctcgccgccggcggatcctccgtcttcagaccagacgaccccgtcggaggcgaacgcgctggtgaaccgctgctccggctgcaggagtaatgtcggactcaccggatttcggtgcagatgcggcgagctctt

SEQ ID NO: 22756 - DNA, 257 bp, Glycine max
  Clone ID: 700952121H1
ctcgagcgaatcggctcaggcgacacgtatcttcatcaaaaatcgcagaagcagattccggtgcatctcatcgacttccaaaatgaacgacgcagatgtctcgaagcaaatccagcagatggtgcgtttcatccgccaggaagctgaggagaaagccaacgagatctctgtatctgccgaagaggaattcaatatcgagaagctgcagttggttgaagccgaaaagaagaagatcaggcaagaatacgaacgcaaag

SEQ ID NO: 22757 - DNA, 253 bp, Glycine max
  Clone ID: 700952122H1
ctccacccgagatccccaaggctgtagagtttgagaagataccctcaccagcttcatcaagtggtggtgaaaaggctgttaaccatatgtcaatagctaatcagaaaggttctgataattatctggagtttgatttcttctagagagagggtagagacaatatattgattgcaaatggtttctgttaagagggggaggaactgtttttcaatgtttcaggaacagatatgatgaggaattgtatgtttgtttt

SEQ ID NO: 22758 - DNA, 254 bp, Glycine max
  Clone ID: 700952124H1
ccaaatcccaactactactcacactcactgcagatctcaatccatggctaccattgttagcatcaaggcccgccagatctttgacagtcgtggcaatccaaccgtcgaggtggatttgacatgctccgatggtacttttgctagagctgctgttccaagtggtgcatccactgggatttatgaggcccttgaattgagagatggaggatctgactaccttggaaagggtgtatcaaaggctgttgacaatgtga

SEQ ID NO: 22759 - DNA, 251 bp, Glycine max
  Clone ID: 700952126H1
ctccgattccgcatttctctgcttccactgcgacgccgccgtccacgccgccaacttcctcgtagctcgccacctccgccgcctcctctgctccaaatgcaaccgtttcgccgcaattcacatctccggtgctatatcccgccacctctcctccacctgcacctcttgctccctggagattccttccgccgactccgattctctcccttcctcttctacctgcgtctccagttccgagtcttgctctacga

SEQ ID NO: 22760 - DNA, 253 bp, Glycine max
  Clone ID: 700952128H1
tcttgagctagatgatctaaagattatagaaagcaaaccaacattactagctagtggagtatttaattatacttcacatgctcccttataatttttggaaattgatatataccagagccgtaagatttttcccatctttctcgtgatatagttcttctggctcacaagccaataaaggcaaccacaaccttcaacttcaacagcacttgatcacattcactgtctagtgatccaccttcacttcccgtttcca

SEQ ID NO: 22761 - DNA, 247 bp, Glycine max
  Clone ID: 700952129H1
ctctacctgagaaggaggatccctgtgctagctcgatcaaagatcaaagatggaggagcggactcgcagcattctgattttgatgaccttgctttccatctccattgctggcggcaatgcaggtggcttgcagcatcataagggtaggcatggtaagcatggtcgtcatatgtctgctcgtaatgtgacttacgacggtaagtcactgttcattaacggaaggcgcgagatccttttttccggctcc

SEQ ID NO: 22762 - DNA, 247 bp, Glycine max
  Clone ID: 700952130H1
ggctcgagggccattgagagatagccccgatgaaatgatggcagccttataccttcaagtcagcataattagccaggctctaatcttcgtcacaaggtcccgcagctggtcttttgttgaaagacctggtcttctcctactaggtgcattttttattgctcagttggtggcaacttttatagcagtgtatgctaactggggctttgcaagaataaagggaatgggatggggttgggctggtgtaatc

SEQ ID NO: 22763 - DNA, 250 bp, Glycine max
  Clone ID: 700952131H1
tagaggcagaggtttttcttctctcaccgtagaatcgaatcgagttcactttgatcgtgtgtgtctccgatcttcaaatccgcaacaaccatggtgaggggattgctcaacaagctcgtctctcgctccctctccgtcgccggaaaatggcagcacaaccaactccgccgcctcaacatccacgagtaccagggcgctgaattgatgagcaaacacggagttaatgttccgagaggcgtggctgtttcct

SEQ ID NO: 22764 - DNA, 251 bp, Glycine max
  Clone ID: 700952132H1
ccactcaagtgttgtaggctcttcgtggtttgcttttgggcccggcccgatacggcttgtttttattatgtatctcacttattcactttgctgtttttattccgtaggctgaagttcaggagaaaactttatatatggaataataacaataattgtacatagaaaaagataatggtcgcatctgtatgtatgtatcataatggctttgaatctgaattatccaaaaaaaaaaagataaagaaaaaaaggga

SEQ ID NO: 22765 - DNA, 206 bp, Glycine max
  Clone ID: 700952133H1
aggagagggagggagagattcgaattccaattagggttttctcatcatcatcgactttttctcttatgcaaggaaggttctccttctccgatttcaatttgattgaacgagtagtgttaagattatgatatggtttgagaagcttcgtttctctcctcacctaagctgattcattgccggcagcagctggtcaagaaggtgcgagg

SEQ ID NO: 22766 - DNA, 261 bp, Glycine max
  Clone ID: 700952134H1
agctcaccagcttcatccactgcttttttggtttctctccctttggtggtgccttcccctttgaggaggagagagttgcaaagtttgttttaagattcattcttgctttttcagcttccatataatttccctctttttccattgggggggctcctattccttttttgtgcttagtttttttttattacttttcaaaattttctttgctgctcagaatcagggaaaaggtggatttttgatttttaaaaaaaagttttgttt

SEQ ID NO: 22767 - DNA, 253 bp, Glycine max
  Clone ID: 700952135H1
taaaaagagaacagttgaggaagaagggaagcttctcccggagtttgaagatgctgatgaaagagaactctttgaagcgctgatgcttgagctggatagtgatatggatgttgatatattgcgccactatgaggttatgtacttaattcatgagaagcatgaagaggaggttgtagctgtcaatgagaaaattcaagactttttgagggagaagaaaggtcaggtttggagattgaatgattcgggtatgaga

SEQ ID NO: 22768 - DNA, 257 bp, Glycine max
  Clone ID: 700952136H1
gtttgttgatcgagataactagaaacagtgtgatgaaaatgaaggtccttgttttcttcgttgctacaattttggtagcatggcaatgccatgcgtacgatatgttccctctccgaatgaacactggctatggtgcccgtactccggaggtgaaatgcgcaagttggaggcttgctgtggaagcacacaacatctttggctttgagaccattcctgaagagtgcgttgaagcaacaaaggaatacatccatggcgaa

SEQ ID NO: 22769 - DNA, 256 bp, Glycine max
  Clone ID: 700952138H1
ctcacacagcacgagggccaatcaatggaaagccgtgtccacctcccttgctctaacgacgtcgtcgtccacgtcaacggcgactctgctcccgacgctcgccggtttcacccaaccaacgatgacatttccccctcaacaacaacaacaacagcatcaggagcatgggaaggaaagaaggggcagtttggttcttgcgtacaagactcttggagtggtgtttggaggacttgtgacatcaccccttcacgtgaac

SEQ ID NO: 22770 - DNA, 253 bp, Glycine max
  Clone ID: 700952140H1
ttttacttcccctatggctcgtcactccttgctcttagccctcctcctcttcgccgccgtggccaccgccgcgatggcggtgccgcgtccgacgccgacgacatcctgatccgtcaggtggtgccagatgttggcgaagccgaagaggaggacaacctgctgaacgccgagcaccacttcgcgagcttcacggccaagttcgccaagacctacgccaccaaggaggagcacgatcatcgcttcggcgtcttca

SEQ ID NO: 22771 - DNA, 258 bp, Glycine max
  Clone ID: 700952108H1
cccaactactcttcttgatggctttttgataaggctgtatgtggcaccaaggaatggtttagacatttttatttgtttgatgttgaaggtggaggccaaagccacatctcagctgcttgattttcccctaatttctagccgccagaagaggacttgatattgctggtgttcctttgagaaaatactctaccggtgctggaagtgttcttgacatggtatctcctttgacacgacaacctttttctcccatctctttaa

SEQ ID NO: 22772 - DNA, 252 bp, Glycine max
  Clone ID: 700952073H1
gaatgatttggatagtagcaatttttgtagtttctcttacttacctgtgtctatggagaagaagcaagaaaaagggaaagagattaccacctggtccaaaagggttgccaattttgggaaaccttcacaagttggggtcaaatcctcatcgtgatctgcatgaactagcccagaaatatggacctgtcatgtacttgcgcttaggatttgtgccagccataattgtttcttcaccccaagcagtgaactgtt

SEQ ID NO: 22773 - DNA, 248 bp, Glycine max
  Clone ID: 700952074H1
tgatgatgtgggagttgtgcggagtcttggtctacagcaattatctctgagttatcccaattccctaaagaaaaaaatactgaagaattgagcaaatctgatgccactaaaaagttggaactaatggatgactttctggaggtggagaaattggctcggttatcaaatgatttcagtggagtttcagttacttcaaacaatatggcaaatgaaactgtgaccaatgatgtatcagaggtagtactgag

SEQ ID NO: 22774 - DNA, 248 bp, Glycine max
  Clone ID: 700952075H1
gttaattaaaggttttatgcctatactgaactcactttaatgaacatcttgtagaatgtagattattaaactatatttttaattcaattgctactgctggcattgtactcatgtgtttaaatatttttgtagtgtattggagccacaacattagacgagtataggaagcacattgaaaaagatcctgctttggagagacgattccagccagttaaagtgccagagccaactgtagatgaaccatacaa

SEQ ID NO: 22775 - DNA, 246 bp, Glycine max
  Clone ID: 700952076H1
ctctagcgttgttgcattgcagaagcgtctccattttctttcgcgatggccgcgcgagccctgttgaccagaaaaaccctagccaccgttctccgcaacgacgcgaacccataatcggagctggcatagctgcagctactcattctcgtgggttgcacgtgtacacgctccccgatctggattacgactatggcgctctggagccagccatcagcggcgaaatcatgcagctgcaccacagaagca

SEQ ID NO: 22776 - DNA, 245 bp, Glycine max
  Clone ID: 700952077H1
gtaaaataataaatgatataacctaggagagagcttgtatgaaagaatagaatgacatgcggcaattagggttataacagagaactgtatgatctttttgaattttccagctcaggaattgtattcttgagaaacaaaagtgaaaactcaccactccacgggcaacactggtatacaagtaattggggagtaagtaattatgggatgacatctcttgaatctcaatgaaatgtaaaccctgcata

SEQ ID NO: 22777 - DNA, 246 bp, Glycine max
  Clone ID: 700952078H1
gcatttggtgctcattgtcgcctccagatccaactaactgcgttcaaccggacccagaaaaagaccctttttgcccaccaccccccttcaaagactacgagctccctccacacgatgacaagacattaccccttcgaattagaccagctgctcatttggtcactgatgattacatagccaagtacgaggaagccgtgaggcgcatgcaagaccttccacctgatgatcctcgcagtttcagcaaca

SEQ ID NO: 22778 - DNA, 250 bp, Glycine max
  Clone ID: 700952079H1
ctaaaacatctccagtgggttcttcttcttctattacaacaacgtcgtccaagaccatgaccatggccatggccacgatcctgctcctgttcacggtcttcgcggtttcatcggccctagacatgtcgataatctcgtacgacaacgcccacgccgccacgtcgcgcacgagagcgagctgatgtccatgtacgagcagtggctagtaaagcacggcaaggtgtacaacgcgctcggagagaggagaaga

SEQ ID NO: 22779 - DNA, 253 bp, Glycine max
  Clone ID: 700952080H1
ctcgtgcgaaaatgcgtgagattcttcacatacagggagggcaatgcggaaaccagatcggagcgaagttctgggaggtggtgtgcgcggacacgggatcgattccacggggaggtaccagggggacaacgagttgcaactcgagcgagtcaacgtctattacaatgaagcgagttgcggaaggttcgtgccgagggcggtgctcatggatctagagccagggaccatggacagcgtcagatctgtccctacg

SEQ ID NO: 22780 - DNA, 253 bp, Glycine max
  Clone ID: 700952081H1
cgtctttaccattatttattgtaaataaatacacagcttagattattagagactgaaataacaaaaggcaatggatctcagagagggtcaaactcaaccaatcttggatcctaaccaaccatctcatgtgtatcatctggctttggatattggaggatctctcgccaagttagtatacttcacaaaagatgatgatcatttggttgatggcgaggaagggatatctcatagaaaggctttggagaatccgaca

SEQ ID NO: 22781 - DNA, 246 bp, Glycine max
  Clone ID: 700952082H1
ttgtggcaaggttgatatgcaggagcaggaggttagtgatattactttgagagagagaagtgtttcggttgtcctattggctggagggcagggcaagaggatgggagctagcatgccaaagcagtatcttcctctttttggtcaacccattgctttgtatagtttccacactttttttcacctggttcaagtcaaagaaattattgtggtttgtgatccttcatacaaggacatttttgaaatgca

SEQ ID NO: 22782 - DNA, 195 bp, Glycine max
  Clone ID: 700952083H1
ttttccttctaaagggttggcacccccctaatcatgtgaagttcctttggccgaaaaagggtttcactgcaattttcttcacatgtaatcctgtaggcccagtagaactaaataatattttaagcttggcaggtctagtatgtgttatatacataataataataatatataataaaaacttgcatgttacccatt

SEQ ID NO: 22783 - DNA, 251 bp, Glycine max
  Clone ID: 700952085H1
atttcccttcctctctttactttctccacaccccaatttctacacacacactccccccccttcctacttactccaaagccaacaatccttaataggctttgagcaaccaccgagttcccttctcgggctcaaccacctaagcccgtctcagatttctcagatccaggcccagatcgaggcccaacagagccaaaaccagaacccacactctctcaactttctcggcccgaagcccgtcccaataagcacgt

SEQ ID NO: 22784 - DNA, 250 bp, Glycine max
  Clone ID: 700952086H1
cagcatttagccgagagaccaatgaaagaatatgcttcttgaatgtcagtcctgatgaagttataaggagtttgttttataataaaaataacgactcacttatcacagtctctgtctatgcatcagacaattacagttctttaaaatgccgaagtacaaggattgaatatataaggagggttaaaccggatgctggctttgctctttttgaatccgagtcattaaagtggccaggttttgtgagttcgat

SEQ ID NO: 22785 - DNA, 248 bp, Glycine max
  Clone ID: 700952087H1
gttcctccaccacgaacacacacgccctttccttccttcatcacctcgcgctaacctgcgccccctgcttaaattgcgcactccttctttatcccattctttcctcagattcggaaaaaaaaagctttccggtgctggggagcctagggttagggtttctgagagatgtgggatgttccatgcattgatgagccttatcgcgcgctgttggaagccgttcgggcacggtgacgacgccgtaatgccgc

SEQ ID NO: 22786 - DNA, 248 bp, Glycine max
  Clone ID: 700952089H1
atttttctctctttttcaactttcaattcaagcagctttggaaaaaccaaccagccaacgggttttttttttttcacctcctgaaatttgtgttggtttggtaatataggccttggagtgaaaattcaatattttgcatggaagccagagaaggtattagttctggggttacagtgataggggcagaagctccatcagcttaccatgtggctccgaggagtgaagctccaaaccaggttctgtccctg

SEQ ID NO: 22787 - DNA, 246 bp, Glycine max
  Clone ID: 700952090H1
tgcatgaataatctgatcttggtgggtggacacgtattgttgttgagaagccttttggtaaggatctggaatctgcagagcaactcagtacccagattggacagttgtttgaagaaccccagatttatcgaattgatcactacttaggaaaggaacttgtgcagaatatgttagtacttcgttttgcaaaccgattattcatgcctctatggaaccgtgacaacattgctaatgtgcgatcgtttt

SEQ ID NO: 22788 - DNA, 247 bp, Glycine max
  Clone ID: 700952091H1
gccgtagcagcggaagctctagcttgggtagcgaatcacaatggcgagaggattaaagaagcatctgaagaggcttaatgccccaaagcattggatgcttgacaaactgggtggtgcatttgctcctaagccctcatctggaccacacaaatcgagggaatgcctgccactcatactcattttgcgaaaccggctgaagtatgctctaacataccgtgaagtcattgctattctgatgagcgacatg

SEQ ID NO: 22789 - DNA, 246 bp, Glycine max
  Clone ID: 700952092H1
aaagtaactgattttggtcttagtgctttaccccagcatcttagggaagatggactgctgcatacaacttgtggaagtcccaattatgtagcaccagaggttcttgctaacaagggctatgatggtgcaacatcagatacatggtcatgtggtgttatattgtatgtaagcctaacaggatacttaccttttgatgatagaaatcttgtagttctctatcagaaggtatattcatatttgcctcta

SEQ ID NO: 22790 - DNA, 247 bp, Glycine max
  Clone ID: 700952093H1
atcaccttgcgaactccgccttctacaactctctcttctgctgcatcttccattcacagaacaagatccaccaccttctccttctcgctttgttccccaccaactcttcgcttcaattcccacagctccctctctcttactcgcgcttccgcttcctctatcactaccgcttcgaccactgagctggacgctgtgtcctccttcagcgagatcgttcccgacaccgtcgttttcgatgattcgaaaa

SEQ ID NO: 22791 - DNA, 247 bp, Glycine max
  Clone ID: 700952094H1
cagaaagaggaacgaagcaatggcgccgaagaagccccgaaccacgtcgaggaaccctgatttggtcaggggaattggcaaatattcgaggtcgcagatgtaccacaagaggggcatctgggccatcaaggccaaaaacggcggtgttttgcccctccacgatcccaagcccaaacccgaggccccggcccagaagccgcccaagttctacccggccgatgacgtgaagaagcccctcgcaacaagc

SEQ ID NO: 22792 - DNA, 249 bp, Glycine max
  Clone ID: 700952095H1
cctacctctccttcaaggttcgtagatttcttctgtttttttttcttcttctttattgtttgttctacatcagcatgatgttgatttgattgtgttttctatcgtttcatcgattataaattttcataatcagaagattcagcttttattaatgcaagaacgtccttaattgatgattttataaccgtaaattaggtctaattagagtttttttcataaagattttcagatccgtttacaacagcctta

SEQ ID NO: 22793 - DNA, 247 bp, Glycine max
  Clone ID: 700952096H1
ggaggagggaacttggagattggaatggaatacagaactgtttctggagttgctgggccattggtcattcttgataaagttaagggacccaagtttcaagagattgttaacattcgcttaggagatggtactactcggcgtggacaagtgctagaagttgatggtgaaaaggctgttgttcaggtctttgagggtacatctgggattgacaataaatttacaactgtgcaatttactggaaggtgtt

SEQ ID NO: 22794 - DNA, 273 bp, Glycine max
  Clone ID: 700952102H1
attcggctcgatgcgtagggggttgttattattcttcataatggttgcaacagctgctacggcgtcgtttctccctgtgccttcgccggacgctggaaaagggtcacccaagggtggtggtggcggcggcgtttctgtgaacctcggaggactcaaagagaagcaaggtttgtgcggttgcttgcaggtcaaggcaaacgcacaagcccctccgaagaccatggagaaggttgagaatgatttgccatggttgtcgtcgtcgtcgatttcgca

SEQ ID NO: 22795 - DNA, 170 bp, Glycine max
  Clone ID: 700952104H1
attgaaggctctacaggttctaggatttggtgagtacattgaagaagtttatgcagcatatgaacagcacaaactggagaccatggactctttaagagggggtggtggtggtggtaaatggaacaatggcagctgagatcgactcgaggaagatagcatatagcagacgc

SEQ ID NO: 22796 - DNA, 250 bp, Glycine max
  Clone ID: 700952071H1
gtgcttcttcactttctctctccaacaactttcactcccaagctccatggccgcaaaccttttacccctttcaatttcatgctcctctaaaacccacattctctgtcttccctcccctcccaaacccctctttctctgccgccactctctgctccgttaccgttccactccgcgactcacatgtaaggcagcccaagtttcggtcgccgaagagtcgtcggcgtccggcgacaactgggttccgtggtgc

SEQ ID NO: 22797 - DNA, 263 bp, Glycine max
  Clone ID: 700952105H1
atttcagatgaccagcaagacatcacaagaggaaagggtatggttgattccctcttccaagctccacaggagactggaactcactatgcagtcatgagctcttttgagtaccttagcactggacttaaacagtataacttggataacaacatggacggtttttacattgctcctgcttatatggacaagcttgttgttcacatcaccaagaacttcatgaccctgcctaacatcaaggttcctctcattcttggtatttgggg

SEQ ID NO: 22798 - DNA, 249 bp, Glycine max
  Clone ID: 700952044H1
gattgaagaagtgcatttcgtcctctaacactcttccaaatcatggctagctcactgcttgtgagggttgccagctgcatggttgtggtgtggatgtttagttttgggcacataattcccttggcagaagctgaaattccatgtggcagggtgcaaatcactgtggctccatgcatagggtacctaaggggtcctggtggaggtgtccctgcaccatgctgcaatggggttaagagcataacaaccaag

SEQ ID NO: 22799 - DNA, 249 bp, Glycine max
  Clone ID: 700952045H1
attgtcttgagctggaagcttcggtttctctctctctctctttctctttctcttagggttttcactttcaccaatttctccttctcttccgatctacgcccaaaggtatcacctcgcgtgcattcgttcctaatcctttcaaactctccgttctcccatctttaacttgtttaagctgctacgtttaattgaattcgccgtttccaaattgtcttttcatttctttcttttgttctgcaattgacattg

SEQ ID NO: 22800 - DNA, 251 bp, Glycine max
  Clone ID: 700952046H1
cttcgaacttgaaatcgacgcgataatggagcagatgaagcagcacctcgccaccgactcaggcaaacaagtcaccaaaaaaattggactcgtttatcagattcaaattgctcctaagaaacttggaatcgacgaggtcgtctacaccgttgatctcaggaaaggagaggtcaccaaagggccatatgaaggaggaaagcctgatgcatctttttcatttaaggacgaggactttgttaaggtgccttggg

SEQ ID NO: 22801 - DNA, 252 bp, Glycine max
  Clone ID: 700952047H1
cattactatcttgcctctcttcttctgctactgctgctcaacccacacaccaccctgggagcgcagaacctcatgctaccctaccataacggcgccctcctcaaaggaaccattaccgttaacctcttatggtacggcagcttcaccccaatccaacgctccataatcctcgacttcattaactcgttaagttccaccgcgggggccccacttccctccgtagcatcgtggtggaagaccacggaaagtaca

SEQ ID NO: 22802 - DNA, 252 bp, Glycine max
  Clone ID: 700952048H1
gtctgaacccattcctgaagctaacgatgaacctgttaaagtggtagttgggaacagtcttgaggacattgttttcaaatctgggaagaatgttctgctggagttttatgctccctggtgtggtcattgcaaacagttggctccaatattggacgaattgctatctcatatcaaagtgatgctgatgttgttattgcaaaactggatgcaactgccaacgatatcccaagtgaaacctttgatgtccaggtt

SEQ ID NO: 22803 - DNA, 256 bp, Glycine max
  Clone ID: 700952049H1
gtgaaaactgaccaagttttgagcaagaagagaaaaaagcttccctagactctgggattcgcaatacagaattagaacccgatgatattttaaatgctattgttgattataagtctaaaaggggatctagataagcttctaaccaggtcaaagccacagatgcttcatctactcgactcaattatcaactccttgtgccaggttccaccgttcgtgttctatctggaacattttcagggtttacaggaccctcaag

SEQ ID NO: 22804 - DNA, 252 bp, Glycine max
  Clone ID: 700952050H1
gttcagatcccagatagacacctctctctctctctctctctgcattattatggactctccgtttcttcttccgcttcttctcatcttcctcttcctctctcccactccctcctcctcctccattgataatttccaccaagcctttcccatcgttgaacctgatcctggtcacacaaaacttcgtctttcaagagaaggtttggaggctattgagaaaataaccaaccccattgcagcagtggcaggattggg

SEQ ID NO: 22805 - DNA, 249 bp, Glycine max
  Clone ID: 700952051H1
ctcgagccgctcgagcgcgctgcgagagactcagattggacgtttcctgaggaacattgtttccaccgtgtcgcagctatgggcggcttcggagtgcggggtaagattctggaacttcaaggatctgtacgcgtcgtggtgcggcgaagaagaagaagaaggagtggttgcgaggaacggcgacgaggagagtgcgccgtttcgagagtcggtgtggacctcaccaacgttgtgtttggttgggatgag

SEQ ID NO: 22806 - DNA, 252 bp, Glycine max
  Clone ID: 700952052H1
gtcatggcatctcaactgctgaggcaaagaaggacaagagggaaactgggttggccattcctaaggatttggattctgcattggctattcctggagttggaagaagcagagatcaacatccacatgtgtatagggtttctcctgaacagaggaaggctcttggctctggttcaaccaaagctttgaaggaccatatgaagtcctctgcaactgatggtaaaatgcaacagtggttccgtgaagtcttgcagg

SEQ ID NO: 22807 - DNA, 253 bp, Glycine max
  Clone ID: 700952053H1
gttagacttcgtcacctcactcaccactcaccactcaccactcgccaatacacttcctcagaggtcaattatcgcgcgactcggtaaaatatttcttgcacactctcaatttgctgccattattttcgcatatgaattgctactttcaccctttgtttcgtgttagttagggttgtggattttgagagtggctttgatttaattctagcactagttgcagagagctgcatggtgaatacaaaacgatggttca

SEQ ID NO: 22808 - DNA, 252 bp, Glycine max
  Clone ID: 700952054H1
ctaggagacagatcactctggttggttgccacattttggggtaccaagacaccttgtacgtccagaccaacaggcaattctaccgcaactgcgtgatctctggcacagtggacttcatctttggcacctcccccaccgtgatccagcactcagtgatcatcgtgaggaagcccttggacaaccagttcaacacgatcaccgccgacggaacatccatgaagaacatggatacaggaatcgtgaccagggttg

SEQ ID NO: 22809 - DNA, 250 bp, Glycine max
  Clone ID: 700952056H1
cttcggcacctcctcaccgtgatccagcactccgttatcatcgtgaggaagcccctggacaaccagttcaacacagtcaccgccgacggaacatcccagaagaacatggctacaggaatcgtgatccagggttgcaacatcgtcccagaagccgaacttttccctacaaggttccaagtgaagtcataccttggaaggccatggaagcaattctcaaggacggttgtgatggaatccaccgtggtgactt

SEQ ID NO: 22810 - DNA, 250 bp, Glycine max
  Clone ID: 700952057H1
ctaggccttggcctgagcaactccttcaggctttcttcgtggcagcaaagtgcatatggttgctacatttattggcattttctttcaaccctccattgggaattttaagggtggaagagaatagaagctttgatcctcactacatggaagatttggttactgatagacagaggtcacaaggtccaagccgggttaagatcgtggtggtgccagggttctatgttcaggatatgatcttgaggttagagtt

SEQ ID NO: 22811 - DNA, 246 bp, Glycine max
  Clone ID: 700952059H1
ggagctgcccaaggaatgatggacaaactaggagatgatggtcttgttgtggatggcagaaaacttttctttgaatatagtagtaagccaacaggaggtcctggtccagatggagctatgaaatcaggtcataattataagagcatgatggttccatccgattggatgtgcactatatgtggctacataaattttgcacgccggacttcctgctatcagtgtaatgagccacgaactgatatgccc

SEQ ID NO: 22812 - DNA, 247 bp, Glycine max
  Clone ID: 700952060H1
gtcgaagagaggagcggtggttcggcggggaacaagttccggatgtcgctgggtctgccggtggcggcgacggtgaactgcgccgacaatacgggggcgaagaacctctacatcatatcggtgaaagggatcaaagggcgtttgaaccgtctcccctcggcttgcgttggcgacatggtgatggccaccgtgaagaaggggaaacccgatctgaggaagaaggttttgccagctgtcatgttcgcca

SEQ ID NO: 22813 - DNA, 249 bp, Glycine max
  Clone ID: 700952061H1
tggaacgcgacaggcgcagggagcgaaacgagcgtttgcgcctcggcctcgacaccgccgacatcgacacggagtcggagcaggactacatgggcgtggggcccctcatcgcgaactcgagaaggagatgctcaaggaatcccccgagctgaaccgctacgaggagcccaccgactccgacgacgactccgacgaggaaaccaaggacgaggcggacaagaagatgagtgacttcgagaaaaaagagac

SEQ ID NO: 22814 - DNA, 186 bp, Glycine max
  Clone ID: 700952062H1
cagaaccttctcaaaaatgagacggtcatctctagtgagtgcccttcttatagcaaacattctcatggcaacacgccttaccctcactcttcctttctctcgctccatctctccactcttatctcgttccctttcacaactcaaacaattcccaaaatcccacccttgtcccctctggtcctcctc

SEQ ID NO: 22815 - DNA, 255 bp, Glycine max
  Clone ID: 700952063H1
gagaatacaactatagagaagtgaggcttccttctctgatagcagtggtgggcgagccagagctggggagggaaacaggggaaaggagaagaggaagggacataataatagccatagatcatggccccaataccaaacatgctttcgattgggctctggttcacctttgcaggctcgctgataccatccatctcgttcacgccgtttccgacttgcataaccaagttgtctacgacataacccaggtcttatgga

SEQ ID NO: 22816 - DNA, 253 bp, Glycine max
  Clone ID: 700952064H1
ctaatccaattcagacacgaaaaaaccaactacatcagctcatggcaacccccaaccccaccagattctcccttgccatggagagaaccgggcaatgggttttctccccagaaatccccaccgatgttattgttgcagttggacaaaccaatttttctctccacaagtttattctggcggcgaagagtaactacgtcagaaaagtgataatggaatcagaggagagtgacctaacaagaatagagtttccgac

SEQ ID NO: 22817 - DNA, 254 bp, Glycine max
  Clone ID: 700952065H1
agcatacttagaaacagcaactatgtctctcatgcagcttactagctcccctgttggctcactggtccgtttcattgtaatatttgctttatggtacagaaccatggctttggccaagttgccaccaaacgcttcatcagttccagcagttttagcgtttggagattccatcgtggacccaggcaacaacaacaacataaaaacattgatcaagtgcaacttcccaccttatggaaaggattttcaggaggaaa

SEQ ID NO: 22818 - DNA, 252 bp, Glycine max
  Clone ID: 700952066H1
gctaaaatcacttcatcatggcttcctcgtgtgcttcctctgccattgcagctgttgccatctccacaccaagttcccagaagaatggatcactcttgggaagcacaaaagcttcttttcttagtgggaggaaactgaaggtgaacaactttacagcaccagttggagcacgatccagcactacagtttgcgcagttgctgagcctgataggcctctgtggttcccaggcagcacccctcctccaggctaga

SEQ ID NO: 22819 - DNA, 250 bp, Glycine max
  unsure (1)..(250): unsure at all n locations
  Clone ID: 700952067H1
gtccggcatgacggcggtgaagccactggatttgatgccggtgaaacggagctccggcgaggacgcggcggatacggtgccgaaggagataaatctaattccgaatccgaagctgtttggcgtggcgattggagcgaacgngncgagagagggaggaggaggaagtggaagtggtcgagattgcggaggaggaggaggaggaggagaggaagataccctgctgcgcctgcatcacgtgggttctcagacg

SEQ ID NO: 22820 - DNA, 251 bp, Glycine max
  Clone ID: 700952068H1
ctgctcaagatctctttcgccagatccaacacttctgtggcgtatccctatgtttctacatcagaggatgtgcttttggaaaactcattgatttcaggatttgctgaagcctgtggagatatgggaattggcaatgttgctttccatggatcttgctccatggatggggcaaatcatgaagaaatcacaactttgcactcagttcaagactatttgatcaagaggatggaagagagtcacagaggaaaaca

SEQ ID NO: 22821 - DNA, 254 bp, Glycine max
  Clone ID: 700952069H1
gtactcactcgtgaaccccacgcagtgttcgataatcaaatcttctttctttttcttccgcagtcccaaccttcatggattctcactcacacatcattgcttggggctctggtgaagatggtcagctaggaatcggaagcaacgaagagaaagaatgggtctgcctcgtcaaagccctccagccccaccgtattcgctccgtcgtcgccggcagcagaaactccctcgccatcgctgacgacggaaattgttca

SEQ ID NO: 22822 - DNA, 250 bp, Glycine max
  Clone ID: 700952043H1
ctttggcctaggaggccaccattgggttttggtgggctttcactgaaccaataaaaaacccatctttaaaaggtgctttgttttgaaggttccaatttgcttcctgtgtttctttccaacaaggaagggagggtggtgtgtcattaatttgtgtcaagtattttggttttgctttcccccttgttagccattggtgttgcacaattggcattaaggttctattatcacatatgccaaacttacctttgaa

SEQ ID NO: 22823 - DNA, 252 bp, Glycine max
  Clone ID: 700952070H1
ctcaaccatcgaattgttggtgattgaaagagaaggaagaagaagcaggaaatggaagcagtgagagctggtcgagaaggagcaataggtctaggtcaaggtgatggcgtagccaaggacagcactgagactgaactcaccaaaatccgtctcctcagggcaattgttgaaacccgtgatccctcttccaaggaagaggatgattttatgattagaagattcctgcgtgctcgtgatttagattagagaagg

SEQ ID NO: 22824 - DNA, 254 bp, Glycine max
  Clone ID: 700952013H1
accgaatctaagagagccgatgccaaacttgctgtgaataagaagggcgccgccaccaagactaggaaacccgccggaaaggggaaggcagcgaaagatcctaacaagccaaagaggcctccaagtgctttcttcgttttcatggaggaattcaggaaggtgttcaacaaggaacatcccgacaacaaagcagtgtctgctgtgggcaaagctgctggagcaaaatggaagacgatgtctgatgcgaaaaagca

SEQ ID NO: 22825 - DNA, 254 bp, Glycine max
  Clone ID: 700952014H1
tgctgttcaaatacagtggtgcctcagctgctctcactgtagacccttcactccacttgtcaagagcttctagcattgtgatgttgattgcatatgtagtctacattgtctttcaactgtggacacacaggcagttatttgaagccgaagatgagggtgaggatggtgaggacggtgaagaagaacaagctgtgattggattatggagtggcattgcttggttggtagggatgactgtgttcattgctgtgttg

SEQ ID NO: 22826 - DNA, 251 bp, Glycine max
  Clone ID: 700952015H1
ctcgagccgaatcggctcgcgaactacatcgcgttcctcgccgattggccgcaaacagtgttgccggagtcttacagaccgtagtcccgattagctgaacggatggcgtggttgatattagagctcctctacaaggaggtccgcaactcaaacctagggttcatcctcggggagaattggttgacgaagcatgaattgaaggtgaaagagtatgcttccaagtacgagcgcgtgggaaggaaacgttttta

SEQ ID NO: 22827 - DNA, 255 bp, Glycine max
  Clone ID: 700952016H1
cccaaaacactattttattacttcttcgtctgttctttgcattgaagaaaatttctttgaattgaagaaaacttgaaatcgacttgtgcaacagaaaatacaccaaaggaaatttctactgattgaattgcagagattggaaaaatggcgttgagtatgactcaacagcatcgggaccctagctggtgcgacggtgccggattcctcggccggagaatcgaacgcggcggtgagtgccgccgcggtgtggcagtc

SEQ ID NO: 22828 - DNA, 267 bp, Glycine max
  Clone ID: 700952017H1
ggctcgagaaaacccttagccaacacaacatcatggccacctctgctattcagcaatcagcattcactggtcaaactgctctgaagcagctcaatgagttcgtccgcaagaccggtggcgccggcaaaggtcgcactaacatgcgccgcaccgtcaagagtgctcctcagagcatttggtatggccctgaccgtcccaagtacttgggtccattctcggagcagattccatcatacctgaccggagaattccctggtgatacggatg

SEQ ID NO: 22829 - DNA, 256 bp, Glycine max
  Clone ID: 700952018H1
cgatatctgatattgtgagctcgcatggagttgcgacaatgggggcactgatcttcccccaccctgacatccgccgcccacctcccccttgctgaacttggttctgtacctcttctcggcggggttctcgctcctcatcatctaaaagttgaggcttttatggtgttggtgttcgtcggagggtgcagcagaataggcataagggctagaagcatgtgcggcgccgaagcgtggtagggtggcacgtcgagagtgg

SEQ ID NO: 22830 - DNA, 254 bp, Glycine max
  Clone ID: 700952019H1
gtcttctttctttttttcatttccaaatcacgaaactcaagaagatggagaaagcgatcaacagacagaagattttgcttcatcatctcaacccttcatcatccacccaccccaacgaatcatcctccctccatgcttcagcatgtgtggcgggggatagcgctgcttatcaaaggacatcgacattcggggacgatgttgtgatcgtggctgcttatcggactgctcattgcaaagctaaacgaggggtttca

SEQ ID NO: 22831 - DNA, 256 bp, Glycine max
  Clone ID: 700952020H1
gcttcctggataacgttttcgggttcgagaaggcacttgtgttgtttttcgtacgaaatggagactaaacagagttcggtgacggttacgctcagttacggcgcgttgacgtgcgccgcggaatttctcgcgactttgctagcttctgctgtcgtcaaagcctcgcttttggccccggatctctaccggctgctattgatcaacacgcctactgccaaaggagagagcaaaattcagagtgaagacagcaacgtga

SEQ ID NO: 22832 - DNA, 255 bp, Glycine max
  Clone ID: 700952021H1
ccttcgttcactcttctttcttgcggctagggttttagcgcacttcttctagatttaaggaagatgggtaaggaaaaggttcacatcagtattgtggttattggccatgttgactctgggaagtccactaccactggccacctgatctacaagcttggaggcattgacaagcgtgttattgagagatttgagaaggaagctgctgagatgaacaagaggtctttcaagtatgcctgggtgcttgatagcttaagg

SEQ ID NO: 22833 - DNA, 254 bp, Glycine max
  Clone ID: 700952022H1
ccagaatcaaaataagaaaacagagtaattttgcatcgtcgtcacacatggagatctccggcaccgttctccgtcaggtcagctacgtctccggctatgggacccacacgcggtcccgcggcctggctcctcgttttggggtgaggatggggatgggttctggtttctgtgacgaggggcatttgcggtattaccaggacaccaaaaaggttctcaccccaaagaagaagttgaagctgctcaaggtttctcca

SEQ ID NO: 22834 - DNA, 253 bp, Glycine max
  Clone ID: 700952027H1
aatttttaatctctccatattcccacgccacttattgtagttggcatattctgaagactctgcaaaatatataaaattacgttttaatctcgaattttacttttccaatgttttctcccttttttgttttgtagttatttatccgagttgttattggaaggcttactccaaattagctgatttgattattaaagttgtaattcactgggggtgaaatctttgtaagaggttgaagaacctggttccgggtatt

SEQ ID NO: 22835 - DNA, 252 bp, Glycine max
  Clone ID: 700952028H1
atgtttttcaccaatttgtctaaggaagaagttgaaaggctgtttaaagaatttgaggaatatgactttgcaagaacaggaagcattgccactgaaaaggtggatctcaaagagggtcctttagagcaattcactcatgagatggaaccctttctcaggaagcaaggcatgcctgttcggttaaataaaggagttgtggagcttgtttcggattttgttgtttgcgacgaaggaaagcctttgtcacagagg

SEQ ID NO: 22836 - DNA, 252 bp, Glycine max
  Clone ID: 700952029H1
tttattctttatgttatgaattaatttcttgatcttgtcctcaccagtgacaaccaatgaacatacgtgatgaactgagaatgggaacaaaccatattgtttgcttaaattagcttaattgattgagcggtgtgcaagagttgttcttaatctcctaatacctgaattcaatttctatggataaaaagaaaattaatgttgccgagtgttgagagtaaagtagaatagttaataaattggatgcataacaga

SEQ ID NO: 22837 - DNA, 253 bp, Glycine max
  Clone ID: 700952030H1
gttcaactgagggtgagagtgacacaaatctagggagcactactctaaaagttctattagattcttcaaaacatgaccatgcatcgcgagtcttgggcttttgtcttcggcgttatgggcaacatcatctcctttggagtgttccttgctccattgccaaccttttaccaaatctacaagaagaaatccactgaagggttccagtcacttccttatgttgttgcactgttcagtgcaatgctttgatttacta

SEQ ID NO: 22838 - DNA, 253 bp, Glycine max
  Clone ID: 700952031H1
aaaggacattcacaactcacttcacaaactgcgatcaagtgaagcagccatttccactcccttccatatcacattcactttttgacaagctagatgagttaattaaggctttgcctgggaacaataatggaagggatgaagcttaaaaggtggctcgtgagtgttttgttcctcattgttgccacagtgagcaatgcagcaggtgcatttgtgggggtaaacattggcactgatgttactgatcttcatctgc

SEQ ID NO: 22839 - DNA, 256 bp, Glycine max
  Clone ID: 700952032H1
ctttctccttttcctcgtgttcacaaaatcacgctgcttaattattccttcaactaccatcatatcataccttctcaacagaaaaataaaaataaaaatgagatacatccttggagaacacaacattctgttcctcaaaagcttcgccttcacgatattattccttagttgcatagccattcggcttaacttgtgtctttccagcatcccttcttcactgaaatcaattccccttgaagggcatttaaaattgatc

SEQ ID NO: 22840 - DNA, 259 bp, Glycine max
  Clone ID: 700952033H1
agaaaacgaacaataatgaatgataaacaggtgatgctgattgagagggcactcaaagatgagcctgatatgcagcgaaatgcagcttcacttcaatcatgggctgataaattaagtgggcatggttccgaggttacatcttcacagcttaaaaattggttgaacaatcgaaaagctaggctagctcgcacagctagggatgttaaagcagcagcaggtgatgacaatcctgtcccagagaagcagagagggcagtacc

SEQ ID NO: 22841 - DNA, 257 bp, Glycine max
  Clone ID: 700952034H1
atcattctgaaaccaattccaccttcttcttttcgcgtcacaccatgaaacctcttctcggcttcgcaatcgcgttcctcctcctcctacattcctctcttgcttccgacatcccctaccccaaagcaatttccgatttgaaggatacaattgtgaagggatttgggtttacggcggaagatgatgttaagattacggggttcgatccgagagacgccgaggtagggcattccgtggagtaccaattcacctccaaa

SEQ ID NO: 22842 - DNA, 255 bp, Glycine max
  Clone ID: 700952035H1
gagaaatccttggtgacggggaaacactgggggagaatttattctctttgttctgtttcagcttgaatcttttctctatttctatcttgggttcctattgctaacactgactggtcttggaatcagagaaatacataacataaaattagaccaaagggcttgtgtggtcttgaacttgcaacaaatagttgatattgattttataagacactggacttccaaaggaaattgctaagcagatagttaccttattat

SEQ ID NO: 22843 - DNA, 251 bp, Glycine max
  Clone ID: 700952036H1
gtttcaggcattgctggctgggggtgatgatgatgaccactattttagtaactcttgttatgcttcttatatggcagatacacatcattgtagtgctgagttttgctgtagtcttcctgggattggagttgactttcttttcatcagttctgtggagtgtaacgcatggaagttggattatattggtctttgctgtaataatgttttttataatgtttgtatggaattatgggagcaagctcagtatgaaa

SEQ ID NO: 22844 - DNA, 255 bp, Glycine max
  Clone ID: 700952038H1
cttcttcttcccacgctcctccttctcatacccttcgccaccctcgtctccgcccgccctcacctcgccggagactttctccgactgccctccgaaaccgataacgatgacaacgtccagggcacccgctgggccgtcctcctcgccggttccaatggctactggaattacagacatcaggtccatctcatacacatgacacttcaatttttatatctttgatttcttaaataagttctggggttcaatcttgta

SEQ ID NO: 22845 - DNA, 252 bp, Glycine max
  Clone ID: 700952039H1
ggggaacagacacagtttgcgagtgaacacaagttacaacaatggctttctttggtagaattgggaatttgttacgacagacagcgagcaggcaggttagttcaaaattgcgttcgcccccttcattttttcaggctatacgctgtatgtcatctgccccaagcacaaaactgtttattggaggtgtttcatattctactgacgagcaaagcttgagggaagctttttcaaaatatggtgaagtgttgatgc

SEQ ID NO: 22846 - DNA, 253 bp, Glycine max
  Clone ID: 700952040H1
ggcaaacactcctgttcttctacatgaccacaatgagtttctgcacaaagatgaatacttgaaagggattaaaatctacgagtcaataattaaggtatatgcatcgttggatgataatggaagagatggagcatccaaagatgagttatgagcaagtggtgtggcacctacccctacctaattctcattttctgccttttcttatgtaacaatagagaggaaaaataacacctcaactgactttttgtagctt

SEQ ID NO: 22847 - DNA, 255 bp, Glycine max
  Clone ID: 700952041H1
ccagatccagcactttatctcaatctagtggcagagaaagtgagagttcagacggtaatgttttgagtaatcatgaagcagttacatatgccaatacatggactttcctagtgcctgacctcgtatgcgacgtggccaataaattattgtggaagttcaatttagacttagaggcaatttctgctagtagctctgaggtcccatcaatattagagttcctgcagcggcggaagttggaagctaacaggctaaaca

SEQ ID NO: 22848 - DNA, 254 bp, Glycine max
  Clone ID: 700952012H1
cattttagaagaatacccctcttttgctgcatcagaggagttgtaaattaagagcatggctgcacaagctcttgtatcatcatcttctcttaccttctcagcggaggctgcaagacaaagtcttggaccaagatcactccaatctccatttggcttctccagaaaagcctcctttcttgttaaggcagctgctaccccccctgtcaagcaaggatcagacagacctttgtggtttgcatcaaagcaagtctttc

SEQ ID NO: 22849 - DNA, 263 bp, Glycine max
  Clone ID: 700951965H1
atgcaccccatatcagaaatacaaaggagagattccggtcaatgcctatatgttgtcccatacttcttcctttaccacatgccttggcattgcgcatgattttacaattgggtgttaaaccttcttggtttaacacttgcagtacaaccatagaaaagagacctcacttaattccaggaactccttcatctaaaggggatcttcgcacctacatgatcgacataccacctcttggcgactcagtggtgcctgagatgctctta

SEQ ID NO: 22850 - DNA, 261 bp, Glycine max
  Clone ID: 700951966H1
agcagtgggaggaggctcgggactctgaccgcgtgcctgttgaagaatgagccggcgactcataggcagtggcttggttaagggaaaccaccggagccgtagcgaaagcgagtcttcacagggcaattgtcactgcttatggacccgaacctgggtgatctatccatgaccaggatgaagcttgggtgaaactaagtggaggtccgaaccgactgatgttgaagaatcagcggatgagttgtggttaggggtgaaatgcca

SEQ ID NO: 22851 - DNA, 258 bp, Glycine max
  Clone ID: 700951969H1
ttcccctctcatcattttaatcacgcgcacatcagcacaacacaacaattcactaagctaaaatcacttcatcatggcttcctcgtgtgcttcctctgccattgcagctgttgccatctccacaccaagttcccagaagaatggatcactcttgggaagcacaaaagcttcttttcttagtgggaggaaactgaaggtgaacaactttacagcaccagttggagcacgatccagcactacagtttgcgcagttgctga

SEQ ID NO: 22852 - DNA, 256 bp, Glycine max
  Clone ID: 700951973H1
cgtgattccttggcggagtgcgagcgtgcaccgagccgcggcgagacaaaacgctgcgttgggtcgctcgaggacatgatcgactttgccacctctgttttgggccgaaacgtcgccgttcggactacccagaacgtgaacgggtccaagaagagtgtggtggtggggcccgttaggggaatcaacggtggtaaagtcacccaatccgtgtcgtgccaccagagcctgttcccttatctgctttactactgccacg

SEQ ID NO: 22853 - DNA, 258 bp, Glycine max
  Clone ID: 700951974H1
ttgaggtcttgtatgtggctgcagatatccaaaccttaaattcggtcctcgaatctttctgatcattggttgttttttattctttcaaatacattccaaaatctcttggaaattgcgagattcactgcttatcctagcagcagattttgggttctgacccaattattcattttccccaactgggtcttgtggattttttgttggggttttaaatttcgtgttgctgggttttgaaagttatttcctttcttccccgtc

SEQ ID NO: 22854 - DNA, 257 bp, Glycine max
  Clone ID: 700951975H1
atgataccatggatgccaatggggaagctagattgattaatggttatggctcaaaacaagtttcacaattccttaatgcaaatatgaagaagcccaaggtggtttctggtgatgatgatttaccaaagagagatgatattggtgaaaggcgaaggaaacacgagcttcgggtgttggctggtgctggaattaggactgaggatgatgatggtgatgatcagatgactgatcttggacctaatgaggttaccgatgaa

SEQ ID NO: 22855 - DNA, 87 bp, Glycine max
  Clone ID: 700951977H1
ctgaaaccccaacacccaaaggaatatgtgattgggtcatggctgaaagtgatataacagccatgaaggagacgctccgtgcgcaac

SEQ ID NO: 22856 - DNA, 258 bp, Glycine max
  Clone ID: 700951978H1
atttccctacctctcccttcaagatgcagatcttcgtcaagaccctcaccggcaagaccatcacccttgaggtggaaagctctgacaccatcgacaacgtcaaggccaagatccaggacaaggaaggaatccccccggaccagcaacgtctcattttcgccggaaagcaacttgaggacggccgtacccttgctgactacaacattcagaaggagtgtactcttcacctcgtcctccgtctccgtggtggcatgcaga

SEQ ID NO: 22857 - DNA, 261 bp, Glycine max
  Clone ID: 700951979H1
agagaaagcaagttagatcaaagatctgaatcgagatcggagaagaggaagaagaagaagaagagtatgggaacgacggtggcgggtctagcgccgggtctgtcacggaagctgaagaaggttctagaatctcggatcgatacgccagacctcttgtcttcgctcaacacgctctcttccttctacgatgacaacactcctcaggcgcgtcgcaacctccgatccaccatcgagaagcgcgccctctccatcaaccgcgaa

SEQ ID NO: 22858 - DNA, 262 bp, Glycine max
  Clone ID: 700951980H1
aagagctccaaggaatcaactcaatgactccaacccatctatttcaagatattgctaaagagggttataagtttctccaagtgattatatatatatatcaccaaagacaaggctctaaataggtggatttccagagtaaaaaagtattggcatgttcaatactaactctactgtcgtgtgttctttaccactgtattgaaataattttagatgcaatgtgatgtggttcgatagttgttttttgttacctttcagtttagaa

SEQ ID NO: 22859 - DNA, 260 bp, Glycine max
  Clone ID: 700951981H1
aatggcggctctcagaaaagccgtgttctttgtaatcgctcaatgcttcaccttttccgcatatgctgcaaggtttgaaatcacaaaccgatgcacatacactgtctgggctgcgtctgtgcctgttggcggtggcgtgcaattaaacccgggccagtcatggtccgtggacgtgcctgcaggaacgaaaggggcccgcgtttggacccgaaccggctgcaacttcgacggttcgggccgcggtggatgccagaccggtg

SEQ ID NO: 22860 - DNA, 257 bp, Glycine max
  Clone ID: 700951982H1
atgcagctgccaaaaaggcatcagaggatgcttccaaacaggagaaagatggtgagcagcaagctagcccacaggatacaacaatgactgagggtgccagtgcagcagcttctgaagccgagactaagagaactgatttgacggacgatgagaatgctcttctacagcaggcccttgcaatgtcaatggatgatcccacaattaaccatgaagtgagagatacagatatgtctgaagcagctgctgaagatcccgag

SEQ ID NO: 22861 - DNA, 255 bp, Glycine max
  Clone ID: 700951983H1
gtgccagttggaggcttggcgtggaagcaaacaacgtagtcaagtggcaaactgttcctgcagcttgcggagagtacatagctgactacgttctaggagaccaatatagatcagattccaaaacagttaaccaacaagcttatttctatgctaaatccctcaaactcaccaacaaagatgtctttgtcttggacgttgacgacactactctctctaatctccagtattttgctaaccatggatttggtgtggaac

SEQ ID NO: 22862 - DNA, 254 bp, Glycine max
  Clone ID: 700951984H1
gcagcaggctgccacctttttgaattgtcagttgttggttcttcctttcaattacctgggaatacctattggggcaaaccctaggagaggcgactacttagtaggaaccagggtagagaagatgacaatattgagacaataaggaagcgatttaaggtctttcttggagtctagtcttcccgtgattaattattatgatgcaaagggaaaagttcgcaagattgatgctgcaaggcctatcgacgaggtatttg

SEQ ID NO: 22863 - DNA, 258 bp, Glycine max
  Clone ID: 700951988H1
aaaccttacctagtattttcgtttctgaacccaattaattaagcacacaaggaccataacatacctatacctcaatatcacaagtcttatggaggcagagcgagacaagtacaagatgatcaactttgaagaaaccgagttacgactcggcctcccactcagtggaaacgagacgctcaacaccacttgcagcactgggaagagggttttttcggatactgccgtggatttgaagcttaacctttcctcaacctcaaa

SEQ ID NO: 22864 - DNA, 174 bp, Glycine max
  Clone ID: 700951990H1
gatgccatttcagaggagcatgaacatcattttggaaggccaagatcaagggaggaggctttgcatttcttgaatgagcttggctggctgttccaaagagaaagattctcatatgtgcatgaggatccatattattcgcttgacaggttcaaatttgtactcacatttgctgtg

SEQ ID NO: 22865 - DNA, 260 bp, Glycine max
  Clone ID: 700951994H1
cgaggacgagaggaagtcgccggacatagaaattccccttgacgcgccgacgatgacgcacgacttcgcgatcacggagaatttcgtggtgatcccggaccagcaggtggtgttcaagctcggcgaaatgatcaaaggaggatcgccggtgatctacgacggcgagaagaaatcgcggttcggaatactgccaaagtacgcttccgacgcgtcgagcatcgtgtgggtggactcgccagacacgttcttcttccacttct

SEQ ID NO: 22866 - DNA, 258 bp, Glycine max
  Clone ID: 700951995H1
caaaacaaaacaaaacgcgatcatttctccgccgtagcagtggaacaaactccaccgactccgttatggacaactccggaaatcctcaagatgtggttgtgccacctgttgaaggtgttgcaggaggtggtacggcttatgggtggaatgatggtggcacacatggcttgaatgtcaagggaccaattgaccccacagaaattccaactaaggatttagtgcatgtatggtgcatgccaaacacagcaaatgttggac

SEQ ID NO: 22867 - DNA, 254 bp, Glycine max
  Clone ID: 700951996H1
ggcgattggatctgcaccggttagttttgcccccccaaccaccacttcttcttccaactaatcattcaatcaaaatcttttctttttcatttttttatttatgaattgggctttgggtcctgttttgtgtaatgggtagcgtggtttttcaagttccaaagaggaccttgtttaggaacctgttttatatatttatttagtgttaagttggtatggatgacacatgtaggaattaaatggaattaggaaattgt

SEQ ID NO: 22868 - DNA, 264 bp, Glycine max
  Clone ID: 700952001H1
agtggtttcagtgagtgatcggtgttcacttgatccttcataagtcgtcatcatcatcatcatcatcaccgttgattgaagaagatgccgatcagaaacatcgccatcggaaggcctgaagaggctactacaccccgacacgttgaaggcggggttggctgagttcatctccaccttgatcttcgtgttcgccggttcaggttccggcatcgcctacaacaagctcaccgacaacggcgccgccactcccgccggctcatctcc

SEQ ID NO: 22869 - DNA, 256 bp, Glycine max
  Clone ID: 700952004H1
gctaaaaaatatgctgcaattcttatttttattttcattttcattttttgtttttttaagaaaaaaggctaaccttctgactttccaaagaactgagtctagtaatacaccaatggatggaattttcgcttacaccattctcattttgcttaccatattttcatttatgttcttaccaaaaccaaacagaagaagacctcagaaccagacacttgcaaagctccctccaggctcaatggggtggccgtaataggag

SEQ ID NO: 22870 - DNA, 255 bp, Glycine max
  Clone ID: 700952006H1
ttgagtcattccttgattcataccagtcaatgaagcccgcaaggatagtataaggataagatggccatcatggtatctaatccttcttcaagcgatcaaggaaggtgttaatttgaagggctattatgcatggtcattttcggacagttttgaatgggatgctggttacacagttcgattcgggctcatatatgtggattacaagaacaacttgaaaagataccccaagttctctgctttttggttgaaaagttc

SEQ ID NO: 22871 - DNA, 254 bp, Glycine max
  Clone ID: 700952007H1
cactacctctgcatttttctctcgctctctgccttccatcaccctcgccatttcccttcccaagatagtagaagatggcagacgctgaggatattcaacctcttgtttgtgacaatggaacaggaatggttaaggctggttttgctggagatgatgccccacgtgctgtgtttcccagcattgtaggtcgtcctcgtcacactggtgtgatggttggcatgggccaaaaagatgcatatgttggtgagaggcac

SEQ ID NO: 22872 - DNA, 258 bp, Glycine max
  Clone ID: 700952009H1
cgttcgagtacttcaccttctttctctctaagcgcaaaacctcgtactgtttttggcggttaaggatgtcggggaaaggagcgaaggggttgatcacaggcaaaacctccgccgccaacaaagacaaggacaagaagaaacccatctcgcgttcttctcgtgccggccttcagttcccagttggtcgtatccaccggcttttgaagtcaaggacaaccgctaatggtagagttggggccacagctgctgctactctgc

SEQ ID NO: 22873 - DNA, 263 bp, Glycine max
  Clone ID: 700951964H1
aggtgatctagcaaacagcatgacagagaattcccagggaacaaccctttcaagaggagggatgattgctgggttagagccaatcaattttataactttagcaacaccacatcttggcgtgagaggaaagaagcagcttccatttctgttgggtgtcccaatcctagaaaagcttgctgcacctatagctcccttttttgttggtcagacaggtagtcagttattccttactgatggtaaacctgacaaacctcctctcctat

SEQ ID NO: 22874 - DNA, 251 bp, Glycine max
  Clone ID: 700952011H1
ataacatctcaatgggttttcttctattacaacatcgcccgcaaccatgaccatggctgcgatcgtgctcctgttcacggtctttgccgtttcctccgccctagacatgtcgataatctcgtacgacagcgcccacgcggacaaggccgccacgatgcgcaccgaggaggagctgatgtccatgtacgagcagtggctcgtgaagcacgggaaggtgtacaacgcgctcggcgagaaggagaaggcttcca

SEQ ID NO: 22875 - DNA, 264 bp, Glycine max
  Clone ID: 700951931H1
ctctaacatcatagtcctcagaggctgattggtgcatactaattgtagacaggctagtcttcctattatcacaaacaatgtctgacagtcaagaatctgacaagaacattgagatatggaagatcaagaaattgatcaaggctctggaagctgctcgaggtaatggtaccagcatgatttctctgataatgcctccacgcgatcaaatttcccgggtcactaagatgttgggagatgaatttggaactgcttcaaacatcaaaa

SEQ ID NO: 22876 - DNA, 265 bp, Glycine max
  Clone ID: 700951933H1
aaacttcggcaaaatcatgtatgcaattgtaactaggcccgggccgaaatgatatttcattcattgatgtaaaactgtaaatattagcttcattgaatttttgcccatgcgagttacaaattaatttcaccttgagcaatttgttgtattccgtgctataaatgccactaataaaagcactccttgtaaatatccgattttgttccaattggaatggtggtggtcattgttttgaaaaaaaaaaaaaaaaaaaaaaaaggggggg

SEQ ID NO: 22877 - DNA, 265 bp, Glycine max
  Clone ID: 700951934H1
caaacttggttttaattggtataggcgtgccaaggtcttgttaattttgagcgttaagtgctgcaactaatcagatcccaagaccttggcctaccttgccatacagaaaaaaaaaaagcaaaaaaaaagccaaggtttggagccaacaaaaataaacacaaagcacaagtcatggaaagaataatggttggaagtgcaacaaaggttgctttcaccctcttggccactttcgccattgacattccatgccttgaggctggcattg

SEQ ID NO: 22878 - DNA, 262 bp, Glycine max
  Clone ID: 700951935H1
gtccacttttgaagtacagagaagaagaattgaagaatgtaagaggggatggaactggagagcgcaaggaatgggataggatctatgattatgatgtctacaatgacttgggcaacccggatagcggtgataaatatgcacgccccgttcttggtggttcagccttaccttaccctcgcagaggaagaaccggaagaggaaaaactagaaaagatcccaacagtgagaagccgagcgattttgtttaccttccaagagatga

SEQ ID NO: 22879 - DNA, 260 bp, Glycine max
  Clone ID: 700951937H1
agttgttgcagttaaaaagctcgtagttggaccttgggttgggtcgatcggtccgcctccggtgtgcaccggtcggctcgtcccttctgccggcgatgcgctcctgtccttaactggccgggtcgtgcctccggtgctgttactttgaagaaattagagtgctcaaagcaagcctacgctctgtatacattagcatgggataacaccacaggattctgatcctattgtgttggccttcgggatcggagtaatgattaaca

SEQ ID NO: 22880 - DNA, 261 bp, Glycine max
  Clone ID: 700951938H1
tgactgctactcgctcatcccgtggagataatgggagagacaaaggacgaagcatacgaggaagagcttctcgattacgaggaggaagacgaaaaggcccccgactccgccggagctaaagtcaacggcgaactaccaagaagggctatgttggaattcacagttcgggattcagggacttccttctgaagccagagcttcttcgggctattgtggactcgggatttgagcatccatctgaagtgcaacatgagtgcatac

SEQ ID NO: 22881 - DNA, 262 bp, Glycine max
  Clone ID: 700951939H1
gtgaaagacgtcagaatgtacagtcaagacaagataatagctaatcatatcataaaggtccataaatcagctggtggaaggatgggagagagcagaactttgaaagaagagaattggctgaagaggtatttacaatattgtcgaactcaatgccaccctcgtctatctgaatcagcaacaacattattgcagaatcattatgtgaaaatcagacaggatatgagacaacaagcgaatgaaactggagaagctgcagcaatac

SEQ ID NO: 22882 - DNA, 261 bp, Glycine max
  unsure (1)..(261): unsure at all n locations
  Clone ID: 700951940H1
atacaatggaaacatgaaaccgtggctggagataagtattcgccaagttccgaggttattggacaaagtatgttgactacaatcttgtgtatttacgagaatgcaacatcaatccatagaaggatctggtggcatgtgtagggcatgaaatttatttaaagcttttatgattattttttatacattttcctccctgtatggaaaaagatcccaagccaaaatcacgagtatgaaatgtgntcgttcgtttcctttggctgt

SEQ ID NO: 22883 - DNA, 260 bp, Glycine max
  Clone ID: 700951942H1
cttttgctttatgttattacagcaaactgaactgaagcaaattccatccatgtctcggcttcaaaagtcaacaggtcagcagcaaatgtttcattccctacaccaaattctgtccccatacatgtcaagtgttgttgtatctgtgttattgtggcatgtcattgctgtgcttttggtttcaaatttggcctttgcttcaagccttgaggaaacaaatggacacccaaaacacaaaggtgaggtgatctatgcccacaatg

SEQ ID NO: 22884 - DNA, 169 bp, Glycine max
  Clone ID: 700951944H1
agtttttctctcaaccggcccaatttagcataagcccagcatggccaccgcaacagcagcagccacctcgtccttcatggggacgcgcctcctggaggcccactccggggcggggcgggtgcaggcccggttcgggtttggcaagaagaaagccgccgccccgaagaaa

SEQ ID NO: 22885 - DNA, 261 bp, Glycine max
  Clone ID: 700951945H1
atgagctttgattagtgtggcctagttgttgttttctcgatgagaaaggcttcttccactatgcattgcgcacttctgcgcttttgggttcccttgttgctgcttgctagcttcagctatgctccttctgtttcggccacaactgaaatttcagggaatgaagtgaacacagatgggaaggtgataaatgaagagttagcaaaaccaagtctaaaaggacatgatgaagaagcaaagttcaaaggattttttccaaaacca

SEQ ID NO: 22886 - DNA, 262 bp, Glycine max
  Clone ID: 700951947H1
attttataaagcattttcaagtttctctaacactgaaaaggaattgctccatcgcctatttcttcaggtcattacttcgttgcatgaaaacttagaggatgggtttgagacggtctgtcttcaaacacaggcaggagctactcttgatgctgtggaggaaattgtggaagaacaagatctggatgtcttattttcagataggagtaacataatggatgttgctgagaatctgtctatggcaaagaagaatgaaatccaacac

SEQ ID NO: 22887 - DNA, 263 bp, Glycine max
  Clone ID: 700951948H1
ctctttctttctctcaaagtgttgaacttgaagttgcagagagaaaatggattgagaattctctctcttttctctttctcttcccaactttccttccttgggatcattctgcttctttgctatggaagactcagattcagttgctacgctgatagattccacaacttctaagatacagcagctgcaaaaggcatttgctgaacttgaaagttaccgagctgttactcctgaacttgaaatggaaagaactcgaggaacatttt

SEQ ID NO: 22888 - DNA, 126 bp, Glycine max
  Clone ID: 700951949H1
agcgccttcgactacaccccaacgccgtcgtcttctctgtttcatccttccgctctttatgttactcatacgctcagtctcaaacacaaacacaatctctctctccttcttctctagatcagatct

SEQ ID NO: 22889 - DNA, 261 bp, Glycine max
  Clone ID: 700951951H1
gagaacaaagcacttagtgctattcaataattacgaaaaaccaacagcgagtgttgtttttgtttggtccaggctggaccagggaatgaatagagatgagaggctttcggttgaagagaactgagttaagcggcgaagccaaacgcagaatcggcggcagaaattgccaccggaagcacgtcgaagacgggtgaaccaaacacaaaattccatccaccacttctcttttcaatccccaactcaaatctgtgaagaaaatct

SEQ ID NO: 22890 - DNA, 259 bp, Glycine max
  Clone ID: 700951952H1
tgcaaagtaaatgttatgaatgtgtgtcttctatattgatgacactgaaaaaagagctggatagtttatatgccccaacagaaaatggcgaggtgccaacagcggttactgttgaaaaatctcttttcattggacgattattgtttgcattccaaaatcattctaaacatatacccttgatacttggttctcccagattttgggttaatgggaatgcatctgcagttgggaaattaccagctctggtaaaacaatctcg

SEQ ID NO: 22891 - DNA, 86 bp, Glycine max
  Clone ID: 700951954H1
ccttatctcacccttctttgactgttctcccacaccacacccatgagactcctcctgctccttattctcctctttcacgcggcgga

SEQ ID NO: 22892 - DNA, 259 bp, Glycine max
  Clone ID: 700951955H1
gtgagattcccatcaacagttctgactcacttgttcagagttatgagattcccagcaacagttctgactcacttgttcagagttatgatgtgattctaaaacccaatgtttcaatggacacatgcaatgtgtttgaaggaagttgggtgagggatgatagctaccctttgtatgatgcttctcactgcccttttgttgaaaggggtttcaattgccttgctaatgggagagcagatagagattacacaaaatggaggtg

SEQ ID NO: 22893 - DNA, 183 bp, Glycine max
  Clone ID: 700951956H1
ggtttttttaataaagttgcattgcatcaactacgtacctggattcttcccttcccagttagacctggattgtaattaatgacgtcgttgcatcatgacgttaccatatgtgtagcttggttgttatgattgtacgaatatgtgcagcagaatgcatattacaattcacaatacgattgaatc

SEQ ID NO: 22894 - DNA, 257 bp, Glycine max
  Clone ID: 700951958H1
gtccaaggcttggtttatttacttatttattggaattggtgcggtcctctttgtcatttcttgtttcggttgtattgcagctctgacacggaatggatgctgcctgagcttttattcagttttagtgttgttgttgatcttagtggagctgggatgtgcagcctttatattttttgacaaaagctggaaagaagaaattcctaaggacaaaactggagattttgatatgatatatgaatttctgagagagaactgga

SEQ ID NO: 22895 - DNA, 258 bp, Glycine max
  Clone ID: 700951959H1
ccgacatcccttctcttccaaatcctgtgatcccattccaatccgttccgttcagctcaatctcaaaatctcaatggccgataatgagcaaccgaataacgaggaggcaagtcctcttctccaccagccccatccccaacccaaatccgaaccaccaacgccacctgagactcccgagtttctcctcggctggaccgctgatgggctccctctggcccacgccagcgtcgtgggccagcccatgggccgcgccccttg

SEQ ID NO: 22896 - DNA, 259 bp, Glycine max
  Clone ID: 700951960H1
tggtaaaatgttgttttataagttgtgtacaatgcattttctgtgcaatgattttgatttttaaattgctttattgatttattatgtataaatacataatcattcaattatatagaatatatttttgcctttgcattatttttaattatgtataaatatattatttctaaattatttgacttggtttttacatgttacatataaacctgtgtaggtgaaatccataccattcagtggaactggcaagcacaaatacagt

SEQ ID NO: 22897 - DNA, 260 bp, Glycine max
  Clone ID: 700951961H1
cttctacattagttcttgttattcattattcattctcagcttcttttcttctggggggcaaaaggggtcacttttcagatccgagattgagctcctttacccatcatcatcatggagctcctcgggtacctgaatcagggtcacccttctagaggaacaacacttgttattactctttcattggtgctttcgacacttgtgtccttctccactttcacacatgccttctcttcttctgcgtttccggaactgaatcctat

SEQ ID NO: 22898 - DNA, 263 bp, Glycine max
  Clone ID: 700951930H1
ggaaagatgatattgcagttcttcgtgctttcacagagaggcgataacatcgtctaccgcgactatcgtggtgaagctcaaaaaggaagcgctgagacatttttccgaaaagtaaagttctggaaagaagatgctgagggagatgctccacctgtttttaatatagacggtgtgaactacttccacgtaaaggttgctggattgctatttgttgctactactagagtcaatgtctccccttctcttgttttggaacttttaca

SEQ ID NO: 22899 - DNA, 261 bp, Glycine max
  Clone ID: 700951962H1
cgagaatgggtttatcactcttacggtgggttctgccgctgactctgttgctcacctgcgccctaggtttccaatcggacgagcttctcctcgacgacgaagagttcggcatcgaaggaggacgaacctcctttgattccgattcgcatccaccttccaccgcctccacctcgaggaagaggctttccgactcctcctccgattccaagatccagttccctctccaacacgctttcggcgactccgatttctccgacgccg

SEQ ID NO: 22900 - DNA, 257 bp, Glycine max
  Clone ID: 700951963H1
gtaagctcccaagcagtgggaggaggctcgggactctgaccgcgtgcctgttgaagaatgagccggcgactcataggcagtggcttggttaagggaaaccaccggagccgtagcgaaagcgagtcttcacagggcaattgtcactgcttatggacccgaacctgggtgatctatccatgaccaggatgaagcttgggtgaaactaagtggaggtccgaaccgactgatgttgaagaatcagcggatgagttgtggtt

SEQ ID NO: 22901 - DNA, 270 bp, Glycine max
  Clone ID: 700951902H1
agagagaggagcacaccatcgacaacatcctacacatgcagcttcacagagaccccaatgtcttgtttgtcggatacaagcttcctctcctcttcaatacaaaattattgtcagggttagcgtcttttccttattactactattgctgccttctttcaatttcatggaatagttcaggtttttgttctaagctatttcgagcatatagttagttagggttaaagaataagacccaaatcctacttttatttggaataaatgtggattgca

SEQ ID NO: 22902 - DNA, 267 bp, Glycine max
  Clone ID: 700951903H1
catttgctggtgagaggtgaccccatctctcttttatctctctcttccaaaaagcaccgatttttgcgcacgccaacgcgaatcgcgaagagggtctcaccgagaacaaaaaatgggtgtttgtgggtcgaggcccaaagtgaacgaagaagacctctcatcaaagaagaagaacaacaacaacaacaatcatcgaagaagaagaaggagaatcctcagaagacgcgtatcttctagaaagatcgaagccaacaacgtttctcactc

SEQ ID NO: 22903 - DNA, 263 bp, Glycine max
  Clone ID: 700951904H1
cgccggggccattgtttacattaagatagaccttgcgttgcaaacaactatggaagggcttgtggtggccatgtccctgattggagcaacggtaatcaccacatgctctggtcctatagcggattggctcggtcggcgacccatgatgataatctcatctgtgctctatttcttgggtggtttggtgatgctgtggtccccaaatgtgtatgtgttgtgcttggcgaggctacttgatggatttgggattggccttgctgtga

SEQ ID NO: 22904 - DNA, 260 bp, Glycine max
  Clone ID: 700951905H1
cggatgagatgtacaccacaccggaggatcttgttaaggtcgtttaccactccgcgaaccggattgcgcccgctcacgaagggatggaattgggtattggcgacacttccatcgtcaaggcgcttgctgaggcgtacggaaggaccgaggtgtggattaagactcagtatcagaaaaaaggggatttgggcttggttgctaaagagagacgtacctcgcaacctatgatgtttaagcccgaagacattgactattacgaa

SEQ ID NO: 22905 - DNA, 262 bp, Glycine max
  Clone ID: 700951906H1
cgaggatgaaaagattgaactttcacataggagaaaacgaaaacgaacaataatgaatgataagcaggtgatgctgattgagagggcactcaaagatgagcctgatatgcagcgaaatgcagcttcacttcaatcatgggctgataaattaagtgggcatggttccgaggttacatcttcacagcttaaaaattggttgaacaatcgaaaagctaggctagctcgcacagctagggatgttaaagcagcagcaggtgatgac

SEQ ID NO: 22906 - DNA, 263 bp, Glycine max
  Clone ID: 700951907H1
gtcattgaaggctctctcccaccgtctctcgacggcgcctacatccgaaacggccccaacccccagttcctcccgcgtgggccctaccacctcttcgacggcgacggcatgctccacgcgcttcgcatctcccatggcaaaaaacccacgctctgcagccgctacgttaaaacctacaaatacaccatggaaaacgacgccggtttccctctcatccccaacgtgttctccggcttcaactccctcgtggcctccgcggcacg

SEQ ID NO: 22907 - DNA, 263 bp, Glycine max
  Clone ID: 700951908H1
gtcatttctctctccggcgagaaagaaaaatgcagcatttcatggatttgcaagcgaattcggagttgggtgagtcgaattcatggctttcagtgaaagagcagtccggtgcggcacccaacaccaatttggatcgcgtcctcttcaacgacctcgtcgagattgtccctctcgttcagtcactcatcgatcgtaaagcaagccgttcattcacgcggcgtggttccatgatctacaccaagacacccaccagagaatcattg

SEQ ID NO: 22908 - DNA, 264 bp, Glycine max
  Clone ID: 700951909H1
aattaagcaccacaccactctccaatatccccaacatggctcaagtgggttctctatcttccgaaatggagacactgaatcatgtcctagccctagtggaggcattccgagcatttgacgcggacaacgatggccgaatcacgcaggcagagctaggaggaatcttggggtcactcgggtacaaccctagcgagcaagaagttagggcaatgattgaacacggcgacaagaacaaagacgggttgttgagcatccacgagttct

SEQ ID NO: 22909 - DNA, 262 bp, Glycine max
  Clone ID: 700951910H1
ccaattctctgaaatcgtatccttcaaatgctgttttgcctttacaaagctatacaaatgagtatcaggtatcttgttcaggactctccggagttgccactggtgctacctcttcagaagtttgctctggtgcaaataatttttctttgcaagattttgcagttggacgtagtagcctttctctccctcatgatggtagacaacggtcaagtaatggttactcctgtaataaaaaggtgcgtgaaaatggaagaatggtaag

SEQ ID NO: 22910 - DNA, 264 bp, Glycine max
  Clone ID: 700951911H1
acgagatttctgatgatgatgaagcctccacaaagagttccaaggataaaaagtcaaatggacctgattctggaaaagcatcaaaccttattttcaagattacaagcaaggtcccttacaagactgttatgaaagctcaaagtgcagttttgttaaaggctgagagtatggcagataaggttgagtggatcaacaagttaagaagtgttgcacaggctaaaggaggtcaagccattggtgaacctagttttcctatgcgacaaa

SEQ ID NO: 22911 - DNA, 102 bp, Glycine max
  Clone ID: 700951913H1
tcccaatacagggaggcttatcagttgggttgatagcattgatatatcctgaaatcctctactggggttttgagaatgttgacattttattagaatctcggc

SEQ ID NO: 22912 - DNA, 265 bp, Glycine max
  Clone ID: 700951914H1
ctggccttggaagtatctggttccatggatgagggaagacctatttgctaggagagaagctaggtacagtaggggactgaatatcattgaaagcaatgattcttatgacatggaagattttgcaatgccattacaagaatacatcaatgatcctgtggctgtggatgttgtacataatggagccacattccaggttgcaggtttgacaaacaattcttatatagcagaagcacatgaagtgcgccattgtgtacagaaatataag

SEQ ID NO: 22913 - DNA, 265 bp, Glycine max
  Clone ID: 700951915H1
gttgcgaagtcgtgcaactatcccagattatgcttataaggcaattgatgcattgcctgtttctgctcatccaatgactcaattcacaactggtgtcatggcccttcaggtgcagagtgagtttcagaaggcatatgagggtgggatagctaaggcaaggtattgggagccaacttatgaggatacaatgaatctaattgctcgtttgccagccattgctgcttatatttatcgacggaaatacaaggatggaaaaatcataccg

SEQ ID NO: 22914 - DNA, 267 bp, Glycine max
  Clone ID: 700951917H1
aggaaatggagttcccaagattcaacactgataaaagccagtcttggtcaagcatcttctggtgaaactcgggaacatctgtatcataattttgagactgatcctaatagtggcagccttggttcaaaaactaaggatcttgcttatgccgtcaatccaatgggtcaaaactttggctctcaaactagccaacatggacacatggacagtagcgtgacttagagggtctttcaactcctcgtctagatgtaaacggtttgatgtcat

SEQ ID NO: 22915 - DNA, 265 bp, Glycine max
  Clone ID: 700951918H1
tctcagacagtttcttcaaatcctagctccttccctgagaccagcataatcgcccgtccagggagggagcagcagcgcaagggcttgagtcctggtgccattgtggccatcgtgatcgcgaattgcgtggcactgctcgtggtagtgtcgttcgcggtggcgcattgttgtgctagagggaggggttcgagtttggtggggagtggggagagctacgggaataggaagattgagagcagctacaatgggagtgatgagaagaagg

SEQ ID NO: 22916 - DNA, 263 bp, Glycine max
  Clone ID: 700951919H1
ggctggcttagtagagtgcaagagactaattgctggcattgggaaaatgatgagtgtccaagtcattattgaaggatcaatgaacagttcaaacccctatttttcaagctcttggaggcgcaatttcactggaggtttcattcttgatatgggtgtgcatttcattgcagggttaagaatgcttgttgggtgtgagattgtttcagtttcagctatgacatctcatgtggatttgaccttacctcccccagataatatatcat

SEQ ID NO: 22917 - DNA, 263 bp, Glycine max
  Clone ID: 700951920H1
gcctgtgaagagaaatacctcaacagcaagacagaggagagcacccacacaggaaggtcgcacttgccatagctcgcgatcggcggtgcaccttgatatacctctgacagggccaaaatggctcaaagaggcatgggtggggcgacttagaaacccggccttattcaacagactcgaagaggaacttctgtgggatatcggaactaatatttcggtgaaatatatgggggacgacatggttctgctccttggactcacagatg

SEQ ID NO: 22918 - DNA, 265 bp, Glycine max
  Clone ID: 700951921H1
cgagcaaccatggcaatggcaacccaagcctctctcttaaccccacccctctccggtctcaaagccagcgaccgcgcctccgtgccatggaagcaaaactccagcctctccttctccagcccgaagcccctcaagttctccagaacaatcagagcagcagccgccgacgagaccacagaggcaccagcaaaagtagaggctgcaccggtcgggttcaccccaccagaacttgacccaaacaccccttccccgatcttcgggggca

SEQ ID NO: 22919 - DNA, 262 bp, Glycine max
  Clone ID: 700951922H1
cttgctgaggctgcagcaacaccaagataggaccccattttatccatctgtgttataaaccaccaactggacctgtcaatgtcaagttagcattagtcggaaaaggtttgacttttgatagtggtggctacaacatcaagacaggacctggctgtttgattgaacttatgaaatttgatatgggcggttctgctgcagtttttggagcagcaaaagctctaggtcagatcaacctcttggagtggaggttcattttatagtt

SEQ ID NO: 22920 - DNA, 260 bp, Glycine max
  Clone ID: 700951923H1
ctgatattatatttccaatttgctgtcaaaacattattatcgatcaatttgaaattgatacagagctgagagcatcaaggaatagaatagaagattcatttttccattttgatatggaagctgatgtttctattatttttgccgcgttttcaaaaccctaaattgaagaaatcccaatttcccctcctctctctctgctttggatgattttcaaccaaaaatctgtgcttttgtgcttttcgaatcttttgctctgatgg

SEQ ID NO: 22921 - DNA, 261 bp, Glycine max
  Clone ID: 700951925H1
ctatttcctcttcttcatcacttgaatccaccaagtccttctcctcacacacataaaaacaaatatcctccacttcttctacccccagcagtagaacaagaggtgccggagcaagtttcgtcacgccggaacgatgaccggcggcggatccacggggaggttgccgacgtggaaggagagagagaacaacaagaggagagagagaagacgaagagcgattgcagctaagatctacactggccttcgagcccaggggaacta

SEQ ID NO: 22922 - DNA, 260 bp, Glycine max
  Clone ID: 700951926H1
agacaagccaagtgaaagagagaagataagtcaaagacaatgtcagggatcattcacaagattgaggagacccttcatgtgggaggccacaagaaggaggaggagcacaagggtgagcagcaccatggtggagaatacaaaggggagcatcatggtgaacacagtactgaatacaaaggagagcatcatgttggtgagcacaagccggagcaccatggaggagaagagcacaaagaggggttcctagacaagatcaagga

SEQ ID NO: 22923 - DNA, 261 bp, Glycine max
  Clone ID: 700951927H1
ggcaatggcaacccaagcctctctcttaaccccacccctctccggtctcaaagccagcgaccgcgcctccgtgccatggaagcaaaactccagcctctccttctccagcccgaagcccctcaagttctccagaacaatcagagcagcagccgccgacgagaccacagaggcaccagcaaaagtagaggctgcaccggtcgggttcaccccaccagaacttgacccaaacaccccttccccgatcttcgggggcagcaccgg

SEQ ID NO: 22924 - DNA, 261 bp, Glycine max
  Clone ID: 700951928H1
ctctctctctctctctctaacacggagtgatggctgtgcagctgtgggaaaccctgaaggaagccatcgtagcctacactggcttctctccttccaccttcttcacggtgctggcgcttctttttgccgtttactacgtcgtcacgggtctctttggctcctccgacgatcaccatcaccgccaccgccacgtcgaggaggaggaggagatgccgcctctgcgccccccggttcagctcggcgagatcacagcggaggagc

SEQ ID NO: 22925 - DNA, 274 bp, Glycine max
  Clone ID: 700951901H1
cattatacactttcatttagtccttgtgtgtatctgttgacaaacatgggaaccacttgtccagaatcaccaccacttctccaagacctaagggttaccatccacgaaacttcaatggtttttccatccaaagaaaccgagaagaggtcattgttcctatcaaacatagacaaggtcctacaacttcgaagtggaaacggttcacttctttggagcaaacaaagattttccaccccaaaaagtggccaagatgttcaagaatgctctagaggat

SEQ ID NO: 22926 - DNA, 266 bp, Glycine max
  Clone ID: 700951869H1
caaaaccctgaagaaagacacagccattgtttgtttactttccattgattgagcgaaagtttgttttttctgcgatcattttccattgggtggaagaaagtctcaacctttagtcgaaagagcaaggatctgagtgagtgagcgatcatgtgtggtggtgcgattatctccgacttcattccagcgggtcccgccggcggggcgcacgcgtgaccgccgacatcctgtggccgaatttgaggaagcggttctcgaagtcgctgctg

SEQ ID NO: 22927 - DNA, 268 bp, Glycine max
  Clone ID: 700951870H1
gtccctttctgaaccacttaaagagtcaacagttgaaggccgagctgctctgttggcaaataacaaaatgcctcatccatttattttgatcaaacccaaggatgagcctgttgatgatataccagattatgagattccccttgcagtgattcctcctgactctccaatgggtgcagttgaaaagcaagatgtccatgacactgttgtatcacaatgcagagatgaagacgttgaacatgaagatgtttttccttcctcaaatgaagaa

SEQ ID NO: 22928 - DNA, 253 bp, Glycine max
  Clone ID: 700951871H1
tatggctcgtcactccttgctcttagccctcctcctcttcgccgccgtggccaccgccgcgatggcgtggcgcgtccgacgccgacgacatcctgatccgtcaggtggtgccagatgttggcgaagccgaagaggaggacaacctgctgaacgccgagcaccacttcgcgcgcttcaaggccaagttcgccaagacctacgccaccaaggaggagcacgatcatcgcttcggcgtcttcaagtccaactccgc

SEQ ID NO: 22929 - DNA, 266 bp, Glycine max
  Clone ID: 700951872H1
aattgttgtaactttttgattcctaaattctctaaaattcgaaattctaatttcgttaggggaaagagattgtttgtgtgtgagtgagtatggctggaaaaggcgagggtcctgctatcggaatcgatttgggaacgacgtactcttgcgtcggcgtgtggcaacacgatcgtgttgaaatcatagccaacgatcagggtaacagaactaccccatcctacgtggctttcaccgacacagaacggttgatcggcgatgcggcgaag

SEQ ID NO: 22930 - DNA, 264 bp, Glycine max
  Clone ID: 700951873H1
agacagtaactactggtagttagttatgtattagaatctgtaggatggcagctatgtaataggagtatatatctgattgtagattgtgtaattgggcagtgtgaagttatttgtagtttgtggacagagaatacactctgtaggagacttttgtctctgggacagcaagtgtattgctgtatagtgtgtgattccagtgttctatatgatattttattatgttatcaattggtgttctatcaccttgggagattgagcttgaag

SEQ ID NO: 22931 - DNA, 251 bp, Glycine max
  Clone ID: 700951874H1
cgcaacaaaaagaaagaatcccaggcgaggagaaagatggaggggaaggagcaggatgtgtcgttgggagcgaacaagttccccgagagacagccgattgggacggcggcgcagagccaagacgacggcaaggactaccaggagccggcgccggcgccgctggttgacccgacggagtttacgtcatggtcgttttacagagcagggatagcagagtttgtggccacttttgctgttctctacatcaccgt

SEQ ID NO: 22932 - DNA, 264 bp, Glycine max
  Clone ID: 700951875H1
atataaggcaattcttaaatgggcagtaaagttgggtatggattttgatgttataagatcaaattcaacagttctccatgtcttccccttcaattctgagaaaaagagaggtggtgttgctttgaagctggtaatcatttgataaaaacatttactgatgcatcctttcatttagagcaatctgtgaactagtacgagacatgtattcatccttgtttcaattgataactttcacttgtgaactaagttaagttgtaatagtga

SEQ ID NO: 22933 - DNA, 263 bp, Glycine max
  Clone ID: 700951876H1
ataagaagaagggtgagctaaagtcaattttccttcctttcctttccactagtcacataatcccgctagtggacatggccagactcttcgccttgcacgacgtcgacgtcaccatcatcaccaccgcacataacgccaccgttttccaaaagtccatcgatttagatgcgagtcgcggtcgccccatcagaacgcacgttgtcaacttccccgccgcacaagtgggtctccccgttgggatcgaagccttcaacgtcgatacg

SEQ ID NO: 22934 - DNA, 264 bp, Glycine max
  Clone ID: 700951877H1
gatcttttcctctgagaagacgtgtcggtagctgaagcattttgtaagcctccactttcctgaactagttttaacatacaatctttcaagtacacctccccagcttccatttaagaatggagatcactagaataggccaatggttaagtcttctgatatgtgtactactattactgcagacagaaggggttcctgtgggaatcacttttgttgaaaatgcagtggcaaaaggggctgtttgtttggatgggagtcctccagctt

SEQ ID NO: 22935 - DNA, 264 bp, Glycine max
  Clone ID: 700951878H1
gtcctttatagcagcaacatacccaaagttgacgcgccaatgtctttaaatgcaatggcatttacaaaacttagagtttcatcgtttacaagctcacttgctagtaacaattcaaggccatccatttatcaaccatggaacttatcgttgcaatcatcaaaaataggaatggtgccaaataaattatccatcaagtccgttgcttttagtgacaaggtgcctagtcaaacttatcttggtacgaaagatttggatcaagttata

SEQ ID NO: 22936 - DNA, 268 bp, Glycine max
  Clone ID: 700951880H1
attgaaaggcaagatgtgaagcaaatggtagttgctacacttgctgaatctggcatgaacctatcagatgatgttatagaaagtataattgacaaggttttaccccattttctataacttacatttctaagttctaatagtgcacatgagtcttaagagtctcattttctctttttgaaaactcacatggatagtttcaacattaaattttggatttctttagaccttcgaggaagcagatacaaagcatgatggcaagattgacaag

SEQ ID NO: 22937 - DNA, 278 bp, Glycine max
  Clone ID: 700951881H1
gaattcggatcgagctaaagcacaagaagttcctgcgaaaattccttctcagcaagtgcctagcttcacatcctcttgggcagttgatgacttgttggaattaacagactttgaatcaccagacaaagttcagaagcaatcccttgagtttggagaacttgaatggctagcagatgtaggcctttttggtgaacagtttcctcatgaagctttagcggcggctgaagttcctcagcttccaatgactagcagtgttggctcacacaaagcccccaaat

SEQ ID NO: 22938 - DNA, 254 bp, Glycine max
  Clone ID: 700951882H1
aagaaatcaaagagaaaacaaaaatgactgatcgaagtccacgagtgcttttgcgagattatatctatggtgggatgagaaccaacaaccaaaagaagaagaaaaagctacccttttgtgcatgtgtgcgacctcccaccaagggagattgattgttaccatatagtttgaagtaagtgagacattagctttcttgtttgtaaaattttgtttctaaggatgcttcaagaccctacatattttgatcatcctag

SEQ ID NO: 22939 - DNA, 266 bp, Glycine max
  Clone ID: 700951883H1
caacctcacagcaagtgggcctaggcccaacccgcaaggctcctaccattacggtctcataaacacaaccaggaccatcatactgtcgggttcaccaggtatagtgaatggcaaacaaagatacgcaattaatagcgtgtcttacgttgctccggacactcctcttaagctcgccgactacttcaaaatccctggcgttttccgtgtgggaagcattctgacaggcccatggcggtggcatataccttgacacatctgtgctgcaa

SEQ ID NO: 22940 - DNA, 151 bp, Glycine max
  Clone ID: 700951884H1
ctagttctagatcgcgagctgccgccctattttttttttttttagaaatggcgaatagagaagaaaacaaccacggtcacaaattcacagtgaaatatgttggcctcaacggaatggaatgcgaaggcaaattgccgaggagggtggtggc

SEQ ID NO: 22941 - DNA, 260 bp, Glycine max
  Clone ID: 700951885H1
atcccctgcaaggctgtcacctagaaggggatctaaggcgtctaggtggagatggagaacgacctcttccaggagacaccttagatcccctagctggctgtcacctagaaggatgcgtggaaacccaggtcgaagacgttcacctccacctcctcccaggcgccgatcaccacctagacgactacgtagtcctcctagaaggtctccaattggtcgtagacgtactcgctctccaatacgtaggtctgcgcgctcacgct

SEQ ID NO: 22942 - DNA, 160 bp, Glycine max
  Clone ID: 700951887H1
ccattgctgaataagtgcagcaatgcccaaaaatttgaactagaaactttgaatctggatgcagatgatgatcagcttcctgagacatggaatagtaaagaacgaatctaatatgtgtcaggatttgtctagtagaaatccaaaccagaacatgaatttg

SEQ ID NO: 22943 - DNA, 264 bp, Glycine max
  Clone ID: 700951888H1
tgctgacttcctgtttgtttctgatctatggcttccaaggagttctctggtctttgttccttggtttcttcactctccgagagcattttgtgcactactgggttgaaaatgtatttggtggagagcaaaggaggtgccataacatgcatgttcttggctcttttcttcttggggacatggcctgctcttttgactatgttagaaaggcgtggtcgtcttcctcagcatacctaccttgattactcaatcaccaatttcttgtct

SEQ ID NO: 22944 - DNA, 261 bp, Glycine max
  Clone ID: 700951889H1
aaatgaccaagatcttctttgtattgctgttatgtctgatcatagcagcttcttctgggtttgtgaattgctttgatgttgaaaagaaggaaaagattgaaatatttgagctcaataaaggtgacctttctttgaaggtcaccaactggggtgcttcaattttgtccctggtgattcctgataagaatggaaagttgagtgatgttgttcttggatatgattctgttaaggattacactaatgatacaacatattttggag

SEQ ID NO: 22945 - DNA, 157 bp, Glycine max
  Clone ID: 700951891H1
aaagtgagaacacaagatgggtatatatggagaaaacaattataactgcttataataaattaaattggcaatgtaatcgattatttcaagaaagtaatcgatgagatttcccatttaatcgattaaagtgttcttccccaaacctggaaagttttcg

SEQ ID NO: 22946 - DNA, 261 bp, Glycine max
  Clone ID: 700951892H1
aaaattagctcattgtgttgtgttatttattgttgtttttttctttttcgtgaggtggaaaatgatacggacggtgggtttttggtatccgttgaatgtgtatgggtggggaaagtggaggaaaagctgttagtgaactagtcttagctcttaggtatgtttggatacatttctccataaacactttaggtgaaaaaaaatagaaaataaaatgagttggacttctactataagctaatgttaaattttatataagctttc

SEQ ID NO: 22947 - DNA, 260 bp, Glycine max
  Clone ID: 700951893H1
ttccggtttctctctctctctctctctcatggcgaatctagcacacttctccaagagagccctaagaagcgcacacgcgctcgcaaggcaccacgtgcagccgcagctgctggcagcggaacgcgcttttgcgacggaggcggcgaaatcgatatccccgtcggcggatcgcgtgaagtgggactaccgagggcagaggaagataatcccgttagggcagtggctccccaaagtggccgtggatgcttacgtagcaccca

SEQ ID NO: 22948 - DNA, 258 bp, Glycine max
  Clone ID: 700951894H1
ctatgaacaatgatgagctacatgtggttatgttcccattccttgcatttggccacattagtccatttgttcagctctccaacaagttgttctctcatggtgttcatgtcactttcttgtcagctgcatccaacattcccagaatcagatcaactcttaatctcaatccagccatcaatgttatctcactaaagttcccaaatggtataaccaacactgctgaattgccacctcacttagctggaaatctcatacacg

SEQ ID NO: 22949 - DNA, 263 bp, Glycine max
  Clone ID: 700951896H1
gatttgtatgctgcagctaccatattaagatagacttgtgcatccataaatttcttcttgttaattgatcacaaattcagagggcgagccctggtgcagcggtaaagttgtgccttggtgacttgttggtcatgggttcgaatccggaaacagcctctttgcatatgcaagggtaaggctgcgtaccacatccctcccccataccttcgcatagcgaagagcctttgggcaatggggtacgaagtttttttttaattgatcac

SEQ ID NO: 22950 - DNA, 264 bp, Glycine max
  Clone ID: 700951868H1
ctctctctctttttcgcctcattccattttcatctatcaatggctccagtagcagcagcatcttcagattcaatcaagccaagagatgtttgcatcgttggtgttgcacgtacaccaatgggtggatttcttggtactctgtcatctctatctgccaccaagctaggctctatagctattgaagctgctcttaaaagggccaatgttgatccatcccttgtggaagaagtatttttgggaatttcttagtgctaattggggcaa

SEQ ID NO: 22951 - DNA, 271 bp, Glycine max
  Clone ID: 700951839H1
ttatcccaaaactaaaaacctcaccctcatctttctctcaactcccttaaccaaaaccaaaacaatggccacccaaagaagccatcattcccctatcttattttcgtccctcatcttaacccttttcgttctctacttcccaagatgccaccacgccattcccaacaaccccatcaaaaccgtcgtcgttttggtaatggaaaatcgctccttcgaccacatgctgggctggatgaagagactaaacccggccatcgatggcgtgaccggg

SEQ ID NO: 22952 - DNA, 268 bp, Glycine max
  Clone ID: 700951841H1
atttattttatttctatggacttgatcacgaaatatatggattgaattgtgtgcctgtttgttctgcagcggtgggagagtactatttaggttctggtttttattacccttgattatctcatgttcattatggactggctttccttattgtgggttttggatttattgtttttgacagtgtagggttctgtcagagttagacttgacttgatgtttctttttgggaaatgtacgaggataactggttctttatacggatggccccgta

SEQ ID NO: 22953 - DNA, 266 bp, Glycine max
  Clone ID: 700951842H1
ggaaaaacaaaaggcatgaggatgtgatgcccccatttttctagttttagttttatccacaagctttgttttgtgagttgaaactatgtatttgtaacctataaacccacacaactccaacctccaccacccctcatatcctcatatctttcactctttttccttttgttttgtccaagacactggcttctggagtttgagtgatagttctacacctatcataatgccattcaggagcattgtgcgtgagctcaaggagattggag

SEQ ID NO: 22954 - DNA, 268 bp, Glycine max
  Clone ID: 700951843H1
atcgagataactagaaacagtgtgatgaaaatgaaggtccttgttttcttcgttgctacaattttggtagcatggcaatgccatgcgtacgatatgttccctctccgaatgaacactggctatggtgcccgtactccggaggtgaaatgcgcaagttggaggcttgctgtggaagcacacaacatctttggctttgagaccattcctgaagagtgcgttgaagcaacaaaggaatacatccatggcgaacaatatagatcagactcca

SEQ ID NO: 22955 - DNA, 257 bp, Glycine max
  Clone ID: 700951844H1
atatcttcccccgttggcctactatgttattagggacattctaaggaaaggtttgagtgaaaatcctaatgcaaagtttatcattacgggtcatagtttgggtggagcactcgcaatcttgtaccctacgatcatgttcttgcatgatgagaagttgctgattgagaggttggaagggatctacacgtttgggcaaccaagttggagatgaagcatatgcacagtatatgagacaaaaattgagggaaaattctatc

SEQ ID NO: 22956 - DNA, 266 bp, Glycine max
  Clone ID: 700951846H1
acaacacaaggccatcatcatggcagctgcttctcctatggcaagccaactcaagtccaccttcactaaaactcttgtagctcccaagggcctctctgcctcttcaccactccacctcctgccttctaagaggcaatttagcttcactgttagggccatccaatcagaaaagccaacctatcaagtgattcaaccaatcaacggtgatcccttcattggaagccttgaaaccccagttacatccagccccttgattgcatggtact

SEQ ID NO: 22957 - DNA, 284 bp, Glycine max
  Clone ID: 700951847H1
ggaattcggatcgaattgaattgaatttattgaactagagagagagagagagagagaagaaaaatggcatatgcacacggttttgctccaattttcaaattgggttttgtgttttcttctgtatcaccatcacaaaaaaaacaccctttggtgtatcctgcatcacactgtggatataccctcaaattctatgatggggtgttatctgccagatcctgcaagtacaaaaacccttcctttgtaaaacaaggttcaataagaggtttcagggctctgaaatcggt

SEQ ID NO: 22958 - DNA, 276 bp, Glycine max
  Clone ID: 700951849H1
gaacggcgtcgacatttccgtcgccgagggcgaatcccccaacagcttgttcaacatcataggcaacttgctcttccccttactcgcattcgcgggcctgttcttcctcttccgcagagcccaaggcgcgcccggcgggcctggcgggctgggagggcccatggacttcgggcggaacaagtccaagttccaggaagtccccgagaccggcgtgagcttcgctgacgtggcaggcgcggaccaagcgaagcttgaattacaagaggttgttgattt

SEQ ID NO: 22959 - DNA, 273 bp, Glycine max
  Clone ID: 700951850H1
gatttgcatcatgttaggttcattaccaatattgccactccctgctcctccctctgatggaaatctaggtcctctccctgagtctcaagtgattgataatgaggagcagaacaaatcaaattctgtttctgttccagcgccggcaacagttgccacccacaccagaacgattggaattatacatccgcctccggacattaggaccattgttgataaaacctcccagttcgtcgccaagaatggtccagaatttgaaaagaggatcattgcaaa

SEQ ID NO: 22960 - DNA, 272 bp, Glycine max
  Clone ID: 700951851H1
gttgtgggctgctccagcctctgtctgtggttggtcttatcttttgctgaaacttgaaattgaatctctctcaagcttcctttcttaaaaggttaggaatttgaagcagaagtaagaactaggaagagatgggagtggatttgagacaagtggtggcaggtgtcctcaccctcacaatgtttgtcatgcttggaaatatgatcaaaagagaccacttcgataattcacttcaagaaaagcttccaggaggatcggaagatgccaactttgaa

SEQ ID NO: 22961 - DNA, 271 bp, Glycine max
  Clone ID: 700951852H1
gtctctctctctcggtctcgctcttcttctcatcaagcacagagttacagactcaccgatcttccgattctctttcgtcttggtttatgagctcgaaggagagacccactcttggtggcacgcggattaagacccgcaaacgaaatattgctgcgccgctggaccctgcagcattctcggatgcagtggtccagatttatttggataatgctggtgatctggaacttattgctaagagtattgaatcttcagaccttaacttttcaagata

SEQ ID NO: 22962 - DNA, 265 bp, Glycine max
  Clone ID: 700951853H1
gcattccaatcgctcccaaaatcttttctaatttgttcataactcaataattctcatcatgggctccttgattgttccaggtgaacatgatcacaaactaaagcttgtttctcttccctttgtatcaaccagtcacctcattcccgtagtagacatagctaggctctttgccattcatggtgttgatgtcaccataatcaccaccacagccactgccgccattttccaaagctctatcgatcgcgaccgtgaccgcggccacgct

SEQ ID NO: 22963 - DNA, 269 bp, Glycine max
  Clone ID: 700951854H1
tgttcacctatgaaaaagacagaaatgtctaccagagatgcctttttggtggagggagagaagaccagtgtgacgctggctggagatgcgtcatgcgtcgtgtgcgtgaacttcacacgctagggctcttcatggggttgcatgcggagatggttggagttgctgtgcatgtggacgacgtggtggtctttggtgattggtgacagtggtcgaaggtgagtttcgatgaaaaggcattgggaaatctgccaaataagggcagagcatcc

SEQ ID NO: 22964 - DNA, 264 bp, Glycine max
  Clone ID: 700951856H1
aatttatgcagtatcaattacaattcgtattgtgcttggttttatgttgctggctctcatttggaagtttgactttccaccctttatggtgcttattatcgctatcctaaatgatggtactattatgacaatttcaaaagatcgtgtaaaaccatcacctctgccagatagctggaagctagcagagatatttactactggagttgtgcttggaagttacttggcaatgatgacagttatattcttttgggcggcatacaaaac

SEQ ID NO: 22965 - DNA, 264 bp, Glycine max
  Clone ID: 700951858H1
atcgaacagcactagaagaagacgatggagaaagaggagagcacggaacagcgaaagcaagcgatgctcgccattatggagctcgctaacatgataagcgtaccgatggcgttaaacgccgtcgttcgcctcaacgtcgccgacgccctctggcaaggtggcgccaacgctcccctctccgcctccgagatcctcccccgcatcctccccggcgccgacggcgcgaacgccgagatactccagcggctcctccgtatgcttgcc

SEQ ID NO: 22966 - DNA, 264 bp, Glycine max
  Clone ID: 700951859H1
gtttttaatcaaggccatgcatggttgttgctgcagagaaagaaattaccattcttttatgactttttgtgattaattgattgtgtaggttgtcaacattgcacagtggaagggatatctgttgtaacataaaattccaattagaggaagctcctcctgtgtaagtctttcggggatttcgacttgcattttgtgtataataaaagatgaagaagttggaggtgcaaaaaaaaaaaaaaaaaaaaaaaaaaaaaaaaaaaaaga

SEQ ID NO: 22967 - DNA, 266 bp, Glycine max
  Clone ID: 700951861H1
cgataactaggaagtttcctaaacatcccttctttcaaaaaaccaatggctttcaagaacttgtccgttcttactctctgtgtttcccttgtgctttccttctttgcaccgaattccatagctgctaacaaccgtgcagtggttcctccagaaaccatttgcaactccaccgtaaacccttccttctgcaaaaccgtgcttgctaatcaaaatggcagcatcgttgactacggtcgaatttctgtccgaaagtccttgtcccagtc

SEQ ID NO: 22968 - DNA, 265 bp, Glycine max
  Clone ID: 700951862H1
atatcactgagttccagaccaaccttgtgccctaccctaggatccacttcatgctttcgtcctatgctccggttatctctgccgccaaggcctaccacgagcagttgtcggtgccggagatcaccaatgccgtgttcgagcccgccagcatgatggccaagtgtgatccaaggcacggcaagtacatggcttgctgcttgatgtaccgtggtgatgttgtcgctaaggatgtccatgctgctgtagccaccatcgagactaagag

SEQ ID NO: 22969 - DNA, 264 bp, Glycine max
  Clone ID: 700951863H1
gtcccaatcccatatgcttgttaactgtggcggaatcaccgtaaccccaaggagactccggacaatagctaagaaacaggtggattacttgcttggagacaacccattgaagatgtcatacatggtggggtatggtccacggtacccacgaaggatacaccataggggctcatctttaccgtcgattgctgtacacccgggaaagatccagtgttccgcaggttcagtgtgatgaattcgcaatcccccaacccaacattctcg

SEQ ID NO: 22970 - DNA, 269 bp, Glycine max
  Clone ID: 700951864H1
cagaggaattcgttttctctgatcgggatctggaagggaagcgaatcgacatgggtttcttggtgacgacgctgatcttcgtagtgatcggaatcatcgcgtgcctctgcaccagaatttgctgcaacagaggaccttctgccaatctatttcaccttactttggtaattactgcaacaatttgctgctggatgatgtgggcgattgtatatctggcacagatgaaaccactcattgtgcctatactgaacgagggtgaataagtctct

SEQ ID NO: 22971 - DNA, 250 bp, Glycine max
  Clone ID: 700951865H1
aatataaaatgatgaattcagattttctttaatcactgtcagctatgctaataataagttattctccaaatactttggactttgaatgttatgttttctcgcagtgtacctatcactaattgagcttagcttcagatcaggccattccaagattgtaaatgcttttacaagagtaaggagtaataagaagggataatataaataaaaaagcattaatattttcatctgttgttaattctcatatatcata

SEQ ID NO: 22972 - DNA, 273 bp, Glycine max
  Clone ID: 700951866H1
ttcctgttgatatatggagcttgggatgcacaattcttgaaatggcaacatcaaagcctccttggaatcagtatgaaggggtagctgcaatatttaaaattggtaacagcagagatatgcctgaaattcctgatcatctctcaagcgaggcaaagaaattcattcagctatgcttacaaagagatccatcagcccgcccaacagcccagatgttactagagcatccctttattcgagatcagtcattaacaaaagcttacaatgtcagaataa

SEQ ID NO: 22973 - DNA, 267 bp, Glycine max
  Clone ID: 700951867H1
ctctacctctcccttcaagatgcagatcttcgtcaagaccctcaccggcaagaccatcacccttgaggtggaaagctctgacaccatcgacaacgtcaaggccaagatccaggacaaggaaggaatccccccggaccagcaacgtctcattttcgccggaaagcaacttgaggacggccgtacccttgctgactacaacattcagaaggagagtactcttcacctcgtcctccgtctccgtggtggcatgcagatcttcgttaagac

SEQ ID NO: 22974 - DNA, 273 bp, Glycine max
  Clone ID: 700951836H1
gtagaataagagtttaacggaaaattgggatttgggtcaacagctataaaccctaatcaactaactacaatttgcgttgctaaatggaacatcggaacacagaatcagaagctggagatgtttcttcagccacagcagttctccttggagctttagctcctggtgttaatgtccgtattttcactcagcgatctctcccatttttaatttttatactcttttttcattagatttttgtgattttattgttttttgattcagggtcctacatgg

SEQ ID NO: 22975 - DNA, 273 bp, Glycine max
  Clone ID: 700951807H1
cccgctcaaaggtctacttctcccccaagctttactatcttagagttcaagtaatcgaggctcaggatctcgttccttccgaaaaaggaaggccccctgactcccttgttagagtgcagctagggaatcagatgagattcacccggccttctcaaattagaggcaccaaccctgtttggaatgacgagcttatgtttgtggccgccgagccatttgaggattttatcattgtcactgttgaggacaaagttggtcctaatgttgaaatcttag

SEQ ID NO: 22976 - DNA, 273 bp, Glycine max
  Clone ID: 700951808H1
ggagaaagttctaataatctcgatgaaagtcaaaaatataagcatttgtggcttgaatgcgaaaattgttatggattaaattataaaaaattttttaaatcaaaaatgaatatttgtgaatactgtggatatcatttgaaaatgggcagttcagatagaatcgaacttttgattgattcgggtacttggaatcctatggatgaagacatggtttctctggatcctattgaatttcattccgaagaggaaccttataaagatcgtattgattct

SEQ ID NO: 22977 - DNA, 271 bp, Glycine max
  Clone ID: 700951811H1
cttctgcccccttttccacttcaattaggtatatcgccgattcgattaccaatttgcttaaactcaatcaagcttcgcagcgtcaatcattctattagaggtgatcataatccatgtaattctcgtacttcatccctagttatattttgtatcaaaaccctaattttacatccttcacgcgcttaatccttgtattttctttgcgcgattggtttttctgtttgcaattcgatgctcagttcatgtttttccaaaaattcttgttgtccct

SEQ ID NO: 22978 - DNA, 275 bp, Glycine max
  Clone ID: 700951812H1
ccgccacctccagctccaccggccgcctctccttcggcaccaccaccacttcctacgtcaagtacacccccttctccaccatctcccgcggctcctccttctacggcctcgacatcaccggcatctccgtgggcggcgccaaactcccagtctcctcctccaccttctccaccggcggtgcaatcatcgactccggcaccgtgatcacccgcctcccccccaccgcctacaccgccctccgctccgccttcaggcaaggcatgtccaaatacccc

SEQ ID NO: 22979 - DNA, 269 bp, Glycine max
  Clone ID: 700951813H1
gtacaatcctgtatgtgattctgtactttcggcagatgcaaaggggataattgaatactggagccctgctacacttcaattcccagagaatgtggtcgattttaaattgaaaagtgacactaacctctttgaaattgcaaaatgcaagacttctgtttcggctattgaggttagtccagatggtaagcaattttccattacatcacctgatcggagaatacgtgtgttttggttcagtacaggtaaactaaggcgagtttatgatgaat

SEQ ID NO: 22980 - DNA, 271 bp, Glycine max
  Clone ID: 700951814H1
cttttctctcttctctctctttctccggcgacgatctcagattccggtcactcctctcgccggcgatcccttattcctccgtcctccgtcgagtcctttccgattcgaatcgttcccagccttgtgccaccatgaatcccgaatacgattatttgttcaagcttttgctgattggagattctggtgtaggcaagtcatgtcttctcctgaggtttgctgatgattcataccttgacagctatatcagtaccattggagtggactttaaaat

SEQ ID NO: 22981 - DNA, 291 bp, Glycine max
  Clone ID: 700951815H1
cgtagtatttcggaattcggtcattcgagcgattcggctcagatttatttcctttattttatatttttaattatttgttcctagtctttatcttataataattttcgcattgcttgcccggtaattcaagatcaacttggaaaatttgcaagatttgggatgaaatctggtcggatcttgctttgtgggatggggattttggtgggtcttatttcaatacaaagctcttcctcttcctcttctaaaaatcccatctctttctcttttttttcatcataacacaaaacacaa

SEQ ID NO: 22982 - DNA, 275 bp, Glycine max
  Clone ID: 700951816H1
ttggaaatggcaactctgcactctcttgcattgtcctctccactctccaactcacttcagaagccacgctcatgtgcagtcccatcttcaattgttcatcaaagtacaaactcttcattcaatggtcaaacattacacctgccgtgtttaaggttacctgtgctaagacaaaatactcccatgcacatgcctgttatcatgatggtcaaaccaaaaatacagttcatccagggaactgatgaacaaacaatacccgatgtgaggctgaccaaatc

SEQ ID NO: 22983 - DNA, 279 bp, Glycine max
  unsure (1)..(279): unsure at all n locations
  Clone ID: 700951817H1
gtcnccggcgactgagtcgcggtctcttcccaactcggaactcagtccattccgcatttctcttcaaaccaaatttcttctgaagaaggagatttgaattcagaattgagtgagaagaagagaatagaaatgggctccgaattgattttcagaggccacgaggctcagcccgtggacgactcgtactcgccgaagccccacaagccctggttcaccgtgactcgcccgattcactacatgctccgcgagcagcgactcgtcttcgtcctcgtcggcgtc

SEQ ID NO: 22984 - DNA, 275 bp, Glycine max
  Clone ID: 700951818H1
ggacataataatgtctataatgctaccatatttccccataatgttgggcttggatgtaccagggatcctaacctggcacaaaggattggtgctgcaactgctcttgaagttagagctacagggattccttatgtatttgctccatgcatagcggtttgtagagatccaagatggggtcggtgttatgaaagctatagtgaggatcctaaaattgtgcaagacatgacagagatcatacctggtctacaaggaagtatccctgccaattccaggaa

SEQ ID NO: 22985 - DNA, 272 bp, Glycine max
  Clone ID: 700951820H1
aaatttcagaagctagtgatcaatcatcaacacagagctgagtgtgttgctctgtgaatccaccttcttcttccattggaggaccatttcctcctggaatagaaatactaccacacttttcttttttcacttctctaagttgctaagttaattgctccttcattttttcactcttcgttctcgcgtacccgtgtcacggtaactcgtggtgaagtgttcgaaaatgactgtcacacctaagatctcagttaacgatgggaaacttgttgtcc

SEQ ID NO: 22986 - DNA, 273 bp, Glycine max
  Clone ID: 700951821H1
gaagcctttaaccatgcgggaaacaaacattacaagctaggcatcaaccattttgctgatctcacaaacgaggaattcaaagccataaatagattcaagggtcatgtgtgctccaaaataacacggacacccacatttaggtatgaaaatatgacagcagtgccagctacattggattggagacaggaaggagctgtcacacccatcaaggaccaaggccaatgtggatgttgctgggcattttctgctgtggcagcaacagaaggaatcacc

SEQ ID NO: 22987 - DNA, 267 bp, Glycine max
  Clone ID: 700951823H1
tttgtagtgattattagaggatttgatcgttaacaatttctcttcttatttgtttaatgtttttggtttcttaggtgaattattcaagaggacccgacaatcccacaaagcagaaagagaggttgttatgttatggcgggcaaaggtgttggttcagtggctaaggcagtagcagaatatcagtatccttggcgtgagaagttggcgaaatataaggatgagtttgctaagggtgtgtggggatactgggagctgggggcatggaag

SEQ ID NO: 22988 - DNA, 272 bp, Glycine max
  Clone ID: 700951824H1
cgctgagttgcgtcgtctctctaacaaaacaaacaaacaaaaaaaatgatttctgcgatttcgtgggtgcccaaaggggtttcgaagtcggaacttgtcgtggctgaacctcctcccgaagaggaaattcaagagataatagccaaccacgcaaccaaaagtggagacagtgacaatgaagacgctaacaacgatgacgttgtggcacaagcattaaccgtagcagacgcattggcaaggcctccactggaacctgcgacgaaataaccttg

SEQ ID NO: 22989 - DNA, 271 bp, Glycine max
  Clone ID: 700951825H1
ctcccctctcaggtttttgtggataagattgagctataatggctgccaggagaccgggtttgattgctttgtttgatgttgatggaactcttacagctcccaggaaggtggtcacaccggagatgttgacattcatgcaagaactgcggaaggttgtaactgttggagttgttgggggttctgaccttataaagatatcagagcaacttggcagcacagttaccaatgactatgattatgtattttctgagaatggtcttgtggctcacaa

SEQ ID NO: 22990 - DNA, 269 bp, Glycine max
  Clone ID: 700951826H1
ttaagcggttacacctcacctatgattagaacaagtggttcaatagacaacacatttggaatctttggagagatgatatatgcaagggtatttggtaaccacgtgtcaaacctccatacatatgccaatctttcggggaccagtaacccaagaatgagaagacatttaatgcaagttgataaatcactcagcagaataagttgtttcctcctttgctgcctagttttgtgtctgctcttattctgattgctatttcgttttcatcctta

SEQ ID NO: 22991 - DNA, 269 bp, Glycine max
  Clone ID: 700951827H1
gaggaagctccacgagtcctagagaggcatttcttagatttaaggaaaaaatatggggcagtattggatgttgatcttgttaacaagcatggcggagaagggcgactgtgtgaaaaatttggtgatgcatcgcagcatgtggctggtaatgatgtaagatatctgcactttgattttcaccatgtctgtgggcatgttcattttgatcgtctctcaatcctgtatgatcaaatttcagatttccttgagagaaatggatatcttctgtt

SEQ ID NO: 22992 - DNA, 211 bp, Glycine max
  Clone ID: 700951829H1
gtactgaataggaaatgaacctgtgtaaaattatttagtgtctattttaagtttcagtttaccatggtgtccgcacaaaatgttaacaaaaacaaaattataatttatttttttatgtaataacatcaggatactataaaattgacattgtgaaaaaaaaaaaaaaaaaaaaaaaaaaaaaaaaaaaaggggggccccccaattttttccc

SEQ ID NO: 22993 - DNA, 265 bp, Glycine max
  Clone ID: 700951830H1
tcaagatgcagatattcgtaaaactttgaccggcaagaccatcacccttgaggtggaatcctccgacaccattgacaacgtaaaagctaagattcaagacaaggaagggatcccacctgaccagcagagacttatctttgcgggtaaacaacttgaggatggtcgcacccttgccgattacaacatccaaaaggaatcaaccctccatctcgtgcttcgcctcaggggtggcatgcaaatctttgtcaagactttgaccgggaag

SEQ ID NO: 22994 - DNA, 275 bp, Glycine max
  Clone ID: 700951832H1
aatcattcttcgctccttctctttcgattaacatggcatctcatttactcaatcactcgtccaagatgagaaatgcttccaagttgctgcaccacgaacgcgctcttttggttcgttggttttccggcgatgctcaatcctctctcaaccgaaaccgcgatgtgtggaaaactcaattccacgagtcttcaacaacaagaagtgtctttgaaccggcctccagctttaataaacgttcatttggtatgcagaagagaaacatctccatggctacc

SEQ ID NO: 22995 - DNA, 281 bp, Glycine max
  Clone ID: 700951833H1
gtataaataatgtttgcgaatattgattcacaaatcacaaccagttctctatgctgaattcactagcaatgtattttccacatgtaagagtgaaaactagaaaatctgtgaaccataccaggcactacacattactgattagtagaattcaactcagcagattatatattgaaatctcccagagtcagagtacatggaggaatgatattccgccttggttggtatctagggaatggcacaccaaatactggctgcacaccatattctagttttctccttac

SEQ ID NO: 22996 - DNA, 171 bp, Glycine max
  unsure (1)..(171): unsure at all n locations
  Clone ID: 700951834H1
gcgtacgtgagcgcgnggttggggtcgagcaaaagtgagagacacctatttgtgagtatgtgggttgtgttgttccataatcattcttgagatcaaactcaaacgacaatatttgtgtcttgagatcaaactcaaacaataatatttgtgttatctggcattgtgtttttt

SEQ ID NO: 22997 - DNA, 274 bp, Glycine max
  Clone ID: 700951835H1
gcaacaccaccaaggctgctccgccgcgagcccttacggtggtccctcgtatagtggcgcgctcactctcctgcgacggtgaactcgagatcgcgctccggtacctccgcaacgcgacccagtcctctcccctctcatcgacattcaccaacccccaaccttcgacaatttccacactcccttcctcgccctaacccgcagcatcttgtaccagcaactcgcgtacaaagccggcacctccatctacacgcgcttcatcgcgctctgcgggggc

SEQ ID NO: 22998 - DNA, 274 bp, Glycine max
  Clone ID: 700951806H1
gttagaggttcctcgagttgaggttaacttaaactggcttcattcaattagctcttaagacatgtcctgcttcatggaaagcatttgaagctatgctttcccaatctcaagtttgaggttcctcaagttgatgttaactgaagctggtttcattcaatttgctcctatgacctctttctataaaaatgttagaccaatgatcgtaactgtttcatgtgaaacaatcttgtttaaaatagggataataaatgtgtattcaagttgctgtagtagt

SEQ ID NO: 22999 - DNA, 237 bp, Glycine max
  Clone ID: 700951772H1
cgatcatggcttctatatcctgtctatcctctttctccctctccaatttctctgcacctcttcccatttccatttgttcttcatcttccaccttcctaacttcccaaataccatgcaaacccaccaaacgtagcaaaccaaaacgccaccacgtttcgaaagtgacatgcaacagtaaccaaaacaccccaacaccaaacccagaagaagaaagaccatcatacaacattctaggaa

SEQ ID NO: 23000 - DNA, 242 bp, Glycine max
  Clone ID: 700951773H1
ctttctgacttcagccagaaaaattcaattacagaatccactgacatgttgcacaatgggaatacatcaaatctgaacatgatgtccagctcagcaggaaagcctttgcaagcagatggccataccattgatgatggatttgccccgccacagacatacaaacagttgcctgatacaacaattaaggtgaatccaaagttatcacagcatgtgaattctgagtcgaagcaagtgctagaaga

SEQ ID NO: 23001 - DNA, 238 bp, Glycine max
  Clone ID: 700951774H1
agtcgccttaggatgaaacggcttgggcggatttgctgccgaggaagttattgtcagaacagatccaacatgactggggggtgatgtataggaagattaagaacatgggtgtgttcaagtcaggtgaaggatttctcaaagaagtgcctcttcaggatgtgaggttgcataaggattccatccatagtagagcaaagcaaacaaatttggaatatctgttgatgttggatgtggacag

SEQ ID NO: 23002 - DNA, 239 bp, Glycine max
  Clone ID: 700951775H1
cttttgttccaaacaaaaacgtatgaattggtcggtttttctccggagtcgtcttcacttttctccgagtttttattatcatcatctctctcgtgtccctgtctccatctccatctcttagtttcttcttcaaatggcagaagttgaagacatagacaaccctcatcacgaccaccatcattacctttcttcttctacaacacaacctccaatgatcaatttcccgcgagatctgttaa

SEQ ID NO: 23003 - DNA, 240 bp, Glycine max
  Clone ID: 700951776H1
gggaaggttgatcaaacgctacgcagcggacgtgacttggtagggcatggcacccacacactgtcaacagctggtggtaattttgttcctggtgcaaatgttgaaggtaacggcaatggtactgctaagggaggatcccctagggctcgcgttgttgcctacaaagcatgctggaataaactggatgaaggagggtgctatgatgcagatattctagaagcatttgatcatgccatttat

SEQ ID NO: 23004 - DNA, 239 bp, Glycine max
  Clone ID: 700951777H1
caggaataaatgacttccctatgactactattgaccatatcaaggcgggattgcctgtgttagcaaaatataaaaggccgatagttgtgcatgctgaggttcaacaagattttgaaaaccatttggagcttaatgaggataaccttgatccacgtgcttacttgacctatctcaatgccaggccaccttcatgggaggaggcagccattaaacaacttgtaggtgttacgaaggacaca

SEQ ID NO: 23005 - DNA, 241 bp, Glycine max
  Clone ID: 700951778H1
gcaagagctgaaagagatcccgaagcagaggcttcgaaatcgaacacttgcgaggaatgtggtgccactttcaaaaaacacgcctatttgttgcagcacatgcaaagtcattcacttgaggtatttgaactcttgattaattattatttaagaaaaataagttggatacagtcaaactctaaaagcacataagaaaactgtatttaaaagctatgtcttatagaccgttgtgttccttgag

SEQ ID NO: 23006 - DNA, 242 bp, Glycine max
  Clone ID: 700951779H1
gtcctcttttctcttctccctttttctctctgtctctctctctcggtctcgctcttcttctcatcaagcacagagttacagactcaccgatcttccgattctctttcgtcttggtttatgagctcgaaggagagacccactcttggtggcacgcggattaagacccgcaaacgaaatattgctgcgccgctggaccctgcagcattctcggatgcagtggtccagatttatttggataatgc

SEQ ID NO: 23007 - DNA, 245 bp, Glycine max
  Clone ID: 700951780H1
cacatatctgcacttcacaaccctccaaacaacatttaactttatataaaaccatcattctgaacaccatgtttactctcttcttctctcttcttctacattagttcttgttattcattattcattctcagcttcttttcttctggggggcaaaaggggtcacttttcagatccgagattgagctcctttacccatcatcatcatggagctcctcgggtacctgaatcagggtcacccttctaga

SEQ ID NO: 23008 - DNA, 247 bp, Glycine max
  Clone ID: 700951781H1
gaccattacaagtatatattacaaggttatctcttggttattttattgaatgttaaactttattatactactacctgcaatattattcagcttattcttatgaaattttattaaatattgtctatgtacattggttttttggtcttgtttcatgaatcatggttgaggttttacctgtttattgttgattgtttgtatttcctgcacataatacatacatgcatctgaaatatgaaaaaaattctaa

SEQ ID NO: 23009 - DNA, 242 bp, Glycine max
  Clone ID: 700951782H1
ggaaatttgcaaggggctcgacaaattcgttattggacaagagagggccaagaaggtgctttctgtagcggtttataatcactataagaggatatttaatgaaacctctttgcccaagtggcctgcaggagattcagataatagtgtgaaagttgatgctgctgatgatgatagagttgaacttgagaaaagcaacatccttctaatggggccaaccggatcagggaagacattacttgcca

SEQ ID NO: 23010 - DNA, 253 bp, Glycine max
  Clone ID: 700951783H1
tgttacaagaagatatcagagtcaattgaatcagggaacaaattcaatagtaaatatttttttgggtcttgggagagagaataacagacatgttactgtaagtttgtaacaactatatagttatcatccgcacactcttttctttctttctttttcctttggtattgagggttgtaaagaagcttcttgtttgatatgtatgtaaatgatgtaaatgcccaagtcttgtacttattttcctgttaaattcaag

SEQ ID NO: 23011 - DNA, 144 bp, Glycine max
  Clone ID: 700951784H1
gggagtgaaccgatgtaggtgagcatttattaactgtaagatatgggaagatcaaatttaaataaagtgatttctggcggggcatgtaaataatgccctagggagtttgtaattattgtttatgatactatttctttgcaattc

SEQ ID NO: 23012 - DNA, 237 bp, Glycine max
  Clone ID: 700951785H1
gtgaagctactctcagacatagatgaccaagatgggttacgtttccaaattccggtgatacagttctatcgccacgacccatcaatggcagggaaagaccctgtcgatgtgataagaaaggctgtggccaaaacgcttgtgttttactcaccttttgcaggtaggcttagggaaggacttggtcggaaactgatggtggattgtactggggaaggtgttttgttcattgaggctgat

SEQ ID NO: 23013 - DNA, 235 bp, Glycine max
  Clone ID: 700951787H1
aagagaaagagtgggagaaagccttagagagaatttttttcaaaaaagaaaaatattccttcttaattctacgtacgtgaggtgttagaagacacaacaatgaatttggcaaagggtgttggcggaaacattgacaaatcccaagttctgtccgctgttgaaaagtacgagaagtatcatgcttcttatggaggtcaggaggaggagaggaaagctaattatgttgatatggtta

SEQ ID NO: 23014 - DNA, 239 bp, Glycine max
  Clone ID: 700951789H1
gcatgttgttgatgttgggactatgcttcctattgttctctgcatttccacttgcgttctctgagagatgccacccacaagacaagaaagcgttgctccaactccagaaggacctcggcaacccttatcacatcatatcctggaacgcaaaggaggattgctgcgagtggttctgctgcgttaagtgtgacgagaaaacaaaccgcgtcattagcgttgccttatcatccccttttcca

SEQ ID NO: 23015 - DNA, 62 bp, Glycine max
  Clone ID: 700951790H1
cgaagaagcaatacaccaaaacccaaataaaacagaaaatttatttatttattcgtttttag

SEQ ID NO: 23016 - DNA, 239 bp, Glycine max
  Clone ID: 700951792H1
gtcccctctaatccccccttttctctccgaggcatatgaggtaatcaacctcgtcgttttggcatgtctccaagttaagctagcatggcttcctcttctttccatctttttctgttaatctctttgccattcttgtaggttctgcttcccttccgagggggtccttcaacgtcatttgagggaccctcgtcctttaatttagctattcttattcttattaattaatttagccaaagaga

SEQ ID NO: 23017 - DNA, 237 bp, Glycine max
  Clone ID: 700951793H1
agaaaactctgtgaagctccttataacaagacagtggactggtccaagtggtatatcttctgggctgacgagcacgttgtggcgaaaaaccatgccgatagcaattataagcttgctaaagatggccttttgtccaaggtgcctattgtccctagtcatgtgcattcgattaacgattccgtgtcagcagaagaagctgccgatgattacgagtttgtcattcgacagctggtgaaa

SEQ ID NO: 23018 - DNA, 242 bp, Glycine max
  Clone ID: 700951794H1
atcaatgtttctaataaatgttttccacgtttcttgttttccttccttttttttattacattttttgaggtttcgccattttgaggagctacatcgacgcctgaaagagttccctgagtataatcttcatttgccaccaaaacattttctgtcaactggtttagatgtaccagtcattcaagagcggtgtgaattactggataaatatttgaagaaactcatgcaactaccaacagtttcgg

SEQ ID NO: 23019 - DNA, 243 bp, Glycine max
  Clone ID: 700951795H1
atcaatggcaattatcatgttgaaaaggacatggtccactggctgcaaaagtcactctcagctaaggcagggatctctcacatgccatctccattaggaagtgattgctcatcaagatcaagtccaaaagtccaagtcacccattgcaggaaaaggttgaatcatttcacaaagtcaaaatcattgagaagtccagtgagtaagatactggaaaatagtgagatcaaatcaaatggcatagca

SEQ ID NO: 23020 - DNA, 245 bp, Glycine max
  Clone ID: 700951796H1
ataaaaaacacacaagcaccacaataacaaaacaaaaatacaattcaaagatcacattctccttcttctcatgttatgttaataaggtttctctttctccttccagaaccaaaatcccatttctggaaaagaaatggaggaatcagattcaacaccaaagtctctgatggagaatctgcttggccttttgagggttcgcgtgaagcgtggtgtcaaccttgccgttcgtgatgttcgaagcagcg

SEQ ID NO: 23021 - DNA, 286 bp, Glycine max
  Clone ID: 700951801H1
attattattagggtttggcgattcagagagaaagagaaatgggagaacgaaaaggaatcccaattgctctggggctcttggcgatgctcctcttcttcattgcttcttcctcttcctctcacctcgttcgtgcttccgatgacgccgacgacgcgatcttctacgagtcattcgacgaggattttgacggacggtggattgtgtccgacaaggaggattacaacggtgtctggaagcatgctaagagtgatgggcatgatgattatggacttcttgttagtgaaca

SEQ ID NO: 23022 - DNA, 292 bp, Glycine max
  Clone ID: 700951802H1
ttcggctcgagcttagaaggcgtcttcataaacgcctttcttctccgtttccgtttcctcgttcgaattcgctttttgatctgcgaaaatgagagagtgcatctcgatccacattggtcaggctggtatccaggtcggaaatgcttgctgggagctctactgcctcgagcacggcatcgggcccgatgggcaaatgccaagtgacaagacagttggcggtggtgatgatgctttcaatactttcttcagcgagactggtgctggaaagcacgtgccacgtgcagtgtttgta

SEQ ID NO: 23023 - DNA, 280 bp, Glycine max
  Clone ID: 700951803H1
caacatgcgactgtgttagcctagcggatgaaaacaaaaaaaaataaaaaaaattacatctaagcacagagaaagaggaagagatggaggcagaggcagaaggtgaagaaggtgcgaactaagcatttacaaggcggcgagaagcataaagcgaagagagaacagtttgtacaacgcactgagatccatctaccaagactccatcttcgtctccgagatctctcttctatggcctcagctccctctcctcgccaacctccgctgcggcctctggtactcc

SEQ ID NO: 23024 - DNA, 276 bp, Glycine max
  Clone ID: 700951805H1
atgaggtccaattcaacactcagtcggttcatttaggcttcactcttcagacttagttgagcctcaccccttttggttggattcaattcatctcagtttggcgagcctaagccattctctcttgactgttttatccttcctagtcaaacaggacaactcacctattatgtgaatttggggcttattgttgttactgataccacataagagggaagaagtgatcctcaacattagcggtgcagttactccgatgccaaacgatgccccaacatgaat

SEQ ID NO: 23025 - DNA, 237 bp, Glycine max
  Clone ID: 700951771H1
attaaagctccaggaaaatggtcaccatattaggaccctctttctctttctctctcttttttctcatacacagttcgtgacactcctttttcatgtttggggactctcttctgggctttcttcggtttaagccttagaagacggagattattaaaacatgggttgctttcgttgcacaggcaaatcaagcaaagaaaccaacaacaataacattaatcacgccgagaagcacaccat

SEQ ID NO: 23026 - DNA, 244 bp, Glycine max
  Clone ID: 700951742H1
cggcagtgaagttattagaatctgtgttgtgttgtgttgtgttgagcagagagagagagtgagggataagaagagaatagggttagggttagggttagggttagggtttgattgaggatgccgaagaacaagggaaagggaggtaagaacaggaagaggggaaagaacgaggcggacgacgagaagcgggagctggtgttcaaggaggacgggcaggagtacgcgcaggtgctccggatgctgg

SEQ ID NO: 23027 - DNA, 243 bp, Glycine max
  Clone ID: 700951743H1
cgtatttgattggtcggtcatagcaattagcaactccacccttcaaacttgaaaggaaaaaaggactttggttatccacgccacaccacgctgtaattaactaaactttctagaatcttcttctctcgccatggccgcgccgtcgtcctccgccgcggcaaacatcatgctggcgatctccgagaagaagacgaacagtgtagatctgtatcgccctctccgcaactacgtggccttccacta

SEQ ID NO: 23028 - DNA, 243 bp, Glycine max
  Clone ID: 700951744H1
ccaagccccactcaaccaccacaccactctctctgctcttcttctacctttcaagtttttaaagtattaagatggcagagacattcctatttacctcagagtcagtgaacgagggacaccctgacaagctctgcgaccaaatctccgatgctgtcctcgacgcttgccttgaacaggacccagacagcaaggttgcctgcgaaacatgcaccaagaccaacttggtcatggtcttcggagaga

SEQ ID NO: 23029 - DNA, 245 bp, Glycine max
  Clone ID: 700951745H1
cttcaccttcacaattagaaaaaaaaaaaaacaaaaaatgggcgtttctcgttctcaaaagcctcatgttgtttgtgtgccattcccagcacaaggccacgtgaacccttttatgcaactaagcaaactccttctttgcaccggtttccacataccctttgtgaacaccgagttcaaccacaagcgtttggtgaagtctcttggacaagaatttgtcaagggacaacctcattttcgatttgaga

SEQ ID NO: 23030 - DNA, 244 bp, Glycine max
  Clone ID: 700951746H1
cttattgtcttgtctcaaaatggtggatcaaatagaggaggtttcaatatagtatcttcaagtgccaaaagcagcattcatctggatggactattcaacattatctcatacgatttggtgccaaagctacagaatatgcttatgacatgtaactttaaggttgtgattgctgatgagtcacattttctgaaaaatgctcaggcaaagaggacaactgcttctcttccagtcataaagaaagctc

SEQ ID NO: 23031 - DNA, 248 bp, Glycine max
  Clone ID: 700951747H1
tagggaagatagtcaatggatgtttagtcggctggggaagcagtggtggagagttattgtttatttttctaacaggaacataatagtatttgaggcactgaagtttttgtggagcatttgtttgttgcatttggggggtttggagaactctgtggctcttccgctgttttctagataattttttatgcgaaagatatatcccaagtgttgaacggcttgagaagcggaacgggcaagtcagccaaagc

SEQ ID NO: 23032 - DNA, 128 bp, Glycine max
  Clone ID: 700951748H1
ctctctctccctctttctcgtcactagctctgtgcattcttctctcgctctctgccttccatcacactcggcatttcctttcccaagatagtagaagatggcagacactgaggatattcaacctcttg

SEQ ID NO: 23033 - DNA, 248 bp, Glycine max
  Clone ID: 700951750H1
gaggaacaacacttgttattactctttcattggtgctttcgacacttgtgtccttctccactttcacacatgccttctctacttctgcgtttccggaactgaatcctataaaacctaggcactcacgtcttctcaggagtgccgtgcaacatgaaactcctacatcacagctttctgaaatatggtcacctctggaaagccaaggacggaaaccttatgttgaatcagataagccatcattaccagag

SEQ ID NO: 23034 - DNA, 248 bp, Glycine max
  unsure (1)..(248): unsure at all n locations
  Clone ID: 700951751H1
attgtgccctccctctttctagctatttccctctcttaacacaattaacaaagatatatcatatcatatcaactccaaatgatgaaaaatattgggttgtttcttcttgtggtggtggctacttttgtggtggcagccacagctggtagcttttaccaagactttgaaataacatggggtggtgagcgtgccaaaatctatgaaaatggaaatcttctcaccctctccctagacagagnctctggctc

SEQ ID NO: 23035 - DNA, 242 bp, Glycine max
  Clone ID: 700951752H1
gacctaccaagaagaaaaagcttgactgggagctgcgtctaaaaatagcacttggagcagcacaaggacttgcttatctacaccatgattgctgtcctagaatcatccacagggatgtgaaatcatctaacattatattagatgcagactttgagcctcatctcactgattttggcattgccaaaagtctctgcccctcgaagtcccatacttctacttacataatgggcacaattggctac

SEQ ID NO: 23036 - DNA, 241 bp, Glycine max
  Clone ID: 700951754H1
cttggaaccgttcttcgtgttctccattccctctctcactccttcatctacgtaatttccttccttcctttctttctttctttctttctttatcttctcatttttctcaatacaatttttttctttctttctcaagttttgctacttttctcttcttaaccatagttcacatattatatcatcacatatcatagtgatatcatatcacaatgtgtggcatacttgctgtgcttggttgctc

SEQ ID NO: 23037 - DNA, 240 bp, Glycine max
  Clone ID: 700951755H1
tcctaagaatgttgagcatcctcttttacaggcttcctttggtgtatctccttcgggtaggatgtcaccaagaagtgttgaaccaatctctccaatgagctctcgcatatcggcatttgctcagcgcgaaaaacagcagcagcagcagcagcagctgcgcagtctcagttcgagagacctcggtgccaacagtcctgcctcacttgttggctcccctgcaaacccttggtcaaagtgggg

SEQ ID NO: 23038 - DNA, 239 bp, Glycine max
  Clone ID: 700951756H1
tgcaattgaagttaaaagccttagccttccctacaactccaaacacaaagacatcatcatccatggctgcctccgtctccactgtcggagctgtcaacagagctcttttgaacctgaatggttctggagctggagcttcagctcccagttcagccttctttgggaccagcttgaagaaggttattgcctcaagggtccccaacagcaaggtttccggtggaagcttcaagattgttgct

SEQ ID NO: 23039 - DNA, 242 bp, Glycine max
  Clone ID: 700951757H1
ctcagaagaagacccttccaccgggcccaccgggctccctatcttcgggaaccttctatctcttgacccggacctccacacttacttcgccgccctggcccagatccacggcccaattctcaagctccgactcgggagcaagctcagcatcgtcataacctcaccggccatggctcgcgaggtgctcaaagagaatgacaccgttttcgccaaccgcgacgtccccgccgccggaaggtcag

SEQ ID NO: 23040 - DNA, 244 bp, Glycine max
  Clone ID: 700951758H1
attaacaaatcatagcatagcagaagaagaagaagaagagatacatagaaagaaagaaaaaaaaaatgagtttgagggaagacaatgaagagggaagggatctgaagaagccatttcttcacacgggaagttggtatcgtatgagtgggagacaatccagtgtgttcggttccacacaggccattcatccagtcctccatctctgtctttgcttgtgttctaatcgttgctttgggtccaattc

SEQ ID NO: 23041 - DNA, 241 bp, Glycine max
  Clone ID: 700951759H1
agacggagtggctcgacggaaagcacgtcgtgttcggacaggtcgtcgaggggatggacgtcgtcaaggagatagagaaggtcggatccagctccggcaggaccgccaagcctgtcgtcgtcgccgactgttgtcaactctcttagatagacgacgttgaccctaggcttttatctctgtgtcggtggctctgaatgtgtcgtttctttcggtgtcgtttttgccttttttttctctttcc

SEQ ID NO: 23042 - DNA, 243 bp, Glycine max
  Clone ID: 700951760H1
ggaatttgtctaagtgattttcacttttattggtttgcagagatattgaaagtcctcatggaggcctttcctgaaatttcaatgactgttgatctgtcgaacactactgtgttgcatactgctgcagcacaaggacacattgaggtagtaaattttctcttggaaaaaggtaatagcctggtaactattgcaaaaagcaatgggaaaactgtgttgcattcttctgcaagaaatggctacttg

SEQ ID NO: 23043 - DNA, 243 bp, Glycine max
  Clone ID: 700951761H1
ttccaatatattccattctctctgtgtatttccctacctctcccttcaagatgcagatcttcgtcaagaccctcaccggcaagaccatcacccttgaggtggaaagctctgacaccatcgacaacgtcaaggccaagatccaggacaaggaaggaatccccccggaccagcaacgtctcattttcgccggaaagcaacttgaggacggccgtacccttgctgactacaacattcagaaggaga

SEQ ID NO: 23044 - DNA, 244 bp, Glycine max
  Clone ID: 700951762H1
cgtttaccatgctttcctaagagaaagagaaaagtaaaacccctcactactgatagattttcattcctccgaggaaaaaaaaaacatgtcggatgctttgatcaatggattggccggagctggaggagggatcattgctcagctcatcacatacccacttcaaactgtaaacactcgccaacaaaccgagcgtgatccgaagaaagacacgaggagtcaaggggccctcgaacgaatgtgccag

SEQ ID NO: 23045 - DNA, 247 bp, Glycine max
  Clone ID: 700951763H1
cttccgtttctttttctttttctctctctctagggtttcgaaaatgttctccggctcccagttcgacgccaccaccgccttctccggcggcggtttcatgtcttctcagccgtctaccctcaacgattcctctcccgcgccgtcaaaaagccgcgaaactcagggtttggtgccagtgacagtgaagcagataagcgaggcctctcaatccggtgatgaaaagtcgaatttcgtgatcaacggtgta

SEQ ID NO: 23046 - DNA, 244 bp, Glycine max
  Clone ID: 700951764H1
tctcccgaagataaggcagagaagagaaggagagaggcttgtacctggagagaaaagaggagacaataatacatggggaagcagggtctaaacacggtggagcaacaatctgtggcaccgacagcatccaagtttccgttgagcttttgggaagccacggtggcttcaacggtggcgctggtttttgcggtgggtcttctcggcgtgtacctcaccatgcccgattccgattacagcttcctta

SEQ ID NO: 23047 - DNA, 247 bp, Glycine max
  Clone ID: 700951765H1
aaacctcctcactaccctaaaccaccagttcatccacatccaccccatgtcccaaaacctcatccaaagcctccagtgcatccccatcgaccttatgtcccaaaacaacaattggggcagtagcaccagcatatgttccaaaaccaccaattgtgaaccctccctatgtcccaaaaccgcctgttgtgccagttacaccaccttatatccctaaaccaccagttgtgacaccagcatatgtccctaa

SEQ ID NO: 23048 - DNA, 244 bp, Glycine max
  Clone ID: 700951766H1
ggaggagagagacagttcaatggccttgttgatgtctacaggaagacattggcatctgatggtgttgctgggctctaccgtggtttcaacatctcatgtgttggaatcattgtgtatcgtggtctgtactttggattgtatgattccgtgaaaccagttgtcctcaccggatcattgcaggatagcttttttgccagctttgccctcggatggctcatcaccaatggtgcaggtcttgcatcat

SEQ ID NO: 23049 - DNA, 245 bp, Glycine max
  Clone ID: 700951767H1
ctgcattcttttaatgtgccttctaagttccttctcacccccaatcaacgctcttctcaacctcactttaccccaccaacaccctcaccccgaatccgtcgtccacgatctccaacggaaggtgaatgcctcactatggagaagggaaatgctgtcaaaggaggaccaacaagaaggcatgtcgtcgtcgtcgtgtctgaccggaaaccccatcgacgactgctggcggtgcgatccgaactggg

SEQ ID NO: 23050 - DNA, 244 bp, Glycine max
  Clone ID: 700951768H1
gtttatttcattttatatttcttctttcaccctatgtttggatgcagagaaagaaaagaggagtaaagaaaaaaaaattgattttaaaattctgttgtttggttgaaaagaaagtagagaggaaaaaatatctagaaaacaaaattttgtatgtgttatcttcatttcatatttcaaaatttttgctctctcctattgtttccactaatcagaatttagtctaaatgaatactgaattgaggaa

SEQ ID NO: 23051 - DNA, 241 bp, Glycine max
  Clone ID: 700951769H1
ggtcgccttgtcacccaccaaacccatgaccctcccttctatgctgttttcgttgattgcaacaacagtgatggagccagattcatccatgcaactttagatatgaccatatctgatatcctctctcccgttgacgttccacccattgttcaatcattgtttgaccaccacaaagctgtcaaccatgacggtcacacaatgccgttgttgtccgtccaagtcactgaatttgtggatggtg

SEQ ID NO: 23052 - DNA, 240 bp, Glycine max
  Clone ID: 700951739H1
cactgtcctcgctcaaggaatcacctttctagatcacccagtaacaattctagcaaagcatgggatgatgcttctttggattcaggctctgaccaagtgggttcatgcacaacaaaggatatgcttggcgccctttacttacagtactctgagaactctccaccttaccagcgggttccattttctgagaagataaccgagttagctaaaagccatccaggattgatgaggttgaagagt

SEQ ID NO: 23053 - DNA, 245 bp, Glycine max
  Clone ID: 700951708H1
gccttgttcagcttcatattcccaccaccatcttctctggtggtttcggggatgtcagtgataagccttgtgtcactggctaatgctggcttctcagagattagagggaagcatttgaactattcaaagttttggaatgctaatccctctgcagaaaagcaggtcaagttgtctagcaaagctggcatgcttttgctgtacactcctgcttttcttgctggccttgcatccttctggatctttcc

SEQ ID NO: 23054 - DNA, 246 bp, Glycine max
  Clone ID: 700951709H1
aaccaattggcctcaagtttgagaacccaagagagggtgaagaaggccaaacctggtgttgtttctgctgttcttacatcaagtaacaccaaagaatcagtggcttttcaaatgccatcgtttctcagaagaaaggctgatccaaaaaatgttgtttccatcatattgggagggggacctgggattcaactctttcctcttaccaagcgagctgccacacctgctgttcctgttggtggatgctac

SEQ ID NO: 23055 - DNA, 246 bp, Glycine max
  Clone ID: 700951710H1
ccggaagcaacagaggaaggagcctgagaggcctctttatcaagtacttgaagagaaggaagaaaaaattgcccctggaactttgcttggaaccacacacacttatgtggttggcactggcacacaggacaaatcaggtgctaaaagggttgatttgcttagaggtcagaagacagataaagtggatgtcactttacagcctgaagagttggaagccatggaaaatgttttgcctgccaagtacga

SEQ ID NO: 23056 - DNA, 247 bp, Glycine max
  Clone ID: 700951712H1
ataagttggtggattttgagcaccatcttagcaatgtttctcagcaggctgaatcccttgtcaagtttcagcaagacatgggtgaaacggttggtgaattaggtctggcttttgtaaagcttaccaaatttgagacggaagaagccatatttgagtctcagagagttcgagctgctgacatgagaaatgtggcaactgcagctgttaaagcaagcaggttatatagagagctgaatacacagacaat

SEQ ID NO: 23057 - DNA, 246 bp, Glycine max
  Clone ID: 700951713H1
agcaagctggttatggctatgtgcaacctggagcatactctggtccatcaccccagtataacatgcctcagtaaccatatgcaggctatcctgcccagcaacctggtggatattccaccaattgggaccagtctactgcaccacctccaccagcagtctactcatggtggtggttatgattactatagtcaacagccacagcaaccacaaaatcctgggggtactgcacctccagctgatggctct

SEQ ID NO: 23058 - DNA, 247 bp, Glycine max
  Clone ID: 700951715H1
attgtgatttatcagatggattttctgaagatcctttgcgtcatctcccacctagcaaggtgccacaccttcattgttttattcagaggaaattagcggttcacgacttccttcagcacaatcctattgtagagccaaggcccaacttggtcagaggaatcagggaagcattgctaaggcatctcacggctgttcttagcaatgatgatttggctactcatttcatgttgctgcatcttctatccaa

SEQ ID NO: 23059 - DNA, 252 bp, Glycine max
  Clone ID: 700951716H1
gaagatgcgagcacttcattgacagatcgagcagcaaaactacgtcaaacagcggctcttatagaatgcaacctaaagcttcttggagcaactggaattgaagacaagctacaggagggtgtaccagaagccattgaatccctgcggcaagctggaatcaaggtctgggttcttaccggtgataagcaagagactgcaatttcaattggtctttcttgtaaacttctgagtgcagatatgcagcaaataatt

SEQ ID NO: 23060 - DNA, 258 bp, Glycine max
  Clone ID: 700951717H1
agaaaacctctcgttttctttttctctctctaaaacacgatttccaattttacttctctagaaatgggaacagcaatacttcgttcccacgattgcctccaaggccggttcctccacaacgaagccgtgacgatcgccacgtcacgtgttgcatcgcgaagaaaccataactctaacaacaataaccataatagcttcgcctcctccgcaaaccagaattgcccgccggaagcggagtccggtcaccgatcgagagcg

SEQ ID NO: 23061 - DNA, 252 bp, Glycine max
  Clone ID: 700951718H1
aaattgctggggttctccacctcacaacccaaccccaacaactaccggtaaccttagtacaggtacgacggggacatctcaggcgatcagcagcggtagctatactactactactacgacgactactacttcttctggaagtgggagcagctccataaatagcaagttctcagtgtcaagcggtggtcagccttatccaaatggacagatcttacctacctctaatttgaggatcttcacttttgccgagtt

SEQ ID NO: 23062 - DNA, 250 bp, Glycine max
  Clone ID: 700951719H1
tgagagaatgagtacggtgggagaagggaaggtgagtagtaatggtcatggatgttgcaaatcagggccaggctatgcttccccactggaagccatttctggtcccagagagtctctcatttatgtaacctctgtctacacagggaccggaatagagaagccagactatttggcgacagtggatgtggatccaaactctccaacttattccaaagtcatccataggcttcctgttccttatttaggtgac

SEQ ID NO: 23063 - DNA, 245 bp, Glycine max
  Clone ID: 700951720H1
gggatcctgaaacgggagaaggcttgaccagcattgaaccgacaacgggaacaataaatgacgtgtgtacatttcctggcagtggtttgatcttgctggccttagattgtagtcaaataccatcttacttcataccatcgcttggacctgctcccaagtggtgttcttcgctagagaatttcactgaggagttagacatgggtggacaaacaactatttatgatcattacaaatttttgacaaag

SEQ ID NO: 23064 - DNA, 248 bp, Glycine max
  Clone ID: 700951721H1
acctgagcatgtggagaaagctttgaagcatgtttaccatgcgtcaacaaacaaaaccaaaggaaaggaattggagcttttgttagcaatattgccggacaacaatggttctctctatggtgatatcaagcgtatttgtgaaaccgaccttggtttaatttctcaatgttgtttgacaaagcatgtctttaagatcacaaagcagtatttggctaatgtgtctctgaaaatcaatgtcaagatgggag

SEQ ID NO: 23065 - DNA, 245 bp, Glycine max
  Clone ID: 700951722H1
gagagagagagagagagagagagagatctatctatctatcaagatggcgttgttggttgagaaaacaagcagtggaagggagtacaaggtgaaggacatgacgcaagccgatttcggaagattggaaatcgagctggcggaggttgaaatgcccggcctcatgtcctcccgcaccgagttcggcccctctcaacccttcaagggcgctaggatcaccggctccctccacatgaccatccaaaccg

SEQ ID NO: 23066 - DNA, 244 bp, Glycine max
  Clone ID: 700951724H1
tattaggccttccttaccgtgatgagaccgatgataaagttacaattgaaagtgcggaacaactctcaagtataatgtggcaattaagtgcgcaactattactccagatgaagctcgtgtgaaggagtttggtctgaagtcaatgtggaagagtccaaatgggacaattaggaacattttgaatggaactgtcttcagagaaccaattctttgcaaaaacattccccgccttgttcctggttgg

SEQ ID NO: 23067 - DNA, 244 bp, Glycine max
  Clone ID: 700951725H1
ttaataattagcacatagttttttggaagagttgtgaaaatgggacttgtggagctttttggagtggcatctatgcccgtgatcaaagtactaataatcactgcagttggcttgcttcttgcactggataacgtaaatttgttgggaaaagatgcaaggatacaagtgaatcatcttgtgcattatgtgttcaatcctgcactggtgggtggcaatttggcggacacgattacttttgagaatg

SEQ ID NO: 23068 - DNA, 116 bp, Glycine max
  Clone ID: 700951726H1
ctcgtcactagctctgtgcattcttctctcgctctctgccttccatcacactcggcatttcctttcccaagatagtagaagatggcagacactgaggatattcaacctcttgtttg

SEQ ID NO: 23069 - DNA, 246 bp, Glycine max
  Clone ID: 700951727H1
agaaaactcaagctcccagattctgttccaatgcctcccgtaccaatttcccccatcaaagttgggcacattgatgatgtccaagagctaagaaaaaccaagccaaggacaattcctcaaagatttgtacgagacttgacagaaagaccaacactcactacacctcttcccccaccacatagtgacatgccagtcattgatttctctaagcttagcaaagggaacaaagaggaagtcctcactgaa

SEQ ID NO: 23070 - DNA, 245 bp, Glycine max
  Clone ID: 700951728H1
tggcatagttaaaaatctcatagttacagacagaaatcctgttgcactttaataaattaaatgaaaagatttttcaatgttgcattactgtacttgtccaaagaaatacatttctgacggagacattgtttggaatatatacactttcaggtgatgggtatggtttggatttcaaatgtctttcttctcgggtaatgagatgcatcaagttttgaagtacagtgagcagggatggacattgctgc

SEQ ID NO: 23071 - DNA, 247 bp, Glycine max
  Clone ID: 700951729H1
cgagtacttttcgttcttgatctgttggttacgatgtcgtattcaaggagatctaggtattctccttctccttctccttctccatacaagcgatacggtaggtctgtgtccaggtctctctcaatatcaagatccagaagccgttcaaggagtttatcaagagatgcagaaaatccaggaaacaatttgtatgtgacaggattgtctcctaggattaccaagagagaactggagaaacattttgctg

SEQ ID NO: 23072 - DNA, 248 bp, Glycine max
  Clone ID: 700951730H1
taaagcgggttactgtctgttcaagctaccatctctctctctctttcttagtgcctccttgccagaagttaaaatggcccaagaaactttcctattcacatctgaatcagtgaacgaggggcaccctgacaagctctgtgaccagatctccgatgctgtgctcgatgcatgcttggagcaggaccctgacagcaaggttgcctgtgaaacctgcaccaagaccaacatggtgatggttttcggagaga

SEQ ID NO: 23073 - DNA, 251 bp, Glycine max
  Clone ID: 700951732H1
tgttgttttcagatcaaaaggccttctttcctcatttcggacgcacgctccccatccatgtctacttgtgtaaaatcccgagatgtttgtattgttggtgttgcacggacgccaataggtggtttacttggcaccctatcatctctttctgccacagagttaggctcaattgctattaagactgctctcaagagagcaaatgttgatccatcactcgtgcaagaggtgttttttgggaatgttcttagtgc

SEQ ID NO: 23074 - DNA, 97 bp, Glycine max
  Clone ID: 700951733H1
ttcaccttcagcccttccttttttgcgctcattctgttttcaaaggcttctttttcctcatgttgcagtgacgaacttctgaagacatggcaaatca

SEQ ID NO: 23075 - DNA, 250 bp, Glycine max
  Clone ID: 700951734H1
attttcatcatcttcttcttctttttcatcaatcatcaccagtggttcttttccttctgagaagatcgaattgtgttttgcaaaaatgggagttccagagaaagaccctctttcccaattgagtttgcctcctggttttcggttttaccccaccgacgaggagcttctcgttcagtatctgtgccgcaaggtcgctggccaccatttctctcttccaatcattgccgaaattgacttgtacaagttcgac

SEQ ID NO: 23076 - DNA, 248 bp, Glycine max
  Clone ID: 700951735H1
gcccatacttgtgggagatagatggcacgcttgtcactgctcattttcgcgttctgcgccgtcgccgtcgccgtcgccgtcgcgggctcctccttcgatgatgccaaccctatccgtttagcgtcggacttggagtcgcaggtgctggacgtgatcggacagagccgccacgctctctccttcgcccgcttcgctcgccgccacggcaagcgctaccgttccgtcgacgagatccgcaaccgcttccg

SEQ ID NO: 23077 - DNA, 246 bp, Glycine max
  Clone ID: 700951736H1
caattaacaaactctaacaacatcatggtgcaatcaaagaagttcagaggtgtcaggcaacgccattggggttcatgggtatccgaaattcgccacccgcttctgaagagaagggtgtggctagggacatttgaaacagcagaagaagctgctagagcctatgatcaagctgcgattctgatgagtgggagaaatgccaagaccaatttcccaataactcaaactccagaaggtgatccaaagagc

SEQ ID NO: 23078 - DNA, 242 bp, Glycine max
  Clone ID: 700951737H1
gtgagattcatcaattttgaaagaacaaaacttcctgaagaaattctaaagcataatctagaagaaaaaagaaaatatttttcagatataattcttgaagttgaaaggagtgatgccgaggttcaggctgagggagtatacaaccaaaggcttcagaatcttgctgtcactcttgataaggtaaggtatgttatgagatgtatttttggcgatccacggaaagcaccacctcctcttgagaa

SEQ ID NO: 23079 - DNA, 243 bp, Glycine max
  Clone ID: 700951707H1
tacaatgtcattgtggaaattgccactatcctctccccggaagagcttttggcggttagacgcgcctatctcaaccgctacaagcactccttggaagaagatgttgcagctcatacctctggccatctacgccagcttttagtggggttggtgaccgcattcaggcatgttggtgatgagatcaatccaaaattggcacaatctgaggctgaaattcttcatgatgctgtaaaagagaagaag

SEQ ID NO: 23080 - DNA, 254 bp, Glycine max
  Clone ID: 700951702H1
atcaactgaggcagagctgcaggacatgataaatgaggttgatgctgatgggaatggtaccattgatttcccagaattcctgaatctcatggctcgcaagatgaaagacactgattcagaggaggagctgaaggaggctttccgcgtgtttgacaaggatcagaatggcttcatctctgcagcggagctccgccatgtgatgaccaatctcggtgagaagctgaccgacgaggaagtcgatgagatgattcgcg

SEQ ID NO: 23081 - DNA, 250 bp, Glycine max
  Clone ID: 700951704H1
gttacaagaagatatcagagtcaattgaatcagggaacaaattcaatagtaaatatttttttgggtcttgggagagagaataacagacatgttactgtaagtttgtaacaactatatagttatcatccgcacactcttttctttctttctttttcctttggtattgagggttgtaaagaagcttcttgtttgatatgtatgtaaatgatgtaaatgcccaagtcttgtacttattttcctgttaaattca

SEQ ID NO: 23082 - DNA, 249 bp, Glycine max
  Clone ID: 700951705H1
gttaaaacgacgcggagacggcgtcgtcggactcgacaacttcaacgactactacgatccgtctctgaaaaaagcccgcaagtccctcctacgccaagcatgacgtcttcatcgtcgatggcgacctcaacgacgccaagctcttggcaaagctcttcgatgtggtcgcgttcacccacgtgatgcacctcgcggcgcaggccggggttcgctacgccatggagaatccccactcctacgtccacagca

SEQ ID NO: 23083 - DNA, 133 bp, Glycine max
  Clone ID: 700951706H1
gcaacaagagcttctgatccgcgtcgccacgctctccctcatctacgtcctcgccttcatcacgcgcctcttcagcgttctccgctacgagtccatgatccacgagttcgacccctacttcaactaccgcacc

SEQ ID NO: 23084 - DNA, 261 bp, Glycine max
  Clone ID: 700910063H1
ataaaacggagaaaagaaaaaagaaaaatgtaagtggaagaagagaaagtggcatcgcttaggtacagatacagacacaacctggtaaaaatcccgaccccagtgccgcacaattatccttcactcgcagcggaatttaggagtgtggtcttcctgtcttggaagtgctgcttgaaagaggaccttggtcatatggttgcttgtcatcattatttgtgtggtatttatccatgcattatgtggtcagaacataataatcaa

SEQ ID NO: 23085 - DNA, 258 bp, Glycine max
  Clone ID: 700910065H1
tgattatcttgatgctgctgatacacctggatggtattgtggacctaatttcttttcaactgatgtgctccgtaattttgccaagacccagattgattacatccttggaaataacccaaggaaaatgagtatgttgtaggttttggttctcattacccaaaacatgttcaccatagaggagcatctataccgaagaacaagatcaagtatagctgtaagggtggatggaaatggagggacacttctaagcacaaccca

SEQ ID NO: 23086 - DNA, 256 bp, Glycine max
  Clone ID: 700910067H1
cgggtatgggagctacattggacctcataatcttcacatgggtagacggacgaccaacttccttggccagcaagtcccggcaactgtttggcttcgcttggtagctggactgaatgctcggttgaggactgatggcatggatcaattcgtgcttcactaggtcctgttgttctctggatagatagtcatgcaaacccccaacttgagtttcatggagttaatattgagctatggatagttcccagctacagcttct

SEQ ID NO: 23087 - DNA, 259 bp, Glycine max
  unsure (1)..(259): unsure at all n locations
  Clone ID: 700910069H1
ggccacttcgctctctttctccatttctcgcaaaaccactgccacaacctccccnctccgattcaaagtctccgccatggctaccaccatcgccgccccttctaccaaggtggctcccgccgtcattgtcgcggcggaagagtgggtagggccttgcatgacatgggcaccggtcaagacctcctcgttcgccgacgagagtccgtacctcccagatttgagggtctcattgtagtgtgcacaaggaacgatgatcttg

SEQ ID NO: 23088 - DNA, 260 bp, Glycine max
  Clone ID: 700910071H1
tgctgagaaaattgcgacgcggaaacacgcgcatcttcacgatcctggaatccaccgcggcgtatccagcgattccgatctccgacgagtctgcgcaggcgaagaatcgcgaggccagccgccggtgaagaacgcgcgatttgtctggaaatcgcgattcagccacgattcatccccgatactgagactcaaccacgattcaggaagaaaaacgagacaacctccgattcgtatcggtagcagttggaatcatatcgaat

SEQ ID NO: 23089 - DNA, 263 bp, Glycine max
  Clone ID: 700910074H1
acacactgttaataattattctgattcacgaaaaacaggaaaaccccaaaactctctttgttcacaatgggcacagagacctcatcggtagatatttcggaacccctgctcttggatcctcacgggaacgaggaaaggaagagtatttgcgcgaagaggttccggagtggaaggagcagataacgataagagggttggtggtgagtgctgtgttggggagcttgttctgcatcatcacccacaagctaaatctcaccgttggg

SEQ ID NO: 23090 - DNA, 253 bp, Glycine max
  Clone ID: 700910075H1
tggaatatgcttagaaaactgccaagcccacccatattctctcataacttgcaatcatgaactggataacaataacaacaacaacacggccacccgtatagatccacctctaaagagatcatcattattaccaatttccgatttcacagcgactattctttgtgggcatctcttctcaaatgccaatcttccccatcacggtggctgcatgtcgcaggaccggcaatgcaccggaaacctccatcttttctca

SEQ ID NO: 23091 - DNA, 260 bp, Glycine max
  Clone ID: 700910076H1
cttaaaagttattaagagcttttgcttttctttctgcgcgcctttcccaattaagtagttcttccttttctcaaagcaaaaaaaatgttcatcgagagtttcaaggttgagagtcctaacgtgaagtacacaggactgagattcagtccgtgtacaactatgaaaccactgaacttgttcacgagaacaataatggcacttatcagtgggttgtcaagcccaaaactgtcaaatatgaatttaaaaccaacacccatgtc

SEQ ID NO: 23092 - DNA, 261 bp, Glycine max
  Clone ID: 700910077H1
gagcaggctcggtcttcaagtcccacacgcaccaccgcaagggccctgcccgcttccggagcctggatttcggagagcgcaacggctacctgaagggtgtcgtcactgacgtcatccacgatcctggccgtgcgcgcctctcgctaaggtcgccttccgccacccgttccgctacaagaagcagaacgagctcttcatcgccgccgagggtctctacaccggccagttcatctactgcggcaagaaggccaccctcgttgt

SEQ ID NO: 23093 - DNA, 257 bp, Glycine max
  Clone ID: 700910078H1
gatttggaacaaacaacaatagaggggttgtggtgctctgtgtgctgcaatttccttttgagcttgtgtttgattcatcaaatcatcaaagatgactgtaggggcaggaatatctgttgcagatgggaacttatggtgttggggaacaaagtgctgagccatgtccatgacaaggttcttgttacccctgcatgtggtggtgctttgctcaatggggcattcattggggttcaatcccatcacaagggtagccgcac

SEQ ID NO: 23094 - DNA, 258 bp, Glycine max
  Clone ID: 700910079H1
aatttaagtgaggagctagagaatgatgatgaagtctgctatgtgtgcagtggtggttgtagcacttcttcttctggcggaggtggggcccatggctgaggctgtgacatgcaccccaacagagttgagtcctgtcttccagcaatcacttccggtgctaaaccttccaatgcttgttgcacgaagctgaagcagcaaaaaccatgcttatgtggctacctcaaaaacgctagcttgaagcagtatgttaactctcct

SEQ ID NO: 23095 - DNA, 260 bp, Glycine max
  Clone ID: 700910080H1
agaatatttgtggcaaagcagaagtcctgtatcaagtggtatcataataccttaacaatcctccaggcagagtcctcaatcttgctgtcaccctcacacttggttggcccttgctcttggctttaaatgtttcggaaggccttatgatagatttgcttgcgactatgacccatatggtcccatttactctgatcgtgaacgacttcaaatatatatatcagatgcaggagtacttgcagtatgctatggcctgttccgtc

SEQ ID NO: 23096 - DNA, 255 bp, Glycine max
  Clone ID: 700910081H1
gggacacgaaccaaaggtggttattctaacatcatggttgtgcaccagcgttatgtgctccgatttcctgagaacttgcctcttgatgctggtgctcctctgctgtgtgctgggataactgtgtatagccgatgaaatattatgggatgacagagccaggcaaacatttgggagtggcagggcttggtgggttaggtcatgttgcaatcaaacttgctaaggcgtttgggctgaaagttactgtcatcagtagct

SEQ ID NO: 23097 - DNA, 152 bp, Glycine max
  Clone ID: 700910082H1
aatttctccaactcaaaactaagtttcgtctttgtgatctcttgattatattatatcgatttgtgaattgtttttccacaaaaaaaaaattctatcataccatggcttcattatgccggcggttatcccgccgctccggccggtaacttccg

SEQ ID NO: 23098 - DNA, 154 bp, Glycine max
  unsure (1)..(154): unsure at all n locations
  Clone ID: 700910083H1
ctctgtacaattcttcgttcgttctctgcagttatatcctgtgtgagcttcaatggcggacgctgaaaccttcgctttccaggctgagatcaaccagcttctaagtctcatcatcaacacattctacagtcaaggagataancttgcgtgaact

SEQ ID NO: 23099 - DNA, 259 bp, Glycine max
  Clone ID: 700910085H1
gtttgtgggaacattatggagcccagattcgtaatctccgcatcggaggccgaatcccaatcaatctccaaactcctcccttccctcgtttcctcttctcagtccctcgcccgtccttccatctccaacttcccgtcgccgccgtcggactcgccgcctccggccgcatcttcgtgggcgtgaacgtggagttccccggcctccccttccaccacaccatccacgtcgaacagttcctcctcaccaacatggccaacaa

SEQ ID NO: 23100 - DNA, 259 bp, Glycine max
  Clone ID: 700910086H1
gtacttttacaatggagatatggaatagttggtgggttttgcaaattatgcaatttctgggtttttttagtttttggatttcatttgcaaagtttaggactttattctcaagagcttttggttatggccaaggttgtgaagggtgactgcagtacttggatctttgtttccttcaatgggttggtcacagttggttctttcatattcttcctcttggtcctttcctgggcttatttatacgcatttcccagttctcaat

SEQ ID NO: 23101 - DNA, 163 bp, Glycine max
  Clone ID: 700910089H1
ggtttttctcaagtaaatgagactcacctttgcgttttggggggtctattattaggtttgtatgtgggttttctcatgtgaatgagagttacccacatctcatggtgaagttctcatgatttgtggaccttatctttttgtagtgaatatataatattttttc

SEQ ID NO: 23102 - DNA, 263 bp, Glycine max
  Clone ID: 700910090H1
gggcaaccggggaccggttgaaggaaactcaggctatcaacaaaagtctctcctctttgagtgatgtcatattgcgttggcaaagaaacaggagcatgtaccctttaggaattcaaaattgacataccttctcagccatgtcttggtggggattccaaaactttgatgtttgtgaacatctcacctgatccatcttcaactggagagtcactttgctctcttcggtttgctgctggagtgaatgcctgcgagattggtatccc

SEQ ID NO: 23103 - DNA, 245 bp, Glycine max
  Clone ID: 700910091H1
tgacgctgcaataataggcaaaggtggaattgaaggatgggcatggcagcaggcacagcataggcagtgacacaacacaacacagccgcccttggaattaaccatgaaaggcgtgttttcggcgcccggtgatacgtccacttcaagtcccaagtccctcttcacaaaattcctataggcactaagcagtggcggtattacgatttcggtccaaaagccgtgcctccgcttatatgtcttcctgg

SEQ ID NO: 23104 - DNA, 262 bp, Glycine max
  Clone ID: 700910092H1
agatcgtgagaggggcagtagccgagattccgtgagttgcaaaaatgaagacgattctttccaccgagaccatgaacatcccggacggcgtgagcatcaaagttcatgccaaggtcatcgaagttgagggcccgcggaaaattggtgcgagacttcaagcatttgaatctcgattttcagctcattactgacgaaaacggtaaaagaaagctgaaaatcgacgcgtggtttggttctcggaaaacatccgccgccattcgca

SEQ ID NO: 23105 - DNA, 158 bp, Glycine max
  Clone ID: 700910093H1
catccatgctgaaggtggtctaaatcagcagagaattgcgatatgcaatgcagtggctgtggcaagaatattgaatgccaaccttagtgagcctggtttgaagcaggaccagatttggtaagaccagacgatttgaagacagttttgatgtggatcac

SEQ ID NO: 23106 - DNA, 255 bp, Glycine max
  Clone ID: 700910095H1
ggtggatgctatcttggatgtcgatgtcagttgcatgttcatagttaggaaaaacggcaaaacttcactgcacaatgctgctaggtatggtgtccttcgtattgtaaaaacatatattgctcgggatccaggatagtatgcatcaaagatagaaaaggtcaaactgcccttcatatggctgtcaaaggacagtgtacttcagtggtggaggagatattactagctgatccttctatattgaatgagcgagataag

SEQ ID NO: 23107 - DNA, 260 bp, Glycine max
  unsure (1)..(260): unsure at all n locations
  Clone ID: 700910096H1
ggtggctacttttgtggtggcagccacagctggtagcttttaccaagactttgaaataacatggggtggtgagcgtgccaaaatctatgaaaatggaaatcttctcaccctctccctagacagagcctctggctggctttcgttccaaaaaagaatacttgttcggaaaaattgacatgcatntcaaagctcgtgcctggtaactctgctggaacagtcactgcctattatttatcttctctggggcctactcatgacga

SEQ ID NO: 23108 - DNA, 262 bp, Glycine max
  Clone ID: 700910062H1
agaaactcttaggcatagcgaaaatgacaaccaccttcgcgaccgtcgcaggactcggtggtgcatcactgtcatccacctcatctcgtctcacctcagggtttgtgaaatcgccagtgagtgctaggaatccctgaggcaagctgtggcaatgggaaatgggagggttacatgcttcgagaggaattggctgcgggcagattacagtgtgattgggtttgggttgattggttggctagcaccctcaagcgtaccggctatc

SEQ ID NO: 23109 - DNA, 267 bp, Glycine max
  Clone ID: 700910022H1
tctcgagccgattcggctcgagggtctccaccgtgcacgccatgtacggttctcagggactctgagccaccctccgccggaagcgtttcatcccgaatacgacaccgttttgcaggggctgttgtcgtttaacaatgcacgggctcgccctttaccattaacccttacccttactttgcctacagaagcgaccctggcagagctgataaccttgctttttgccttttccagcctaacgctggcagagttgactccaacaccaacctc

SEQ ID NO: 23110 - DNA, 264 bp, Glycine max
  Clone ID: 700910024H1
ggcaaatctcataggtccaagaatatctgttgcatgctttttcagcgaaggtcttaaatcatcaccaaaaccctatggacctataaaagaattattgacagaagacaatcctcccaaatacagagaaaccacagttcggagtatgtacggtatttcgaagctaaaggtcttgatggaacctctgcacttcaacacttcaagatttgagttgaattggtgtgtggtttatttagcacaataaatgaatagattagataagttgga

SEQ ID NO: 23111 - DNA, 269 bp, Glycine max
  Clone ID: 700910025H1
gattataaattttataaatacaaatagacctaggaaaaacatgcctggacatcttctcccacctcatatgcattctatgccacaatcacgcttccaagttactcaagtgcagtctcatgaaaatcaaatgaaccctcatgcaaacaacaaatatgctaggctctgtagcaacaatgcagcagaataatatggcaggcatgcagcataattctctgtctggtgtatctacagtacaacagagtaagatgaattcaatgcaaccaagtacc

SEQ ID NO: 23112 - DNA, 264 bp, Glycine max
  Clone ID: 700910027H1
ggattttcctcatggtttcttaccctttcaaaattcagggaaatttgtgagtggcactctcaattgggctgcaaatcattctattggcccaagttccttctgggttattgtttccttggatctgcataaggaaacattagggaagttctgccacctgattatgaaaaggaggactgctccacccctagtttgggtgttttacaaggatgcctttgcatgaattatgattacaagaaaacccattttgttgtgtggatgatgaag

SEQ ID NO: 23113 - DNA, 259 bp, Glycine max
  Clone ID: 700910029H1
cacctcctcaacctctgcagcgccttcgatccagaaaacatgactaagagaacaaagaaggctggcattgttggaaaatacggtacccgttatggcgccagtctgcgtaagcagattaagaagatggaagttagtcacacagcaagtttttctgtgaattttgtggaaagtatgctgtgaagaggaaagctgtgggaatatggggatgcaaggactgtggtaaagtgaaagctggcggtgcttacactttgaataccgc

SEQ ID NO: 23114 - DNA, 263 bp, Glycine max
  Clone ID: 700910030H1
gcttcaaattctgaggcttttggtggcagcccgcttgttagtattatttttttttttccttttgaattttcaattttgtctgtattctttccttggatattgcttaagaaaaatccttattacccatcttttattttctacacatggggacggacaccgtatattgatatgagaatcaatctagtgactattgttctggttggccttgcatacatatgttcggataataatcattaatgataaatgatacctccagtttcgat

SEQ ID NO: 23115 - DNA, 261 bp, Glycine max
  Clone ID: 700910031H1
ggatttactgggtaaaatatttactgacccaaaaatacttgagcagttgattaatgaacatggaactgcagctaccacagcaagtgcttcctcaaatactgtggatatacccacttctgggttgaagcctgctatccatcagttctggtgtctacacctacacctgatgtgacagcttcatggactacacccacaagtgcagtgggttcattaccttctgggtttgggttgaagccttcaaatccatcagtttctttattg

SEQ ID NO: 23116 - DNA, 261 bp, Glycine max
  Clone ID: 700910035H1
accgaatgagagcatcaaactcttcttcttcgatttccattgcgaacgttactttttcttcttctttctcttcattttcttcgctcttcgatcttcgtccggggactgctccgaataccaccaccacgactgccgatggccacgatcggaggcttacacgactcccaaggctctcaaaacagcgtcgaaaccgaagccctcgctcgattcgccgtagacgaacacaacaagaagcagaattcgcttctggagtttgctagg

SEQ ID NO: 23117 - DNA, 258 bp, Glycine max
  Clone ID: 700910036H1
ttcgcattgccttcgcttctcttacatacgtggcggtgggatcacagtccacatggcctgccatatatgctacagtgatgggaagcttgatactgctctctgcgattggctcgatgtgccattgtgtcattttcacacgctcgtggagactacactgagacccgagagtctatcgttcgccatgtctcatgcatcagtccatgcgattttgaagagtgcatacaacagagtgtgcgcgctgcagtctgtagtgtagtt

SEQ ID NO: 23118 - DNA, 258 bp, Glycine max
  Clone ID: 700910037H1
ccaatttatccctttatttcccatctagtgtagttttccgggtatgtgggtggaaatgctagtgactagtggttatcttggtgggtgtgctctagaatgtacattggcattggttttttagtacctaatactatggatcacaaatttgaatttgggatgtactctgttctccacccatttctggtccgtcttatgtctctcacgtgccatttcaggtcctttcaaggttaatggagttcctttgagacgtgtgaatca

SEQ ID NO: 23119 - DNA, 260 bp, Glycine max
  Clone ID: 700910040H1
gagacaatgatgaagccatcgatgctcagatctctccactcctgcgccacccgcggcgcctctcatctcttccgccgtgggtacgcctccgagccggtgccggagcgcaaggtagccgttctcggcgccgccggcgtctcgggcagcctctctcactgctcatgaagctcaatcccctcgtttcgagcctctccctttacgatatcgccggaactcccggcgtcgccgccgatatcacccacataaacaccagatctgag

SEQ ID NO: 23120 - DNA, 167 bp, Glycine max
  Clone ID: 700910041H1
gtgttcttcctctttaatttctctatagaatacttacccttttctcaagactaacctctcgatccttctcaaaagaagaaaatttaaatggcaactgaaaagcttagaggttgtgcaaagttttttgcaagctctaaccctacttggccatgatctctttaccaatt

SEQ ID NO: 23121 - DNA, 262 bp, Glycine max
  Clone ID: 700910045H1
gcagttccaggtatagttcatgtgctgaagaagggaagcatggaggctcgggaaaatgcagcagcaacacttttcagcctttcagtaatagatgaaaacaaggttacaattggatctttaggagccataccacctagtgacactgctaagtgagggtaaccaaaggggtaagatagatgctgcaacagcactcttcaatttgtgcatttatcagggcaacaagggaaaggcagtgatggctggcgttattcccacgctgatg

SEQ ID NO: 23122 - DNA, 160 bp, Glycine max
  Clone ID: 700910048H1
gaagtatttgtgccaaagcagaagtcctgtatcaagtggtactctaaataccttaacaatcctccaggcagagtcctcactcttgctgtcaccctcacacttggttggccctttatcttggctttaaatgtttcggaaggccttatgatagatttgcttg

SEQ ID NO: 23123 - DNA, 259 bp, Glycine max
  Clone ID: 700910049H1
tcgcaggatgatctgaagaaggcttacaagaaagccgccatcaagaatcaccctgacaagggcggtgatcccgagaagtttaaagagctggcacaagcatatgaggttctgagtgaccctgagaagcgtgagtatatgatcagtatggtgaagatgcgcttaaggaaggaatgggtggtggcggtggccatgatccgtttgatatcttttcatctttctttggaggtgggagtcctttggatcaggtggcagtagtcga

SEQ ID NO: 23124 - DNA, 260 bp, Glycine max
  Clone ID: 700910050H1
gggaaagcaagtaaacattcccccgatactaatgcataattatcccaaaatcaaattataaataactccattatctctcactccttaaattctcaacgccgctcccacttctctccctctctattgcagcatgtgtcttcctcccaacacattctggtcaccggtggtgccggtttcattggcacccacaccgtcgttcagcttctcaaagctggcttcagcgtttcaataatcgacaatttcgataactccgtcatgga

SEQ ID NO: 23125 - DNA, 263 bp, Glycine max
  Clone ID: 700910052H1
cgccgcctcacctccctctccgtccccctccggcaccggtcgagcaaggcggcggcggcgggtggacatgtggtggaggttgacatggcggagtacgacgtggcgctgaagcacttcgacgacctaatccagccatcctcgtcaagaagaacacaccggactggctccccttcgtgcccgggtcctccttctgggtcccaccgcgcctctctccctccaacgtcgccgacctcgtccacaagctctcctacgaggaccaccgc

SEQ ID NO: 23126 - DNA, 262 bp, Glycine max
  Clone ID: 700910053H1
catttttcaataacaagagagagagagagaggcgtagttcacttcacttcaccactctcgcaactttaattcttcattcttcttctctctctttgacaagtgtcaacaattctcctgtctcgttccgtctcccgatccgtacgattttctttgagggtttgatcgcgccgatgtctgtttaccacgaaatcggaggctcttcatccatcatcggcttccgatcctgcttcaccaaccgcgccaggcttcgctgtcccgctaa

SEQ ID NO: 23127 - DNA, 264 bp, Glycine max
  Clone ID: 700910054H1
ggttggggaagcgaaggagaggatgtggaggctgaagatagcagaaggtggaaatgaggcatacatattcagcacaaacaattttgttgggaggcagacatgggagtttgatcctgaagcagggactccagaggacgagcccaggttgaagcagctcgtaaggatttctaccaccaccgcttcaaggtcaagccctgtgctgacctcctttggcgttttcagattctgagagaaaataacttcagacaaacaatacctagtgtg

SEQ ID NO: 23128 - DNA, 263 bp, Glycine max
  Clone ID: 700910055H1
ccatgccaccgacactctcactctcactctcactagtgttggtggtgctgtttttcgccgccgtggacgcgcattttccggcgaccggcgagcttccaacgttccgcgaggcgccggcattccgcaacggaaggaatgccgcaaccgcccgcgaagcgactccgtgatccacatcgcgatgacgcttgacgcgacctacctccgaggctccgtcgccggagtgttctccgtgctgcagcacgcgtcgtgtccggagaacgtcg

SEQ ID NO: 23129 - DNA, 263 bp, Glycine max
  Clone ID: 700910056H1
agaagagacagagaagtaaacaaaccctagtgaaggaagagatgattcgcagaatcatcgcagtggtgagcagatcatactacacgagcaggtcgaagaaaccgagcctgtactcgaaaatcagccccctcgggatcccaacactagtgtggtaccggtgctcgacgattgggtgttcaaggggaacaagcttcgtgtcgcagaacttcaacgcatcattcgtgaccttcgcaaacgcagtaggttctcccaagccctccaga

SEQ ID NO: 23130 - DNA, 263 bp, Glycine max
  Clone ID: 700910057H1
aaacaatacaaaacaccaccctttaaccgtttgcaacggttgctttgaacgaagggagcagtaacggctatgttataatttctgagtttgtgttgtagagagaagttacgttctgagaggccaagatggattttattcgttcttgacgtccctggggacttcctttgtgatatttctggttttgatgattgtgtttgcgtttctgtcaagtaggccagggaacaatgtggtgtactaccccaacaggatcttgaaggggttgg

SEQ ID NO: 23131 - DNA, 161 bp, Glycine max
  Clone ID: 700910058H1
ttgacacgagtgagtgagtgagaacaagacattgcacttgtcatcatcatcaagctctacatttctttatcatcagtcaacagacacgcatgcattcatttgttcagctgccaccgttctcggtatctcatgtatcttcaaagtttgttgctttcagcctt

SEQ ID NO: 23132 - DNA, 262 bp, Glycine max
  Clone ID: 700910060H1
cagaaaatcatgggaatattgttcatgatcaagaaagggatattgtggcagaagattggaaccagggctgtggcttaaagaattcccctaacttttacaaattcacttctatcattgatagggctacaggatcacaagtttgactgacacagaaccatatgttatgaaactaactgaagatcaaatggcccagctgctttctgccttttggattcaagccaatcttcctgataatttaccttcaaatattgaagctatggct

SEQ ID NO: 23133 - DNA, 263 bp, Glycine max
  Clone ID: 700910021H1
gtttctgtctctgtgtttgcggctgaggattccgaacgagcgaccttcttcgtttctcgcaaagtttaagtcatcatgggtaaggaaaagactcacatcaacattgtcgtcattggacatgtcgactctgggaatcaactaccactggtcatttgatctacaagcttggaggtattgacaagcgtgtgattgagaggttcgagaaggaggctgctgagatgaacaagaggtcattcaagtatgcctgggtgcttgacaagctc

SEQ ID NO: 23134 - DNA, 252 bp, Glycine max
  Clone ID: 700909975H1
gaagattgaagatggtgttcctttgactactttgtctcgcaactcggatgaaaagattgaattatgtcgattttccaaggatggaaccaaaccatttttattttgctctgttcaaaaagcaggtgatacttctgtcactgcggtttatgagattagcacatggaataaaattgggcacaagaggctgattagaaagtctgcttcagtaatgtccattagccatgatgggaaatacctttctctgggcagtaa

SEQ ID NO: 23135 - DNA, 256 bp, Glycine max
  Clone ID: 700909977H1
gctttgtaaggttttcagatgagagtgagcaagtgagggctatgactgagatgcaaggggttctttgctcaacaagacccatgaggattggacccgcctctaataaaacccccaccactcagtcccagcccaaagggtgtcaagaggctctgtcatcccggagcctggaactgatttcagctgaaatggttaccattttagtgcatatccttgcttagcttcatatcagaattctcaacctcaaggttcacagaat

SEQ ID NO: 23136 - DNA, 259 bp, Glycine max
  Clone ID: 700909978H1
ctagtcgtctgaaataaaccagagccttagaggaggagtttctggttggagaatagcagaggagaaaatcaggcctaaatgtacaactcatcaatttgcagttttatgtttagtactaatattttgcagcctaggatggtaattgcgaggctgtcatgcacattgaagactcatcaaaacgtgagaatcggacactgcacaaaggtgcccaggaatgtaaacatggagaaactgcaacatggttatttatttcctgaga

SEQ ID NO: 23137 - DNA, 263 bp, Glycine max
  Clone ID: 700909979H1
catttgtgttgtgtgtgcatatggaaagttactactattctggctggcctctggctcaattcaactctgcaccaattagtgatcaattatctcctttttcagtcccaacaacaacacaacaaacactccctcttgttgctacttcaacttctgaccctgcagctgcagcctctcttcaatttggtgagttcccttcgtggcctgcccccattgcagcagaagatagagctgcaagtgcttccaagagccacagccaagcagag

SEQ ID NO: 23138 - DNA, 260 bp, Glycine max
  Clone ID: 700909981H1
atcgacgaccacaactccgcggaggaccgaacctacaagctcggactgaaccggttcgctgatctcaccaacgatgaatacagggccaagtacttgggaaccaagatcgatcccaaccggaggctcggaaagaccccgagcaaccgctacgcgccacgtgtcggcgacaaattgcctgattccgttgattggaggaaggaaggtgctgttcctcctatcaaagaccaatgaggctgtgggagctgttgggccttctcagc

SEQ ID NO: 23139 - DNA, 256 bp, Glycine max
  Clone ID: 700909985H1
ctcggggagtggaatacttgcacagcttggctcagcaaagcttcattcacagggacttaaagccctcaaacatattgttgggtgatgacatgagagccaaggttgcagattttggtttggataaaaatgcgccagatgggaagtattctgttgagacacgcttggctggaacatttggatatcttgcacctgaatatgcagctacgggaagagtgacgaccaaagtagatgtgtacgcatttggagtagttttgat

SEQ ID NO: 23140 - DNA, 152 bp, Glycine max
  Clone ID: 700909986H1
catgctcctatcaccacccaggtcctacggcacgcaccggataacttcacggagcaagatcatcttcggcagggcgaagtgtggcagttgcaaattttcgggctttgcttgacggtacactgattgctgtcaagagtctggaatctggctca

SEQ ID NO: 23141 - DNA, 201 bp, Glycine max
  Clone ID: 700909987H1
gaccaaggtgctgctacctatgcagttttcttaccccttctcgaaggagatttcagagcagttcttcaggggaatgatcaagacgagattgaaatctgtgtaggaaagtgcgttgtacctgactgtgagacggaatttagatagggtactcattactggtgttatagttgaggggctagggatccgataccttgtctgaag

SEQ ID NO: 23142 - DNA, 247 bp, Glycine max
  Clone ID: 700909988H1
aatgctactatttcaatccaggttcttcggcaagtaacggataatttcagtgagaagaacattttgggtaggggagggtttggggttgtttataaaggggaattgcatgatggaactcaaattgctgtaaagagaatggaatctgttgcaacagggagtaagggattgaatgagttccaagcagagattgcagttcttagtaaagttcggcacaggcatttggtcgcccttttagggtattgcatta

SEQ ID NO: 23143 - DNA, 95 bp, Glycine max
  unsure (1)..(95): unsure at all n locations
  Clone ID: 700909990H1
catgaatttcccaaaaagccctcaacccagaccctcatctccttcctcttcctacattccacacaacatacgattcctctnaatggggatgtgct

SEQ ID NO: 23144 - DNA, 254 bp, Glycine max
  Clone ID: 700909993H1
caaacaaaccagcagatgggaaacgttttattcgatcccttgggaaggagcaacaagagcttgctgaaagagtgatggtaactcgacttcacctttatggtaaatgggtcaagaaatgtaaccatgctgagatatatcaagaaatctctgatgaaaacttggagttaatgagggaacggctcatggagacagtaatatggcccacagatgacacaaacacagaaaagattggttgataattcatctcaaatttt

SEQ ID NO: 23145 - DNA, 261 bp, Glycine max
  Clone ID: 700909994H1
atccaaacgtcattaagattcgcgaggagttcccaccacgtagcaagctagatacacaagcctacggtgatcatacctgtataataacaaaacaacatttggaacctaacttgggtgggctcactgttgagcaggctatccagtgcaagaagctgttcatcttagatcaccatgactatctcattccatatttgaggaaaataaatgcaactaccacaaagacttatgctaccagaaccatatttttcttgaaaagtgatg

SEQ ID NO: 23146 - DNA, 261 bp, Glycine max
  Clone ID: 700909995H1
aattactagagtattcttttaaattttgtctgtgaaaaaaggtcttttttttttatgtatttctaacaaaaattgtctctcttttttaataatctttgaactggccttattgtttcagtatatcaaatgtctgaattgcttgattagctcctggccgccatggttcataaacaaattttgagctttctgtctccctgattacattttggttattccggccagccttatgtcaaatgtaaaggatgccttagtgactagttg

SEQ ID NO: 23147 - DNA, 255 bp, Glycine max
  Clone ID: 700909996H1
ggatgttacaaagaacttccttgttattgttgctgagaatggaaggcttaaaaacatagacaccattgcaaagagatttgcacagttgtcaatggcatataagggagaagtgcaagcgactgtgaccactgttgttcctcttccccctgaagaggaaaaggcattgaaggagactcttcaggaaataataggttctggagcgaaggttcatcttgaacagaagattgatccaagcatacttggtgggcttgtgct

SEQ ID NO: 23148 - DNA, 264 bp, Glycine max
  Clone ID: 700910001H1
gtttcgaccatcccctgttccttttctgttgcttgttcctctcttgtacgcaaacccatcaccacgtttgggtttgtgtaccacattccataacataaccttgttgtcctcaaattccagttgttggatttgtacagaaggtgaaaatgttttggtttagaaaaacaccagcaccaactgaatcagataagaagacaacccttactgcagaaaaaagaactgcttcagaacctgtcctgccagttccaaaatctaaaggaaact

SEQ ID NO: 23149 - DNA, 261 bp, Glycine max
  Clone ID: 700910003H1
ctgcttttcaaacattgctgtatgatccaaatgcaactctggggtcagagtggcaaacttgtgacataaggccatctggtttgtgcttgtgttgtgtaacaatcaaggcatgaaaccttgtcttatctggatcttggagtgatggatacatctatggaattctctgcattttatcaagaatgaagacagcagtgagtgtgagtgttcctcacgatcacatcatactattatctgattataattctgtgctttagcttgttt

SEQ ID NO: 23150 - DNA, 246 bp, Glycine max
  Clone ID: 700910006H1
cagatcccgctgtctagcggaaacaaacaaaggcagaaaatcatttcctccttaaatctgttcctattttcattttcatttcaacttaacgttttcatgggtattcgcttttcgtcctcccaggcggcgccgtcggatcgtcgccggcgtcgagtttgtgcgaattgcccgagagtcgtgtcgctcagatcatgacctacatggatccgccccagatttgcaagctcgtaaccctcaatcgggctt

SEQ ID NO: 23151 - DNA, 266 bp, Glycine max
  Clone ID: 700910008H1
ccctcaccaaagaagaaccaaaacaatggcggatcaactcaccgatgaacagatctccgagttcaaggaagccttcagcttgttcgataaggacggcgatggttgcatcacaaccaaggagcttggaactgttatgcttcattgggagcaaaacccaactgaggcagaactccaggacatgatcaatgaagtggatgctgatgggaatggtaccattgacttccctgagttcctaaacctcatggctaggacgatgaaggacactg

SEQ ID NO: 23152 - DNA, 264 bp, Glycine max
  Clone ID: 700910010H1
caagggaaatctcaaagtgtctgattttggattaagtgcattgcaaaaggtagcattgttcctttgaaccttatcctcagttccatcataagtattctcttactgagtcaaatttggatacgttatcagcataacgagtcttaaacacgcggtgtggatccccaggctatgtggcacctgagctgctattgagcaaggggtatgatggagcagctgctgatgtttggtcatgtggggtgatcctttttgaattacttgcaggct

SEQ ID NO: 23153 - DNA, 268 bp, Glycine max
  Clone ID: 700910011H1
attccacaatactagcaccctcaccatgaaactcttccactacctcttctcactactcacactactcttcctctagcaagccaaagaaggagtttccattagccctttgcaattgatcacacacccacttgacccctaacaaagcaagaaatcaccctcgtccaagccacagtcctaaagagataccccacaccacccaaccatgtcttcttccactacgtcggcctcgtagatcccgacaagacccacgtcctaaagtgggcctcct

SEQ ID NO: 23154 - DNA, 268 bp, Glycine max
  Clone ID: 700910013H1
cgtgtttacccaaggccaagggaacagagagcaacaattctacctctggttcgaccccaccagaaacttccacacttactccatcatctggaagccccaacacatgcatattcttggtggataacattcccataagggcttcaagaatggtgagactattggcgttcctttcccaaagaagcaacccatgagaatctattctagcctgtggaacgctgatgactgggccaccagaggtggtttcgtgaaaactgattggtccaatgca

SEQ ID NO: 23155 - DNA, 263 bp, Glycine max
  Clone ID: 700910017H1
cacaaacgcacactgaattcaaaaacatcgaaagagagaggcatggccgagcaaaccttcatcatgatcaagccagatggcgttcaaagaggccttattggcgagattattagcagatttgagaggaagggtttcacttgaaagggttgaaactcgttactgtggaccgtccttttgctgagaagcactatgctgatttgtctgcaaagcctttctttagtggtttggtggattacattgtctctggccctgttgttgccatg

SEQ ID NO: 23156 - DNA, 263 bp, Glycine max
  unsure (1)..(263): unsure at all n locations
  Clone ID: 700910018H1
agcatacttagaaacagcaactatgtctctcatgcagcttactagctcccctgttggctcactggtccgtttcattgtaatatttgctttatggtacagaaccatggctttggccaagttgccaccaaacgcttatcagttccagcagttttagcgtttggagattccatcgtggacccaggcaacaacaacaacataaaaacattgatcaagtgcaacttcccaccttatgganaggattttcagggaggaaacccaacggt

SEQ ID NO: 23157 - DNA, 221 bp, Glycine max
  Clone ID: 700910019H1
gaggcatgccaagtgggtcgaattgcttgagcaattcccctatgtgatcaggcacaaaaaaggtttgcctcggcctaagggaggaaaggactcgatttttgtggtggttgagaggttatctaagatggcttactcatagcctataagaagataagtttgggcaggttaaagcagaatatgtcaagaagttgcatgagaaaaccaaggcccaaattgagaag

SEQ ID NO: 23158 - DNA, 261 bp, Glycine max
  Clone ID: 700910020H1
ctagtggcgatcggatccagctacagcatagagatcaaggaaggaaggaaggaagatgttgggtgttataaggcacaagagtattcgccctgccttctccgcaatcagacacttgtcttctgcagctaaagagtactgtcagggaggctctgaactccgcactcgatgaggaaatgtcagctgatcctaaagtgttcttgatgggtgaagaggttggggaatatcagggtgcatacaagatatccaaggggctgctcgaca

SEQ ID NO: 23159 - DNA, 253 bp, Glycine max
  Clone ID: 700909974H1
cactcattgccactgccatggacctcacagagaaaaacattgaacttctcctccttgatctcaaaccacacatcgttttgttcgatttttccacatattggctaccaaacttggctcgtagtgtaggaataaagtctcttcagtactggattattagccctgcaacagtagggtacatggcatccccagctagacaaagagaagatgacatgagaaaaccaccttcagggttccctgattgttccatcaagct

SEQ ID NO: 23160 - DNA, 259 bp, Glycine max
  Clone ID: 700909944H1
gtcttgcaattgaagttgaagtcttgcccttctctcttcaactccaaacacaagacatcatcatccatggctgcctccgtctccactgtcggagctgtcaacagagctcttttgaacctgaatgggtctggacctggggtttcagctcccagttcatccttctttgggagcagcttgaagaaggttattggctcaagggtccccaacacaaagatttcctctggaagcttcaagattgttgctgtagaagagaagaaag

SEQ ID NO: 23161 - DNA, 258 bp, Glycine max
  Clone ID: 700909945H1
gcggaatttacatccaccaccactaacactaacagtaacagcggtctcaggttgaaagccaaagtagccatagtcaccggaggtgcaagtggcatcggcgaacgacggcgcgtgtgttcgcggagcaaggcgcgcgtatggtggtgctcgcagacatccaagacgagcttgggaatcaggtggctgcgtccattggaacccagcggtgcacctacatccactgcgacgtggcagacgaagaacaagttcaaaacctcg

SEQ ID NO: 23162 - DNA, 258 bp, Glycine max
  Clone ID: 700909946H1
ctcaaataaacctcaactcattgtgtgaccaaagttattattacattgcataatcaaccatgtcaatgaagttgtacgcttcccttacctttgtggtgtggcttttcatggccacatcgtccctagcccaatacgttctcgacacaaaccgcgaacgcgtcgacagcgatgatgagtactacatccggccagccataacggacaacggagggcgtttcacattgatcaacagaaacaggtcgtgtcctttgtacgttg

SEQ ID NO: 23163 - DNA, 264 bp, Glycine max
  unsure (1)..(264): unsure at all n locations
  Clone ID: 700909947H1
ccgagttcttgcactccttggaccaattcctcgttttgacattcattcccagaaaacttttccacacaccatattcttttcatancaaaattccaattttccttcacaaagaacacaacacaaacatgtagactcgcacctctgcctcaatctctgcaacatggattccatctttctctgtcttttcctacattattggtatgctcgtcacaagcaggatgtaggatccaacagaatcaaacttgttgcttctttcgcacatca

SEQ ID NO: 23164 - DNA, 266 bp, Glycine max
  Clone ID: 700909948H1
caccaattaagctttcaagagacaaactgttttgaaaaatgggatccaaggttcttgcatccgttgcccttctcctctccatcaacatccttttcatttccatggttagctccagcagccactacgatccaccgcccccaccttgctacgtccctgctcctttaacaccaccaccatcattgtcaccaccaccgtcattgtcaccaccaccaccgtccagacctagttgtccggatctgagtgtttgcctcaatattttagacggg

SEQ ID NO: 23165 - DNA, 263 bp, Glycine max
  Clone ID: 700909949H1
atcgacgaccacaactccgcggaggaccgaacctacaagctcggactgaaccggttcgctgatctcaccaacgaggaatacagggccaagtacttgggaaccaagatcgatcccaaccggaggctcggaaagaccccgagcaaccgctacgctccacgtgtcggcgacaaattgcctgattccgttgattggaggaaggaaggtgctgttcctcctgtcaaagaccaaggaggctgtgggagctgttgggcattctcagcaat

SEQ ID NO: 23166 - DNA, 258 bp, Glycine max
  Clone ID: 700909951H1
cacgcacacgcttgtataattatgtgtgaatcatcttgtttttttggctggtaattgatttttgaaaaaaggtagaggcaatggaatgatacccgtattttgtaacaacatccggcatgaattaatttgctaaatgcggtgtcagtgggagcggtggggcgtggcagaccaaaatgattataatgattcggtggtggaggaatcactgactgtgatgggccaactccattttctaccaaaagtgccgttcccagaccc

SEQ ID NO: 23167 - DNA, 252 bp, Glycine max
  Clone ID: 700909952H1
caaaaagaaagaatcccaggcgaggagaaagatggaggggaaggagcaggatgtgtcgttgggagcgaacaagttccccgagagacagccgattgggacggcggtcgcagagccaagacgacggcaaggactaccaggagccggcgccggcgccgctggttgacccgacggagtttacgtcatggtcgttttacagagcagggatagcagagtttgtggccacttttctgtttctctacatcaccgtcttaa

SEQ ID NO: 23168 - DNA, 254 bp, Glycine max
  Clone ID: 700909953H1
caaaaaaaccctctctttctctctcttccaaaacctaattttcattttttctcttcaaacaaattttcaaaatgcgtgagatccttcacatccagggtggccaatgcggcaaccagatcggcgccaagttctgggaggtggtttgcgcagacacgggatcgaccccactggaaggtacggttgggactcagagcttcagctcgagaggatcaatgtctactacaacgaagccatctacggccggttcgtgccgc

SEQ ID NO: 23169 - DNA, 252 bp, Glycine max
  Clone ID: 700909954H1
gagagaaacaaagcagcacccatttggatcctctcttctcttctttgatctccgttaccctttttgttttctcaacagagagagagagagagaatctttcgaagttcgtttgcgtgtgttgtgtggtcagtcaccgatggcagcaccacctgcgagggcacgtgccgattacgattacctcatcaagcttcttcttattggcgatacggtgtgggaaagagttgtctgcttttgcgattttctgatggttcc

SEQ ID NO: 23170 - DNA, 203 bp, Glycine max
  Clone ID: 700909956H1
ctaaaatatataggccctaatatgatttagcgtaagtgctgttttttgtcactagtacaatatgctatattgatgatcgatttttgaaatttttgcgatattggtctcattttgtaaaatatagtgatcttaatctatctgttaatttgtcacccatcactcaatggagatgttgacatgtacatatggttggtatggttgcg

SEQ ID NO: 23171 - DNA, 151 bp, Glycine max
  Clone ID: 700909957H1
ctttttgtttgtttgcaggagctgtttttgctgtcaaaataggtgagttaattagtatgtgttataatagtttgacattgttattactattgattatatgatggtatgcaccactttgtgtctttcactcttctaataattaagaatgtta

SEQ ID NO: 23172 - DNA, 253 bp, Glycine max
  Clone ID: 700909958H1
tgctatctgcttcctcgtagtacttcattgagagagacatggacactgtactaagtactacgctgctactcatgttttcatgctccatcgtgcatgttcttcgttcactacaagcaagaatgagaagaaaatcaaactacaatcttccaccaggaccctctctgctcaccatcattagaaactctaaacaactctataaaaagccacagcagacaatggccaagcttgccaaaacctatggccccataatgcg

SEQ ID NO: 23173 - DNA, 253 bp, Glycine max
  Clone ID: 700909959H1
ctcttcttctcttgcggctagggttttagcgcagttcttctagatttaaggaagctgggtaaggaaaaggttcacatcagtattgtggtcattggccatgtcgactctgggcaatccactaccactggtcacctgatttacaagcttggaggcattgacaagcgtgttattgagaggtttgagaaggaagctgctgagatgaacaagaggtctttcaagtatgcctgggtgctggacaaacttaaggctgagc

SEQ ID NO: 23174 - DNA, 259 bp, Glycine max
  Clone ID: 700909961H1
aaaaatggttcgaactgtaagagttgagaagaggataaatgagattgttaacaggctaaacaagacaaaagtggaaaggaaacctgatttgaaagctgagcgagaagcagttaatgcagctgagagagctgagagaaaacaacaactgagagaaaaaaaacgtcgggaggaattgggaaggcttgaaaaggagaaacaaacagagcttaggagctacaagggtttgatggttgcagaaaatatgacatccaacaaacaa

SEQ ID NO: 23175 - DNA, 263 bp, Glycine max
  Clone ID: 700909963H1
aaaatttgacttattttgattttttatgattgatactagtgtgagcagttgataagagagatgatgatcaacgtgaaggaatcgaccatggtgcggccggcggaggaggtggcgcggcgggtggtgtggaactccaacgtggacctggtggtccccaatttccacacgcccagcgtctatttctataggtccaatggcgcccccaactttttcgacggcaaggttatgaaggaggcactgaccaaggtgctggtgcccttcta

SEQ ID NO: 23176 - DNA, 262 bp, Glycine max
  Clone ID: 700909964H1
ctagtggcgatcggatccagctacagcatagagatcaaggaaggcaggaaggaagatgttgggtgttataaggcacaagagtattcgccctgccttctccgcaatcagacacttgtcttctgcagctaaagagattactgtcagggaggctctgaactccgcactcgatgaggaaatgtcagctgatcctaaagtgttcttgatgggtgaagaggttggggaatatccaggtgcatacaagatatccaaggggctgctcgac

SEQ ID NO: 23177 - DNA, 259 bp, Glycine max
  Clone ID: 700909966H1
ctcctactgcctccccgccacctccagctccaccggccgcctctccttcggcaccaccaccacttcctacgtcaagtacacccccttctccaccatctcccgcggctcctccttctacggcctcgacatcaccggcatctccgtgggcggcgccaaactcccagtctcctcctccaccttctccaccggcggtgcaatcatcgactccggcaccgtgatcacccgcctcgcccccaccgcctacaccgccctccgctcc

SEQ ID NO: 23178 - DNA, 256 bp, Glycine max
  Clone ID: 700909967H1
gcttattatgggatgagcacaaacctggtgctttattttaagaagcggctacatcagcatagtgctattgcttccaagaatgtctctaattggagtggaacttgctatatcacaccattggttggagcatttttggctgattcctaccttggaagatattggacaattgctgttttttcaataatttatgctattggaatgacactgttgacattgtctgcgtcagttcctggcataaaaccaacatgtcatggac

SEQ ID NO: 23179 - DNA, 254 bp, Glycine max
  Clone ID: 700909969H1
gcgttttctgcgtcatctccgattccccgacaatggccacccaaatgagcaagaagagaaagttcgtagctgatggagtgttcttcgctgaactgaacgaggttctgacaagggagttagccgaggacggatactccggcgtggaagttagggttacgccgatgcgcaccgaaatcatcatcagagccaccagaacccaagccgttctcggtgagaaaggaaggagaatcagggaacttacctcggtggttcag

SEQ ID NO: 23180 - DNA, 255 bp, Glycine max
  Clone ID: 700909970H1
taataatcctgtttaattaactaaaggctagcttcataactcttcccctcaccccaccaaatcaccccctttagtttcctggtattcttcttccacgtaggtttaattttgaggacacaagagttttcaaagcatcattggtggtggattgaaagacttggtgagtgacatcgtacacatgggaagacactcttgttgctacaaacagaagttacggaaaggcctttggtctccagaggaagacgagaagcttct

SEQ ID NO: 23181 - DNA, 250 bp, Glycine max
  Clone ID: 700909971H1
ctgcaaaggattctacccgccgctcgatgggaattgcgcttcaaggcgtctcgtagggctaatccgcctcacgagggtcaccaacggcacgtgcctttggggggccgaggccccctactgctggtcggcaaacggacggcgggcgcacgcgtcgcttctagcccggattctgacttagaggcgttcagtcataatccaacgcacggtagcttcgcgccactggctgttcaaccaagcgcgatgaccaatt

SEQ ID NO: 23182 - DNA, 247 bp, Glycine max
  Clone ID: 700909972H1
gtcagttgctgaggagcgagctggacggaagctgggtggacttagggtcctcaattcttactgggtgaatgaggactctacttataaatactttgaggtgattctggtggatgtggctcatgctgctattagaaatgatcccagaatcaattggctcgccaatccagtgcacaagcacagagagctgcgtgggctcacctctgctgggaaaagcaacaggggtttacgtggcagaggacatctgtac

SEQ ID NO: 23183 - DNA, 252 bp, Glycine max
  Clone ID: 700909973H1
cttttggtttcttctctccttgataacagcatgtgctggaacatgggaagcctcatgagcgttcttctataataaaggaattagcagacaagatagtgcaaatgagtcaacagaagtttgcctccaatgttgtggagaaatgtttgacctttggaggtccttctgaacgccaattactagtgagtcagatgcttggcaccacagatgaaaacgaacctcttcaggcgatgatgaaagatcaatttgcaaatt

SEQ ID NO: 23184 - DNA, 256 bp, Glycine max
  Clone ID: 700909943H1
ggcttttgcaatactccccaagtctccggtgcactgcgcttgaagcatgtgcacatcctttctttgatgaacttcgtgaacctaatgctcgcttgccaaatggtcgtccatttccccctctattgaacttcaaacaggaatgatctggagcatcttccgagcttgttaataagttgatacctgaccatgtgaagcggcaaatggggatacagtttatgcatctgggaggatcgtgacgatacagcttacgggacat

SEQ ID NO: 23185 - DNA, 260 bp, Glycine max
  Clone ID: 700909903H1
gtgtacatagagagattaggccaagtcgatgccacgaagatgatgcaagtcacaaccatggatcgctacatcaaataccacgtaaaggagtttgagaggacatttgatgttaagtttgcagcttgttcaattgctgcaaagaagcacatagatcaaagttcaactatcctggacgtgcagggagtggggcttaaaagcttcagcaaacatgctagggaacttgttactcgccttcagaagattgacggtgacaactatcc

SEQ ID NO: 23186 - DNA, 258 bp, Glycine max
  Clone ID: 700909904H1
gttcgttgtcactgcagtcgccaccgacaccagagctgtgggagaactcgcgggaatcgcggtgggagcgactgtgatgctcaatatactcatagcagggccagtatccgggggctcaatgaacccagtaagaacactaggtcctgctgtggcggcaaacaactacaaagccatatgggtctatctagtagctcccatacttggagctttagctggggcaggtacctacactgcagtgaagctgcctgaagaagatga

SEQ ID NO: 23187 - DNA, 154 bp, Glycine max
  Clone ID: 700909906H1
cgctctgttactgtctctgtgtttgcggctgaggattccgaacgagcgaccttcttcgtttctcgcaaagtttaagtcatcatgggtaaggaaaagactcacatcaacattgtcgtcattggacatgtcgactctgggaagtcaactaacactg

SEQ ID NO: 23188 - DNA, 155 bp, Glycine max
  Clone ID: 700909907H1
gtttttgtcgatagaagccatcagtcatggataggcttctatcatcgtcttcacccccttcttttacatttctcactcgattcgaatctgcaactgcaagattcaatttctctccgtcaacacgttctcactctcacttgaagcggctctcctca

SEQ ID NO: 23189 - DNA, 255 bp, Glycine max
  Clone ID: 700909910H1
atttcaatacccttgctgggacacgcgccatatctccgttcactgctccaccaagcattgtacaggctatcactgcgctatggacccttgatccacgtcatgatcggttcgaagcacgtggtggttccgtcgtcggcggagacggccaagcagatcctcaaaacctcggaggaggcattctgcaaccgtcccttaatgatagcgagcgagagcctaacctacggcgcggcggactacttcttcatcccctacggc

SEQ ID NO: 23190 - DNA, 260 bp, Glycine max
  Clone ID: 700909912H1
gcctctgcttccgacacaaatcaatctttctgatcatatattattcttttgtttttttaatttattctccatacacatgcagacactaagttcgaacaagttcaggagcggcatggatttcttccaccgcgcgaaggcggtgcgcctccgcagccaccacgacaagtacctcctcgcggaggaggacgaggagtcggtgacgcaggaccgcaacggctcctccaaaagcgcacggtggacggtagaatacgtggccgaat

SEQ ID NO: 23191 - DNA, 257 bp, Glycine max
  Clone ID: 700909913H1
aatggaagttctatgttgccttttctatcatccgggcagctccaattcctgcaggagtgtataatagatgggttaagggtaatgcatcgggcggtgaacgtgctcgacacacagaagtacttacaaatggccttatagatactgcgtggaaatttattgaacacaaatctgtgcttcctcagcatccaccctcagatgcaaacgctcaagactattccaaagagttaccgaatgggactgatatcacaggtcctctc

SEQ ID NO: 23192 - DNA, 269 bp, Glycine max
  Clone ID: 700909916H1
gagcaccaattacgctttcacgagacaagctgttttgagaaatgggatccaaggttgttgcatccgttgcccttctcctctccatcaacatccttttcatttccatggttagctccagcagccactacgatccatcgcccccaccttgttacgtccctgctcctttaacaccatcaccatcattgtcaccaccaccgtcattgtcactaccaccatcgtcaggacctagttgtccggatctgagtgcttgcctcaatattttagacggg

SEQ ID NO: 23193 - DNA, 262 bp, Glycine max
  Clone ID: 700909917H1
aaaggattctacccgccgctcgatgggaattgcgcttcaaggcgtctcgtagggctaatccgcctcacgagggtcaccaacggcacgtgcctttggggggccgaggccccctactgctggtcggcaaacggacggcgggcgcacgcgtcgcttagaacccggattctgacttagaggcgttcagtcataatccaacgcacggtagcttcgcgccactgacttttcaaccaagcgcgatgaccaattgtgcgaatcaacggtt

SEQ ID NO: 23194 - DNA, 138 bp, Glycine max
  Clone ID: 700909919H1
cacaggctgcgcagtgtatgaacgttgaaggagagcgtagaggcagtggctggcaattgatgattgctctttggagaatcgaatcgagttaatttcggatcgtgtgagtgtccgatctagaaatccacaagatcaatg

SEQ ID NO: 23195 - DNA, 253 bp, Glycine max
  Clone ID: 700909920H1
ggcctggcaggagtcactgctgccacaactacttatccattggatcttgtaagaacacggctggctgcacagacaaattttacctactacagaggtatctggcatgctttacacacaattagcaaggcagagggaatatttggcctttataagggacttggaactacactcttgactgtagggccaagtatagctatcagcttctctgtgtatgaaaccgtgagatcttattggcagtcaaatagatcggatg

SEQ ID NO: 23196 - DNA, 242 bp, Glycine max
  Clone ID: 700909921H1
atcgcgagccgccgtccttttttttttttttttttttttttggggcgtgtttaaaagtttaccccattttttccatgtgacttctttggggttttttgtaaattttgttgttttggaaattaagccccccctggggttaccgtttggggattgtttccactgtccaatggggggggatttttggcaaatgtccaatttagggggggacctttaatgtcctatgccccgtaattttgggactt

SEQ ID NO: 23197 - DNA, 154 bp, Glycine max
  Clone ID: 700909922H1
gccggaaggacggaggattttctctctcaggtcggcctctccacgctccacagcgccgtcgcggttctcaaatcctgccaaaagattctccccttcgccgccgaggtcaacgtcgttgaccgctgcgttgaggtcatcagctgcaaggcttgca

SEQ ID NO: 23198 - DNA, 161 bp, Glycine max
  Clone ID: 700909923H1
ttggaatccaaaaatgagagacatcatcagcattcacataggtcaggccgggatccaggttggcaactcctgctgggaactctactgcctggaacatggcatccagcccgatggcatgatgccaagtgactcctccttcggtgtgagcctcacgacgcctt

SEQ ID NO: 23199 - DNA, 250 bp, Glycine max
  Clone ID: 700909924H1
atcatttcctatgcacttgctcctccaaaacccacccactcctgctaagcccctgtgttccagcagcttgaatgactcgtacctcattctgggttcctgcaatggcttactgtgtctgtatcatattcctcggtgttacgtagcgttgtggaacccttcaatcagattcacatcaaaaagattgcccaccggcttatcacctggcgagggttttagtactttccatggttttggctatgatgcagtaaat

SEQ ID NO: 23200 - DNA, 256 bp, Glycine max
  Clone ID: 700909926H1
attatgcaacgcgattaggaattaaaaaaatacaaagcttagcgacgcgggtttcttccataattaagcataattagtggaacagataatgttattttggcggtaatagattagatgctgaatgatgatggacgaatgagtgttagtttcagcaattctcttccgtaagcaaagagcagtagctgaaacaaacaaacgaacactgtaagcatgaacaagcgccaagaagatttgcgcaacatagctactaccctcg

SEQ ID NO: 23201 - DNA, 255 bp, Glycine max
  Clone ID: 700909927H1
gaatatattatccactcgtggagtgcttgagcaaggtgcatgcttagatgctctaatctcattgatggtggattcatcattcaatcaaatggatttcgagaaatgtagtggtattatggaagttgctgaccttctaagagaccaagaactggatgaagatctcaggttaaaatgtggagagtttttgctgctgctcattggacatgtcaatggaagagatacgcctcctttagcaactatacacgaagatacaag

SEQ ID NO: 23202 - DNA, 264 bp, Glycine max
  Clone ID: 700909930H1
tggtaccagagtagagtagtgcggacgccaagagaaacgaaatccctcgctttgagaaatgggtgtattactcttccggtgggttctgccactgactctgttgctcacttgcgcgttaggtttccaatcggacgagcttctcctcgacgaccaagagttcggcatcgagggaggacgagcctccttcgattccgattcgcacccatctcccacctccaccttgaggaagagcttttctgactcctcctccgactccaagatcca

SEQ ID NO: 23203 - DNA, 266 bp, Glycine max
  Clone ID: 700909932H1
gaactagtaccatgttgctgtcacaagccaaactgcacaacaacaacaacatctccaatgccattaacatgattatgaagaagaagggtaataacaataacaacaatcattgttcacctgctatactttatcactacccttgccctgatggtgcttttgctgcccttgctgcacacctttactttaaggccacttcatcattctctcctctttcctttcccaacactgtcttcaacccctcagtgctgaagatttcctctgaatga

SEQ ID NO: 23204 - DNA, 262 bp, Glycine max
  Clone ID: 700909934H1
gacaggttagttttaccctactgatgacagtgtcgcaatagtaattcaacctagtacgagaggaaccgttgattcgcacaattggtcatcgcgcttggttgaaaagccagtggcgcgaactaccgtgcgttggattatgactgaacgcctctaagtcagaatccgggctagaagcgacgcgtgcgcccgccgtccgtttgccgaccagcagtagggggcctcggccccccaaaggcacgtgccgttggtgaccctcgtgagg

SEQ ID NO: 23205 - DNA, 111 bp, Glycine max
  Clone ID: 700909935H1
gcggtccttaaacctatctctctctcactcaatcaatcagatggacatcggtttcatagactaccagttgcgctacgaccttcgcgcacacgaagacgacgttcgtggaat

SEQ ID NO: 23206 - DNA, 146 bp, Glycine max
  Clone ID: 700909936H1
ggctatataatcggtctctgttgttgatactggatccgtaaacctccacttgaagctacgtggttatatattctggggatacatgcatatctaagccaggatatatatcagggatgagtcacctaccatcaaacttgttggtcgtg

SEQ ID NO: 23207 - DNA, 254 bp, Glycine max
  Clone ID: 700909937H1
agagcattcaccattttcttgtggtttggtttcctagagacaagcagtactcccatggaacaaaacaacaaaagccttgtttcttctaaattcttatgtttatgtttgttgatcaccttgatcagcattattgttgctccacaagcggaagcagcacgagcatttttcgtgtttggcgattcgcttgtagacaacgggaacaacaatttcttggccaccacggcgcgtgccgattcatatccttatggcattga

SEQ ID NO: 23208 - DNA, 257 bp, Glycine max
  Clone ID: 700909938H1
ggcaaagatagtggcagagctccaagctgtgaagcacaacagtggcaagtcctacaatcagttagcggaggagactggactcaccaacgtctatgttgctcagcttctcaggagacaggctcagctcaatccccaaactgcccctctacttcgggcagcgctgcccgacctgccccaagaccttgtttctgagatgatgagaccccctttgaggtcttatgacctaatctcatccaagactccactgtctataggtt

SEQ ID NO: 23209 - DNA, 233 bp, Glycine max
  Clone ID: 700909939H1
gtgttttttcctggtgtgaaatatatttgtaaaacaagtgtattggattgtatatgtgatgttggtgctggatcatccaattttatgcatataaaaaattggactttgtattggagtttggtgctgattgacagcgttgttttcatgcactataatgtgcgtttgccctgttcttttgttcctctgcactccaagttgaatactttttgtaagtgtttatttttattataatc

SEQ ID NO: 23210 - DNA, 254 bp, Glycine max
  Clone ID: 700909940H1
gcccttttgctgaaaggggttttaattgccttgctaatgggagaaaagatagaggttacacaaaatggaggtggaaaactaagaactgtgagattccaaggtttgatgtccgtggaatactcgaacgacttcgtgggaaaagggtggttttcgtcggcgattctttgagtaggacgcaatgggagtccatgatatgtttgctaatgacaggagttgaggataagaagagtgtctatgaaatcaaaggcaacaag

SEQ ID NO: 23211 - DNA, 264 bp, Glycine max
  Clone ID: 700909902H1
cttgacccctaaattcgtgcccattcccacaactgcacattcttctttctatatattccaaatcccttttccgatttccaccaaaatctaaacccaaattcccaattacccttcccaattttcaccaaaacctaatactcccacaccaatcttcgatgctggacgccgattcacaacctcaacaactcgaagagagaacagaggagcaagaactgaagtacctggaattcgtgcaattcgcgaccatacaggctctgatgcgct

SEQ ID NO: 23212 - DNA, 154 bp, Glycine max
  Clone ID: 700909942H1
cggtggcagcagtagcaaacgcacaccacaatcaaagaacaatttccactcgaagcaaagcgtatcagagatccaaactcagttctccaactctctgatctcaacttccacttcagcttcaagtcgcatggccaacgacgattgctgcgccacg

SEQ ID NO: 23213 - DNA, 238 bp, Glycine max
  Clone ID: 700909851H1
gtgacaagagctttggtgggaacaggtggccaagacaagagactttggctttgttgaagatacggtcggatatggacgtggcttttagagacgcaagtgtaaagggtcccttgtgggaagaggtttctaggaaactggcagagcttggctaccacagaaatgccaagaagtgcaaagagaagtttgagaacgtttacaagtaccacaagagaaccaaagaaggtcgaagtgggaaatc

SEQ ID NO: 23214 - DNA, 240 bp, Glycine max
  Clone ID: 700909853H1
attcagaataacaataaagggtggatgaggatccagaggttcttggccacactggccataactgtctccatactcttgggaaatggaaaccccgttcagtgcttcgacggcggtagccaccaaaaacagcaacacagtttgtgtgaagagctcattatcccctacggttacccctgctccgagcatacgattcaaacgaaggatggtttcttgttaggtcttcaacgtgtctcttcttct

SEQ ID NO: 23215 - DNA, 237 bp, Glycine max
  Clone ID: 700909854H1
ccgcaacagagagtagaaaagatggcgcggttgatcacagtggtgtggtgcgcggtggcggtgctactgtgcgccgcggcgggcgcgtcgtgggtggaggaggcggcgaacccgatacgaatggtggcgggggtggaggcggaggtggttcgggtgataggggcgtgccggcgcgcgctgaagtttgctaggttcatgagcaggttcgggaagagttaccgaagcgaggaagagatg

SEQ ID NO: 23216 - DNA, 163 bp, Glycine max
  Clone ID: 700909855H1
ctcccactctcgtatcatgattctgttgtttctgctctccttgggcacagcatcagaagaaaagaagacaacatacatagtgcaagtccagcaagaagccaagccttccattttcccaacgcacaggcactggtaccagtcttcccttgcccttgccgacagc

SEQ ID NO: 23217 - DNA, 71 bp, Glycine max
  Clone ID: 700909856H1
ctgattgtttttattccccataaaaataacagtttattatattgttattatgataaatacaaaagaaaaag

SEQ ID NO: 23218 - DNA, 235 bp, Glycine max
  Clone ID: 700909858H1
gtcgcgaagagtgactggacgaatcataccgacaagcccttgagactcggcgactacatggcgccgcctcccaagccagtgccatggaacgccgacctaaacaaaattaatgaaatatttgagagtgagaaaagtggtgctgtggctttggagaaggatggtgaggttgacgatttggtggtgagggaggaggtggagagggcctcgggttacccgaaactggtggcgccggcga

SEQ ID NO: 23219 - DNA, 234 bp, Glycine max
  Clone ID: 700909859H1
tttcgcgataccaaaacctcagcaatcaacaatgtcgttcttctcaaggcgccgtcgcgacgacgacacggtggacgactacgacgagtacgaccccaccccttacggcggcggctacgacatcgccctcacctacggccgccccatcccaccctccgatgagacctgctaccctctaggagcctcttcttctgatgacaacttcgattatgatcgccctcaatacacctctaa

SEQ ID NO: 23220 - DNA, 235 bp, Glycine max
  Clone ID: 700909861H1
cagcaccagccgaaagccaagaaaaagctttcgatccctgtaactgcgttcgactatttagggttttttcggagacaatggcggatgaatcggagcacacggcggcgccggctgccggcgaatcgctgctcgacaagatcgccgagaagattcacggccacgacgactcttcctcttcctccgattccgattcggataaaaaggaatcttcgtcgattaaggagaaggttttccg

SEQ ID NO: 23221 - DNA, 238 bp, Glycine max
  Clone ID: 700909864H1
cttcaatttggaagaaatcactcgaatttgatcgtacaagattcttagatgcaaaattggatttcagtggcaatgacttcaactatttcccctttggatctggaagaagaatttgtgcaggaatagcaatggctgagaagacggttttgcattttcttgccacactcgtacacttatttgattggacagtaccccaaggagaaaagttagaggtatcagagaaatttggaattgttct

SEQ ID NO: 23222 - DNA, 242 bp, Glycine max
  Clone ID: 700909866H1
ggagacaataaaaaaattgaaagaagaaaatgaagtgcacattcaggaagaggccatatcaaaggagacaattaaaaatctcaaagaagaaaatgataaactacttcagaaagtggtttccttggaagaggtcatcaataatttacaaactgataatgaattgcagatacaaaaacatactagtctggaaatgagaattgcacaattgcaaagtgagaataattccttacttcaaaaagagg

SEQ ID NO: 23223 - DNA, 234 bp, Glycine max
  Clone ID: 700909868H1
aacacaacaacactctctcttctcgctcttggcttttcgctcttcactcactctcattcattcatttccaccgttcatggatcccgtaagcgtgtggggtaacacgcccttggcgacggtggatcccgagatccatgacctcatcgagaaggagaagcgccgtcaatgccgcggaatcgagctcatcgcctccgagaacttcacctccttcgccgttctcgaggccctcggcag

SEQ ID NO: 23224 - DNA, 236 bp, Glycine max
  Clone ID: 700909869H1
aaagtttcttcctttctctgctctttgccttctctgacacatttggtgccttgtagagcgtgttttggcaggaaggtggtatggcgaaggacgttgaggttgctgagcgtggctccttctctgggaaggactaccaggaccctccaccagcaccactcattgatgctgaggagctcacaaagtggtccttttacagggctctcattgctgaattcattgccactttgctcttcctc

SEQ ID NO: 23225 - DNA, 237 bp, Glycine max
  Clone ID: 700909870H1
ctttcttcttcttctcttaaaagagcctttgctttttctttaggcctttccgaattaagtacttgtttcattttctctagaagcaagaaaaatgttcatcgagagtttcaaggttgagagtcctaacgtgaagtacacagagactgagattcagtccgtgtacaactatgaaaccactgaaattgttcacgagaacaagaatggcacttatcagtgggttgtcaagcccaaaactgt

SEQ ID NO: 23226 - DNA, 235 bp, Glycine max
  Clone ID: 700909873H1
cttgcttccaatacatacctggttggccattctgttacccttgctgctatcataacgacgtgcaacttgtatttaggattcagccagctcttagttaagagcttcacctccgagttccctcacgtcgagaggtacttttggacattggtcaaccagcctaacttccgaaagatattaggtcaggttaagcatactgagtctgttccacccattccatccgctgcaaagaagcctt

SEQ ID NO: 23227 - DNA, 238 bp, Glycine max
  Clone ID: 700909874H1
gagatcgtcccaatgctccattggtgcttaagggcatcacttgtacttttaaagaaggtagtagagtgggagtcgtaggaaggactggaagtggaaaaagtacactcataagtgctttgtttcgcttagttgatccagcaaaaggttatattcttatagatgggattaacatatgctcaattgggttgaaggatttgagaatgacgctaagcatcatccctcaagaaccaactctttt

SEQ ID NO: 23228 - DNA, 232 bp, Glycine max
  Clone ID: 700909876H1
aaatcaatagccatgaagatcgttcggagagacctagtacctaatggacctggcagcgttaagatggtggcagtggattcggatgatctctggtttgcgtataacttgatagctcccggagactctgtcatggccgttactgtcaggaaggttctaagagaagctgcttatggcggacgggaagcagaacgcgtcaagctcaaattggaaattaaagtcgaagagctttctg

SEQ ID NO: 23229 - DNA, 235 bp, Glycine max
  Clone ID: 700909877H1
gcagaagcctcctctgcctcgcaatcatcggcattgtcgtcgccgccgtcggaggtcagtctccagcggcggctcccaccacttcctcggcatccccagccacagccccttctaaacctaaaccaaaatcacctgcgccagttgcttctcccacttcatctcctccagctgcattccccaatgctgcaaccgcaacccctcccgtttcgtctcccacggtagcatctcctccgtc

SEQ ID NO: 23230 - DNA, 234 bp, Glycine max
  Clone ID: 700909878H1
tttcaaccccatccaatcctcacatgcatgctgtctctgccaaagtgccaagtcacataacatttccattgttaccattctttctttccatcacaaccactaaacaaacctctgatcctcactttctctcacacaaaaacacactcaccatggatcatcgcaaaccattgctacccacttcctctgatgctgctcaattccacacactcgcaaggaccttcttctagttatttg

SEQ ID NO: 23231 - DNA, 237 bp, Glycine max
  Clone ID: 700909880H1
caagaactctccaaggatcctccttcccacgcaattcatttggtgggaaaatccaagaagagggtggaatttcaagccagggaagatggattatttcaatgcaccaggaagataccatctctttgttccggggccggttaacatcccggaccagatcattcgggccatgaacagtaacaatgaggactaccgttctccagcaattccagctatgaccaaaacactgcttgaggatgt

SEQ ID NO: 23232 - DNA, 241 bp, Glycine max
  Clone ID: 700909882H1
gccataactcactcactcgcttcttctctgttctcaccaatggcatcaacaatctcagcaatggccatgatcaacgccaaatgcgtcaacccaaagttccccaatcccaccaagctcgcaccatcaaaaccctcccttcagatcaaccttccaaagggcctcatagcctcacccgaaagcactaaactttcccccgcgacagcaatcgcaggagcaatattcacaaccctcggaacctgcg

SEQ ID NO: 23233 - DNA, 237 bp, Glycine max
  Clone ID: 700909883H1
ggaaaaggcgtcttcataaacgccgcccaaaacttctcatacccttttattcattccattcgtttctagggttttcttttctttgccgagaaaatgagagagtgcatttcgatccacattggccaggccggtatccaggttggaaacgcctgctgggaactctattgccttgaacacggcattcagcccgatggacagatgccgagtgacaagaccgttggcggaggagacgacgcc

SEQ ID NO: 23234 - DNA, 74 bp, Glycine max
  Clone ID: 700909884H1
tttcgttctgttttggcttcgtcgctgcaactctctaccttccctctttttccgaatctgaatagaaatggctt

SEQ ID NO: 23235 - DNA, 237 bp, Glycine max
  Clone ID: 700909885H1
gagccttgaaccttgaaccttgaatcttgagccacgagccaccctcagactcagtcaccaacaccgaccaacgcaacaatggcatcggcgttcgtcaagctcgacgattcccctatgttccagagacagttatattctcttgaagaaacaactgatgagttaacggatcggtgccaaaaactatataaagggtgcaagaagtttatgacagctttgggggaagcatatcatggagaa

SEQ ID NO: 23236 - DNA, 236 bp, Glycine max
  Clone ID: 700909887H1
tttcgagacctcagcttgactatccattctggcaagacagtggctcttgttggtgaaagtggaagtggaaaatcgacagtgattgccttgttgcaaagattttataatcctgattcaggccaaatcacacttgatgggatagaaattcgtgagttacagctcaagtggttaaggccgcagatgggtcttgtaagccaagagccagttttgttcaatgaaactatacgtgccaatat

SEQ ID NO: 23237 - DNA, 93 bp, Glycine max
  Clone ID: 700909890H1
caaaaccccgtaatgatgctgatgtttctccttcactgctactagtagtgtagttagcgtggtctgcttgtgccgccttcgcttcttattttt

SEQ ID NO: 23238 - DNA, 231 bp, Glycine max
  Clone ID: 700909891H1
cggagacgcagtgcccgggccaatgcgcgtggcccttccagcagcccatttacggcccacagaacccgcccttggtcgcgcccaacaacgacgtgggcctcgacggaatggtcatcaacgtggctaccctattggctgggaccgttaccaaccctttcgggaatggctacttccaaggacccaaagaggctccgctcgaagccgcttccgcttgcaccggtgtgtacggaa

SEQ ID NO: 23239 - DNA, 242 bp, Glycine max
  Clone ID: 700909850H1
atcaacaaggagaagctgttttcgttcgtcgccactaacactaatcgtttcttcaatgccttacgagaaggaactcgccgctgcaaagaaagcagtcactctcgctgctcgtctctgccagaaagttcagaaggctcttctgcaatccgatgtgcactcaaagtcagacaaaagtcctgtcacagtggctgattatggttcacaagcattggtcagctttatacttgagagagaacttcctt

SEQ ID NO: 23240 - DNA, 229 bp, Glycine max
  Clone ID: 700909894H1
caacttgaagctagaagagaaatttgattgctggaagttacctacttcctagattattctttatacaacatgtactgtaaacgcctgagaaattgtggttttgtaagttgttttatctgtgaaattaataggctaaatgtagatctgtataaagagttttgtgatcttgtacagtagaggtatatatgatgtaaaagtggaatgaaatgaatgtatctttcccacgcct

SEQ ID NO: 23241 - DNA, 241 bp, Glycine max
  Clone ID: 700909895H1
cttcccttctccatcatgccaaacgacagcgttctgagtcttttctccttcgttaccctcttcacatgccttctctctgctaattcccacgatgaccatattttcctaccgagtcaactccatgacgatgactcagtgagttgcactgctaccgacccaaaccttaactacaagccggtgatcggaatcctgacccaccccggcgacggtgcctctggccggctcagcaacgccaccgggg

SEQ ID NO: 23242 - DNA, 241 bp, Glycine max
  Clone ID: 700909806H1
taaacatattacaacttcttcttcttcttccattgaccattgttgttgttgttgcttttgttcgttctcgccatgccaatgttgtcttcgagaggcttcatcgcttatctcgtatctgctttctcttgtgctgttctgtctgcgctttttctcaccaaccacatccatcatgatgataacaagccaattactttgttagcctctcgtgtgtctgaaactcttaaagtttggccagacttgg

SEQ ID NO: 23243 - DNA, 230 bp, Glycine max
  Clone ID: 700909807H1
aggctcataaatcttttttatgggtttcagggtcactactactctgtctctgctctccctgttttggctcttgtccctgcaccaagcaagagctgcaaagttccacaatgtgagtggctcgagagggaaaaagccagttgtagcaaatgggtgcaatttgttcctgggaagttgggtggttgacacgtcttatcctctctatgactcttcaacatgccccttcattgatc

SEQ ID NO: 23244 - DNA, 241 bp, Glycine max
  Clone ID: 700909808H1
aattgactcggggtgagtttcctcagcgatggcggaagaggtgactcgggtgatggtggcagtgaacgagtcgagcatgaagggataccctcatccttcgatcagcagcaaaggggctttcgaatggaccatcaacaagatcgttcgcaacaacgtctctgccttcaaccttctttttcttcacgttcaagtccccgatgaagatggttttcatgacatggatagtatctacgcatcgcct

SEQ ID NO: 23245 - DNA, 239 bp, Glycine max
  Clone ID: 700909809H1
actcattctccatacctcaacgaagatgttaaagagacggcaacactttgctgtccgccttgaccgagcagagcttcgtcatggccctcgattttgccctaaagtactctcagtcacaacagacaccgtcgtcgtcgtcgtcgtcatcaatggcaccgaagcagaccaaggctgagaagaagatcgcttacgatgcgaactgtgcgacctaatggaggagtacggccagatcctcgttg

SEQ ID NO: 23246 - DNA, 238 bp, Glycine max
  Clone ID: 700909810H1
acttacttgaagttgtgctattcaatcccaaagccacagaaataatattattcagattttagagactgaaaacatcatggccaacctcgacctcgacccattccagacaagcatcttaatcctcgtcccaatagcactcctggtggcgttactatctcgtactcgtcgaagagcaccctacccaccaggcccaaagggtttaccaatcataggaaacatgttaatgatggagcagcta

SEQ ID NO: 23247 - DNA, 237 bp, Glycine max
  Clone ID: 700909811H1
gagaaaggaaggaaaaatggagttgttcttctacgcggtgttcggcggtttgggagcggttgttgcagtgacggagctgagcaagagcaacaaggaccgaatcaacacctcttccgcattcaattccttcaagaacaactacctcatcgtctattccctcatgatggctggagattggctatcaggtccatatgtctactaccttttacatacatatggatatgggaagggagacat

SEQ ID NO: 23248 - DNA, 234 bp, Glycine max
  Clone ID: 700909812H1
ggaagagttgcaagagcatgttgagtcgattgacatggccaatgatctccactcaattggtggtttggttcctcttcttggttacctaaagaattctcatgccaatattcgagcaatggctgctgatgttgtgaccacaatagtccagaataatcctcgaagtcagcaacttgttatggaagcaaatggctttgaacctcttatttctaattttagttcggatcctgacgtgac

SEQ ID NO: 23249 - DNA, 237 bp, Glycine max
  Clone ID: 700909813H1
gtgcccgtttagaattctgatgctcttgttttccctttgttccttttcccttaccacccaaacagctgagctctatgaagcctgcagcctgcctactgcctaaaccagaagacctgatgaaccagggtttgacaaacttatggcccaccctgaagcttctacttagaggaccaaacatatgtggagactattgaaattggccatgtccattttaccttaattcccaagcttgataac

SEQ ID NO: 23250 - DNA, 240 bp, Glycine max
  Clone ID: 700909815H1
aggaacgtgaaagtaaaacggacggtggcgatagaagcgtctctcatctccatcgtctcctcactcctctcttctccagcgttcattttttctcgcgcccaaatacaaaatcacatcacaacagggttccggcgaccatgtccgatgctccggcgagtccatgcggcggcggcggcggaggcagccacgagagcggcgagcacagtccccgctccaatttccgcgagcaggaccgcttcc

SEQ ID NO: 23251 - DNA, 245 bp, Glycine max
  Clone ID: 700909818H1
caagcctaagcctaagcccaagcccgctgcgaaagccaaggatactaaggcaactaaatcgaaggcaccagctaagcccaagccagctgctaagcctaaagccaaagctccagccaaggccaaacccgctgctaaaccaaaggcttctgctgctgccaagcccaagcctgctgccgccaagcccaaagccgctaaaccagctgccaagtccaagcctgctgctaaaacaaaggctgttcctgcca

SEQ ID NO: 23252 - DNA, 239 bp, Glycine max
  Clone ID: 700909819H1
cgcttggttacaagaagagcggggcacgcctagaggaggagtctggcatacctttgcattcgtccgtagtgaatcagtttatgcagcatatacttgatgggcattgggacgagagtgtagccacattgaataaaattggtctagcagatgaaaatgttgtccgggcagcttcgtttttgatattggagccgaagttttttgagcttctggatggggaaaaggtcatggatgctttgaag

SEQ ID NO: 23253 - DNA, 241 bp, Glycine max
  Clone ID: 700909821H1
attactatacacaccctctttctcctcctcctccttcttcttctactccttctttctctttttcattctttctttcaacatgggtggcatcagcctcgaagaaataaaaaacgagaacgtcgatctggaacggattccaatagaggaagtgtttgagcagctgaaatgttcaagagcaggtctaacatcagaggaaggggccaatcggctccaagtctttggaccaaacaaattggaagag

SEQ ID NO: 23254 - DNA, 239 bp, Glycine max
  Clone ID: 700909822H1
cacacacacacacacacaaagagaacttttcagcttcactcttcatttcagttcaattttaaacatgctttgcgtcaacactgccttcacctctttcttacccagaaaatcaacttgcgtcttttcctccaaatcaaccaccccaatttcctgcaccctccaaggaacagttgcagagccaaaatctacagctgctgctgaaccgcttttgctaaatgcagttcgcgggatagatgttg

SEQ ID NO: 23255 - DNA, 240 bp, Glycine max
  Clone ID: 700909824H1
gtttgtgttcgacagaacaggaacctcaaacctttgtgtcgagaatcttagccatgggtagcaacggtttgaggtacgaaatcgctcaaaccgcttacatcaaattcatccttcactccctcaaacacccaacctccgccgtcaacggcgtcttgatcggtcgcatctccgcttccaacgacgtcgtcgagatcgccgatgccgtccctctcttccactctcacatccctcttcttcccc

SEQ ID NO: 23256 - DNA, 238 bp, Glycine max
  Clone ID: 700909826H1
aaaatatagaacacactaccctcaacatagtaaagcagctggtgcaagtgaagcaatggctcaaaccatgttgctcatgtctagtgtctctagcagttattccgtggatttgaagaaagaccttttcctccaattgcagagtcaaagtttaaggcctaagttctctcaactctcattcaacccacttccaccatcaacttcttccgtttcttcaccccgtacattcacaaccctggct

SEQ ID NO: 23257 - DNA, 236 bp, Glycine max
  Clone ID: 700909827H1
cctttatctcgggacttctaagaagctctccctctccagaaatggcatatgctccaagtgcactggtaagggttctaagtctggtgcttcgatgaagtgtgctggttgtcaaggaactggtatgaaggtttctataagacatcttggcccgtccatgattcagcagatgcagcatgcttgcaatgaatgcaagggtactggagaaaccatcaacgacagagatcgctgcccacagt

SEQ ID NO: 23258 - DNA, 237 bp, Glycine max
  Clone ID: 700909829H1
aggcagttgaagtgacggaagagaagaaggaagtggaagtgaccgaaggaaagaaagaagtggaagtgatcgaagagaagaaggaaacagaagtgacagaagaaaagaaagaagtggaagtagaagtgagggaagagaagaaggaaagtgaagtgaaagaagaagaaaaaggtcgggaggttgttccagaggaagttgagatatggggaattcccctgctgggggacgagaggagcg

SEQ ID NO: 23259 - DNA, 239 bp, Glycine max
  Clone ID: 700909831H1
ctcaaaatttcgccctctttcattcaattctcttctctgctcttctcgtctgttcccaccttctgatccatcatccctcgttttctccgaacaatggctgctggtgtcactgtcaagtccgaggttctagaatcttctccccctgaaggagtatgttccaacacggaggaaaaccacctggttcagaccaatttgtctgatgggtcacccaacaagtctgtgccagcatctggacttaa

SEQ ID NO: 23260 - DNA, 240 bp, Glycine max
  Clone ID: 700909834H1
gagaagaatcactcactgatccacacacaaaccagaacaaaaccaagcacagacagcgtgcgctcttcttgtgatttgtgttacaagcaaccaaccacactcacacacacccctccataataaaaatcacttccatgctctcttcttcaccccaaccaaaacaaacaggtttgcatttgcttaactggagccagattctgtagctgatttcatcccaataaatctaatgatgcttaagta

SEQ ID NO: 23261 - DNA, 236 bp, Glycine max
  Clone ID: 700909840H1
ccaaagctgtattgtaattagggactctgacattatagacgaacatgttaatgttaatgttagtgtccctcgtgaagttgagagcactgatcaaacaattgaggacacagatcggttttcattctcaacagctaccaactcaaccgtgtacctctcgtgctcagacattgatgaagatggaacctcgttgtccccacataaagacaaagctttgttttctccaaacacttgccaag

SEQ ID NO: 23262 - DNA, 235 bp, Glycine max
  Clone ID: 700909841H1
agattaggttgccctgtctgttctctcacacactcactctccttctctctcctattgcggctagggtttgggtttttcactttcagcctctccattccttcaaccttcttcttctctttgatctctgatggagacgttccgtgtttagtagcaagggttagttgaggccttgtgtttggaaacgtacggtgtcgttttggagttgggaaaacaaataattctgagagatggcaac

SEQ ID NO: 23263 - DNA, 236 bp, Glycine max
  Clone ID: 700909842H1
gtttaaacctaattctcatttcttcatcgttcgattcttctcctcctaaagatgcagatcttcgtgaaaactttgaccggtaagaccatcacccttgaggtggagtcctccgacaccatcgataacgtgaaagctaagattcaagacaaggaagggatcccacctgaccagcagagacttatctttgcgggtaaacagcttgaggatggtcgaacccttgccgactacaacatcca

SEQ ID NO: 23264 - DNA, 235 bp, Glycine max
  Clone ID: 700909843H1
gttttctcgcgattgcccagaacgaatatttcttttccccccgtttcctctttccaaagactgtaagaatgatttaatgtgttgtgtgtataaatcgatacaaacaatactgatcccagattaatccaacgacgaccatcaaatctcaccatccaaaccctaatctgaaaccatcgttccttctatttcactctctacaacctccaaattccgatctcatattcctctcctcgct

SEQ ID NO: 23265 - DNA, 238 bp, Glycine max
  Clone ID: 700909844H1
cttggtcctttctctaatccaaatatctctccgttaatgctctcaccacaaacttcaatagactagccaaaagctaacaccaactataggccaaatcaccaataaatattatttacccgtctctttatgtgcgtgtatggccacccactgaacacatttgcactcacacatagatactcagagaggccattggttggtttcagagatgggcagcatgcacataggaaccccagatact

SEQ ID NO: 23266 - DNA, 241 bp, Glycine max
  Clone ID: 700909805H1
aaagttacaaatttaaatgaagtgcttatatctcttattagtactattgtatgtagaattgttttggggagaaggtatgaagaggagggatctgaaggtagcagattccataagttgttcaatgagtgtgaagctatgttgggtaacttctttgtttcagaatatattcctttcatgggttggattgataaactcaggggactggatgcacgtcttgaacgcaatttcaaggagatggata

SEQ ID NO: 23267 - DNA, 236 bp, Glycine max
  Clone ID: 700909845H1
caattgcatataatttcttttaaaactaaagaagtgcaaattatgggacttgaattctggaactaatatacttaacagtggaagttagtgccacaagaccaataagtatctcattcaatttgaaataacaagtaaatgccatatcaaatgaagaatccaacctttatatttttgttcatcattttcagataacgtccagtgccagtaacggtgccaccagttccaatcccagctac

SEQ ID NO: 23268 - DNA, 232 bp, Glycine max
  Clone ID: 700909846H1
cagggtcttaaattgtagtggcattgcttttctgatcaaagtgacacactagtgtaagggattgtgatcacaatcccttacactatcgtttcactttgatcagaaacaaaacaaaaacactaagtgacacgagcagtcatattcatcactgtgccacgttttactgattgcattggtagtaggtatctactaatggtcatgccaaatgtccaattcctatcaataattgaag

SEQ ID NO: 23269 - DNA, 246 bp, Glycine max
  Clone ID: 700909761H1
ctgcaacttttcaccgtagaatcctctgcaaagccttcagagattctggcgaggacatcaaggcggtgctcaagtccgacgacggtggtggcagcggcgacggcggcggcgacggtgggggtgggggtgaccgggatgcggagaagaaagaagggcccttgccggaatggttgaatttcagttctgatgacgcaaaaacggtgcttgtggctctggcaatttcgcttgcgtttcgaacgttcgtgg

SEQ ID NO: 23270 - DNA, 245 bp, Glycine max
  Clone ID: 700909763H1
agaaactcttaggcatagcgaaaatgacaaccaccttcgcgaccgtcgcaggactcggtggtgcatcactgtcatccacctcatctcgtctcacctcagggtttgtgaaatcgccagtgagtgctaggaatcccttgaggcaagctgtggcaatgggaaatgggagggttacatgcttcgagaggaattggctgcgggcagattacagtgtgattgggtttgggttgattggttggctagcaccc

SEQ ID NO: 23271 - DNA, 253 bp, Glycine max
  Clone ID: 700909765H1
atctcattcacacattcacagttcttatctctctctctttgtcgcttggatcactgatctcatcacaactttcagaaatgtcgacatctgataagccagaagtggtggaaaggggtagcaaggatgaaaaacacaaggaagatgatcaagaggaggggaagggtggattcattgagaaggtgaaggatttcattcatgacattggtgagaagattgaggaagctattgggtttgggaagccaactgctgacgt

SEQ ID NO: 23272 - DNA, 247 bp, Glycine max
  Clone ID: 700909766H1
ctttgacagggagtgggtctgggagtaggaatagtagtggaattggggactctcacatcattgaagctggaaatctaaggatatcagttcaggttctgaggaaagtgaccgagaactttgcgcctgagaatgagcttggccgtggtggatttggggttgtttataagggggagttggatgatggtactaaaattgcagtgaaacgaatggaagcaggtgtgattagtagtaaggccttggatgaatt

SEQ ID NO: 23273 - DNA, 251 bp, Glycine max
  Clone ID: 700909767H1
gctcttcctccctttctcacagcaatggccgccgcagcacgccctctcgtcaccgtgcaggccctcgacggtgacatggcaaccgatgcctccgccaccgttcccatccctgacgtcatgaaggcctctatccgccccgacatcgtcaatttcgtacactcgaacatctccaagaacagccgccagccatacgccgtcagtcgtcgcgctggtcaccagacctccgccgaatcctggggtaccggccgagc

SEQ ID NO: 23274 - DNA, 246 bp, Glycine max
  Clone ID: 700909770H1
aggccatagtgaagtcggagaaattagcataagattttcacaagaaatagactcatcaaatgtgcaggaaagctcatctatgagctctgcactggacgaagcctcacttgaagcaactagctttcgccaactgcaacaggtcatggatcagttggatattagaactaaactatgcataagggacagtctataccgcttggctaaaagtgctgagcaaagacataatgataccaatgcaagtggtca

SEQ ID NO: 23275 - DNA, 246 bp, Glycine max
  Clone ID: 700909771H1
cttcaacactaaattagagacgacccactttccttgcagatctttttccagggaaaagtttggattttttgatcgttttgtgataagagttagatgttgagtgatagacggaaaagttgaggtggggttggattatatggatagtctttgttgcttcagctctttcagtcaggtggttggagggcgttcttcatgtaactctggcaaaggcaagagcagtcagtcctcagtcaagtatggctatag

SEQ ID NO: 23276 - DNA, 243 bp, Glycine max
  Clone ID: 700909773H1
atttcttttcccctttttctctttgctgactaactcaatcaatttagtgtggcttccgggaacaattcaggaatcatggctagggttttagctcagtctactggtatgcctggcctactgagtgggcgaaggcatgggccgcataaaggatcaggagaaacgaaaagatctgttaaaatgatgagtaccttacgaattcctgctttaagaatgtctagtttctctggattacggacacttaat

SEQ ID NO: 23277 - DNA, 244 bp, Glycine max
  Clone ID: 700909774H1
taaccttttctctccggttaccagaaccgtaagttgctgaacatgaacccgcaatcgccggttcgggcggaaccggagcctccggttccgacgttctccccacggttcgcgctcacgtccggttcgcagcggaaaatcgcgatcgcggtcgatctgagcgacgaaagcgcctacgcggtgcgctgggcggtgcagaactacctgcgcccgggcgacgccgtgatcctcctgcacgtgcgtccca

SEQ ID NO: 23278 - DNA, 244 bp, Glycine max
  Clone ID: 700909775H1
cacagacaatcatttatatactatacaatatttcgccgttcgcaccattgcaacacgcaagtgttgttgctgattcatttcgctccagtcttgtctctttctctctgcagaaccaaaccaaaaggttgttttttccgggcacaattttttgtggggttcatcaaagttcgctccttttctgcaaaagaaatttcgcccaaaactgtaatcaatacagtactttgtattccattttggataatga

SEQ ID NO: 23279 - DNA, 244 bp, Glycine max
  Clone ID: 700909777H1
atccccactgttctgtacatccaaccaacttatcctcactccaaaaggattcaccgagacagtttcatcaatcaaggcataattcctcggcattccatcatcatcatcataaaccgcccacacttggcctttcttaaagcttcttccaactctatctttgtcaaaatcataaaaatcagaatccaccaccgccatagtctccaactcccctccactagaaccccccctatgcttctcaattatc

SEQ ID NO: 23280 - DNA, 242 bp, Glycine max
  Clone ID: 700909779H1
agagttttctcttttccactgaaaatcaaattacggtttggatttcggaattgccacagaatcatggccactctgaaagagcttcttcctcctgcaaaatcctcctccaccgcctactacgaccacaccaacgatccatggttcaagcagcgtttctcctcagaagaggaggagaaatccgccgccgccgccgccgccaagcagaagcccgttcccccctacctgaagcgcgccggcttcgt

SEQ ID NO: 23281 - DNA, 226 bp, Glycine max
  Clone ID: 700909780H1
aatttaagtgaggagctagagaatgatgatgaagtctgctatgtgtgcagtggtggttgtagcacttcttcttctggcggaggtggggcccatggctgaggctgtgacatgcaccccaacagagttgagtccgtgtcttccagcaatcacttccggtgctaaaccttccaatgcttgttgcacgaagctgaagcagcaaaaaccatgcttatgtggctacttcaaa

SEQ ID NO: 23282 - DNA, 247 bp, Glycine max
  Clone ID: 700909781H1
gcaattggttggcatcagtgccatgctgatggcatccaaatatgaagaaatttggactcttgaggttgatgaattagtccgcctcacagattatactcatgaacaggttctggtcatggagaaaaccatattgaataagctggaatggaatttgactgtgccaacaacttttgttttcctggttcgtttcatcaaggcatcagtcccagatcaggagttagaaaacatggcacattttctgtctgag

SEQ ID NO: 23283 - DNA, 247 bp, Glycine max
  Clone ID: 700909782H1
ataatgaccagttctcgagagcgtttggtgaaggcggtgaagcagtttgtggaggttcgctacaaggttttcggcgaccgttatggccaaaacatcatcgacatcctcgactttccgattaaggttgtcttgtctcccttcactctcgccttcgatattgcaggctctgctcctcgcggcttcggcgtcccggaactcatctccaagctctctgccacttccgtcttcgctatagctgctcttggga

SEQ ID NO: 23284 - DNA, 245 bp, Glycine max
  Clone ID: 700909783H1
ttgatctctttcactctcagccgccattctcccacttccaactccttctaccctaccttctttgtccatcccacccccgccaccgccgaatccaccactctcgaaatccaatcatgtctgccacatccgtcaactccgaacgagcacgcgcccctcccgccattcccttgccccctccccctctctccaacttcaaaattggcctctgtcaactctccgtcagccccgacaaagacagcaacatc

SEQ ID NO: 23285 - DNA, 246 bp, Glycine max
  Clone ID: 700909784H1
ttcccaatcaagtaaagatttagattagcaggaatgaagaagaatggagtatagtagtcatcaaccttgttagcagtctcagtcacactgtaaatttttggttacttatctctcaaaatctcaaatgcatatgcaattgcaaagcatttccgatcctgagggagagaacttttgtgacagctgtatccactccgattgttgattttttattttctttctcgcggcaagatctcactctgcacctag

SEQ ID NO: 23286 - DNA, 245 bp, Glycine max
  Clone ID: 700909788H1
ccgttctctactgtccgatctgactcactgagttgctttctctgctcgactcggatgagttagaccggaagatcgcgccgcattaatcgccatgtctgcaccagtgaatattattgtaggttctcatgtctggattgaagatccagcacaagcatggattgatggagaagtttctaaaatcaatggtgaagaagtccatgctcgcaccacagatgggaaagcagttgtcaaaaatatttcaaagg

SEQ ID NO: 23287 - DNA, 239 bp, Glycine max
  Clone ID: 700909789H1
gtttatttgaacaactgaaaaaacaacactcttcaggcaaagagaagtagtaatatttttcagacacgtatgtgaaaagaagaagttacttgtcgatctcagcaaaattggttatttttatgaatttatatgctagtaagttagtcacaatattcaaagtgtctgtttatttttatgttcatcaataatgtatatgtcaagtcaaacttatgtgtcatctatcatgtttgaattcatcc

SEQ ID NO: 23288 - DNA, 239 bp, Glycine max
  Clone ID: 700909790H1
acccaccctactacctcatcatcttccgatccctatacttttattgtgtgtgtttgagcaagagagagcgcaatggaaggtatctcaatgggtttgaagaagtactggagaagaagcattaggggataccaaagattacacgtgtcggatcggcgaaagaaggaaacggttcaacttggagggtgccaaagaaggtggagatggcgcataaagatggctcctaagatgagaattcacaa

SEQ ID NO: 23289 - DNA, 243 bp, Glycine max
  Clone ID: 700909791H1
gtttatttgaacaactgaaaaaacaacactcttcaagcaaagagaagtagtaatatttttcagacacgtatgtgaaaagaagaagttacttgtcgatctcagcaaaattggttatttttatgaatttatatgctagtaagttagtcacaatattcaaagtgtctgtttatttttatgttcatcaataatgtatatgtcaagtcaaacttatgtgtcatctatcatgtttgaattcatccgaaa

SEQ ID NO: 23290 - DNA, 119 bp, Glycine max
  Clone ID: 700909793H1
ctcacacacagatctctctatctatcgttcattgtcgtttcaatctcaaacgccatggcgttttggagatccctcgcgttctctgcgatccttctctcgctcttcatccatggcgctct

SEQ ID NO: 23291 - DNA, 219 bp, Glycine max
  Clone ID: 700909794H1
gtttgtgggaacattatggagcccagattcgtaatctccgcatcggaggccgaatcccaatcaatctccaaactcctcccttccctcgtttcctcttctcagtccctcgcccgtccttccatctccaactttcccgtcgccgccgtcggactcgccgcctccggccgcatcttcgtgggcgtgaacgtggagttccccggcctccccttccacacaaca

SEQ ID NO: 23292 - DNA, 235 bp, Glycine max
  Clone ID: 700909795H1
attggagctagcctgacatgccttgttagccaacgaaggtggttcggttggtaagaatacgatcaaaacacttgtgtaaacatggcttaaggggataagttcttttggttttcagatgtggaatttgctagggagactttggcatgtgtcaacccatatagcatccaattggttaaggaatggcctttaacaagtaaactagacccgcaaatctatggtccacaggaatcaacaa

SEQ ID NO: 23293 - DNA, 79 bp, Glycine max
  Clone ID: 700909802H1
gggttttgttgttgctgtcaatggatttgagatggtgatcgggatttgagccaacaataaaaatatgattccgttgttg

SEQ ID NO: 23294 - DNA, 247 bp, Glycine max
  Clone ID: 700909758H1
cacaatttcacatttcattcatattcattacttcatggtccttcaacaagctccttaatttcattctctccttccaccttttcctcacgcatcaccgttacttttgtttctgtcttagtgtgccgtgtcccaatacatacataatagaacaacaaacacacacacataactctctctctctgctgaggtaattactgaaatccgtgcctgcttccacccttttgccgaagtttgcaaatttttctct

SEQ ID NO: 23295 - DNA, 243 bp, Glycine max
  Clone ID: 700909804H1
cccaattcttccccctccacccacccagcatatctctctattcctatttattagcacccctcacattaccttgtgtcaccaactactttgactcctttaccataccattacaataattatcaaacctaaccagtaaaaatggtgaccgtggaggaaatccgcaacgctcagcgttcccatggacccgccaccatcttggccttcggcaccgccacgccgtccaactgcgtctcccaagccgat

SEQ ID NO: 23296 - DNA, 257 bp, Glycine max
  Clone ID: 700909713H1
gaactagtagctttcttttaaaattaaaattagaatcattatcgtttatcacactccaacaacgcctttcgctcttaccaccctcgcgggtcattttcttgggaaaactcgtttccaccaagaaaatcgatttccctggaaacaaacactcgcgaatctccgatgcgactcgtttcactttaattcgatgatgatcgccactatatgccgccctgtgcgttccccgtgggaggaaccaatggatcgctgcttccgat

SEQ ID NO: 23297 - DNA, 247 bp, Glycine max
  Clone ID: 700909714H1
tgcagatcgaacgcacccaaagaaaccctgctactgccaccgcgctagctagggtttcattccacccactcccaacaatctcccaatagaatgctgaaagagaattgctgattatcgcttcactcaactctaccaaatcgcatcactgaccaatctggtggagccgattccacagtagatgacattagaccgtgcttgcggacaaagcctcttcttcttctgctctctctgctacttccacacaaca

SEQ ID NO: 23298 - DNA, 254 bp, Glycine max
  Clone ID: 700909716H1
cgaagagagagcaaaatcattcgcttccttcttgtatgataatgcaaaatctctggctgctgccaatggctattcacttttccaaggacttgctgggacagcatgcctctggtttgatctgcttgcacccgacaactctaggttcccaggttatgaattatagatggttaaagtagagatggtacttattctacaagcagaaggaacgtggcatggatggaaaatgttaggtagaacaccaatcataagtgata

SEQ ID NO: 23299 - DNA, 259 bp, Glycine max
  Clone ID: 700909721H1
ctctctcctcctttttgttcacctgccacatttacaacaaccccctcttcttctttatcaacttttcctcagaactctcttagttttagctgctcccaatcgtttggaccaaaagccattaaccccttttgcagaaaagcacgattttgctctctacaagggtcaacgagtgtgaaaagcagaaaaagcttggtgctttgtaccatcaacatgactatagcaacggatagtttgttgcaggtggtggaggaggaagagg

SEQ ID NO: 23300 - DNA, 255 bp, Glycine max
  Clone ID: 700909722H1
tttctctattttgtagtatttggcacatagtgcatagtttgtgccattaattaaccaaggaaaaacgccaccttttggctccttctgttgttccaactgtgcatttgtgtgctgtttcttccacacacacgcagcctaccagccacaatgagaacggggaacctcttctggcttggcattgttgcagcacttgttttcagcttctgggttgatgccttttcagccaaccattattacccccaccaccacttcaat

SEQ ID NO: 23301 - DNA, 257 bp, Glycine max
  Clone ID: 700909724H1
ctcccagtagagatgtgccaagcagggatatgggaggaccacctggtgggaacccatattctgggtgagatcactgcagatttttctagccaatgtagataacgaagaattgtgcccaagaaagcagagtttatgctatgtttctcaaggaattagaatttattagtcttacgtgttactcctattttctaatgaacctgcatgttgtgcatccgaagttcaatttttttaatgctagatacgatcattttgtttct

SEQ ID NO: 23302 - DNA, 254 bp, Glycine max
  Clone ID: 700909726H1
ttctttctttatcttctcatttttctcaatacaatttttttctttctttctcaagttttgctacttttctcttcttaaccatagttcacatattatatcatcacatatcatagtgatatcatatcacaatgtgtggcatacttgctgtgcttggttgctctgattcatctcaagccaaaagggtccgcgtccttgagctttctcgcagattgaagcaccgtggtcctgactggagtgggctccaccaatatggt

SEQ ID NO: 23303 - DNA, 253 bp, Glycine max
  Clone ID: 700909729H1
agatggcaaaatttacgtggttaacgactcttccgacaatgacctcgtaaaccctaaaccagggacattgagacatgctgcaattcaaagagagccactgtggatcatttttgatcgaaacatgaacattaaacttcacgcggagctcatgctaacggataataagaccatagatgcacgtggtgccaatgtgcacattagtgagggtgcccaaataacgttgcaatatgtgaaaaacatcatcattcacggt

SEQ ID NO: 23304 - DNA, 252 bp, Glycine max
  Clone ID: 700909730H1
gaatgagagcatcaaactcttcttcttcgatttccattgcgaacgttactttttcttcttctttctcttcattttcttcgctcttcgatcttcgtccggggactgctccgaataccaccaccaccactcgccgatggccacgatcggaggcttacacgactcccaaggctctcaaaacagcgtcgaaaccgaagccctcgctcgattcgccgtagacgaacacaacaagaagcagaattcgcttctggagtt

SEQ ID NO: 23305 - DNA, 251 bp, Glycine max
  Clone ID: 700909732H1
cacccccatttgcaacgagtcaccaaaatcgaattctgcaatcgacccatttcaattcatctatccaaatcgcataacccacccttcaatttccgcttctgattgcttcctcccccatttcaaagttagggttcggtctctggtggcgcaacaatgccggagatcgaccaggcggcggcggcggcggaggaaaccgccctgttcggaaaatacgagctgggccgcgtcctcggctgcggtgccttcgccaa

SEQ ID NO: 23306 - DNA, 98 bp, Glycine max
  Clone ID: 700909733H1
atgtgctctcatgttcctgttgtggtgaaggatttgtagtttgtaaattggatcatctcttctatgtttgcaacttggtgtgataaaaaacaagaagt

SEQ ID NO: 23307 - DNA, 255 bp, Glycine max
  Clone ID: 700909735H1
ggatcattccaatatgggcaacagaattgttatgggaaattcccttctctttatctctttcttcatcttcagctttagtttcttggaggctcaaaaggctccagcagtttatgtgtttggagactcacttgttgatgttggcaacaacaattacttgagtctctccattgaaaaggcaattcttcctcactatggcattgattttccaactaagaaacccactgggagatttagcaatggcaagaatgctgcaga

SEQ ID NO: 23308 - DNA, 257 bp, Glycine max
  Clone ID: 700909736H1
gccgtaccggagttcggcttgtcgtcgccggagcccagggcaccggaaaatctagcctcatcatcacggccgccgccgaaaactttccggtgaatgtaccaccggtgttgcctcccacgcggttgcctgaacatctgtatccggatcgcgtgcctatcaccatcatcgacacctcttcccgtgctgaggatagtgataaagttgctgaagaattgcagagggctgacacagttgttcttacctatgcatgtgatcgg

SEQ ID NO: 23309 - DNA, 253 bp, Glycine max
  Clone ID: 700909739H1
gaataaatctttcctctgctttctttttcttgtgtctccctacacagttggaagtagaaggcagtgatctgacatggatgcggagaatggcgaagagagaaaacatcatgaggcaagcacgtcagagaatagtgcagaaacaagcacgaatggggagaagagagaaaagggcaaacaaaaggaaaagccagagacagttccatttcacaagctgtcagcttttgcagactccactgacattcttttgatggct

SEQ ID NO: 23310 - DNA, 252 bp, Glycine max
  Clone ID: 700909740H1
gaatcttctcctcctgaaggagtttgttccaacacggtggaaaaccacctggtccagaccaatttgtctgatgggtcacccaacaagtctgtgccagcatctggacttgatgcagtgattcctagtgcaaatcagcttaccatcttctataatgggagtgtttgtgtctatgatggaatccctgcagagaaggtgcatgaaataatgcttattgctgctgctgctgccaagtccactgaaatgaagaagatt

SEQ ID NO: 23311 - DNA, 249 bp, Glycine max
  Clone ID: 700909741H1
aaaagctatagctttgcaaaatattgggcaaataaccagagaaaatgatggaagctacatacccatggtaggggaaataaggggtaatttgggaaaggactataagaaataaaaggaataaaataaatctaagcctttaatttagaagtaaaataaaatctggcagtccaaatacactttcccattatgggatatatacctttcccatgctagccgtcgctatgttcccattgttctattccacacaac

SEQ ID NO: 23312 - DNA, 250 bp, Glycine max
  Clone ID: 700909742H1
gtgaaagagaatccgaggcgaagagaagagaaaaattaagatggaggggaaggagcaggatgtgtcgctgggagcgaacaagttcccggagagacagccgattgggacggcggcgcagagccaagacgacggcaaggactaccaggagccggcgccggcgccactggttgacccgacggagtttacgtcatggtccttttacagagcagggatagcagagtttgtggccacttttctgtttctatacatc

SEQ ID NO: 23313 - DNA, 252 bp, Glycine max
  Clone ID: 700909743H1
agagagtggtttcagtgagtgatcggtgttcacttgatccttcataagtcgtcatcatcatcatcatcatcaccgttgattgaagaagatgccgatcagaaacatcgccatcggaaggcctgaagaggctactcaccccgacacgttgaaggcggggttggctgagttcatctccacacttgatcttcgtgttcgccggttcaggttccggcatcgcctacaacaagctcaccgacaacggcgccgccactc

SEQ ID NO: 23314 - DNA, 250 bp, Glycine max
  Clone ID: 700909745H1
ccgagcttactggagtatgcatgagacttgaagatgaaagtgatgcaaaaagcttggagattaaacagatgacagaaagagtctgtctactggaaagtgaaattggaggactgaaagggcagttatctgcatataatctagtcattagttcattgaaagaggattttgcttctttagaacacactgccctagttcggataaacaaaatgcctgttgaatgcaatcaagaacaaaaggatgcagtaattga

SEQ ID NO: 23315 - DNA, 250 bp, Glycine max
  Clone ID: 700909746H1
gagcgagaagtttgtttcgggcttgatccagtggggcgcatatcagccaatgatagtgtttttccgaccaaaaagaaacccctgacgaaattactcctcttcgaaaatactacgaaaatcgaaaatcaatcgtagaccacttctcaaacacaagagacaccaccgatgatgatgatgatgatattaaagcaacatcaccaggagtaagagagagcaaaggtggctccttttcatgtgagttttgagtgat

SEQ ID NO: 23316 - DNA, 248 bp, Glycine max
  Clone ID: 700909748H1
ctgcaaatagctctgatgcgtgctccaatggtgccttcgtaccttcagagacgaacaaccataatagtggtggaaattctaaaacatcttttatggacaatgatcaagatactgtagcaccttctgtgagcacaggcttcctggagctctccaggcaacatgatttttgtattgatactgcagttggcattaattcaaatggggatgttcatggcttatgttcagggttatcatctattagcattaat

SEQ ID NO: 23317 - DNA, 247 bp, Glycine max
  Clone ID: 700909750H1
caagatctggtcttcttatgatgcgtgcgtgtttgtttctactttaaatgtttgaaattcatgtaagcctagatagacgcatctctgtaatcgatatatttttttttccctttcattttactgtgtggtgtaaattggttgttaattctgttaagggatgagagcttttgttttttttctggtaaaattgacgaatccggtgtatttctctgacttttatttgatagcttgagacttaaagtactcg

SEQ ID NO: 23318 - DNA, 253 bp, Glycine max
  Clone ID: 700909753H1
ctcgagccgtttcccaatttcgcgataccaaaacctcagcaatcaacaatgtcgttttacccaaggggccgtcgcgacgacgacacggtggacgactacgacgagtacgaccccaccccttacggcggcggctacgacatcgccctcacctacggccgccccatcccaccctccgatgagacctgctaccctctaggagcctcttcttctgatgacaacttcgattatgatcgccctcaatacacctctaacg

SEQ ID NO: 23319 - DNA, 250 bp, Glycine max
  Clone ID: 700909755H1
aatcgatcgaggcagatcagaattgagggcttagaaatcaggattcagaatgggtcagactgaaagcgcagaagctgtgacggaaactcaaaccacaaccaacgacacttccaatcccatttccctggaatccgtcctcgcagaagctgcagaatatggaagccaacacactgagtctgtggaggaaatggctcagaaagcccttgaatgcccttgcattgctgacttgcgaaccggttcctgtggctct

SEQ ID NO: 23320 - DNA, 248 bp, Glycine max
  Clone ID: 700909757H1
gtgcagtaactccaaatgcttatctgcaattggatcttgagttggtctcgtggaagaccgtgtctgacattaccaaggatagaaaggttctcaagaagactttgaaggaaggggagggatatgaacgaccaaatgatggagctgtagttcaagtgaaactgattggcaagttgcaagatggaactgttttcgttaagaagggctacgttgatgaacagccatttgagttcaaaattgatgaagagcaa

SEQ ID NO: 23321 - DNA, 253 bp, Glycine max
  Clone ID: 700909712H1
ccatagtgacgaacctcatgttcttgactacagtaaatatcctggtctggaggagcgtcaaaggtttgtttataattatttgagttctgaaggttagtccactaaaatcttactcccacataccactgaaaatacatattattggcagagatctggatttaggtaactgctattgatctattctcagctgaaagaataaacttgctctacaatttggttgatttgtgatatcactccagcttatatttttagt

SEQ ID NO: 23322 - DNA, 248 bp, Glycine max
  Clone ID: 700909668H1
tctgtctcacctcacttgcgttattagggtttagtgagatagtggcggggtagtgacattacagtgtgggcataaaattttcaaagtcgaagcgagaacttgccatttcgagggttttagggttagggttttctcaaattgcaagaacatgggtttcaacagtcaaccctatgggattcagtccatgctcaaggaaggccataagcacctttctggcctcgatgaagcgggtctcaagaacatcgacg

SEQ ID NO: 23323 - DNA, 245 bp, Glycine max
  Clone ID: 700909670H1
tgtgaattggaggatgtcaacgttgaaagtgtcaaagaagttgatgcagtcagcacaagcgaacaccctactgtggtggtagctggttcacaagaatgtgtgattctacactaacaaggctctaaaattatgaacaaattcagcaaatccgtagtgctttaagaataattgctgaattgtgtcaccgtttaagtcacatagtattgtgctgtgcttgagccttaaggtcctgtgttgtatgtatt

SEQ ID NO: 23324 - DNA, 243 bp, Glycine max
  Clone ID: 700909671H1
ccccaccatcacgttctccttctacgctgccggcgagaacggcgccgtcgagagattctccagctaccgcgacaaggccaacgtcggcgccgactccttcacctcgtacgccaaagccgccaacgccgcagacctcggattctcgaactacggcaagtccttcaacgagggaaccggcacgttcaccacgtacgctaaatcctcggatggcgaaacaaaagtagggttcacttccgacggcgt

SEQ ID NO: 23325 - DNA, 220 bp, Glycine max
  Clone ID: 700909673H1
agagtctcttttcttttccccctcaacactcacttgccgttggccacgtgttgcacacctccaagaccaaaacgacgcgtttttgaaaccgctctttgactctatcccacggttccacataacatcgcagacgcgttccgtcgaatcgcgaattcgaaggatatcgatattatcgtgctacacgagattttgaaaagacatgaaaatgtctatggttgat

SEQ ID NO: 23326 - DNA, 236 bp, Glycine max
  Clone ID: 700909674H1
atttgacaaaaaagtagccactgccccaacgatcccatttcccttgacttctctacgtgaagctccttgttttgcataggagctagttgaaatgtccgagggaaatgcagggaaaggaaagaaaatcgccatcattggtgtctcaaccttattgttggtggctatggttgtggcggtcacaattggggtcaatctcaatgagaatggttccaacaatgatatagatgacaacaaga

SEQ ID NO: 23327 - DNA, 236 bp, Glycine max
  Clone ID: 700909675H1
tcttcactgttctctctctgagcaaagccgaggatccctcatagtattggcaggtcaaatattggctaatgtcggatggggcattcatcgatgtacaagcgcactccttcgagagataattcaaacatggaggacgtggaagaaaactcagatcttgtagacatcggcctggacaagggaaccacaaatccttcattgatcgcttctttaccgcatgtacttatggcgaccattct

SEQ ID NO: 23328 - DNA, 237 bp, Glycine max
  Clone ID: 700909676H1
attctctgcacttttcagttacaaagcatttcattgttttacaatatacaacactacaatggctgcttcaacaatggctctctcttcatcatcattggctggccaagctatcaagcttgccccctccacccctcagcttggtgttggaagggttagcatgagaaaaacagcctccaagactgtttcctcaggaagcccatggtacggcccagatcgtgtcaagtacgtgggcccatt

SEQ ID NO: 23329 - DNA, 77 bp, Glycine max
  Clone ID: 700909679H1
gagattccaaggtctggagtcatcattagcaaaccagatggagatgatatttataaaggagttccaaaggattacac

SEQ ID NO: 23330 - DNA, 252 bp, Glycine max
  Clone ID: 700909681H1
ctactttcccttcccaacaacaacaagatgatgccttctgcagaagcttcctccgaaaccatttgtgtcaccggcgctggtggcttcatcgcctcttggatggtcaaactcctcttggaaaaaggctacactgtccgaggaacccgcagaaatccagatgatcccaagaacgggcacttgaaggagtttgaaggagcctccgagaggttaactctgcataaggttgacctccttcatcttgactccgttaga

SEQ ID NO: 23331 - DNA, 252 bp, Glycine max
  Clone ID: 700909682H1
ttcaatatgataattataaagtgcaaaaagctccacacaataacaaggactttgtggacatattgctatcacttatgaatcaacccatcgatcttcagggccatcaaaatgtcattgatagaactaacatcaaggctattatattagatatgattatggcggcatttgacacgtcatccacaacggttgagtgggccatgtcagatactcttgaggcatcaaagtgtgatgaagagacttcaagatgagcta

SEQ ID NO: 23332 - DNA, 242 bp, Glycine max
  Clone ID: 700909683H1
ctcgcacctcgactcgctcgtgggacaggcactgttcggagatggcgccgcagcgttgatcatcggatcagaccccgacccagcagtggagcggccgatattcgagatgatatcggccgcccagacaatcctgcccgactctgacggtgctatagatgggcacctcgggaggtgggactcacgttccacctcttgaaagatgtgcccgggatcatctcgaagaacattgagaagatcttgtt

SEQ ID NO: 23333 - DNA, 244 bp, Glycine max
  Clone ID: 700909684H1
gttccatccgcatccgctagctcgcgcaggcaccagcaggtgaggttattgtgatttgaatggagggaagtggaggtggcggtgcttcaccgtctgcaccgttgaagcaatacttacaggaattctcgaagctgtttcagtactatctggataaatccactccccatccccccgacaggtggattgggactttcgtcattgcatccatctacgttttgcgtgttgtttatgtgcaggggtttac

SEQ ID NO: 23334 - DNA, 241 bp, Glycine max
  Clone ID: 700909686H1
tgtcactgacctatcttggtagagatttgaagtttaaaccttcaaattaatcaaaccattttaatttgcctatagattctgagtcactgctgctatggcgctacgcgtacttcttgtgttggggacgttgctgatgttgtgccttgttaaggtttcatctgatccaaagatagaagaagaaatactggaagcagaagaagaactgcaggttcccgataacgagccacgtatcgtgagagac

SEQ ID NO: 23335 - DNA, 127 bp, Glycine max
  Clone ID: 700909687H1
cttaattaaccaaactgctcgtctcgttccgcgtcgtcgtttcctccaatcatctcaacggcacagtgatggtagcgctatcgctgttgggggaaaaaatccgaatccaaaggtggtaatagatgac

SEQ ID NO: 23336 - DNA, 230 bp, Glycine max
  Clone ID: 700909690H1
gtgtgaagaaagagacctgaaagtgctgttgagccggtgtgttcatcagacaaaaaaaaacccagcaacaatgggaggcacttctgcagatcttcaccaccatgaatcagatatagaactcactgatgctgaaaggactgacacgaagttaggggcttctgattcaaaagctggcaatgatgttggacttgacagtggcaccaaatcccaggctgaagctgaaggacaac

SEQ ID NO: 23337 - DNA, 235 bp, Glycine max
  Clone ID: 700909691H1
gtcttctcgactctggtgtgtcaccctttaatggcttcacctatgatcatctctatggaacaaaggttggtggaaccattttcgacagatttagacgccgccacacggctgctgaactgcttgcttcagggaaccaggacaaacttactgttttggtctatgccactgtccaaaagattgtgtttgatacaagaggaaagaaaccaaaagccgtgggggttattttccaagatga

SEQ ID NO: 23338 - DNA, 233 bp, Glycine max
  Clone ID: 700909692H1
gttgttgagccttacaacagtgtcctctccactcattctcttcttgagcacactgatgtggctgtcctgctcgacaatgaagccatttatgacatctgcaggcgttcactggacattgagaggccaacctacaccaaccttaatcgtttagtttctcaggtgatatcatcactgactgcttccctgaggtttgatggagccttgaatgttgatgtcaatgaattccagaccaa

SEQ ID NO: 23339 - DNA, 233 bp, Glycine max
  Clone ID: 700909694H1
ctaacatttccctttacttgctaaaacatggtccaagaaaagagactagttgacgaggtgtccggttggctcaaaatttatgacgacggttcagtggaccggacatggtccggaccggaccaattcaagttcatggccgaaccggcccctccccatgaacaattcatagacggcgttgccattcgcgacgtcgccgttactcacggtggtggccagagtggccaccatgtccg

SEQ ID NO: 23340 - DNA, 230 bp, Glycine max
  Clone ID: 700909695H1
tattattctgagtgtggtgcaagccacctatgtactatttttcctttacttatgcaaaagctacctttgtactatttttcctttacttctgcacaagctaccttcgttttgcaggtacatgggtacaataactggcataagtgacctggatcctgttcgttggccgaattctcattggcgatctgttaaggttggttgggacgaatcaaccgctggagagagacagcccg

SEQ ID NO: 23341 - DNA, 262 bp, Glycine max
  Clone ID: 700909701H1
cgaaggatctctctctctcatcacatgatcattcagcgagcaatagcatagtgtgaaatttgagtgagcgagcgaggaatcggaagaaaacgaaaccctaagaagaagatgccgaagaagatgggggtgaacacgaaggcggatgcggcaagggcacgtaagagcgcggtggatacggagcgcaaggagaaggagactcgagagaaggaggaccagtactggcgagaggcggagggttcaaagtcacgcgccgcgaagaaga

SEQ ID NO: 23342 - DNA, 261 bp, Glycine max
  Clone ID: 700909702H1
atgatcattctgactctctttctctttcccctcttcttcgtcgtctccgttttcttttatccgtttctgtttttccaattttgccctccgctttttccctatttcccaattttgccctcttcttcttctaccatgacctacttgaagtcgtagctcgagtccgtgttcgccttttccaattcccaatttcaatttcccaaacttcgtaggatttccgtcgaataatggaacctcgagttgggaacaagttccgtctcggtc

SEQ ID NO: 23343 - DNA, 261 bp, Glycine max
  Clone ID: 700909705H1
caccaaagcagtgtagttttccgttgtcactgccatggctttcaaaaaagtactattccaatatttcactctggatttgtgtcttgtcttcgcattttgtgcttttgagggcaatgctcgcactctcgaagatgctccaacgcgtgagaggcatgagcagtggatggctatacatggaaaagtctacacgcactcttatgagaaagagcagaaataccagacattcaaagaaaacgtgcaagtatagaagcctttaaccat

SEQ ID NO: 23344 - DNA, 260 bp, Glycine max
  Clone ID: 700909707H1
ggagactggatggtggaacgaatgaacctttattcacaaatgtcactagagattttattggcactctagattacatattttacacagcggattcattggttgtggagtcattattggagttgctggatgaggagagtttgaggaaggacacagcacttccttcacctgaatggtcctcagatcacattgctctcttagctgagtttcgctgctgcaagaataaatctaggcgttgacagttaaggtcactttcagtgata

SEQ ID NO: 23345 - DNA, 252 bp, Glycine max
  Clone ID: 700909708H1
ggttgcaggagctgctgctgctggtggtctttctcttgctgatgttgctgctgaagcaaaacatgcatctgaaatagtgggaacaatgggtgttgctttgactgtgtgctcaattcctggtcaagttgcatcagatcgtttggggccaggaaagatggaacttggtcttggaattcatggagaacctggggcagctgtggctgatattcagcccgtaaatgtggtggtttctcatgttctacagcaaatatt

SEQ ID NO: 23346 - DNA, 254 bp, Glycine max
  Clone ID: 700909666H1
ttcatcatcatcatcatcattcagagagtgcatagaatgagttcttcttctggtcagagcagtggctatgatctttccttcaagatcttgttgatcggtgactctgctgtgggaaaaagtagcctccttgttagcttcatctccaactctgctgaagatattgctcccacaattggtgttgattttaagatcaagatgctcacagtaggtgggaagagattgaaactaactatttgggacactgctgggcagga

SEQ ID NO: 23347 - DNA, 158 bp, Glycine max
  Clone ID: 700909709H1
gtgctggatctgctgcttctttgtctactcttctaaatcgactggatcctgtgctccgaaagacagctcatcttggaagctggcaggttattagcccagtggaaactgttggatatgttgaggtcatagatgagttgcttgctgttccacacaacata

SEQ ID NO: 23348 - DNA, 258 bp, Glycine max
  Clone ID: 700909710H1
atcttgggcacccacacttctgagaatgagcccaattacctcatgctggcccaggtccaactccctcttgatgatgctgagaatgatgcccgccactatgacgatgatcgccccgacatcggtggctttggctgcgccaatggcaaggtccagatcatccagcagatcaaccatgagggtgaggttaacagggctcgctacatgccccagaaccctttcatcattgccaccaagaccgttagtgctgaggtttatgta

SEQ ID NO: 23349 - DNA, 253 bp, Glycine max
  Clone ID: 700909621H1
gtgacaagttgagtatgcaagttaaacaaacaactgcaagggaaataggggcctaactttatatatctgcgtgagtgagtgcgtcatttctttctttctctgcttccctaaccaactgaaccagcagcaacatttgcgcaaatcgaaattgattctctgccacttaacctaaaatggaaatctttccgattcccgccgaatcctacactctcggcttcatcggcgccggaaaaatggccgagtccattgcccg

SEQ ID NO: 23350 - DNA, 249 bp, Glycine max
  Clone ID: 700909622H1
ttgatctcagattgcaattgcctcttctcttctcccagaatcggtgtaggttacaggtttaagggttttgttttcatttaggtcactaatccgatatcatgaagctcgatacgactagtctcgaatcgtttcccacactgattgcacctcaaaacgacgtcgccggagaactctccgccgctccgttctttgaccttccgaattccaatgacttcgatgggttcttgaaagacgctatcagatggtgaa

SEQ ID NO: 23351 - DNA, 248 bp, Glycine max
  Clone ID: 700909623H1
gtgaaagccaagattcaagataaggaagggattcctccggatcaacaacgtttgatcttcgccggaaaacaactcgaagacggcagaaccctcgccgattacaatatccagaaagaatcgactctgcatttggtgcttcgtctccgcggagggatgcagatcttcgtgaaaaccctaaccggcaaaacgattacgctagaggtagagtcctctgacacaatcgataacgtgaaagcgaagatccagga

SEQ ID NO: 23352 - DNA, 247 bp, Glycine max
  Clone ID: 700909626H1
tgaagtttgtggggggtgaaactgcagcattgagcagagtatatgaatacttttgggaagaaggacttgctggagggtatatagaagagaccaggaatgtggatatgtggggcctgattattctaccaaattctcaccatggcttgcctcaggagatttgtctcctcgtttcatatatgaagaggtgaagagataggagaatgatagactagcaaatagttctacctactgggttttgttcgagttg

SEQ ID NO: 23353 - DNA, 242 bp, Glycine max
  Clone ID: 700909627H1
ccaaacacgacacaaacattaagaagaagagacataccacgaaatgtacggacaaagtagctatgagtccgatttggcccttttggactccattcgccgccacttacttggcgactccgaggagcacaaattcggagccccgaatgttagttcgggtaacactccagcgtactctcggagctcctgtttcagcacgttgtacccttgcttgagtaacgatttgggagaattcctcttaagga

SEQ ID NO: 23354 - DNA, 239 bp, Glycine max
  Clone ID: 700909628H1
cttatatgttggatccacatgttaggaaaattagggatgagagatataggtggaagtatagttgtggagctaagggctgcacaaagctttttcatgcagctgaatttgtgcacaaacatttgaagctaaaacaccctgagattgtgatggaactaacatccaaaatgcgcgaggatctttattttcaaaattacatgaatgatcctgatgctcctggtggaatgcctgtcacgcagcaa

SEQ ID NO: 23355 - DNA, 240 bp, Glycine max
  Clone ID: 700909629H1
gtttgggtttcacaaacagacacacagtcggttcttccttctcaaatattcttgagatctcccattttctccgaagcaaagccatggctaagggtcctggtctctactctgacatcggcaagaaagctagggatctgctgttcaaggactaccacagtgaccagaagttcaccatcaccacctactcaccgactggagtggctattacagcatcaggaaccaggaaaagtgaactgtttc

SEQ ID NO: 23356 - DNA, 225 bp, Glycine max
  Clone ID: 700909631H1
tttgattgcacacactggtggacccgcaattttggaccaagtttaggcgaagttaggcctgaagcctgaaaaaatggaagctactagacatgtgctcagcgagtatggtaacatgtcaagtgcatgcgtgctattcatacttggatcaaatgaggaagtaatcaagagaaaatggacttggcacaaccggtgaaggtcttgactggggtgtgctattgggttcgg

SEQ ID NO: 23357 - DNA, 247 bp, Glycine max
  Clone ID: 700909634H1
tggtggaagggtgcatgcacggggacctggacaatgtctacagaacccttcaacagttggagaaatctgaaaacacgaaaatcgaccttctcctctgctgcggcgatttccaagccgtgaggaacgagcatgacttgaagagcctgaacgtccctctcaaataccgctccatgaaactccttctggaagtactattccggcgccgaagttgccccctaccccgacatcgtcatcggcggcaaccacg

SEQ ID NO: 23358 - DNA, 253 bp, Glycine max
  Clone ID: 700909636H1
tttcccccaaaaaataaaaagcacaccttcattcgttcctctttctttcttccaactctataaatatcaatcaaaattcccctccacactcattctcccatcgttttccctttctctctctcattctcttctccatcgcgcgtaagaaacacattttagttgctactaatgggaactgttgaagctgcaaacaaggatgcaaatggaagtctcctagagaaaaatccttcattgtttttgtgttaggtggccc

SEQ ID NO: 23359 - DNA, 253 bp, Glycine max
  Clone ID: 700909637H1
tattcatcaaactcatcaaaatgaatctgtaccactcctccaccaccaccaccaccaccaccatcttcaccgtcatattcctcctccttgcaatattattcactctcacaccccacaaggccaacggtgccacgtgtcaccctgaggaagaagcgggcctgttgggcttcaaatccggtatccgatccgacccgtccggcctgctcagtaactggatatcgggtacggactgctgcacatggaccggagtaga

SEQ ID NO: 23360 - DNA, 248 bp, Glycine max
  Clone ID: 700909639H1
ctagttcttaacttgttacagaaagttctctctttttatgttctttctgcctccaaattaccactctcttcctatgctatgatacagatacaggaagaggatcaaaataccccaccataagacaaacccaaaggaatagcaacgtcaattatggtgggaggtttcaatggagaaggtgttgtgagagaaaaagaggaagaagaagaaaacaacaagtggccttcatggctgcagccacttctcaagac

SEQ ID NO: 23361 - DNA, 242 bp, Glycine max
  Clone ID: 700909642H1
tggtggaagggtgcatgcacggggacctggacaatgtctacagaacccttcaacagttggagaaatctgaaaacacgaaaatcgaccttctcctctgctgcggcgatttccaagccgtgaggaacgagcatgacttgaagagcctgaacgtccctctcaaataccgctccatgaactccttctggaagtactattccggcgccgaggttgccccctaccccaccatcttcatcggcggcaac

SEQ ID NO: 23362 - DNA, 243 bp, Glycine max
  Clone ID: 700909644H1
tttcccccaaaaaataaaaagcacaccttcattcgttcctctttctttcttccaactctataaatatcaatcaaaattcccctccacactcattctcccatcgttttccctttctctctctcattctcttctccatcgcgcgtaagaaacacattttagttgctactaatgggaactgttgaagctgcaaacaaggatgcaaatggaagtctcctagagaaaaatccttcagttgtttttgtg

SEQ ID NO: 23363 - DNA, 119 bp, Glycine max
  Clone ID: 700909645H1
tttcatcaaactcatcaaaatgaatctgtaccactccttcaccaccaccaccaccaccaccatcttcaccgtcatattcctcctccttgcaatattatgtcactgctcacaccccacaa

SEQ ID NO: 23364 - DNA, 242 bp, Glycine max
  Clone ID: 700909647H1
ctagttcttaacttgttacagaaagttctctctttttatgtgctttctgcctccaaattaccactctcttcctatgctatgatacagatacaggaagaggatcaaaataccccaccataagacaaacccaaaggaatagcaacgtcaattatggtgggaggtttcaatggagaaggtgttgtgagagaaaaagaggaagaagaagaaaacaacaagtggccttcatggctgcagccacttct

SEQ ID NO: 23365 - DNA, 257 bp, Glycine max
  Clone ID: 700909649H1
actaactccagagtgtccacagaaccatacgagtgtttctcggattcagaaaaagagctatgttggtgatggttaattaatgaatgaagaatggcaaaaaaagctgtgttttttcttcttccccacagagctttttcttcctcaaccacagaaacccccaccctttactccttccttcagccctcagtctttgctctcaccaaaaaacaacaccaacccaattcagagccttctccaaagtccccaactttactctc

SEQ ID NO: 23366 - DNA, 256 bp, Glycine max
  Clone ID: 700909650H1
gtttttgaattccaccttctccgaccaatggctgccaaacctcttactaccgaggcgattgcgcttacggaaaagaagatggacatgacactagatgacataatcaaaatgtctaaaaacccgaagaataagaagcaaagaagggttccgaacaaaagtcaaaaattttcaaacaattttactcaggataagtctgcaaaggtccagcgttatatggaatcgagatcttctcttagacagggggctcttgcaaaaa

SEQ ID NO: 23367 - DNA, 174 bp, Glycine max
  Clone ID: 700909651H1
atctaatggttactatgacagggcaatagttttaaatgtgtataaagcctcatcgttgcaagcttatcttgcgatggatgcaggcctacactgccgattcgagaaaggaggttggaatgttacatggctgagccaatgaatttacgtatgtgggaaccgccactaacttagttt

SEQ ID NO: 23368 - DNA, 248 bp, Glycine max
  Clone ID: 700909653H1
tgaacgaacagttttgggtgatcggaggtgtatcttctcatctttttgccctatttcagggtttactgaaggtcttggctggtgtgaacacaaacttcactgtgacgtcaaaagcagcagatgatggagaattctcagaactctacatcttcaagtggacatcactcttgatccctccaatgaccctactaatcatgaatattgttggggtggttgttggggtctcagatgccatcaacaatggttat

SEQ ID NO: 23369 - DNA, 246 bp, Glycine max
  Clone ID: 700909654H1
tgtagaaactgcgaaaatggcatcggagtcaggtcaaagtcccaatccttcttggtttacgcccaaaaggcttcttatgatattttgtctcattaacatgctaaactatgtggatcgaggagctatagccagtaacggtgtcaatggaagtcttgcaacttgcactgactctggaatttgtacaggtggcagtggaattcagggggattttaacttgaacattttcaagatggagttctgtcatct

SEQ ID NO: 23370 - DNA, 165 bp, Glycine max
  Clone ID: 700909658H1
ggcaagagcagcgccgacgattggcagagggtgtcttctgagcgcagggcatccatcgggaagcagatggctgatgctgggatcaagtacatccccagcaacactttctctcactatgaccaggtgctcgacgccgccgccaccctcggtgccgttccaccaagg

SEQ ID NO: 23371 - DNA, 240 bp, Glycine max
  Clone ID: 700909660H1
cttgtgatttgctcacaaaaccagtgtcggtcacaccatctctcccttttctccacctgcaacgatgtcggttaaggagtgccaccaccaccacaagggaaagaagcacaagctctggagacgcatcttctggggaatagtgatcttcgccttcatcgtgttactgacagttcttataatctgggcaatcctaaagccttcaaaaccaaccttcatcctccaagacgtcaccgtttacgg

SEQ ID NO: 23372 - DNA, 215 bp, Glycine max
  Clone ID: 700909662H1
ttagtaggaggcattcattgtcttagagaccatgttctgcagaccctagtccttagagctccattcagtttattgtataatcatctcattcaagtagcatcaggagttagaggacactgacatcatattccatctgataattcaatcagaaatctatgtaactgtgaactaatgtgagcatgtggctaaaatatgaagcgccaaaagtatatgtt

SEQ ID NO: 23373 - DNA, 238 bp, Glycine max
  Clone ID: 700909663H1
gtctctgtctcaatcctctttcgatcaaaaacccttagctcttctctctctcatacttacacacactctcaattcttgcacatcttccatcggcgttggcgtcttcattgaattggttaaaattgacatgaacggtggaaaaattggtgaattaatctcgcagagttttgaaaaatgccgggattagcgcaaaggaatgaacaccaacttactaatcgctcatccacgccgacgtgtt

SEQ ID NO: 23374 - DNA, 253 bp, Glycine max
  Clone ID: 700909620H1
tgagattttgctgctctttgaagaagggtgtttgcttgattttggagatgtcgctgctctcagatctcatcaaccttaacctctcagacactactgagaaggtgatcgcagagtacatatggatcggtggatcaggaatggacctgaggagcaaagcaaggactctcccaggaccagttagcgacccttcaaagcgtcccaagtggaactatgatggttccagcacaggccaagctcctggagaagacagtga

SEQ ID NO: 23375 - DNA, 256 bp, Glycine max
  Clone ID: 700909665H1
cgcaaaccctaacctacttcttctatatcggcacctctatcccctgaaccctgttccatcttccaaccatggcgaaccaagacttcgaagagcgctcgcagcaaccgcaggagctagggtatgacccgaactttgtccccgactcggtaaaatcttttgtggttcacctgtaccgtcacatccgtgaaaagaacgtgtacgagatccaccagatgtacgagagctactccagaccctctcggaacgtctcttcaag

SEQ ID NO: 23376 - DNA, 150 bp, Glycine max
  Clone ID: 700909581H1
aaagaatttagatagccttgctctcaaatccaaccctctcagactgagcagagacacacacacacatcctaatcacaaagcgttggccatggcatacatgattgtggcttccaccaaacctctggttgcggtctgcaccagttcccgttc

SEQ ID NO: 23377 - DNA, 150 bp, Glycine max
  Clone ID: 700909582H1
gtgaagagaagcaatttgccgcagaagaaatctcgtccatggtgctcatcaagatgcgtgagattggcgaggcttacctaggctccacagtgaagaatgctgttgtcaccgtccctgcttacttcaatgattctcagcgtcaagctacca

SEQ ID NO: 23378 - DNA, 146 bp, Glycine max
  Clone ID: 700909583H1
gaggaatcaaagtacagatagaatcaactatctctcttttccttcctcgtccttcttttttctcatttccttctaaacataaaatgcatttgtgattctgccacaataattataagttcagaaatcttaattactgccctctggtc

SEQ ID NO: 23379 - DNA, 254 bp, Glycine max
  Clone ID: 700909584H1
cgttcatggatccagtaagcgtgtggggtaacacgcccttggcgacggtggatcccgagatccatgacctcatcgagaaggagaagcgccgtcaatgccgcggaatcgagctcatcgcctccgagaacttcacctccttcgccgtcatcgaggccctcggcagcgctctcacgaacaaatactccgagggcatgccgggcaaccgctactacggcggcagtgaatacatcgaccagatcgaaaacctctgccgc

SEQ ID NO: 23380 - DNA, 149 bp, Glycine max
  Clone ID: 700909585H1
tacatttttacataccattcttagccgccacttttctatattcatctgtaggaataacttttcatctgtatcaattttccccgtctaataaaaagggtttgactttttcttataatagagtttttttgtttcggctttaggtatttgta

SEQ ID NO: 23381 - DNA, 250 bp, Glycine max
  Clone ID: 700909586H1
aagattttgtccaattgaacttgtaaaaatgactgggataaacttaagaatccaattattgaaattgaataagtaaacaatttaattggattggtccaatggtatcaaaaaaatggagtactaactcccatttgttatttattattgagttaaccgatcagcttgctttgttgtcgaacatgtctttttgatttcagagattttccggaaaaaatttgaatctatggctatatgcgaatcaatcctacta

SEQ ID NO: 23382 - DNA, 132 bp, Glycine max
  Clone ID: 700909587H1
gagacgttatgagttccctccctttcactctttaatccccatcagcaaaacagtttccaaatggtaatagtagcattatcctcctcccttcccgccggaagaaacctcttctcctccattgcacacaacata

SEQ ID NO: 23383 - DNA, 250 bp, Glycine max
  Clone ID: 700909588H1
gaaaatgttggtttgtctctctcatatggcttgtcattaaatgccgtgatgttctgggctatatacatgagctgtttcattgaaaacaaaatggtatctgttgagaggatcaaacagttcacaaatattccatcggaagcttcatggaacattaaggatcgcctgcctcctgcaaattggcccggggaaggccatgttgatatcaaagacttgcaggtcagatatcgtccaaacactcctttggttctta

SEQ ID NO: 23384 - DNA, 248 bp, Glycine max
  Clone ID: 700909589H1
aagaggactgtccatgatgttgtacttgttggtggttccaccagagttcccaaggtgcaacaactcctgcaagatttctttaatgggaaggagctctgcaagagcatcaatcctgatgaggctgtggcatatggtgctgcagttcaagctgctatcttgagtggtgagggtaatgagaaggttcaggatcttctccttcttgatgtcacccctctctctcttgggttggaaactgctggtggggtgat

SEQ ID NO: 23385 - DNA, 245 bp, Glycine max
  Clone ID: 700909591H1
ctctgattggcctagccagtagtagccaatttgttggagctggttgggaatggcgtcgaaaacgaaatcaaatggaaattccaaatgcaacaacggatccgctgacagctatatgctgttgaatcctgaagacgctcatttcttcgatcttgttcatgtgctgtattcccgtaacttgggaaaccgaaaatttgtggacagcaatgctgagggatcttatgagggaagcttccgccaaagatggc

SEQ ID NO: 23386 - DNA, 246 bp, Glycine max
  Clone ID: 700909596H1
acgatgtgtaaagtatctgaatcgctctgtacttgaagggcgtgtcatcacggtggagaaggctaaaagacgacgtggtcgaaccccaacgccagggaggtatctaggactgagaactattcgtgctcgacgtcgctctccaagttactctcctcgtcgctctcctagctattctcccttcagaagaagctacagtcgctctccctattcttcagaccgaagtaggagtcgttcttactctcctga

SEQ ID NO: 23387 - DNA, 264 bp, Glycine max
  Clone ID: 700909601H1
tttggctactggctgtcatcccttctttcatcttcttccactgtctgtctacactacggacagagcttttttcacaccacagctaaaagtgctgcaatagagcccttcttctcccttcttcttctctacccacacccaaacccaaaccaagttctttctttctaattcccttgataatgtaaaatcacagaaaaacaaaaaaagctactcaaaacttggctccaattagcctttctttttttgttttgaggaaaaacagaaaag

SEQ ID NO: 23388 - DNA, 256 bp, Glycine max
  Clone ID: 700909603H1
ttcagacagagactgtcagcttcgccccgccatgaacgctattgcaactgctgcagttctctctctccctttctccttctccaaatcatccaaacttgacaccaaaaagggtttaaaaggaaggtttagagtgtttgctgtatatggagaagagatagataagaagaatgcatggagtgccctctttgatgtggaggatccacgatctaaagtgccgcagtataaagggaatttttggatgtatatcaagcccttg

SEQ ID NO: 23389 - DNA, 255 bp, Glycine max
  Clone ID: 700909604H1
ttgaggatgtaccactccggtgccgttttgcttcgcgatgggcgagttcttctcgctgggagcaaccctcacacgtattacaatttcaccaaagtgttgtttccaacggaactgcggttagaagcgttttctccttggtatcttgagcccggattctctaacgtgcgtcccgcaatagtatctcctgcgtcccaaacaaaactcaagtacggtcagacgttgaggcttcggtttaaggtgagcgcgactttggtt

SEQ ID NO: 23390 - DNA, 254 bp, Glycine max
  Clone ID: 700909605H1
tgtcgtgacataagcaaaaggaaagaatatcaacaaggtaaagtagattccttactagacatggcgttgaaggacacattctacatatctcatggatcaccaactttgtccatagatgaatccattcaggccaggaagttccttcagtcatggaagaaggacgtgtttcctcaaagacccgcttcaattcttgtcatctctggtcattgggaaaccgcagttcccacggtcaacgtcgttgactccatcaacga

SEQ ID NO: 23391 - DNA, 252 bp, Glycine max
  Clone ID: 700909606H1
ttagcatcatcctgatttgattatgtgccggaagcagccagggattgccattggacgactgtgcgagatatgtgatggcaagtgtgtgatatgtgactcttatgtgcgtccttgtacacttgtccgagtttgtgatgaatgcaactacggatcatttcagggtcgatgtgtcatatgcggaggagttggaatatctgatgcctactactgcaaggaatgcacacagcaggagaaagatagagatggttgccc

SEQ ID NO: 23392 - DNA, 249 bp, Glycine max
  Clone ID: 700909607H1
tcctgatgcatataaagctgcttggggtcttttgaaggtttttagtcattctactatttggactgttttagactaaatgcatttcctttattttgtgtcaatactgcattaatttaattttaaatgtattgaattgtagatgtagattatcttaagatgttccctaaatgaacttatgttacagggtgctaatgggattctagttccaggaggttttggtgacagaggagtggaaggaaaaattcttgc

SEQ ID NO: 23393 - DNA, 251 bp, Glycine max
  Clone ID: 700909608H1
tacgaaacagaaaatgccaggtctcacagcaccttccgattactcccaagaacccccccgccactcttctcttctcatcaacgccaaggaacctttcaatgcggagccaccgcgtgctgcgttggttgcttcctacgtcaccccttccgatttcttctataagaggaaccacggtccaatccccatcgttgagaacatcaacagatattccgtgaacgtgtccggcttggtggagcgtcccaaacagctct

SEQ ID NO: 23394 - DNA, 245 bp, Glycine max
  Clone ID: 700909610H1
tgtgaacggtgaaaagtgaattccagaaagaagagaatggcaagtagcggtgctgcaacagcggcgttgcagagcgatgcaagtagtagaatggaaggctggttgtaccttatacgcttcaaccgtattggacttcagttctctcggaagcgttacttcgttctcgatggtaaccttctccgcagcttcaaatcagttcctgtgtcaaataatcaggatcctgttagaagcgcgattgtacgatt

SEQ ID NO: 23395 - DNA, 248 bp, Glycine max
  Clone ID: 700909611H1
tattgaaaggaagacaaaacacaagacagagtcattcagcaaggcttgaaacgagaagcgaggatgcccatcagatgtattctgcattggccaccgaaccaaggaagcgttgtgaacagccaagtcctgaatgagatctcgcagtgcgtcgaaagccttaacggcgtcaaagaaggaagatgcaaagcctccctcactttctacagacccaatttacgagaccaatcggtgaccatcgattttcctcg

SEQ ID NO: 23396 - DNA, 161 bp, Glycine max
  Clone ID: 700909612H1
ctgtttgtgactttgtgttgctcgctccctactctgttatgctgctccttgctttctgatttcaagggtgtaaaccctaaaaaggacccacggcgagaagcttccaactcctctctcacgcgcggacctccccctccggcgacttctgcaccgacggacgg

SEQ ID NO: 23397 - DNA, 94 bp, Glycine max
  Clone ID: 700909613H1
tttttacagcaatggtggtgttgttttgccacacaaggagatcaagtcaaatattgctgaagccggagattggtcatggtgagttgaggtgcaa

SEQ ID NO: 23398 - DNA, 246 bp, Glycine max
  Clone ID: 700909614H1
tctcttcaactctccaacctttcactccatgagtctctcgttctctctttctctagaaacagtcttctcttttctcttttctcttcttctctctttttcagttgcaacatgagatgatgacagagatcacaaacctaagcacagacctcatagagctgatcctgtccctcctcccaatccccatcctaatcagagcctccacagtgtgcaagctatggcactccataatctcctcatcttccttct

SEQ ID NO: 23399 - DNA, 158 bp, Glycine max
  Clone ID: 700909615H1
ggacaacggaggtcactcgcacctagacgacgaagatcacttgttactcggcataggtcaccttcaccagtacgccgaataccgccaaccagtgtgcagaatagatcagactcccccatgcaatccccctcccacatacgacaagagtatggtagtag

SEQ ID NO: 23400 - DNA, 244 bp, Glycine max
  Clone ID: 700909616H1
cacacaccttgttttcctttctatagagacacacagagagagccataaacacccttcaatggctaccactaccactaaagtttacattgtttactattctatgtacggacatgttgagaagctagctgaagagattaaaaaaggagctgcttctgttgaaggagtagaagcaaagctatggcaggtacctgaaacactggctcaagaggtccttgggaaaatgggagcactccaaagagtgatg

SEQ ID NO: 23401 - DNA, 244 bp, Glycine max
  Clone ID: 700909578H1
tggaaaccatatccaagcggtttgaagaacttaatgtttgtggcaaagttactctaaagagcaaacttcgggaaattgcctaccctactctaaactctatgtgtcatcctccaaaaaaggtcaaaacaaaaggtgttcaaaagaaaccgatgaccaaacatcaaagatcaacaaagggtgattcgtcttaatggaagtatgttgatgtattacattctatgcaaaatagtaattcttcagtcaa

SEQ ID NO: 23402 - DNA, 259 bp, Glycine max
  Clone ID: 700909618H1
tatttattttctttctgcttctcatggatctctcctcactctcttcataccgcactgtcggagtaacaccttctgatcctcgaaaatcacttcctcaatggggtcttcatttcctctcctacactcacaggctcaaccagattaagaaaaggtcaagtggggtatatgcatcactatccgagagagagagaggagagtattattcccagagaccgccaactccgctactagacaccgtcaactatcctattcatatgaa

SEQ ID NO: 23403 - DNA, 255 bp, Glycine max
  Clone ID: 700909619H1
tctagatagaattttatagagagagagagtttttagagagagctaggatgaagatcacggcattgttggtgcttaaatgcacaggtgagggttccgatcccgttattctggcgaacgcttccgacgtcagccacttcggttacttccagcgttccagcgtcaaggagttcatcgtcttcgtcggtcgcaccgtcgcccgtcgcacccctcagggccaacgccaatccgtacaacacgaagagtacaaggtgcaca

SEQ ID NO: 23404 - DNA, 244 bp, Glycine max
  Clone ID: 700909545H1
ctttctctctctaaaatctcaggactcagattgtgccctttttgacaaacctctgctctttgattccagttggcttctcagaagtgtgttagtgaagtatttattgaccagagaatggctgggactgtgagtgaggagtctggagtgggaaagtccgtggagggtatttcaaatgggcagcgttgtcaatctggggaagcattggcagagtggcggtcttctgagcaggtggagaatggtatcg

SEQ ID NO: 23405 - DNA, 246 bp, Glycine max
  Clone ID: 700909546H1
attgtatgttgtagtaactcgttctgctgcttttgttgttcggtgtgtgtgtctgttttttctctcacctgaaaatgtcttgctgcggtggtaactgtggttgcggaagctcctgcaagtgcggcaacggctgcggaggctgcaagatgtacccagacttgagctacactgagtcaaccaccaccgagaccttggtcatgggagtggcacctgttaaggctcaatttgagggtgctgaaatgggtt

SEQ ID NO: 23406 - DNA, 226 bp, Glycine max
  Clone ID: 700909547H1
caaaatcatcatgatttggtcagttaagataattctgggttttgtgacaattgatttcaatacgacggtttcctttttccagattttatggtagctgtaagatgatgtataaactgcagtcttgtaatattgaattggagacaagcatgtttcagtgataatgcgggaatagataatataatttctttcttttttaaaaaagaaattaaaaagaaagatgagtagg

SEQ ID NO: 23407 - DNA, 235 bp, Glycine max
  Clone ID: 700909548H1
atcctttggtatatccctatatcttgcttttaagcattcaattgcttccagctgtattatacttgtctaaggaagcaggagatgaaggatataacattgatgctgcccacctatccattgtgctagctgatcatggggtcctttctgaaggtgctggttctgggcaaaagttaggagtgatggatgcttatgcggaagtgtcgaccattatcaggcagtatggatctatgtattt

SEQ ID NO: 23408 - DNA, 245 bp, Glycine max
  Clone ID: 700909549H1
tcttacttcactgcacgtcttgctttactctttctctctcttacatgccggaatttcctctctctttctctctccggagaatagaatacataccctaaatcttcgctttgctgacacacacattagatcctgactacaactgctaacgttaggaattatgcgtcactagcgatgtccgattttgattccacaacgcgaaaccgtccggggtcgtggtcgccgtcgccgggcgccaagggaattcc

SEQ ID NO: 23409 - DNA, 249 bp, Glycine max
  Clone ID: 700909550H1
ggctgcctcttcttatgctatgcaatcaatcctggcaaaccctttgatccgcatttccagcgggtctagggtgaaccaatttggcgttcctgctttgcacatgagaaggaatgttggcctgagagttaggtccatggctaaggaagaacaaccaagtgagcctgcaaccccagttacaccgccacaatcgtaggacccagccaaagcaatctctgttccttcaccaaaggtgagcactaagtttctgtg

SEQ ID NO: 23410 - DNA, 254 bp, Glycine max
  Clone ID: 700909553H1
ctttctctctcctccccctctccctccatccacgaccttctccgctccaaaggcttgccccccggcctcctcccagaggaggtgaaatcctacagcttctccgaaaccggccacttggaagtcttccttgacgcgccgtgcctgaccaaatacgagaacagagtcctcttcgagcaagtcgtcaccgccaacctcacctatggaagcctcataggagtggagggtctccagcaagaggagctcttcgtgtggct

SEQ ID NO: 23411 - DNA, 143 bp, Glycine max
  Clone ID: 700909554H1
agaaaattctctttctctggtgcggtgtccaagaacggccccgcccaagggagggagctcgtggagcttgttgaagggagaggacgggaagaatagttaaatcgtaagaaaaatagatagactaaactaggaagggacacgtt

SEQ ID NO: 23412 - DNA, 253 bp, Glycine max
  Clone ID: 700909555H1
attcagaggtccgaaataggctacgtctctacgaaagccttgttccttcttctcccattctatccgtttctatccaaatatcccaccccgccatggtggtggcaacaaccaaacaccacttccgtttcctctgcacattcatcacgctgcaaccacattagcgtactatgctgttcttcttcttgttgttccctcctcagctatggaattcgccaggaccatgttctgttcttctccaccgttccctccaaga

SEQ ID NO: 23413 - DNA, 247 bp, Glycine max
  Clone ID: 700909556H1
tggaaccccaattgcagaagagcattccctgcttctgtttgctgaggttgctgaaaggtacaaaattggcctagctttaatttaagtaacattcagcaccctccttacgtatgctgttaaattgttttagtattgcattttaaaagctatgattttagtcttcatttctttacagtttctgagtttgttcctcactcttaaaatatcaaagacttaaaagtcagatatcatccaaacactcctttgg

SEQ ID NO: 23414 - DNA, 121 bp, Glycine max
  Clone ID: 700909557H1
caacaagtttatatgagtatcgaggatggaactcaaaagctgccaatcctacacaccgtcggcttacttggggccttagactgctggaaagacgcgtcggttgacttctacatgctcggat

SEQ ID NO: 23415 - DNA, 162 bp, Glycine max
  Clone ID: 700909559H1
gctcggagttcggcgcgagagcaaagcaactacatcagctcatggctacccccaaccccaccagattctcccttgccatggagagaaccgggcaatgggttttctccccagaaatcgcaccggtttagtgtgcattggaaaccaattttctctccacaagtt

SEQ ID NO: 23416 - DNA, 237 bp, Glycine max
  Clone ID: 700909560H1
gaaaaagggaagggaaggtgtgtggggttggaatgagtatactatacatgttgttgtggtgtggatgaagaagacacctcactgaattaaattaaccagggaaaacccactcttgctcatttcccttctctgtctctaaaacaccaaacccctctttttttctttctatcaaacacagtgcgtgcttttttgttcgtgttcttgttctttcgttctcctaattgtttcggtttatga

SEQ ID NO: 23417 - DNA, 247 bp, Glycine max
  Clone ID: 700909561H1
gtaatggattggcatcatttgaacaagatttttcatcaaaaatcctagttacatatcggaaaggctttgatgctattggagatacaaagtataccagtgatgttaattggggttgtatgcttcgaagcagtcagatgctggttgctcaggcattactttttcataaattaggtagatcatggagaaaacctattgacaagccactggataaagaatatattgacgtcttgcaactttttggtgattc

SEQ ID NO: 23418 - DNA, 263 bp, Glycine max
  Clone ID: 700909562H1
ctcggtattctgctcgagggtggacacatgaacagtgtaaatgtggttcaatcagcaactactgataaccaagcagggtggcatgatattacaccagtgaatgaactgaaagtcacatcaaatgttcttgaaacccaaccaggaaaggcaccatcattggaaagtgtgtcctcatatatttggtctggatcaatctcaatcaatctccacattgatgctatgtcctctgcagaaattcctcttcagatctgtgtgttctctcc

SEQ ID NO: 23419 - DNA, 146 bp, Glycine max
  Clone ID: 700909563H1
ctttttctgatatcttttacgtgcccatcaaacaaataagctctccactctatttcagtcaccaatcaccaatgactccttctttcactaacgtcaaaatcttctcttctctcgtcctagacggattcttcaacgctctcaccaga

SEQ ID NO: 23420 - DNA, 248 bp, Glycine max
  Clone ID: 700909564H1
tggcactggagaaagtggctgcgtctttggaacttccctgtaaatatcaaggttttgggtgcatcggtatatatccatattacagcaagctaaaacatgaatcgcaatgtgcacatagaccttacaactgtccatatgctggttcggaatgctctattatgggtgacataccctacctggtggcccatctgaaagatgaccataaagtggacatgcacaatggtagcacttttaatcatcgctacgtc

SEQ ID NO: 23421 - DNA, 254 bp, Glycine max
  Clone ID: 700909565H1
ccagattagtaccacaaaaatggagaaatagaataactgaatatcgtatagctcaaaataaagatttaaccaaatgcaattcatatgaaaaaagccaattaattctttacaaagaacaacaagtaaacggattaaaaaaggaaattagaaaagaatatggatacgatcttttatcctataatttgatcaattatgcagataagaaaggctcatatatttgtggatatagatccctatttcaagtaaaaaaagac

SEQ ID NO: 23422 - DNA, 250 bp, Glycine max
  Clone ID: 700909566H1
gattttctttgggaagacgttgagtctgatcgactcaacctcaaccttctcctggttcctgcattgcgttgctctctctctaccttctaattcccaaatttctagggtttggtacagagagaaataggaacataagatgtctcagaacgggaagctgatgccaaatctagaccagcatagcaccaagcttctcaatctcactgttcttcaacgaatcgacccttttgtcgaggaaattctcatcaccgct

SEQ ID NO: 23423 - DNA, 252 bp, Glycine max
  Clone ID: 700909567H1
attgggttctcttgcaagctttacagctacagtaatggtttcataggtcaaatatcgatgctgttacatgtactgggatggcagttgtaatgtgtggaaattttattcttacggagattttgaagtggaggggaagatcactggctcagtcgaatcaacaacaaggttcccaagtagcagtaccgccacctgatcaatcatctactatccctcatcaagctcagattggttctgaacatactgaaagtaatt

SEQ ID NO: 23424 - DNA, 253 bp, Glycine max
  Clone ID: 700909568H1
agacaacagaggaacactcccaaacaaaccatggacgtgggtcagatgcagagacagtggatcgactacaccaaatccctcttcctcgagggcttcctggatggtcagtttctgcaacttcagcagcttcaggatgagaacaaccctgactttgtggtcgaagttgtctctctcttctttgaagattctgaaaggcttctcaaagatctcacctttgccctagatcagaatggcgttgacttcagaaaagttg

SEQ ID NO: 23425 - DNA, 251 bp, Glycine max
  Clone ID: 700909569H1
ctgaggccttctttctctgcctccaccccatcaaccttgcctgtcacagaattgcggactgttggttcctctaaagtggatattagggatgtgcaggtagatgaacacgttaccgtgacaagatggtccaagaaacatagggccctattcactggcagaggctcagaaaaagtcgaaagctggaaaaaagaactaagcactcaatcgtcaacttgggacgtttctgaaacgtcaaagcctgcctcaaagac

SEQ ID NO: 23426 - DNA, 253 bp, Glycine max
  Clone ID: 700909571H1
gtacaacacaaccaggtccctgaatgctttttagagagagaaagagtaataataataaagtggaagaaaaagaattaggagagtgaaacaagaatatgaagaagaagaagaagaagaagaagagttgagaagatggtgtttgaggaaactgagctgaggctgggactgggactatgtctccctggaaatggaaccacggcaacaactgaagctgctgctgcggaattaggagtgaggaagagagggttctctg

SEQ ID NO: 23427 - DNA, 150 bp, Glycine max
  Clone ID: 700909573H1
tgaccagcaacctccgcacaaaatggatgagaacatgtggaagaatcgagagtacattgaagaaacaatttttttacttcagagttctaattggccagaggcgctgaagcagcagtccacagctgacagtgttgaatttgccattacgct

SEQ ID NO: 23428 - DNA, 247 bp, Glycine max
  Clone ID: 700909574H1
cacttgcaaggtttctccctgatggccttgtgtcagtaattagggatggacctggtgaagctgttgtagttggtcttgagcagactacagagacaccagaacttgtatggacaccagcgatggcagcttccttatctgcacaaatttccactatggcattagagctataccgtgagcagatgaaggggcgtgttgttgattgggatttgcctgagcaggcatctggccagcaggaaatgagagatga

SEQ ID NO: 23429 - DNA, 250 bp, Glycine max
  Clone ID: 700909544H1
ggaggaagtgctgaataatgctctaggcagagtcaccactatcgaacaagacttggttgcaagaaagaaggcacttgatgatgcccttgctcgacaagtagaactccaagctcaaattgacaagaagaagaaaaagaagaacaagttgttccgcttccgctgttttgctgcgtgatctcaaatgcatcaggaagagttgtaaaattggaggctttctatttcgactgcctgtttgattaaaaacctctgt

SEQ ID NO: 23430 - DNA, 248 bp, Glycine max
  Clone ID: 700909575H1
ctcttcactttcaatctctttcccttcctttccttgtctttctattcctctagatcaaaattgttatattatcacccatcaaacattccacacttctccccctccctttgaaaacacctcaatcaatctcgatgatcatggcagcactcaattcaagcacttgtgccatacctcaattccctcacgctctctcctccactatctctgctgcttcatcattagcaagagatttgggcttccccacaagg

SEQ ID NO: 23431 - DNA, 247 bp, Glycine max
  Clone ID: 700909576H1
ctcgagccgggaggagggaggtggagtgcgggcgagggtaactaaccaacgctaagcagttgttgagtttggttggtagtagatgagcgaagtgttgacgatggcggacgtcacggcgaacttgcaagcagcaaccaccgcatccaccccttacgcgctccccaccaatctccctctcctctccgctttcctctccttcgctctcgcacagttcctcaagatcttcacctcctggtataaggaaaag

SEQ ID NO: 23432 - DNA, 201 bp, Glycine max
  Clone ID: 700909503H1
ctttcgcatggtcgattgctttttattttatgattcacgttgcaggtgatgctgcccaatctaatctcttcgataagtatgttaggagaacaaacattatagggtgaggcaacccaattcaccctctgccggttaccatctcgttctgggcctgctgcattacttggagtgcatattagagcaggagaaggagatgaagat

SEQ ID NO: 23433 - DNA, 221 bp, Glycine max
  Clone ID: 700909504H1
gttctagatcgcgagctgccgcccttttcgccttttttttttttttttttcccgccggcaccgggttctttccttttccacctggtgtgcaatcccgggtctttttcaagttttttgggttcacaaaacaaaaaaaatgacctcaggaggggcccccccccgtctagtagtcttccccccggttgatcatgcccgcacgttcccccaagtggagcccgttt

SEQ ID NO: 23434 - DNA, 255 bp, Glycine max
  Clone ID: 700909505H1
aaggcatctcaggttcctccgcagcagcatataccatctggagaagttgttggtaattcagcatcaactgcatcgcagactaaggctagaatgcgttggactccagaacttcacgaggcctttgtggaagcagttaatcaccttggtggtagttagaaggctactccaaagggtgtgttgaatcaaatggaagttgaacaggctacctatctatcatgtaaaaagccacttgcagaagtatagatctgccatata

SEQ ID NO: 23435 - DNA, 253 bp, Glycine max
  Clone ID: 700909506H1
gtggttggattggctgcaaatagctgaatttgttgcagcctttgtgcttcagtgcttcaatgaagaataaccaatgacaactcccatatttttgtatgcccattttaacttaatgcacatactttcagattgtagccagctgttaaatcaatatagattttctttccaataccattatattagaaaagattgaaaaataatgaattgtaagaagcatgtcagactaaatggaatcctgtcattgctctgaatg

SEQ ID NO: 23436 - DNA, 254 bp, Glycine max
  Clone ID: 700909507H1
tttcaatcctcagtttctttcttcaacgtttccatcatacacagatcccaatcccctctcaagccctaatttcccctcatttccatggccacagaggaccccactgtcgcggtggaacacgctcccggacctgcctccgccgatcctcccccggaggagaaggaggagaccaaacctgaagccaaggctaagaaaaccaaggagcccaaacctaaaaaggtttccagacctcgcaaccctcccactcatccttc

SEQ ID NO: 23437 - DNA, 173 bp, Glycine max
  Clone ID: 700909510H1
attcggatctgaaatcgctcctcctccaatcgacgccgaagtcggtggtaggtgatcgaggatctggaccggttcctggcggacaagagggagagaataagcgcgtcgggactactgaacttcatggacgggcttttaacctcgtgttgcgccgaagagagtgttatggtgtt

SEQ ID NO: 23438 - DNA, 247 bp, Glycine max
  Clone ID: 700909513H1
gagtcagcggttttacttgcatcattttggaggacatctcttaatgaatcagagagtcagcggttttactttgatcattttgaaatccatccaataaagatcattgcaaactttatccctggggaatcacgttcaagttacagctcaacgcaggaggctctgaggtccttaattcatagtgtgattaaggtgcctcccataaaaaatatggtagtagaattgaacggggtcctgattacccatgctt

SEQ ID NO: 23439 - DNA, 207 bp, Glycine max
  Clone ID: 700909514H1
ccgtgatcagggtgagcacctccatcaagatgtcacgtcctatgacgtgccagatcctgatgccattccccagcgctcttcatggactggtaggtggtcgaggtgggcgaagctccttgcaggccctcgtacacggtcgacagtcacaacgctagacacagacgtggactatgcgtgcccagacacgaccgtcaccttggacatggc

SEQ ID NO: 23440 - DNA, 248 bp, Glycine max
  Clone ID: 700909515H1
gttttgatcgtccctcttcccaatttcagggtaagctttggatctcggatcggagccttacccatcttttctaaatcttcaaggaacgctttgggacactaaagtttccaagattgtagagagcacaacagaatgagagggaagacttgaatcaggattcaggggtgagatatttgaggatggttacttatggtgaaaggtgggctgataaatagggagtaagcatggaaaatttggtgagcaaatag

SEQ ID NO: 23441 - DNA, 226 bp, Glycine max
  Clone ID: 700909516H1
cagcaattgttgaagattctcgtcctccatcctcatggcctgagaatgggacaatccaattaattgatctgaaggtacgttacaaggaaaatcttcccgtggtgcttcacggagtatgctgcacatttcctggtgggaagaagatgggataattggtcgtactggagtggcaatctacttgattcaagcattatttcgattggttgaaccgggcagggatatccta

SEQ ID NO: 23442 - DNA, 54 bp, Glycine max
  Clone ID: 700909517H1
agctcgattcggtcgagcatgatctcctcgctccaacaatgttcccataccctt

SEQ ID NO: 23443 - DNA, 253 bp, Glycine max
  Clone ID: 700909518H1
atttcccttctgagctttgattagtgtggcctagttgttgttttctcgatgagaaaggcttcttccactatgcattgcgcatttctgcgcttttgggttcccttgttgctgcttgctagcttcagctatgctccttctgtttcggccacaactgaaatttcagggaatgaagtgaacacagatgggaaggtgataaatgaagagttagcaaaaccaagtctactaggacatgatgaagcagcaaatttcaaag

SEQ ID NO: 23444 - DNA, 253 bp, Glycine max
  Clone ID: 700909519H1
caagaagctaagagaatacaccaaaacccaacatgaaaacccttaacaaagcctcacttattttattccctctcttgttcctttccctattcaagcagtcccatgctgcaggaatcgctatctactggggccaaaacggtggagcaggcaccttagcagaagcttgcaacactagaaactaccaatatgtgaacatagccttcttgtccacttttggcaacggccaaactccacacctcaaccttgcaggtca

SEQ ID NO: 23445 - DNA, 255 bp, Glycine max
  Clone ID: 700909520H1
gaagagttggctgatataaaagatcaatttgatgctatagatgtagacaaaaatggttcgattagcctggaagagatgagacaggctcttgccaaagatcttccttggaaattgaaagaatcacgtgtactagagatattgcaagcgatagacaacaacactgatggtctagtggatttccgggagtttgtagcggctacattacacgtgcatcaattggaggaagactctgacaagtggcagcaactgtcacag

SEQ ID NO: 23446 - DNA, 192 bp, Glycine max
  Clone ID: 700909521H1
ccggtgttctcccagagtaggtgatatcctacagcttctccgcaaccggccacttggaagtcttccttgacccgccgtgcctgaccaaatacgagaacagagtcctcttcgagcaagttgtcaccgccaagctcacctatggaagtctcataggagtggagggtctccagcaagaggagctcttcctatggc

SEQ ID NO: 23447 - DNA, 256 bp, Glycine max
  Clone ID: 700909522H1
aatagatcaaggaaatgcaaatgtgggttggggagtaggacagacggcagtgcaggaaaacaggagttctagttcatacacttctgcagtaactccaggctttggggatagccaaacaaaatatggcagtgatcgattttctgtgtccagagatcggggttttcaaggtcatagtagggaatcaggtttgagtagaagcagaattccatataacaggcaaccgtcatatggtgttggaaatggagcatcatataag

SEQ ID NO: 23448 - DNA, 254 bp, Glycine max
  Clone ID: 700909523H1
cacactcattattactatacacaccctctttctcctcctcctccttcttcttcttctccttctatctctttctcattctatctttcaacatgggtggcatcagcctcgaagaaataaacaacgagaacgtcgatctggaacggattccaatagaggaagtgtttgagcagctgaaatgtccaagagcaggtctaacatcagaggaaggggccaatcggatcaaagtctttggaccaaacaaattggaagagaaa

SEQ ID NO: 23449 - DNA, 249 bp, Glycine max
  Clone ID: 700909526H1
ttcgagggtttccttcacatctctgtaatttccatttccacagttactcttgtgaattagcgagatttgaagcgagtgatggctgcgaaggaagagaatcgaatatttgttggaggtttatcctgggacgttacggagcgtcaactcgagcatgcctttgctcgttacggcaaaattctcgaatgccagatcatgatggaaagggatacaggccgtccacgtggatttgggtttatcacatttgcagac

SEQ ID NO: 23450 - DNA, 246 bp, Glycine max
  Clone ID: 700909530H1
acataattgagactttggttgatgaatacaaggcctgtgagtccccagattatatcacatggggaatggaggatccaaacaacatgctaacaggagaaggcaatgctacaggatcattggatccaaattcagtagcgtgaaaaaaaccaagtaccacaagggaagcataatcaaggaaagggtttttctgaaagatcaacaaggtttcctttgaagtttttaacttttatggggtgtgagatggtt

SEQ ID NO: 23451 - DNA, 244 bp, Glycine max
  Clone ID: 700909531H1
atttcttcaatcttctctcccttctacttctagggtttcgcttctgcaacggacgaccttcttcaactcatcaaagttgactttgtgagccaattcaatcaggcttgagaaggtatcctagtgttgtttgttcaccttcatctccatgatggaatactgtaaagatgtcctcagctgtcttgattcggatacgtctcttaagatattcatgtgtctggatgatctggctgatcttgttcgggtt

SEQ ID NO: 23452 - DNA, 237 bp, Glycine max
  Clone ID: 700909533H1
gctatttaaaaccatgggtgttagcattagaatcaaaacttaacttgtatgtatgtgtagtcgataaaactcaacagttttctgaactaaaattaaaaaagatcaaatgattaatagcttaacctattttcttgatctatgattgttccttcagtttttgttactggtaccctctaatttgagtgttttcatgtttttctgcagaatctcgtgctataatgaggtattatgcagaaa

SEQ ID NO: 23453 - DNA, 262 bp, Glycine max
  Clone ID: 700909535H1
ctctgttctctgcgctcggcgtggtgttcttgtgcccattttcaggagaccgagataggcagtgcgattcgatactgttcttcttcctgatgcttcattaggcgtcgcaatctgggtagtgacaactccatgttccaaccatgtaatggggtctaccttcagtgtgtcagtcttcggatctggtacttcacacgatttgtacaacatgttctgcgccatcgtgtggctgcactcgtcagtcgcggatttgttcggagcgttc

SEQ ID NO: 23454 - DNA, 267 bp, Glycine max
  Clone ID: 700909536H1
ctctgtattcggctcgattttgccacatggcataggatcctccgacttgatgcagtacgtgcgaatgcagaatggatgccatactccccttctcaagcaattgtaccagacattagggcatatcgttctgctgaggctgttgggttgacggattatagtcacctagatcccagcaggaatctttcatgctgctcgactagttgctattctcgaagcatatcgttgatacgacccttaaattggctactgccagggtataattgatct

SEQ ID NO: 23455 - DNA, 243 bp, Glycine max
  Clone ID: 700909537H1
gtccgctcgagctgaggccgtctctctgtggctccatgatcatcaatctagccgttgagagaattgcagactctagtgccctctaaagtagagattgagtatgtgcgagtcgatgacctcattaccgtgacgagatagccgatgatccacttggcgctattcactaggataggctcaggggtattctgaatctggtaaaaggtgctagtctcactatcgtcaactgtgggacggctcttgaac

SEQ ID NO: 23456 - DNA, 55 bp, Glycine max
  Clone ID: 700909539H1
ggtattcggctcgcgctctcctatatatacatatctctctcttccgcataccacc

SEQ ID NO: 23457 - DNA, 256 bp, Glycine max
  Clone ID: 700909502H1
tttagatccagatggatggaaaactgtcttggttgacaacgttgatttcttggaagaactgaagtgaagagcaagctttatatgaaataagtagtcctgctgcttgtgtatgaataagttgtctcgcattttatcattgtgcgttttgtatcagtaccagtcatcaacttgttctcttggctttaatgggtccttttgttgacttaaaaccgcaattgacacctcattctgcatgctacctatgattaatctacta

SEQ ID NO: 23458 - DNA, 126 bp, Glycine max
  Clone ID: 700909542H1
tttctgtgccaacaaaagaagatggcctcacaggtttgcaaagctgcttccagagccgcgaggtcccttctctccgcttccagagcctcccataggacgtgacggtctggggctgctaacggctgt

SEQ ID NO: 23459 - DNA, 262 bp, Glycine max
  Clone ID: 700909543H1
gtttttatagtcctcaaagcaaatgacagtggagaaggaggaacgtttgcactatactcgctgatttgcaggtatacaaatgtgagtctgcttccaaatcgtcaacaagccgatgaacaaatctctagtctttaagctcaaactgacctagtcccagacactgcgcaaggtgcctataagtactaaagcgacagctttagaacaggacaccatttttccaagaacctattattgggtgttggttcttctggggagcttccat

SEQ ID NO: 23460 - DNA, 276 bp, Glycine max
  Clone ID: 700909462H1
cctacttctacttccctttgttctcaaaccttatcccttatcctcccaaaaccaaaccatgtctacctccgcagcttctctcgcactcccaaccctcactctccgaactcgacaacctctctgttctccccaatgcttctcctcgtccctctccctcacccctaactccaaacccatttccatttccgccgttttcctcaaaacaacgctgtcgtcgtcgtcgccgttgtcgctgtcgtctcgcttcgttccccatgtctctgtgttggagcagga

SEQ ID NO: 23461 - DNA, 270 bp, Glycine max
  Clone ID: 700909463H1
gtcttcataaacgcctttcttctccgtttccgtttcctcgttcgaattcgctttttgatctgcgaaaatgagagagtgcatctcgatccacattggtcaggctggtatccaggtcggaaatgcttgctgggagctctactgcctcgagcacggcatcgggcccgatgggcaaatgccaagtgacaagacagttggcggtggtgatgatgctttcaatactttcttcagcgagactggtgctggaaagcacgtgccacgtgcagtgtttgt

SEQ ID NO: 23462 - DNA, 274 bp, Glycine max
  Clone ID: 700909464H1
ggattttgttaaagaattcttgctttatagcatattattgtggtcttggagcatcttttatatgacaattgtttctagttatgccagcatggtccaaattgttctgcttcttcttttatgtatgcaaggaaattctaataaaaactaagcaagaattatggacttaggtttaaaatcatcctacaaagctagatttagataatcacagcaaaaatcctagatgtttgaatcattcctttctaacatccatattggcgaaaagatctgtacagta

SEQ ID NO: 23463 - DNA, 269 bp, Glycine max
  Clone ID: 700909466H1
gtgaactagttttagattcttacctggtggtaattaatgggaaagactttctaattttgttataacttataaatcataaactgcatccttgtactcatttgagatcaatgttttaaatcccgaattaggctatatatgaatattttgaaatttattatatagtctattaaatataatttctcaaaaatgataaaaaaaaaaaactcatagttgatgatgttcataattaacaataaaaagttgtaggtgtcatgaacaaaacatacaag

SEQ ID NO: 23464 - DNA, 263 bp, Glycine max
  Clone ID: 700909467H1
gtagttctttacagaaaccatgaaatcagaaagcatcaatttgttgctgttaccgagtggtctggtgggctgtatgtatctccaaccatagctggaagcaggcctggaagtcttattgccggtgcatgggcagcgatgatatctctagggaaagaaggatacttgaaaaataccaaagaaattatggaagggtcaagaagaatacagcaaggcatagaggagattgctgagttggttattgttggaaaacccgcatgacgata

SEQ ID NO: 23465 - DNA, 259 bp, Glycine max
  Clone ID: 700909468H1
accaaatccacgttccttacttcccagcgatccagtctccaacgatccctcgttgcccctttcatttccctcgcctccagaaattacgccaacgtgccggggcaaaaggaaaccaaagttaaggtccctctggctttgtttggaggttcaggaaactatgactctgctttgtatattgcatctgtgaaagccaatgcagtggaaaaggttgagactgagcttctgcaatttgttgaggcagtaaagaatagtcccatat

SEQ ID NO: 23466 - DNA, 272 bp, Glycine max
  Clone ID: 700909469H1
ctcaaacactagcaaagggaaggaaaagtaccttccccaataacccttctctccgatttggcttctctcatcggagggaaacaatcaataaaagaaaaaaaaaacccacaaaaagattataacaaaaaaagtatgaaaggaaaagtactaggttccgcagtttctctcatcctagtggtgggtgtggtaattggcgtggttgctgtagttcaaagcccaaagggcgtgaacaacaacaacaatggaggagaattgaaaaccagcaacagggc

SEQ ID NO: 23467 - DNA, 268 bp, Glycine max
  Clone ID: 700909470H1
tatctctccaacttcactccttttattcccttatcacttcttagttctttccttatcctttcgctatccagacatgtaatctctcctttaccaagttttgttttactatttgatcggatcggatcggatcttgctttcgccattaattactcatggagatccgtgccgatgcttataccagctccttttcaagtttgttcgcagctgtgtcatatggatttacatcaatggccatggtttttatcaacaaggctgttcttatgcagta

SEQ ID NO: 23468 - DNA, 272 bp, Glycine max
  Clone ID: 700909474H1
aatagaatagaattcagcacacacaacacattctctttctttgtagatcccactcaactcactcaggacccatccctcagcatctgagagagagccccacaaacacaaagggaatctgtctcaactcaactcagctcagtgcagaatgcgaaagagcaatgaggaatttccgaatctgagtctaaggaagccacccttaaagaggagcaagacaattccaaatccaaaacacacccatttctctgtctctgtctctgactccgacgagcaat

SEQ ID NO: 23469 - DNA, 262 bp, Glycine max
  Clone ID: 700909475H1
ccaaaccaacacctttcaaaatgcaaacatccttaacctttgctgcccccaacgttgtgcctttggcacaaacaaagagtttctcccatgttgccatcttccctaccaatttgaaagccccacgctcttcaactcgttactctccgatcagggttgcaatcgtggagcctgacacttcaactgtggactacaactctgcgttctcagtgtttccagcgaaagcatgcgaaactgttggaggggaagctgcatggcaaaatgt

SEQ ID NO: 23470 - DNA, 270 bp, Glycine max
  Clone ID: 700909476H1
ctttttaccaaatctacaagaaaaaatctacggatgggtttcaatcactaccttatattgttgcactattcagttcaatgctctggatttattacgcactcgtcaaaaaggatgctagcctccttctcattactattaactcctttggatgtgtgatagagacgatataccttgcaatcttcctaatttacgccccaagcaaaaccaggctttggaccatcaagcttcttctcatgttgaatgtttttggattcggagcaatgcttcttt

SEQ ID NO: 23471 - DNA, 269 bp, Glycine max
  Clone ID: 700909478H1
caaagttaaggtccctctggctttgtttggaggttcaggaaactatgcctctgctttgtatattgcatctgtgaaagctaatgcagtggcaaaggttgagtctgagcttctgcaatttgttgaggctgtaaagaatagtcccatattttcacagtttataagggacttgtctgtggctaaggatgttagagtaaaagtcatccaggatatttgtggtgaagctaagttttcagacgttacaaagaacttccttgttattgttgctgaga

SEQ ID NO: 23472 - DNA, 268 bp, Glycine max
  unsure (1)..(268): unsure at all n locations
  Clone ID: 700909479H1
caaagtttcatcaaatgtactctcaattaagagaaatttgatcaaatttgagctcagttacgtaataaactacttgacatttgatcaaatgtcaagtagtttattacgtaaacagaggtcaaatttgctggctgctcttgaacgctatgataattttgggcgggaagcccgaatgcaaccatattgtacaaaagaggacattgaggatgatgattgattgcataatcgtccanagatcgcaantaatgcacagaagaccacggacgag

SEQ ID NO: 23473 - DNA, 274 bp, Glycine max
  Clone ID: 700909480H1
tttttctctaagtctaaggggtgccctgagatcactttgagcaatggtgaaggctgtggcagttcttggcagcagcgagggtgtcactggaactattttcttcactcaggagggaaatggtccaaccaccgtaactggatctcttgctggtcttaagcctggtctccatggcttccatgtccatgccttgggggacactaccaatggttgcctgtcaactggagcgcatttcaatcctaataacaacgagcacggtgcccctgaggacgagaat

SEQ ID NO: 23474 - DNA, 268 bp, Glycine max
  Clone ID: 700909481H1
ccctcgttgaaatgaaaatgggtacttctttgtggactttgtgtctaattttggcttcactagcctcttctgcattctgtgcctttccacggatgccagtggaggttccattcggctgaaactacgttcccacttgggcttttgatcacatcagatacttcaatggaggttctgagcttcaacttcatcttgacaagtacactggtactggcttccagtccaaatggtcacacttgtgtggtcacttcagcatgaacatcaagatagt

SEQ ID NO: 23475 - DNA, 266 bp, Glycine max
  Clone ID: 700909482H1
atttctggggttggaggggagttgaagaaaatgctgtctgggccaactgggttacaccatgaagatcaaaagctgttatacaaagacaaggagagggattcaaaggcttttcttgacatggttggggtgaaggacaaatccaagatagtgctagtggaagaccctattagtcaagagaagaggttgttagagagaaggaagaatgctaagatggagaaagctgcaaagtcgatctcagaaatcagcttggaagtagataggcttgc

SEQ ID NO: 23476 - DNA, 269 bp, Glycine max
  Clone ID: 700909484H1
aagcacttaagttcttgcattctcaagcttcatccatgcttttgattggagaggtgtcaccggagatagtttgggtcgacgctaagggcgtccctcgccttaaggtcacccctcccctattgccgtgtttggatgtcaagggtttcgtttcttcgccctacgttgctcaagaggtaatagagaggaaaaatgtgacggagaagagtgagatatatgggttcggagtgatgctggttgaattattgacgggaaggagcgccatggacata

SEQ ID NO: 23477 - DNA, 269 bp, Glycine max
  Clone ID: 700909486H1
ctctccttctcgctctttcagctttgacttttgttggaaactaaggcctaatcaaaatggtgaagttcatccctgaagagctacgtcgtattatggactataagcataatatccgtaatatgtctgtcattgctcatgttgatcacggaaaatcaaccctcactgattctcttgtggctgctgctggtattattgctcaagaagttgccggtgatgtccgtatgactgatacccgtgcagatgaagctgagcgtggtattaccatcaag

SEQ ID NO: 23478 - DNA, 269 bp, Glycine max
  Clone ID: 700909489H1
catcttacaacttgaaactcttccgccatacctcacctctgatctacgtcgtcgtcgtcgatcttctgttcagaataataattttagatccctgatgcaacagaacaaggaatcttcttagattctttttctggaagaaagagaagacagatgaagaaactcttcttctttagacccgtcttatatatttatatacagtctctgattgatcggttttttcggaacctctattttcactcaactccacgcgtgatcttcgggcatggatt

SEQ ID NO: 23479 - DNA, 266 bp, Glycine max
  Clone ID: 700909490H1
gaagaagggatacgaggttctttatatggttgatgccattgatgaatatgctgttggtcagctcaaggaatttgagggcaagaagcttgtctctgccaccaaggaagggctcaagcttgacgagagtgaagatgagaagaagaagcaagaagagttgaaggagaagtttgacaacctctgcaaggtgatcaaggatgttttgggtgacaaggttgagaaggttgtggtctctgaccgcgttgtagattcacatgctgtcttgtgac

SEQ ID NO: 23480 - DNA, 266 bp, Glycine max
  Clone ID: 700909491H1
ctttctccgagaacaaaaaaaaaaacgtcattcgctcttctcttcgaataaaccacaaaaccaacaaacgagaagaggagtgagagaagatggggttgtcgttcacgaagctgttcagcaggttgtttgcgaagaaggaaatgaggattctgatggtaggtctcgatgctgctggtaagacaaccatcttgtacaagctcaagcttggagaaatcgtcaccaccatccccaccatcggatttaatgttgagactgtggagtacaag

SEQ ID NO: 23481 - DNA, 266 bp, Glycine max
  Clone ID: 700909492H1
gatagattccatcggtgcgtttctgctctgctagggtttcatcttcttccatcacctccgtcgcattgaaaccaggcttcatctgaatccgattccccttcgccccttctcctccttcactttcaccttctccgaatcctctaccaattattatcatgtcctccatcttcgtctctcacaaccttcgcgtctttggtcccggcttgaatcccttcgcaccttattgcatcgccaatcacaccctttcctctcgctaaataccaatt

SEQ ID NO: 23482 - DNA, 272 bp, Glycine max
  Clone ID: 700909496H1
gcaattttggtgacattttcgatgaaaatttcttcatacaatcacttggaaatcgtgtgcatgtggtgagagaactccctgatgacatacttcaacgatttgacaataacataagtaatattgtcaatcttagagtaaaaggttggtccagttcagctcactatcttcagaaggtccttcctcagcttttggaaatgggggctgttcgcattgcacctttctccaacagattagctcaagcagtaccctcaaaaatccaagggcttaggtgc

SEQ ID NO: 23483 - DNA, 237 bp, Glycine max
  Clone ID: 700909459H1
agagagagagaaagtgagagatggagagaatgttccctcacatgaagcccgctactatgaattcccatgacagacccatgtgtgttcaaggagactcgggtcttgtcctcaccactgaccctaaacctcgcctccgttggactgttgagctccatgaacgctttgttgatgctgttactcagcttggagggcctgataaggccactcctaaaaccatcatgagggttatgggtgtga

SEQ ID NO: 23484 - DNA, 279 bp, Glycine max
  Clone ID: 700909424H1
ccctcccccttctccatgggacagtcaccgtccaccaccgccgcgcctccgccagacctcaaccgccaccaaattcctcagatacatccaaacaccgattccgatttcaccgattacaccctccgtctctccgacgattgcctggccgcaatctttcatttcctgagcaccgccgatcggaaacgttgctctctggtctgccgccggtggctccgcgtcgacggccagaggcggcaccgtctctccctcaacgcacagccggaattactagacttcgtc

SEQ ID NO: 23485 - DNA, 126 bp, Glycine max
  Clone ID: 700909425H1
cttcggaaccctaaattgctctctttccgatgacgaccatgatgctttcgccttagtttcgtttctatgctctctctctctccctctctctctctctctctcactgtttccaacgtctttttcctc

SEQ ID NO: 23486 - DNA, 278 bp, Glycine max
  Clone ID: 700909426H1
agattcgtgatttaccatttaccacaccaaaaccaatcggatcgtttcctctgcggagtcagaaatccatggatccctacaagaatcggccatcaagcgccttcaattctcccttctggactactaattccggtgctcccatctggaacaacaactcatcgctgactgttggatctagaggtccaattctgctggaagattaccatctggtggagaagcttgcaaactttgacagggaacggatccccgaacgtgttgtccatgctcgtggagctagc

SEQ ID NO: 23487 - DNA, 233 bp, Glycine max
  Clone ID: 700909427H1
atttctctctgtcctgcgcacatttacacacctctcaaatctttcacttacagctttatttgaatccctctctctcctttccaaatggccagcgttgaggttgcacatcaaacaccaacaacagttccagaaaatgaaacaaccgaagtaatcaagacccaggaaacaaccccggaaccagtaccagccactgaggctcctgcaacagaacaagcagcagctgaggttcctgc

SEQ ID NO: 23488 - DNA, 276 bp, Glycine max
  Clone ID: 700909428H1
ctcgagccgcttctcaatcgcaaattttctcccccaaatcgtagatctacggttaaattgcgtgtagtgtggtaagatgggaggaggatttagagtgcttcacttagttaggccatttctctcgtttcttcctgaagttcaaactgctgacaggaaagtgccatttagagagaaggtcatatacactgtgatctctcttttcattttcctggtttgtagtcagctccctctatatgggatacactcaacaacaggtgctgatccattctattggat

SEQ ID NO: 23489 - DNA, 280 bp, Glycine max
  Clone ID: 700909429H1
gcccaacaaagggctgccttaaaggctcaaaaagaagctgaactgaaagagaaggagagggagaagagagcaaagaagaaggaaagaagaaagacatcttctgctgtcactgctgagaatacagaacaagaatctgctcataccacagaaactctaacaagtgtggaagaaagtgacctgactgagaaaccagctgaggtaacaaaaaagccacagaaaccatctcaattcacaaggcagaccaaggtaaaatctgtacctgcagctcttcgcaaccggg

SEQ ID NO: 23490 - DNA, 279 bp, Glycine max
  Clone ID: 700909430H1
aaagtccattcccaactagtcaatagtcatataaagacatacacataagaaaaatagttaatggtagtgaggtagagagggaaacagaaacaaataaaacaaagcaactttggcaagtaaagagagcttgttatcatggtagttgccaccatggcatggcgtcacaaggcggtgccaagggctgaagtcctcggcatcctcgcctttgacgccggaaaaaccatgtgccacctaatctccctctaccactccctctccgacaaagaaataaccaagctt

SEQ ID NO: 23491 - DNA, 272 bp, Glycine max
  Clone ID: 700909431H1
gcgacaaagatcgacgatgacggacgaaaccgaagaattggaaccgttgtttgattacagccgggttcagcctctgaaccccatcgacctcgatgatgattttgatgattacgaggatgtgatttgcgttgatagtaaaaagaggaagaattcccaggctgttgggaatgagaagactaatgggaaaggagtacacagtggtggacattgaggatgatgattggttgcctcctccaccagagatcgcaagtaatgcacagaagacacggacg

SEQ ID NO: 23492 - DNA, 283 bp, Glycine max
  Clone ID: 700909433H1
gcccaacaaagggctgccttaaaggcacaaaaagaagctgaactgaaagagaaggaaagggagaagagagcaaagaagaaggaaagaagaaagacatcttctgctgtcactgctgagaatacagaacaagaatctgctcataccacagaaactctaacaagtgtggaagaaagtgacctgactgagaaaccagctgaggtaacaaaaaagccacagaaaccatctcaattcacaaggcagaccaaggtaaaatctgtacctgcagctcttcgcaaccgggcta

SEQ ID NO: 23493 - DNA, 277 bp, Glycine max
  Clone ID: 700909434H1
gagcgagcgagggttttggtttttgtaaggcaaaagcagtgataccaatggggagcacggcggtggagaagacggaggaagaactccgcaacgagatcgatgagcttcttcgccaacagcgcgagattacggagaggcttcgagatcctcgaggtcttcgcagaggttccttggcgggtcctgctctcccctctaacggtgctcgccaacgaccctttattcgtcctgttactggagacaggaatgattctgaagatcaactcctgctaaacgtcga

SEQ ID NO: 23494 - DNA, 229 bp, Glycine max
  Clone ID: 700909435H1
ttcagcttttccctcgttgaaatgaaaatgggttcttctttgtggactttgtgtctaattttggcttcactagcctcttctgcattctgtgcctttccacggaggccagtggatgttccattcggcagaaactacgttcccacttgggcttttgatcacatcaaatacttcaatggaggttctgagattcaacttcatcttgacaagtacactgggactggcgtccagt

SEQ ID NO: 23495 - DNA, 252 bp, Glycine max
  Clone ID: 700909436H1
cagaaataaaaacgcatgccctcgtctctttttgaaaacactttagtttcgcaaagttgattctttctctctttatctttctttccccaatttgtgagtgttactgttgaatcgattggattggcattaggttgatctgaaatacgcaattgacatggcgagcgcgattgtagaagacgcgaacttcgaagatgaccaactagccaatatgacaccgacgacatcgtcagagcttctcgtcttctcgacaac

SEQ ID NO: 23496 - DNA, 270 bp, Glycine max
  Clone ID: 700909438H1
cggaatctgtctaaccaccctaaagatccggcggcgagccccaaaaccaaacccttcttaaaggagaatccaaaattcaattccaacacataaaatttctagtccgaggttgcctataaaaaccactttggacccccttcgctcattgcagcctcaagaatccacacaaactcagagacaggcagagagagagagagagagagagagagagagagagaatgggagggtgggctatcgcggtgcatggtggcgcttgtgtcgaccctaatc

SEQ ID NO: 23497 - DNA, 273 bp, Glycine max
  Clone ID: 700909439H1
tgtgattccatttttggaacactagaatttataatccttcagcctctaatatttgatggtcgaaagtgggtttttgatctgtatttgtgaatcaattcaaagtttaacaacaaacaaaaatcaaagtactgcgtaatcccccccaccctccaaaagaaaaaaaaggtttcagactttcaggggtcattatctaatttgttttgttttccgctctctatcagagggaattcgaacaaaagctctgtgctgtgagggccgatacagtggctacag

SEQ ID NO: 23498 - DNA, 275 bp, Glycine max
  Clone ID: 700909442H1
agattccacaacagtgggagggagatccaaaaagagagagtggaaaagatggcgcggttgatcacagtggtgtggtgcgcggtggcggtgctattatgcgccgcggccggtgcgtcgtgggtggaggaggcggcgaacccgatacgaatggtgtctggcgtggaggcggaggtggttcgggtgatcggggagtgccggcgtgcgttgaagtttgctaggttcgtgagcaggttcgggaagagttaccaaagcgaggaagagatgaaggagaggta

SEQ ID NO: 23499 - DNA, 236 bp, Glycine max
  Clone ID: 700909444H1
aacgaccactgaaacttcactttattccttacctgtcaccggggcatgtgatccctctctgcggcattgcaacactcttcgcctcacgcgggcagcacgtgacggtgatcaccactccctactacgcccaaatcctccgcaagtcaagcccctccctccaactccacgtcgttgactttcccgccaaagatgtgggccttcccgacggcgtcgaaatcaagtccgctgtcaccgac

SEQ ID NO: 23500 - DNA, 267 bp, Glycine max
  Clone ID: 700909446H1
tggtgcaattgtatcactgttaagtaggctagcaattgagaaaacattgtcccaaaaactggaagatgcacggagtgctgttcaactaagagttgtaaaagccctcagggaatatcgaaatctttatgctgtgcaacatcgcttggcaaacagaatgatatatcctgagtctttaaagttcttaatgttgtatggattagccctttgtagatcaacagctttacgtagagcgtatggtgatgttccactggatgaacgatgtgcagc

SEQ ID NO: 23501 - DNA, 279 bp, Glycine max
  Clone ID: 700909447H1
agcttccaaaccctaacactcctcttcctcttcgatcatcacctctccacaatgccgccgaagttcgacccctcccagatagtcgacgtcttcgtccgcgttaccggcggcgaagtcggcgcggcgagttccctggccccgaagatcggtcccctcggtctctcccccaagaagatcggagaagacatcgccaaagaaaccgccaaggactggaagggcctccgcgtcaccgtcaagctcaccgttcagaatcgtcaggcgaaggtcacggtggtcccc

SEQ ID NO: 23502 - DNA, 279 bp, Glycine max
  Clone ID: 700909449H1
ggattttgttaaagaattcttgctttatagcatattattgtggtcttggagcatcttttatatgacaattgtttctagttatgccagcatggtccaaattgttctgcttcttcttttatgtatgcaaggaaattctaataaaaactaagcaagaattatggacttaggtttaaaatcatcctacaaagctagatttagataatcacagcaaaaatcctagatgtttgaatcattcctttctaacatccatattggcaaaaagatctgtacagtaagttg

SEQ ID NO: 23503 - DNA, 265 bp, Glycine max
  Clone ID: 700909450H1
ctgggcccctgcatggtctggccaatcaggaggttctacgatggatcagatcaatagttgcagaatttggaactcctaacataagtactgaacaattggctgactacattaataaaacattgagtagaggccaggttgtgcctggatatggacatggggttttacgccagacagatccaagatacacatgtcagagggagtttgctttgaagcatttgcctaatgatccatatttccagttggtgtctaagataaaagaggttgt

SEQ ID NO: 23504 - DNA, 146 bp, Glycine max
  Clone ID: 700909452H1
agggttatcatttctccatttccattttctctctcacttttcaagaatcgtcagctatgggaaagtcttacccaactgtgagtgctgattaccagaaggccgttgagaaggcgaagaagaagctcagaggcttcatcgctgagaag

SEQ ID NO: 23505 - DNA, 274 bp, Glycine max
  Clone ID: 700909455H1
cgaaaatgtggaagagaacgggttttgaagaagaagcagttcaattgatcaactcagatttcagggacctaagtctagctgctaatagactcgcccatcatgccatcaaacttggtggcattggctttggagcctcttttttcggattgtttgctgccattgctgctatttatctgttgattttggatcgtacaaactggaaaacaaatattctcacagcactactcattccatacattttcttcagcttgccttcattaattttcgacgtctt

SEQ ID NO: 23506 - DNA, 274 bp, Glycine max
  Clone ID: 700909457H1
catattttccaagccttcacttagttttatgcaagtgtggtttttgcgagactagaaaacaatcacttagagaatgggaacgacacacaggttccaaatttagaaattggaggacaagtgttctggtgaaaggatccattctatcgctggaaaaatggatgctgcaagtggctgagtttcatgctaatgctgtagtttctgtgaaacctaaaaagccttcctttaaagaaaggaaacagaagttgcttacctttctacaagagaagtatgaacc

SEQ ID NO: 23507 - DNA, 274 bp, Glycine max
  Clone ID: 700909458H1
gaagtggaagattctcagcagagtctattgcaaaactgaaagcaaaggctaactcggagtgcaacacaaccaaaatctcatcgttccaatcattatcggcacttgtttggagatgcataactcgtgcgcggcgcttgccgtatgatcaaagaacaagttgcaagttgtccgcaacaacagaacaagaatggaaccaccactgcctcaggagtactttggaaactcaatttatacactgaatgcaggaaccgccacctcagggaaattgcttgag

SEQ ID NO: 23508 - DNA, 277 bp, Glycine max
  Clone ID: 700909423H1
gggaaaggtgattttccaatggattgtccccttcatgacagtctgcttcgcgttcattacaagggtactgttctcaatgaagaaaagagggtattctatgatacaagggtagacaatgatggtcagccattggagttctgttctggagaagggcttgtaccagagggatttgaaatgagtgttcgtttgatgcttcctggagagatagctcttgtcacatgccctcctgactatgcttatgataagtttccgaggccattaaatgtccctgagggtg

SEQ ID NO: 23509 - DNA, 252 bp, Glycine max
  Clone ID: 700909377H1
aaaagggttcgtgcgttcttcctccaaagcctttcatggagttcacggcactctctaacgcttcccaacttgggagcatcaaccctcgcagaaccaaccttcaaagtttaacacaaaccctcttgctttttcttagtttctttcccttcttcctctcgcagaggttgctcttgcatagccattctcaacacccacacgcccacctctagcctgtggacctccttccgctgattttgaactctctgttttgac

SEQ ID NO: 23510 - DNA, 268 bp, Glycine max
  Clone ID: 700909379H1
ctgaaccaaatcatcacacacacatactactcagcaacaattcttctacaatggatctcctcactctggaaaagaccctcataggtctcttcctcgctgcggtggtcgccatcgccgtctccaccctccgcggccgcaattcaagctcccaccgggcccactccccgtcccaatcttcggcaactggctccaagtcggcgacgacctcaaccaccgcaacctcaccgatttggccaaaaaattcggtgacatcttcctcctccgcatg

SEQ ID NO: 23511 - DNA, 269 bp, Glycine max
  Clone ID: 700909380H1
aaaacagcatcgaacccgtcgtagcagaaaaacttgtcaccatggtttcttccgacaaggatccacgagaggatgtccttcaagcctggtacatggatgatagtgatgaagatcaaagactcccccaccacaaagaaccaaggagtttgtctcgttggaccaacttgctgaacttggagtccttagctggaaactagatgctgataaccatgaaaatgatccagagctgaagaagattcgtgaagagcgtggttacacctacatggatg

SEQ ID NO: 23512 - DNA, 213 bp, Glycine max
  Clone ID: 700909381H1
ggagttcggcttgagggtatgtgggaacttttaccacacatgcatacatcgcgtagattgtgttctggtttttttatggatggcaaattctacgtgattggtggaatgtcgagttcagctgtttcattaagttgtggagaggagtagatctcaagacaaagagttggcggataatagaggggatgtatccatatgttaacgtgggtgttcagg

SEQ ID NO: 23513 - DNA, 259 bp, Glycine max
  Clone ID: 700909382H1
ggaataattaccactagagtccctttgatctgctttcattcctgaccaaggtattgcaacagtaacacctttagagaaaaagtactcacaggagcgttcagatttcgtctgtttcgaagaagcatttccatgtcatcaaagttccaaatatatacatgggagtcctctccaactgagattatattttttccacttgatgtaaatgaaccagacatctgacttcctgacttaggaagacctttgtatttctgaacaagct

SEQ ID NO: 23514 - DNA, 255 bp, Glycine max
  Clone ID: 700909384H1
gtgaaacggtgggagagaagcagcctcaacctgaatctaaggtactgcaatctcttatggtttctattggttcaaaaacattggtgtcaagaagctcaatgggcgagcacgactatgaacccctcaaacaggcaaaactaagaggaggaagcataagaaaggaggatccactcatgcattcgattccaactccttcacttctccgcctcaactatcccgtgttaggaaacagcttgaccctgaaacaaccaatac

SEQ ID NO: 23515 - DNA, 228 bp, Glycine max
  Clone ID: 700909385H1
ccctgcagacccctctgaccctctccttgtggattggatcaaataccctggaaaccccgttttggtgccaccaccaggcattggtactaaggactttcgcgacccgacaaccgcgtggctcacctccgaaagaagttgcgaatcaccataggatccaagctcaacaaaacaggcaatgcaatgggttaatgaaactgagacttcaagagctatgagctccaggagggt

SEQ ID NO: 23516 - DNA, 176 bp, Glycine max
  Clone ID: 700909387H1
acaaatttcttcacagttctctgaggctttacgattgaactcttttgaaccacatggtgaacataaggagcagaattctgtgccattatctaataatgaaccagatgtccaagttttattggctggggaagaacttctgctgtgaatgcatcatctgtcatcagccattcagttaa

SEQ ID NO: 23517 - DNA, 258 bp, Glycine max
  Clone ID: 700909388H1
cttcctcaacacacacaaaatatctcttccaatttcaatttctcgtcgtccctcatcatggctcgtctcgcgatcgctgtcgccgccgtgctcctcgtggccctctccgcctccaccgcgacggcgcgtcctgcaggaccttcataatctcctcctactcgttccgcaaccctaactccaacaccttcgccaccatcaccgagatccgatctttcacccctctctacatcaccgacaaacccaccggcaaaccctcct

SEQ ID NO: 23518 - DNA, 248 bp, Glycine max
  Clone ID: 700909390H1
gaaaaaaatgaccaagatcttctttgtattgctgttatgtctgatcatagcagcttcttctgggtttgtgaattgctttgatgttgaaaagaaggaaaagattggaatatttgagctcaataaaggtgcctttctttgaaggtcaccaactggggtgcttcaattttgtccctggtgattcctgataagaatggaagttgagtgatgtcgtcttggatatgatctgttaggatacactatgatacaca

SEQ ID NO: 23519 - DNA, 256 bp, Glycine max
  Clone ID: 700909391H1
cggtattcgatggcggcgagctgagaagggaagtggagaaaagtggaattgacccaaaattcattccaaagatatggaagcatatcctcatctctgccaaagatgaagattgggattgggagaaacaagtccctccttgccctcttcggcctactctctccttcgttccaacttcaaaacccctctctcttcctctattcactccgttttccactctgccgacaacctcaccaccaagctcctcatccagctccac

SEQ ID NO: 23520 - DNA, 233 bp, Glycine max
  Clone ID: 700909392H1
ctggtttgtctctagatggaagccttgttagtgaaattgaaggtgaaagcgcagtcgacaggctaaaaagacaagttgaccatgacaggaaacttatgaatgctttgtataaagagctggaggaagaaaaaatgcttctgcagttgctgcaaatcaagcattagccatgatcacaaggctgcaggaagaaaaggcaacattacatatggaagccttgcaatacttaagaatga

SEQ ID NO: 23521 - DNA, 227 bp, Glycine max
  Clone ID: 700909393H1
gcttcctctgtttgctcgcacacgtcgtttttttctttttgttgcttcggagccaactcaacaacaacgccgtgcctaatccttaagaataacgaattacaacaaccaaccatgttgcattgtctcaacattcctgttcggacatcacagtcttggaaagacaacgggaagcaaccatcaagtgccagaaccaccaaccaccctacttaacggactttaacgccgtc

SEQ ID NO: 23522 - DNA, 246 bp, Glycine max
  Clone ID: 700909394H1
ggagattattccaacttccatatccactctcatctactacatatatgccacacactctcatagtactcgtttatctaatatctctctcatattatccattctgcggatattcagctaagtacaatacgtactaagatgactgagggaaagctagttgaagctgcagaagctcataagacacttcaggatttcgatcctccaaagaagcgcgagaggaacaagtatgcttatgcttgtgctatgctg

SEQ ID NO: 23523 - DNA, 262 bp, Glycine max
  Clone ID: 700909395H1
tgcaggtaagctaagaagggtagaagactatctctttctttcgctctatttaaggaacacaaattttacaggtgtagtaacctgtttcacaacccaatacatgtcatgcacatgttcaaccaaaatccggaaagaccaaactgcatttacattttgctgctgctaattaattcaattactggctatgggacttcattcgccgactcctcctaattaactcatcgcacttctttcatcaactcatatttcacttacaaaacac

SEQ ID NO: 23524 - DNA, 260 bp, Glycine max
  Clone ID: 700909396H1
cggctcgaggttttattatgatgtgccctcaattgttcatcaactacaagctcaaatctgttgctcatctaccttggaggcaaatgacttacaagtttctcaacaccataattgatgacctttttgccttttcattaaaatgccaacactccatcggctttctgtcttccgtgatgatcttatctttgtcatatacttataccagaggtggatttataaagtggacaagaaacgtgttaacgaatttggttttggaggtg

SEQ ID NO: 23525 - DNA, 277 bp, Glycine max
  Clone ID: 700909403H1
tagtgacactgtttggtagcattcatgagaagctccccgagacaggagcaggaggaagcatgcgaacactctgtttccaaattttggaagcatgttcagcacagctgagccgcatgttaaacatgaacagtgggatgaagagagcttacaaagggaaggtgaggactacatgtcagatgcagctgatggggactctgatgataatttgcatagtcctttaatctcacgtcaaacaacaagccttgaaaaagacttgcctccccctccttcccatggc

SEQ ID NO: 23526 - DNA, 280 bp, Glycine max
  Clone ID: 700909406H1
aacacacccaaacagagccttattcttgagaaacaagtttcttcttcaaaacaacatgtctggaaccgtgattgtttttgactttgacaagaccattgtcgatgtcgacagtgacaactgggtcatcgacgaattgggtttcaccgatttgttcaaccagcttcttcccaccatgccttggcactctctcatggacaggatgatgatggagcttcattcaaaaggtaagaccatagaggacattgaagaggttctgcataggattcctttgcacccaaga

SEQ ID NO: 23527 - DNA, 280 bp, Glycine max
  Clone ID: 700909407H1
aacacacattgttaaaagtttctttatttcaagtgaagttagttagttatatttatatacacaatcatgtcaatgagatcaattggtacaagccttagccttatggtatggcttgtaattgcaaagtcagcattagcaaaatctgataaccccccagtcctagacacacaaggcaaccctcttgagcctggcaaagattactacatcaaacctgccataaccgacgttggaggccgcgtcactttgttaagcagaaacaatccatgccctctatatgtag

SEQ ID NO: 23528 - DNA, 97 bp, Glycine max
  Clone ID: 700909411H1
ccaatctctagcaatgtaaggatagcgtgctgtctaaaatctgcgcacacttgagttatcatcagtcccaatggagtaaagtttatttggtcagtcc

SEQ ID NO: 23529 - DNA, 280 bp, Glycine max
  Clone ID: 700909412H1
aaagccttagccttccctacaactccaaacagaaagacatcgacatccatggctgcctccgtctccactgtcggagctgtcaacagagctcttttgaacctgaatggttctggagctggagcttcagctcccagttcagccttctttgggaccagcttgaagaaggttattgcctcaagggtcaccaacagcaaggtttccggtggaagcttcaagattgttgctgtagaagagaagaaagagattgaagagacccagcagaccgacaaggacagatggt

SEQ ID NO: 23530 - DNA, 277 bp, Glycine max
  Clone ID: 700909413H1
gaagaatgttctgctggagttttatgctccctggtgtggtcattgcaaacagttggctccaatattggacgaagttgctaggtcatatcaaagtgatgctgatgttgttattgcaaaactggatgcaactgccaacgatatcccaagtgaaacctttgatgtccaaggttatccaaccgtgtacttcaggtcatcaagtggaaagtgctcacaatacgaagggggtaggaccaaggaagacatcatagaattcatcgaaaagaaccgggacaaacct

SEQ ID NO: 23531 - DNA, 281 bp, Glycine max
  Clone ID: 700909415H1
ctccaccgtccattgcaaagtcttgcgcccaatttccatggaactgtaaagacaggatagttagaagattaaatcttaaagcagtaagtcatcatggataaatcagagcagactcaacagcagcagcagcaacaacagcatgtgatgggagttgccgcaggggctagccaaatggcctattcttctcactacccgactgcttccatggtggcttctggcacgcccgctgtaactgctccttccccaactcaggctccagctgccttctctagttctgctca

SEQ ID NO: 23532 - DNA, 221 bp, Glycine max
  Clone ID: 700909376H1
aaattggcggcggcggtggcggcggcatagagtggaagtagtaaggatcaatggcagttccagggaggcgcaacggcatgaacgacgacgaagaggaattagacgacaacgcccttttcgaagaacaaggtgccgcgaagacgacgccgatacccctcctcacctccgcgacctctccgccgccgctcagctaggcgacggccaggccctccgtatcgctc

SEQ ID NO: 23533 - DNA, 285 bp, Glycine max
  Clone ID: 700909416H1
ccatgatggttgcttctctcttctacctttctctttctctttccctcatcctaaccctctcctccgccgcgcaccacaaacccccccactcaccgtccaagccaccggctaaccccgccgtgaccgccgcctccccggcaatcgaacaagcctgcgccgcgacgctcttcccgcagcaatgcgaacctctctctcccaatcccagaacctccctccgaacccgacccctctccagctcctccagtccgccatcgccctctcctccgataacctcgccaccgcgca

SEQ ID NO: 23534 - DNA, 122 bp, Glycine max
  Clone ID: 700909417H1
ttttccctctgtcttccccccctcctctacacaaaaatatatttttagcatggagaaggtgaattttgtgaagaatggagagcttagattgcctccggggttccgtttccacacaacatacg

SEQ ID NO: 23535 - DNA, 52 bp, Glycine max
  Clone ID: 700909418H1
acctttgcaaaccctttccaacaattaagcaaacaattgttaaacgatggaa

SEQ ID NO: 23536 - DNA, 274 bp, Glycine max
  Clone ID: 700909338H1
gatccggctcgacatcgctactcctctctcccaagaaagaatcatcactggcgattcaacacgacgacgatctcaaagacgagaagaaaccgcgacctctcgacgaagatgacatcgccctcctcaagacctacggtttcggaccttactcccaagcataaaacaggctaagaaggaaatcaaagatatggccaagaaagtgaatgacttatgtggtataaaggagtctgatactggtttagctgcaccaagccagtgggatcttgtttctgat

SEQ ID NO: 23537 - DNA, 271 bp, Glycine max
  Clone ID: 700909340H1
aaagagcgacgcgacgcctattttgtttcagacaaagttttgttgcaaagcaaaaactactacgaggagctttcctccatacgaatcaaaggaggagagagagagagagagagagaggagacacagacacaaaggaaacgaaaaagcaacacacaaaaaaaaagaggtctgtgcctcctcttatatgtaatagctagtttccgagacaagaaaaaaaataagagtaaaaagagaacatggattatgaaaacaacagttggatttgggaggg

SEQ ID NO: 23538 - DNA, 129 bp, Glycine max
  Clone ID: 700909341H1
tttctcacttctcagcactcagcagcgatatcagttgaagaaacagaaacaaacaaaagaggcagaagatgttgtgggtggacaaatatcgtcccaaaaccctcgaccaggttatggtccacacaacat

SEQ ID NO: 23539 - DNA, 268 bp, Glycine max
  unsure (1)..(268): unsure at all n locations
  Clone ID: 700909342H1
ccttggagtgcaatttcctggatcaactcttccaaaccatggctaatcatctactggtgaaggattcttccttggttgtgatgtgcatggttttgggtatgcccttggcggatgcagctctttcatgtccttaagtgcaatcattgtagcaccatgccttggtgactagagaggccttggtggtggagttttccctctaccatgttgcaatggggttaggacctanacaactaggccagaccaccccagatcgtcaaggggcttgtag

SEQ ID NO: 23540 - DNA, 271 bp, Glycine max
  Clone ID: 700909343H1
ctcgagcgaatcggctcgaggaaaaattagccccggaaaaccgtcacagcttcgagtcacaacggtcaaaaggagttcgagtgggatcaaacccttgacgaggtcaatatttacatagctcttcctcctaacgttcattccagcaattctactgtaagattcagtccaagcacctcgaacttggcatcaaaggcaaccctccgtatctcaaccatgatcttactagcccggtgaagacagattcttctttttggaccttagaggatgacat

SEQ ID NO: 23541 - DNA, 178 bp, Glycine max
  Clone ID: 700909344H1
catcgcaccaacgatcccatgtcccaagacttctctacgagaagatcacagtgtcacatagggctaggcaaaatgtccgagggtaatgccaagaggggacactgcatcgccagcattggcgtctcaaccttattgtaggtgctatggtcgtggcgatcacaattaggtcggtccgcat

SEQ ID NO: 23542 - DNA, 273 bp, Glycine max
  Clone ID: 700909345H1
aatcaaactcattctgtcttttcttctatttttatttctatccaatcatccatggccgaggaaccccaaaaaccagcctccgctgaagaagtggtcgctgttcctgcggagaacccaccatctgaagccgaagctgaaaactcgaagcagagaaggcccagagtggtgtagaagacaagatttcccagtcggtttcgttcaaggaggagaccaacgtggttggcgacctccccgaggcgcagaagaaagcccttgatgagctcaagaagcttg

SEQ ID NO: 23543 - DNA, 238 bp, Glycine max
  Clone ID: 700909346H1
actaaaacaaatgtatcctctcttgtgctggtgaaaatcatgtacatacatttcaggactatttagtaatagatgatggatttttgctctggtatgttgttttccttcctgtaccatctatttccatttcaatggtttgttcctatccttttagctgccccattaaattgggggctatcaagacttgttcctttttctcctacatttaatctttacacaaggaatgctcctgaaaatt

SEQ ID NO: 23544 - DNA, 270 bp, Glycine max
  Clone ID: 700909348H1
ggatctagctgactacatacgtgctgattctgaagttcttcaccaagacagtgtagattctccagattcagattatcaaatggcttctggacaggcacatcgatcagataatgaatctgtggaggaaggagcactgcccaattagaatcaagatttgataatgcaaatatgtctacgtcagtccaagatgcagatgaaatgtttgattctgcggcttctgatgcccaccatatttcttctaatggttccctatggctgcccacggattta

SEQ ID NO: 23545 - DNA, 270 bp, Glycine max
  Clone ID: 700909349H1
gacatgttcccacaaaccctaatattgttctcagcactcataatcctcttccatggagatctcgtcttaagcacaacagcaccagatgatatccacgatgttctccctcagtacggtttcccaaagggtcttcttcccacaacgcggtctcctacaccctctcccccgacgatggcttcttcaccgtccagctcgatgccccctgctacgtccactgggacgaccaattagtctactaccacagccaaatcagtggcactctcacctacg

SEQ ID NO: 23546 - DNA, 265 bp, Glycine max
  Clone ID: 700909350H1
aatctccatactgtctgatgctggtcttggaatggctatgttcagcttgggtctgttcatggctcttcaacctaagataattgcatgtgggaactctgttgcaacatttgccatggctgttcggttcctcacaggtccgccgtcatggcagcagcttccatcgctgttggcctacgtggcaccctcttgcgtatagctattgttcaggctgcactaccacaagggattgttccatttgtgtttgccaaggagtacaacgtccatc

SEQ ID NO: 23547 - DNA, 259 bp, Glycine max
  Clone ID: 700909351H1
ctctgaatccaattcattcttcttcttgttctttgttaggcaatacaacatttattacgcatactcaaagtagcttcgaagttcgtatttttattggcatatcatggagaataataatcagtcgttttggcaattcgtgaccagctgaggttacaggcatctaatttggcgaacctttctctaaacgattcgatttggagcaacagttacatctccaagaggcgtgatgaaaggattaattttgacatcaaagttgggg

SEQ ID NO: 23548 - DNA, 262 bp, Glycine max
  Clone ID: 700909353H1
ctctctctctctctctctcttttctctgtgtgtgtgcgtggattggtgaatttgagattgaagaagatgatgcaggctggacccggcggcatggcccaacaagcgaaccagcaatacgcacagcaacagcaacaacacaacaacaagcctacatgatgatgccgccgcagcctcagccccctcagatgtgggccccatcggcccagcctccgtcccaatcggtagctcctccgcaacccaccagcgccgatgaggtccgtac

SEQ ID NO: 23549 - DNA, 268 bp, Glycine max
  Clone ID: 700909354H1
aaaacgagaagagagagagaaagacaaatagaagaagctgcatttgcagagacgccctgagagagagaattggaaggttgcgacgagtgatgatatacacatattgtgacggtagtgaaatcgaggaaaaagaggtacaatttgcgagttgcaatgagtaacgaaaaggctccttcatcagcttcttcgagtagctacgagttgagcaaaggcatcaatggcctcgacaaggttattcttcgcgacgcacgtggtagctccgctgagg

SEQ ID NO: 23550 - DNA, 265 bp, Glycine max
  Clone ID: 700909355H1
ctcgagcgaatcggctcagaaccgaacaacattctctgagtttatggtttagcaatatcttattcagaatttgctttctttatcagtttgagatcaacattagattcttatggcttcagagtctggaaaggacgggccggcgtcccaaggaagcttaaatttaaaccaagagctccacctcgtcgagtgataaagcaagaagttaaagctgaagtggctgatgatgttgatgtcgatgctgatgcagaacatgctgctaaggaga

SEQ ID NO: 23551 - DNA, 268 bp, Glycine max
  Clone ID: 700909356H1
ccacatcactctttctttcaaatctagggtttcctccttctgcaaccatcaatgtccgcaatcgcggctccccaacacagatcctcggagacagagtcctacgtggacaataagcgcaaggaggatatccgccatgcaacatcgtggccgcacgctcagtcgccaacgcggttcgcaccagtctgggccctaagggcatggacaagatgatctccacctcctccgacgagatcatcatcaccaacgacggcgccaccatcctcaacaa

SEQ ID NO: 23552 - DNA, 279 bp, Glycine max
  Clone ID: 700909364H1
agacgacaacggcaacgtcaaactcgactgccccgccattggcaaacagttcgctgccgaggaaatttctgcccaggttctgaggaagcttgttgatgatgcttccaagtttttgaacgataaggttaccaaggccgttgtcacgggcatgcttacttcaatgactcccagaggactggtatcaaggatgctggtcggattgctggtctagaggttcttcgtattatcaatgaaccaaccgctgcatccttagcctatggctttgaaaagaagaacaac

SEQ ID NO: 23553 - DNA, 112 bp, Glycine max
  Clone ID: 700909365H1
aatgagctgagtgtaacacttgattaccataagctaagtgttgttcatgtgctacactcagctcatgaacaacacttagcttatggtaatcaagttctacaattcggagaac

SEQ ID NO: 23554 - DNA, 263 bp, Glycine max
  Clone ID: 700909366H1
caaccttattcaatgactggttttggttctttaacggaaaacctgttggtttgatctccaagaaatcttctatctcatgtaaatcaacaggagcaaataatactttctaaagagctctctgggctacaaccagaacagctcgccatgctcggcgtcgccaaggaccttggcgacgccgtcggcttcatgacgggcctgctctgcgagattttgcccatctggggcgcgcttctcgtcggcgctgctttgaacgtcgtgggata

SEQ ID NO: 23555 - DNA, 264 bp, Glycine max
  Clone ID: 700909368H1
tgcagtcttacccgcataagatactcaccggtaggagggacaagatgcataccatgaggcagacaaatggcttgtctggcttcaccaaacgttccgagagtgaatttgattgttttggcactggtcacagctccacactatttcagccagacttggaatggctgttgggagagatctgaagggaagaaagaataacgtggttgctgttataggtgatggtgccatgacagcaggccaagcttatgaagccatgaacaatgctgg

SEQ ID NO: 23556 - DNA, 262 bp, Glycine max
  Clone ID: 700909369H1
atatccccccctagctacagagcagccaaaggggaggaataataataagcctatattctaaggccggaaaaataaaaaaggaataacaaaaatgtctggaaaggtaattatctcggctgtttctctcatcctggtgttggagtggccataggtgtggtggtggccgtcaacaagaagggcgaggatcccacacttcaatctcaacaaaaatcagtaggggttatctgccaaaacactgatgaccagaagctctgccacgaaa

SEQ ID NO: 23557 - DNA, 261 bp, Glycine max
  unsure (1)..(261): unsure at all n locations
  Clone ID: 700909370H1
tncgagcgaatcggctcaccctctttctctttctctgcacaacctgcacactctgcactcgatcaaacagaaactggcaaagaatgtggggatccttgccattgacatctacttccctcccgcttgcgttcagaggaagcattggagactcatgatggtgccagtaaagggaagtataccattggtcttggacaagattgcatgtcattctgtaccgaagtagaagatgtcatctcaatgagtttgacagtggttacttct

SEQ ID NO: 23558 - DNA, 264 bp, Glycine max
  Clone ID: 700909371H1
accaaaaccagcaccacccccctctctatctcttttctcccttgttgccgttgaacttccttaacctaaaaatgtccaattctatctccgacccgacccgaataattcactctcctactccgaataccaccgcggccctcaggttccgcttcggaacctttcccaggttcggaacagaatggattctctacaacacttcctatctcaatccatcaataccaacactctcctcaccgtcgatcaaatcgccatggtctccagcca

SEQ ID NO: 23559 - DNA, 268 bp, Glycine max
  Clone ID: 700909336H1
gttatcaacttggagcacatcaaggccatcatcaccgcccaagagctcctcctcctcaactctcgcgacccctccgtcacccccttccttcatgagctccaggcaaggatcatccgccaccacaaccaggctgatgctgccccaaccccaaccccaacgacgccatcaagattcttcccttcgagttcgtttccctcgaggcctgtctggaggctgcttgtagcgtcttggaaaacgaggctaaaaccttggagcaggaggctcatcc

SEQ ID NO: 23560 - DNA, 264 bp, Glycine max
  Clone ID: 700909374H1
ctccaacagaatgttggctatcttctgctttgtgttgtttgacatgcagtgattaagcatgcttggtttctccttatagcaattttaatgtgtatattgttcttcaacagtctatcctctacaacaaccatagaaagagaatgtttaaatggagatggctttggaacttggggatagtaaaattaagtggaatttcccccttttcttacatatgaggttcaaagcaatactttgtttagaagagagatttctgcaccacttaca

SEQ ID NO: 23561 - DNA, 204 bp, Glycine max
  Clone ID: 700909375H1
ggcgactatgtgtaaggagaggttacacgaaatagtgaaggaagagattcacaaagcgaaggagaatttggaatgggaatcaacgatgaagaagtgtttcgcgcgcatggacgaagaggttctcaggtggagccaaacaacgagactccaaattgcaggtgcgagcttcaaaccccggaatgcgacgccgtaggctccatcgct

SEQ ID NO: 23562 - DNA, 263 bp, Glycine max
  Clone ID: 700909294H1
gttctttcttcttccattgattcgttgcaatatttgtgcaagctccgttgctttctccgccaccactcctccgatcattctccggtgtagggtagagaaattgggaacaatgagtgaggtgtttgaagggtacgagcgtcaatactgtgagcaatcggcgaatctttcgcggcaatgcactgcggcttctgctcttgatggagaacaaaagaagcaaaaactttctgatatacaagctggattagatgatgctgacacattga

SEQ ID NO: 23563 - DNA, 209 bp, Glycine max
  Clone ID: 700909295H1
cccaatcgcaaattttcttccccaaatcgtagatcttcggtttaactggagtagtgtggtaagatgggaggtggatttagagtgcttcatttagttaggccgtttctatcgtttcttcctgaagttcaaactgctgacaggaaagtgccatttagagagaaggtcatatacactgtgatctctcttttcaatttcctggtttgtagtca

SEQ ID NO: 23564 - DNA, 263 bp, Glycine max
  unsure (1)..(263): unsure at all n locations
  Clone ID: 700909296H1
ctgctttacattacattacctctctctcactcacaggtctgctcttgtcctgctttaccatccagttatgtaaggaannaaaaattacctgaggtggttcaatcgctatggaatcctgcaattggattgacccacaagtgccagctgatgacttattgatgaaataccaatatctctctgataactacaatgcccttgcttatatctcaatccctagggagcttatctactatgttaagaaatcagcagtatttccatataga

SEQ ID NO: 23565 - DNA, 256 bp, Glycine max
  Clone ID: 700909302H1
gctcgagtgcaaagcgcaaattaaagcgcaaaaaccattctccttcggtgctcttgaaaacatgggaaaacagagcacagaattctctgccctcaactgcatcgacctctccaaccctgacatcaaccaatccgtcaatttactcaaacaggatgtttggattccggttttttctacgttgtcaatcatggaataagccaggaattcatggaagaggtttttgcacagagcaagaaattcttctctcttcctcaca

SEQ ID NO: 23566 - DNA, 271 bp, Glycine max
  Clone ID: 700909305H1
gagattttgattggtgtttggctcccaaattcccaaaacagtgatggtttcaagtaaaagaaatgtttttggcaccaagggggaaatgggtatagatttcatggttttggtgttatcagtgtcatggttttgtttgactagtattgtgtctctgctacaaaacaagcatacccgccaacaccacaaccgaaccagaacttaaggtttgaccaaaatggagaattcaagatattgcaggtggcagatatgcactatgcaaatggcaagacca

SEQ ID NO: 23567 - DNA, 272 bp, Glycine max
  Clone ID: 700909306H1
cttggcatcgcttctcctctctcccaagaaagaatcatcaatggcgattgaacacgaagacgatctcaaagacgagaagaaccctcgacctctcgacgaggatgacatcgccctcctcaagacctacggtttgggaccttactcacaagcataaaaaaggcggagaaggaaatcaaagatatggccaagaaagtgaatgacttatgtggtataaaggagtctgatactggtttagctgcaccaagccagtgggatcttgtttctgataagca

SEQ ID NO: 23568 - DNA, 278 bp, Glycine max
  Clone ID: 700909311H1
tgtgaagcgtggtggggagggtgagaatcctgaagattatgttgatcccgagactccatcgggtgagaagaagcgtatggctcggcaaatggccaagcaatatagtccaactgccgtggagaaatcgtggtatgagtggtgggaggatcacagtattttgtggcagatgctaacagctccaaaccaccttttgtcattgttttgccccctccgaatgtgactggtgctctccatataggtcatgctctaacagccgcaatagaggatacaatgattcg

SEQ ID NO: 23569 - DNA, 279 bp, Glycine max
  Clone ID: 700909313H1
caagaggaaagaaggcaagactgaagacgatgattgagacagtgaacacaacacaacaccataaccttaaacctcttcttttctaatttgccatgtatctctgtttcatttctctgttacatactctccctccaatgtagtaggagaaaacaagcaacttttttttgccgccaatcgccatggccaccaccaccacccaatggagttccatttctttctctctcatccttctctccattgccctcttccaaaccctaacccccaattcccatccgccgc

SEQ ID NO: 23570 - DNA, 277 bp, Glycine max
  Clone ID: 700909315H1
ctctcttcacatatcatcatactaagatagtcagatacatcacccaataattaaattaaatacatgctagcactttaacagtactcctttctctaatatctctctcatattttcctttctgcggatattcagctaattaaactaagtcctaagatgactgagggaaagctagttgaagctgcagaagctcataagacacttcaggatttcgatcctccaaagaagcgcaaaaggaacaagtatgcttttgcttgtgctatgctggcctccatgactt

SEQ ID NO: 23571 - DNA, 268 bp, Glycine max
  Clone ID: 700909317H1
catggttcacgtcgttttcgccttggccaacaagaatgtctcctaggccatgcacaaggatgtctcggatttgcagtggttcggtacccttctctcggctccctctgccactgccactgccactgccactgcccgtaatgggtcgctgatgccctcgctgtcatctctgagtccaaggaggtccctcatgattggatcaccgatgccgtcattgatcaggttcttggtgatatagcttttcagaaatttggaaaaggtttaatttcat

SEQ ID NO: 23572 - DNA, 273 bp, Glycine max
  Clone ID: 700909318H1
ctagggtttgatttcgttgttcgattccgaaccaataatgcgacgcgaacgttaatggagaaagaaggagatgcattagtggatcctctcgccagctattggggactttccctctttcctcaaccatctctcccaccctccaaccctacaactcagaccaagatcttcacatcatccacactcacctcagatccatggccttgcggagtcctgcgaaactgatgcagcaggccaaatccatagtggatggtaaccctcaactgttcaacactg

SEQ ID NO: 23573 - DNA, 178 bp, Glycine max
  Clone ID: 700909319H1
ctccatatctagaaatgttacttcttccatggcacatgaaggctggctccatgtgtgaatttgccacgaaggagtgaactgcaggcctacgatcttccgggattgattctacggtatagtcccgagctcaggtaccgaatatcgctctgagctgactcatgatcaggaattccgtgag

SEQ ID NO: 23574 - DNA, 273 bp, Glycine max
  Clone ID: 700909321H1
gactctcacacagctcctgagaatcaagaccaatactcttctagaagcaatgcagattaaaagagaagataacatacaaatactcaaaaattttcttcagcatttcaagcaggttaaggatctgagtatcaaagatttgatggggagaacgtagaagaagaggaccctaacatggctgtgaacttgctaactgtggcaagcactggcaatgctgcttttcttgaggagcttctaagagcaggtttggatcctgacattggagactccaaaggg

SEQ ID NO: 23575 - DNA, 266 bp, Glycine max
  Clone ID: 700909323H1
ctctctctctctcacctttgttatacgtcttctccttttcagttctcagaggtcacgaccaccactacacaccgcaccataatcttggaaattagcgtctgaaagagttcaaaggacttccgtagatttaaattaaatatgaatatttatttcttctccttgtcactttcaagattatgaagaggaagttcacacagctacgggagtctatggggtttcaaacatcgcatagcactaaacggataccacagccaattttcagagca

SEQ ID NO: 23576 - DNA, 271 bp, Glycine max
  Clone ID: 700909324H1
tcagaattctctaaaagagatctttttctgctctttgaagaaagaagggtctttgcttgattttggagatgtctctgctctcagatctcatcaaccttaacctctccgataccaccgagaaggtgatcgcagagtacatatggtcggtggatcaggaatggacctgaggagcaaagcaaggactctcccaggaccagttagcgacccttcagagcttcccaagtggaactatgatggttccagcacaggtcaagctcctggtgaagacagt

SEQ ID NO: 23577 - DNA, 272 bp, Glycine max
  Clone ID: 700909326H1
gtttcttgtggttccatttccatctttttgctctgtttctgacacaagatggtgaagagagtgaggtctgattcgggtccattgtctctgcaaaagcacaaccattggtgtgtgaagttaggagtttcaatcttcttggtgggctcgcttttcgtcttctcttgtgggattcattcagtttctcatcggtggtagtggagacacctcctcctctggaagatgcaaaagcattgtcccctgttttctcttcctccgttcttcaggattctgat

SEQ ID NO: 23578 - DNA, 276 bp, Glycine max
  Clone ID: 700909327H1
gtcccctacctttcccacaggttaggccttcgtctttattacctgacctgtgctaccacccaatcacctttccttccattatttcattccattccatatctcaccattcaccaacaccaacacaaataataattcaattaactgcacaagatactccaaattagaagcttgtagttgttgataaactttgattggtatctccacattttttgtggtagagttgttgggaaaaaaaattcaccaaaaaaaaagaaagaaaaaagcatagagagaaag

SEQ ID NO: 23579 - DNA, 272 bp, Glycine max
  Clone ID: 700909329H1
atcaaactcatttattcaaaatctcttcaacacttccaatcgtatagttctcgtcttgcaagattagtcccagtaatgggttgtttgtattttcttagaaaggacacgatggaagaaaaggtaaataaggagcaccaggtttgacatcggatggagctattgatagccagggtcatcctgcagttcgagagaaaacgggtgactgggttgctgcaattttgattttagtgaatcaagggcttgctactttggcattctttggaattggagtg

SEQ ID NO: 23580 - DNA, 276 bp, Glycine max
  Clone ID: 700909330H1
cactgacctatcttggtagagatttgaagtttaaaccttcaaattaatcaaaccattttaatttgcctatagattctgagtcactgctgctatggcgctacgcgtacttcttgtgttggggatgttgctgatgttgtgccttgtaaggtttcatctgatccaaagatagaagaagaaatactggaagcagaagaagaactgcagtttcccgataacgagccacttatcgtgagagacgcgaacagaaggctaatgcaagatatggattgtggtggg

SEQ ID NO: 23581 - DNA, 279 bp, Glycine max
  Clone ID: 700909331H1
ctttattctcccaattcaaaactctcactccgttagaagcaccaaatcctgatggcaccaaaggcagagaagaagccagcggagaagaagcccgcagaggagaagaagtccacggtgggagacaaggctccggcggagaagaagcaaaggccggaaagaagcttccgaaggagggaggcgccggcggcgaagggaagaagaagaagagaaacaagaagagcgtggagacatacaagatctacatcttcaaggttctgaagcaggttcaccctgacattg

SEQ ID NO: 23582 - DNA, 276 bp, Glycine max
  Clone ID: 700909332H1
agacgacaacggcaacgtcaaactcgactgccccgccattggcaaacagttcgctgccgaggaaatttctgcccaggttctgaggaagcttgttgatgatgcttccaagtttttgaacgataaggttaccaaggccgttgttacgggcctgcttacttcaatgactcccaaaggactgccaccaaggatgctggtcggattgctggtctagaggttcttcgtattatcaatgaaccaaccgctgcatccttagcctatggctttgaaaagaaaaac

SEQ ID NO: 23583 - DNA, 123 bp, Glycine max
  Clone ID: 700909333H1
ctgcaggccaatggatggttgagcaaattgccggtgtgaatgaggctacaggtctaatatactgtactgggaccttagatggtcctctggagtccaatttgtattgttccacacttcatgctg

SEQ ID NO: 23584 - DNA, 270 bp, Glycine max
  Clone ID: 700909334H1
ctcgaatgctgcattgcagtttcctgtgatgcccacatgcaaagctaccatggatttgtctgctactgcaacatctgcctcacccgtctttgttgctgctccagcagagaaaggccattttcttttagactttctcatggaggtgtttcagcagctgtctccaaaactgctgctgctcccattgaacgtgttaagcttttgatccagaaccaggatgagatgatcaaaactggtaggctttctgagccctacaaaggtattggtgattgt

SEQ ID NO: 23585 - DNA, 268 bp, Glycine max
  Clone ID: 700909335H1
gccattaccacctcttcactctttctctctcttcccaaactaaacataaacatacattacacatttctagggttctctcacacaccaagattctcctagctgcagctgaaggactgtgaagatgttggagaaagttgaaaatttaacacggagaggatgatggaggaatttgagagggtgacaaaggatgctgagaggattcaaagggaaaccctgaagaggattttggaagataatgcttctgctgagtacttgctgaatttgggct

SEQ ID NO: 23586 - DNA, 275 bp, Glycine max
  Clone ID: 700909293H1
aaagcactatggtgaagggggtcaagtcaattgcccaagatgtctcttccaagcccaagattgattctttagctctcaagaagaagctaaacacctcaatcaagcacccgcctgattctaagttgaagtttgtcaccactacagtcacaaaatctgaggtgaaatcaaaaccggtaactacatcatcagcatcgtccaaaacaataacaaagacaactactaccaaaaccaaagtgagagagaagaaagtctatagtctgcctggccagaaacat

SEQ ID NO: 23587 - DNA, 282 bp, Glycine max
  Clone ID: 700909266H1
caataatgagtttgatagcttcgaggacgtgcgttgtctctttgatggcggagtttatctccctacagatgtactcagcaaaattagccccataccggtgctcaaagaaatcttccgcactgatggtgagctagccctcaagtttccaccacctcatgtcatcaaagttcgtgagtctgaatggatgactgatgaagaatttggaagagagatgcttgctggtgttaatcctggcatgattcaacgccttcaagagttccctccaaagagcaagctagatcc

SEQ ID NO: 23588 - DNA, 285 bp, Glycine max
  Clone ID: 700909267H1
cctctctctatctctcacacacactttctctctctctctctctcacccagatcttgtagcaatggcgagcgctcccactccacgcgaagagttcgtgtacatggcgaactgtgcggagcaggccgagcgctacgaggagatggtggagttcatggagaaggtctccgcctccgccgagagcgaggagctgaccgtggaggagcgtaacctcctctccgtcgcctacaagaacgtgatcggcgctcgccgcgcctcctggcgcatcatctcctcaatcgagcagaa

SEQ ID NO: 23589 - DNA, 280 bp, Glycine max
  Clone ID: 700909269H1
ctttatttcagcattttccaagtcagggaatgttgatgccatgatagcttggtactcagcgaagaaggctgccagacttggtcctgatcttcaaatgtttgaatccctcatatcaggctgtgttaattctagaaagtttaagattgctgatagaatttttgaagaaatgatgatttctggaattgttcctagtgcttccataattgagagtatgcttaatgggatttgcaagcaaaagagattgggtcgggcagaggagtttttcacgtttgcgatggat

SEQ ID NO: 23590 - DNA, 173 bp, Glycine max
  Clone ID: 700909270H1
ggagaataatggcattcttccaagtgagtgtcaggcgttggattttaacctttgctatcctttacgtttgtgtatttgggaaaaactttggaaatgctgatgaggatgagtccgaggcacagacaggtggtggtgggtacggtggtgtgggaggtggttttggttgttcttgg

SEQ ID NO: 23591 - DNA, 274 bp, Glycine max
  Clone ID: 700909271H1
ctttagggatgaaaattaagactgacacacctgtggcaaagaaggctagagaaggagtgatggagtttttattgatgaatcatccattagattgcccaatttgtgatcagggtggagaatgtgatcttcaggatcagtcaatggcatttggctctgatcgtggacggttcactgaagtgaagagatctgtggttgataaaaatcttggacctctggtgaagactgtgatgactcggtgcattcaatgtacaagatgtgttagatttgcaacaga

SEQ ID NO: 23592 - DNA, 280 bp, Glycine max
  Clone ID: 700909272H1
gaattagggttttccaattcacagagcaacgcaacgaaccatcaatggcgcagctcagccgcagtcgcagccgcagcacgggcaagcagcgctggagcaggtgcagtgcttcggtcgctagacgaccgccgtggccgtgacctactgcaagcgcgggcgcggtctcatcaagatcaacggctgccccattgagctcgtggagccggagatcctccgcttccaaggccttcgagcctatcctcctgttgggtaagagccgcttcgccggcgtcgacatgcg

SEQ ID NO: 23593 - DNA, 157 bp, Glycine max
  Clone ID: 700909273H1
gcaaagggaaggaaaagtaccttccccaataacccttctctccgatttggcttctctcatcggagggagaaaatcaattgaagagaaaaaaaacccacaaaaagattgtaacagaaaaagtatgaaagggatagtactaggttccgcagtttctctc

SEQ ID NO: 23594 - DNA, 278 bp, Glycine max
  Clone ID: 700909274H1
aattaaggaacaaagaaaaacttgagacaacagagaaaaagggtcacaacaatggcttccttagactctctcgatttctccctcttccgtctcagcactgacttctgctctccttttgccattttcgttcaggcgcagggatgtataataaacctaatccttgcttttgggtgggcttgtgctgcatttgtcaggaaccgagaaataaatagaataaagaagagtatgcggaatggcaataactttgcattcctttgtcatgatattagtgaacttga

SEQ ID NO: 23595 - DNA, 276 bp, Glycine max
  Clone ID: 700909275H1
atttcattttgttcctcacccagtcaccaatcccgttgtccggagccaccattttgcgctccggcaatgttcttcccggtggccatcgtcccttaaacccaccacacttcaaagtcatgggtattccatgggacgacgtcgttgtgatccagcaagggtaggatcacaatgagccctgcatcgtcaccgtcaattgccccgacaaggctggtctcggctgtgatctttgcagaatcatcctcgagttcggtctccgcattacccgtgctgatattt

SEQ ID NO: 23596 - DNA, 291 bp, Glycine max
  Clone ID: 700909276H1
ggaattcggctcgcggagaaatgcaaatcaagtatttgcatcagagaaaggagaaggtagcagtgttgttttctcatgagaagcaccacttatgaggaaagagtcaagaatgtccactccttattgttgccatgctatgaagctcaaatccagggatgttacaacagattgtgagcttggaagtaatgagaaatttgggttggagaagaaactatgtagacaagataggattgagttgggtcggttgtttcagagtgcagtgagttcccatgactgggaacttgctgaaag

SEQ ID NO: 23597 - DNA, 274 bp, Glycine max
  unsure (1)..(274): unsure at all n locations
  Clone ID: 700909278H1
aaagagtgtttcagatcccgaaccgcatcgtacggtaccacaagtacgagttacagttatagtcatcggtagtagcgttacgtngatcagatcagaattgtgatcgtggatcgaagcaatgttcaaattcttgaaagaggtggtgagtggatctggcacgggcctcaaagatctcccatacaatatcggtgacccttatgcttctgcttggggctcttggcttcattttcgcggcacctccaaagacgatggtacccggtgtccataatttctc

SEQ ID NO: 23598 - DNA, 277 bp, Glycine max
  Clone ID: 700909279H1
aataattggcagatggcacttcgttgcttggtgatgtccctttctgttctcttcactcttggtcttgcgagagaaagccatgccagagacgaagatttttggcatgctgtttggccaaacactcccattccaagttcattgcgagatcttctaaagcctggccctgcaagtgttgaaatcgatgatcaccctatgcaatttgaagaaacacagtacccgaaaaccttcttctatagagaagacttcatccaggcaaaacattgaggtacaattcagc

SEQ ID NO: 23599 - DNA, 283 bp, Glycine max
  Clone ID: 700909281H1
cttcccgccgccgccgccgccgtcagcgtcacaccaatggcagacaccatcttctctgccgacggatcaactcgccgccatcaccctcgacgaggttcccaaagctaatttctccgaccgcgtccccatccgatccatcatctcccgcaccgacggcggctcgggcctcgccggcaggaaagcgcgcgttggcggctgggtgaagacgggacgcaaagccgacaaggacgctttcgcgttcctggaaatcaacgacggaagctgcgccggcaacctccaggtc

SEQ ID NO: 23600 - DNA, 277 bp, Glycine max
  Clone ID: 700909282H1
ccaaccctgtttgaaattcacctgtgcttgtttttctcctacttcacacttctgatctcatctctctcacacctcacctcgttttgctttttttacttttgaatgttaccatcttaattttttctctttgggtatcttcacaaagcaaagaaattcactgagaaagccaaagccaaaggtgatgatggaataataagtacaaatgaaagatgaacaggaaatattgaattgggtcaatcggatctaatctatcgagtataagtaggtaattcacaaa

SEQ ID NO: 23601 - DNA, 237 bp, Glycine max
  Clone ID: 700909283H1
ctcgagccgaaagaagaataaacactcgagaaatttctcacttagggtttggatttttcacgtaatcttctctctccgtcacttcatctcacgcgatctcgttccgatcgcacgcgttttaatgatcgtcgtcttccgcggcctctgattcggctctgatcttcctcgccgcacctctccgcacctctccgccggaaccatgatctccgtgcagggcgacctccaccgccaccacca

SEQ ID NO: 23602 - DNA, 254 bp, Glycine max
  Clone ID: 700909284H1
gcgaaatatacctcattatgtgattatcttgtaatttcacagttttattgttatatatttccagggtctttctgaaggaacattttcttgattttcaatgggaggaacaactttgattttttttcccgctgaaggaaattgtaaaccaatatctatggcaagaaacaaggagagtgaattatgcttatgacttaccaataaaaaaacctagtattcttttcatatcaaaaaaaaaaaaaaagggcgtccgccga

SEQ ID NO: 23603 - DNA, 225 bp, Glycine max
  Clone ID: 700909285H1
aaacggcatttattgagataggtcaacgagttgcatttgttagtatttatataccttttcggcatgtttcctgctgttatggtatatgttgcatcaatcttcacatgaaatcttcgctgatgcattctaataagagtaactatattacctagggtaaatatcttattgagacctatcatttctctttttgtttattctcttaatacttaataatatttatcacat

SEQ ID NO: 23604 - DNA, 274 bp, Glycine max
  Clone ID: 700909286H1
tttgctattgctgttactattgttgttgtggctgttcctgaaggtttacctttagctgtaacattaagccttgcttttgcaatgaaaaagatgatgaatgataaggcacttgttcgtcacttggctgcttgtgagacaatgggatctgccactactatctgcagtgacaagactggcacactaactactaaccatatgactgttgtaaaagcttatatatgtgggaagattaaagaagtaaatggttctaaggtctactctgatttctcatctg

SEQ ID NO: 23605 - DNA, 280 bp, Glycine max
  Clone ID: 700909287H1
atcccatttaatttaaagagagagaaaaatacaaacacaaagaaagagcattagaaaaagaggattaaggaagaagaaggagacgccggaccaagcgtccgtgtttcatctttggtctcctctccttcctcttccccgtaatcctcccttaaatcatcatcccatattcacaaatcacaatcattaattcttagattaattgcattcgaggtattttctgctttcatgtgtcgtaattgttcatgattttgtccttaaaataatcctcattctggtttca

SEQ ID NO: 23606 - DNA, 281 bp, Glycine max
  Clone ID: 700909288H1
ctagatgaggacaagaagaagaaagatttgaggaatgaatcactccaattggcttcaaaggaacaaaagatagctgatgagaatgtcttgaggcttgttgaagagcaaaagcgagagcgagaggaggcctataacaagatacttcagttggaaaaacagttagatgccaaacaaaagttggtaatggaaattgaagagttaaaagggaaattgcaagttatgaagcatcttggagatgaagatgacgcagctgttcagaatgcaatagaggagatgaatgt

SEQ ID NO: 23607 - DNA, 273 bp, Glycine max
  Clone ID: 700909289H1
catactcattgctgttcaccattttcaattcattcctgtgttagattccaagtggtttggtttggtttgacataaataaacctttcaagatctcagaggggcagaagatcaaagccaagacaacacactctcatatataaaagagtgtctctgataatttgatctttgtttcttctcttactctcctttgagatttttcagcaccccaccaaggttttgtccgaaaagcttgaatttttcgcctaccctttacaatgatctcttcattgagac

SEQ ID NO: 23608 - DNA, 268 bp, Glycine max
  Clone ID: 700909291H1
cagagagaagcgtcttaataaacgctcttctctgaaaaacctgatttcttctcttcttctcttctctttcgtttcgatcttcgatctctgaaaatgagagagtgcatttcaatccacatcggtcaggccggtattcaggtcggaaacgcctgctgggagctctactgcctcgaacacggcattcagcctgatgggcagatgccaagtgataagactgttggtggaggtgatgatgctttcaacaccttcttcagtgaaactggggctg

SEQ ID NO: 23609 - DNA, 274 bp, Glycine max
  Clone ID: 700909292H1
atcaagagaaacgataggacattcaagcttacagagccattgtcagagcactgccctcctggtgaattcgttcgtgaaatccctctttcaactcgaattcctgaagatgccaatatagaagcatactatgatgagccaggatctgtgcttgagataatggtgccaaaacttcttccaggagcagaagagcatgaagttcgtgtttgccttcgcccaaatgtggggaatgatctcatgttgacttgagttatagacatgagttaggcacttaatg

SEQ ID NO: 23610 - DNA, 281 bp, Glycine max
  Clone ID: 700909263H1
cacttgccttatttttggttttgagattgagctaaaggccaactcaaccatcgaatttgttggtgattgaaagagaaggaagaagaagcaggaaatggaagcagtgagagctggtcgagaaggagcaataggtctaggtcaaggtgatggcgtagcaaggacagcactgagactgaactcaccaaaatccgtctcctcagggcaattgttgaaacccgtgatccctcttccaaggtaaaccacactattcttgtgcctcaacctctataggtcaattagtc

SEQ ID NO: 23611 - DNA, 287 bp, Glycine max
  Clone ID: 700909229H1
tagtgtggtctgcaactatgagcaaggattatctaatcatactttctctccttctttccacggtgcttgcaacttgcaattcttcttcttcttcttcctccctctatcttgggaagggcttctcccatcgcaaattgtctcccagttatcacattcacaaaaccattgacgaatcctatgcagttatcttcgatgctggtagcacgggaagccgtgtacatgtctatcgttttaaccaacaattagatctccttcgcattggccaagaccttgagttgtttgtcaag

SEQ ID NO: 23612 - DNA, 293 bp, Glycine max
  Clone ID: 700909231H1
cgctcttctcttcaccgtctctccatcctctatccttcacgcctattgtaacacgaagaaaagcacagtaactgagaggacacgatggtgaagaagagcaagaagagtaagagcaagagggtttcgttgaagaagaagtacaaggtcataaggaaggtgagggagcacaacaggaagaaaacgaaggaggcgaagaagcttcgcttgagtgggaagaagaaggttgagaaggaccctggtattcccaacgattggcgcttcgaggagcaggaactcaaagcgcttgaagctcg

SEQ ID NO: 23613 - DNA, 282 bp, Glycine max
  Clone ID: 700909233H1
gcctatgagagtgaactctttgaaggatggagcagaacgttcggttcggttaggaatgaattcccatcagtttgatcgcagccttagagcggatcgcaagaccacaaggaagggcagccaaggtgttgcagccacaaggaggccatcaactgcttctactcatgctcgcagaagtgtggactcaccacaactgtccaagggcaagcagactctcctgccaccaactagaaccaaagtatcagcccaaagtcggtatcattttgattctcccagcaaagtatt

SEQ ID NO: 23614 - DNA, 278 bp, Glycine max
  Clone ID: 700909234H1
ctcattctactacaagtcagatgaggaacttcaaaaagaccccgagctccaagcttggtggaaagaacttgtagaggtgggtcatggggatttgaaggataagccatggtggcaaaagatgcaaactcgtgaagagttggttgaagcttccgctaccctcatatggattgcttcagctcttcatgctgctgttaactttggacagtatccatatggaggtttaatcctgaataggccaactattagcaggagattcatgcctgagaaagggtctcctg

SEQ ID NO: 23615 - DNA, 226 bp, Glycine max
  Clone ID: 700909235H1
ggtggaacaagtggatcggtcaaccactcaacctgacaaatctctagtatatccaatacaattttattaataaaattaattattttttttagctttattttacttttggtaccaagagatccagacatttaaattaaagataacccttctgcaaaattaaatgtctggatctcttggtaccaaaagatccagacatttaattttgcagaagggttttctttaattt

SEQ ID NO: 23616 - DNA, 287 bp, Glycine max
  Clone ID: 700909236H1
gaaacgcttgcaagctaggatacatatttgtggaatgactggggatggagtgaacgatgcacctgccctcaagaaggcagacattggtatagctgttgctgatgctactgatgcagcccggagtgcatctgatattgttctaacagaacctggacttagtgttattattagtgctgttttgacaagccgagccatcttccagagaatgaaaaattatacaatttatgcagtatcaattacaattcgtattgtgcttggttttatgttgctggctctcatttggaagt

SEQ ID NO: 23617 - DNA, 281 bp, Glycine max
  Clone ID: 700909238H1
caggcctgcacggagggttttgacgatgccaaagacggtgagaagaagatcaaggagcagttgcagacccagaccttggacaatgttcagaaactcactggcatcacccttgacattgtgagttctttgtcccacatcctcgagcagtccggcttaaagtttaatcttaaacccgcatctcgtcgtcttctcagcgaggatgggttccccacttggttctctgctggtgatcgcaagctctttgctcgtggatggagagcacgtatcaagcccaatgttgt

SEQ ID NO: 23618 - DNA, 291 bp, Glycine max
  Clone ID: 700909239H1
gggtttttgagtgcggtgcggcgatcctagcactctcttctgcagctttcgccgacagcttcattcaccatggctgagcaaaccgagaaggcttttttgaaacaaccaaaagtgtttctcagctcgaagaaaactgggaagggaaagagacccggaaagggtgggaaccgcttttggaaatccattgggcttggatttaagactcccagggaagccatcgaaggaacctacattgacaagaagtgccccttcactggcaatgtttccatccgtggccgtatcttggctgga

SEQ ID NO: 23619 - DNA, 286 bp, Glycine max
  Clone ID: 700909241H1
atttgccgctcttccgctgcgccgcccccttatcgtcaccacaaaacctaagacactcaatagatcttaacttggtaaccactttctcacggcaagggctgtttgaactttgaaccgccgccgtcaaccgtctgccactgccagagttcatttggacaaaagacaatgggggagtagaggattctataaaccttgggagctgtcatctatacagggattatagtgttacttgcattattaatttacttagataacaagacacataggatggaacccagtagagagc

SEQ ID NO: 23620 - DNA, 285 bp, Glycine max
  Clone ID: 700909242H1
aaaaaataatttttgggaatgaataaattggtaaaattgtaataactcctggttgagcatggttgtggccttagcaatttaggggaagagaagaaagtgctgaaaagagaaagttgttatccacaagacaacgtcatcaacattacacaaggcgcagggtggtctctgtgatggcaacctctttctctccgacagcctctgtcggctccatcatcttccaaaaccctcccaaaggccttcttcttctctcccagcagcagcaacaacgctccttcgcctcttctg

SEQ ID NO: 23621 - DNA, 70 bp, Glycine max
  Clone ID: 700909245H1
cacttcacttgttctgcattgaccatagcttctctctttctttcctgattaatccttccacacaacatac

SEQ ID NO: 23622 - DNA, 117 bp, Glycine max
  Clone ID: 700909247H1
attactatcttgcctctcttcttctgctactgctgctcaacccacacaccaccctgggagcgcagaacctcatgctaccctaccataacggcggcctcctcaaaggaaccattaacg

SEQ ID NO: 23623 - DNA, 288 bp, Glycine max
  Clone ID: 700909248H1
gaagccgaagatatatcctctccaaaagcgatgaagagttattcacaccttacgttgacccctgttcatgaggaagctaagatagtaggaaaaacaagctatgccagcaacttgtctgggtatgatgaatatgttccaatggtagacatacctgttgatgctggttggaagaagcaagcatctctacagaagtcttacacctctaaaggagcacctcctcctgacactcagaaaactcctgaagggattcaagctcggatgtgggtagcactgtctatcttcttcttg

SEQ ID NO: 23624 - DNA, 297 bp, Glycine max
  Clone ID: 700909249H1
catccaccatggggttactacttagctatgctctgaacattactagtttgcttaccggtgtgctgaggctggcaagtttggctgagaatagtttaaacgcagttgaacggattggcacttacattgatttgccctcggaggctccctctatcatcgatgataatcgccctcctcctggctggccttcctcaggctcaatcagattcgaagatgttgttcttcgctacagagctgaacttcctcctgtgttgcatggcttgtctttcaccattttcccaagcgataaggttggcattg

SEQ ID NO: 23625 - DNA, 286 bp, Glycine max
  Clone ID: 700909250H1
aaaaattcgcagcggcaccactttgcttcaacctctaccctttcacgacactcgaagccctcgctggccaggactcgatgggaaaggagagccaaacgtccgctatggaaatcgacgctccaaaatcgatgaattccgatctgatcgttccaaaattctccatcaacgtgctgcagctcttaaaatctgcgcaaatgcagcatggcttgcgtcatggagactacactcgctataggaggtattgcacagctcgtttgaggaggttatataaatcgttgaagtttac

SEQ ID NO: 23626 - DNA, 284 bp, Glycine max
  Clone ID: 700909251H1
ttctcgaccgattcggctcactctcagttccgttctgcatcatagagtatggccagccacgatcttcgattcttcgagttgaacacaggcgctaagataccttccgttggtttgggaacgtggctcgctgaacctggcgttgttgctcgcgccttggccactgcaataaacgttggatatcggcatatagattgtgcgcaaatttatggcaatgaaaaggagattggtgctgccttgaagaagttatttgctgatggtgtagttaagcgtgaagatatgtttat

SEQ ID NO: 23627 - DNA, 275 bp, Glycine max
  Clone ID: 700909252H1
ttctcactgatatttcctctgtactaaagactaaagagagacgaaacaatctctgtctctgtgtgcgtgcgtgcgtgttttcctctatctgtctgatagatagaataatatcccaaaccatcgaaaggaagcaacgaggaaaaaagaaataaatgaaaagcgtagagagccatataatgctccgctttgtttgcatatccatgtgagggttctgacacattctcttcccctatcgctgggtggcttgttcgccttggtggtttctactgagtcac

SEQ ID NO: 23628 - DNA, 269 bp, Glycine max
  Clone ID: 700909254H1
gttcgctataatcacaatattgttctctatatttcgtcttgactttggttttgcacaacagggggatcttgacatatcaagatttggaggaaaaccaaatacaaatataggctatgctttcttaagtgccttgactcaagcatgtgcatcaccaactactgtctaaattgtgattccagctggcacataccatatgggtgctattgatgtcaaaggtccttgcaaggctcctattgaggttcaagttgatagaacaattcagcaactgc

SEQ ID NO: 23629 - DNA, 287 bp, Glycine max
  Clone ID: 700909255H1
gttacaatccaaccccatcaactcctcctggtggtggaagctatgatccaactccatcaccaccctcgggtggtggaagttacaatccaactccatcaactcccccaggtggtggaagctatgatccaaccccatcaccacccacagatggtggaagttataatccaactccatcaccacccacaggtagcaactgtggaacaccaccacaagacccctctactccaacaccctcagtcccaacaacaccatcaaccccatcaaaccctcccttgggaggaggtggg

SEQ ID NO: 23630 - DNA, 283 bp, Glycine max
  Clone ID: 700909257H1
aaactttcttagcaagatcactcctataccaataattaaggaactttttcgaactgatggcgaacagttcctcaagtatccaccacctaaagtgatgcaggtcgacaagtctgcatggatgactgatgaagaatttgcaagagaaacaattgctggtttgaatccaaatgtcatcaagattattgaggagttcccactaagtagcaagctagatactcaagcctatggtgatcatacctgtataataacagaagagcatttggagcctaacttaggtggtctc

SEQ ID NO: 23631 - DNA, 282 bp, Glycine max
  Clone ID: 700909258H1
gaaggtacgtggtttatgtcaaagaaggagtgtacgatgagaccgtgacagtgacaaagaaaatggtaaatttaaccatgtacggtgacggacagcaaaagagtatcgtcactggaaacaaaaatttcgtggatggagtcaggaccttccaaactgcatcatttgttgtacttggagagggattcttggggaaagacatgggattcagaaacacagccggtgcagagaagcaccaagcagtggccgcaagagtgcaagccgaccgagccatattcttcaact

SEQ ID NO: 23632 - DNA, 281 bp, Glycine max
  Clone ID: 700909260H1
ctccactacgattcgctcttccagaagcttccagaaaactccagatggcgcgtacaaagcaaacagcccgtaagtcgaccggcggcaaggctccccggaagcagctggcgactaaggccgcccgcaagtctgctccggcgaccggcggagtgaagaagccacacaggttcaggccaggaaccgtggccctgagggagctcaggaagtaccagaagagcacggagcttctgatccgaaagcttccgtttcagcgtttggttcgtgaaatcgctcaggacttc

SEQ ID NO: 23633 - DNA, 278 bp, Glycine max
  Clone ID: 700909262H1
catttacacacctctccaacctttcactttcagctttatttgaatccctctctctcctttccaaatggccagcgttgaggttgcacatcaaacaccaacaacagttccagaaaatgaaacaaccgaggtaatcaagacccaggaaacaaccccggaaccagtaccagccactgaggctcctgcaacagaacaagcagcagctgaggttcctgctcaagaagaacaacaagcaactgaggttcctgccccagaatcaaccaccgaagcaccaaaggaag

SEQ ID NO: 23634 - DNA, 290 bp, Glycine max
  Clone ID: 700909227H1
gagccagaagctggtcccaaccaaagatcacaaccccatcaagcgtggcttccggtcactggcttactttgtggaggacaattggaaacggatttgggttattctcctctggctttcaatttgtgctgcccttttcacttggaagttcattcaatacaagcaccgtgccgtgttcgacgtcatgggctattgtgtcacttcagccaaaggtgctgctgaaaccctcaagttcaacatggccttaatcctgttacccgtttgcagaaacaccataacttggctcagaagta

SEQ ID NO: 23635 - DNA, 240 bp, Glycine max
  Clone ID: 700909187H1
atcatagattagccttagtaccaattcaggagcagcaacaagaacaaccaaggaactcaaatgagaattctctggaactataccaagagcaacaacaccaaccctcaaggaattccacctcaggagttgtagttaccacaaattgggagttgtttgattctgtcccaccattaatccctgtgcaatccacatccccaccctcctcagtgaccaataattcaggtcctcccaagttcaatt

SEQ ID NO: 23636 - DNA, 156 bp, Glycine max
  Clone ID: 700909190H1
ccggaaagttcgatttgaccgtttccgtcgccggagattccctcacgttacacaccggtgttgattcgtcgaggattgcggacaccattctggattcctctccgctttcgatttattcagtcgacagcgttcttcttccgcaggaactgttcgcga

SEQ ID NO: 23637 - DNA, 240 bp, Glycine max
  Clone ID: 700909192H1
cagatatcttgctagggttttaggaaaagacactgtctcgcgagtgggcacaggttacagcaatggctttctttggtagaattgggaatttattaagacagacagcaagcaggcaggttagttcagaattgcgatcatccccttcgttttttcaggctatacgcagtatgtcatctgctccaagcacaaagctgtttatcggaggtgtttcatattctactgacgagcaaagtttgaggg

SEQ ID NO: 23638 - DNA, 239 bp, Glycine max
  Clone ID: 700909194H1
ctcgagaaaagcagcatagtgagatactacgtatactacgtagtactacacatttcatttgcctcttgtagtagccatggttttccaaacaaacattaatcctcacttcgtattgtttcctctcatggctcaaggccacatgatccccatgatggacattgcaagactattggcacggcgtggtgtgattgtttccatattcaccaccccaaaaaatgcatcacgattcaattctgttc

SEQ ID NO: 23639 - DNA, 239 bp, Glycine max
  Clone ID: 700909195H1
tttttctctctgcagaatttcccaaatttctccactaccctatctcttttgctcctgaaactcccacattcttcaccagctatgcacgatcttcaatacgaatgcagtttcgatatttgatatcggagtatcggtgtttgagcggctgaattggaattggaaaatgcttgaggcaatggaaagttcggtcaatggtgggtttacccatttgcagagctgtggagatagcagcgaagaag

SEQ ID NO: 23640 - DNA, 237 bp, Glycine max
  Clone ID: 700909196H1
gtgcaagttgagattttgattggtgtttggctcccaaattcccaaaacagtgatggtctcaagtaaaagaaatgtttttggcaccaagggggaaatgggtatagatttcatggttttggtgttatcagtgtcatggttttgtttgactagtatatgtgtctctgctacaaaacaagcatacccgccaacaccacaaccgaaccagaacttaaggtttgaccagaatggagaattcaa

SEQ ID NO: 23641 - DNA, 268 bp, Glycine max
  Clone ID: 700909204H1
gaaaggctctggggtgaaaacttttttgatccagccacaaagaaatggaccagcaagaatagtggttctgctacctgcaagcgtgggtttgttcagttctgttatgagcccatcaagcagattattaacacttgtatgaatgatcagaaggataagctgtggcctatgctgcaaaagcttggggtcaccatgaaatctgaggagaaggacctcatgggtaaagcattgatgaagcgtgtcatacaaacctggcttgcagcaagtagtg

SEQ ID NO: 23642 - DNA, 294 bp, Glycine max
  Clone ID: 700909205H1
tctttgttggattctattcccttcactttctcttactctctttcctttttatgttttcctcttatgcttttctttttggttttttccccctcactttgcgcttgtcgatctttgtaactagctataatgcaagcacctcaagctgcatcagccactgatgaagctcctgagatttcccatcaggctgtcccccagcgaaacaaagaagtttcagacagtggacccggtggtaggcgccctgatatttcacttcaagttcccgctagacctatagggtctggtagcactagtagt

SEQ ID NO: 23643 - DNA, 290 bp, Glycine max
  Clone ID: 700909206H1
cttcttctcttctctgcttttccactccttctcctcacttaaccctcccttttatttccattgttattctgcctaagcagtttcttccaaacttccttttacatttcctatttctctatactatcaaaagggtttgaactttgaagggaaattcagaaagatatgatgacgaaccacaatgtggtgactcatgaggttattaacacgttgattgccgtggcagcttccatttcaaactcacacgcgttgccaagtgcaacagtgccagaatccatggctgtgcttggtgg

SEQ ID NO: 23644 - DNA, 294 bp, Glycine max
  Clone ID: 700909208H1
cactgccatgttcttcgaatcccgatccctcctcttcccgctccttttctctctcttccttgcttccgccttcgcttcagagtcagatcacaagtatcaacatgatgaacaagttaacctttgggtgaacaaagttggtccttataacaatccacaagaaacatacaactattacagcctcccattttgtcatccatctagtagtgctagtgctgcacacaaatggggtggtcttggtgaggtcctgggtggcaatgagctcatcgatagccaacttgaaattaagttccaaag

SEQ ID NO: 23645 - DNA, 293 bp, Glycine max
  Clone ID: 700909209H1
catcaaaaaacacacacgacacactcccatacacacacgttgtctcgcacacattccttcattccgcagcagcaaacatctttaccttaaacgacaacaatggccgatgccgaggatattcaacccctcgtttgcgataatggaaccggaatggtcaaggctggttttgccggagatgatgcgccgagggcggtgttccccagcattgtggggcgtccacgtcacacgggagtgatggttgggatggggcagaaggatgcgtatgttggggacgaggctcaatccaagagggg

SEQ ID NO: 23646 - DNA, 293 bp, Glycine max
  Clone ID: 700909211H1
gccaattgccatttcaatccccagtttcttctacaacgtcctcttacgagcagatcccaattctccttcccagtttcaaaccctaattccctcattcccatggcctcagaagagcccactgtcgcggtggaacccgctcccgaacctgccaccgccgagcctcccccggaggagaaggaggagcccaaacctgaagccaaggctaagaaaaccaaggaacccaaacctaaaaaggtttccagaccacgcaaccctcccactcatccttcctacgaggagatgattagagacgc

SEQ ID NO: 23647 - DNA, 277 bp, Glycine max
  Clone ID: 700909212H1
tccgaagccaaattgaggagataagacaataggttactcatataactggttaaggacttgatccgcgcgcatggaagcaggtttctcccatcgaaggcaaagcagaaagaacggaaagggttcaagtcggagtaccacctttgctggatcattgagacaaacctttgcgtctttcatacgtgtgattcttttagacatgtgaacgcattgttttctggagctgaaatctgaatgttactgcaataattatggattcttctgctgtcgtgggtaacac

SEQ ID NO: 23648 - DNA, 290 bp, Glycine max
  Clone ID: 700909214H1
aaccctgactgattctcttgtggctgctgctggtattattgctcaagaagttgcaggtgatgtccgtatgactgatacccgtgcagatgaagctgagcgtggtattacaatcaagtctacgggtatctcactctactatgaaatgactgatgaagctctcaagagttttaagggagagcgcaatgggaatgagtatcttattaatctcattgactcccctgggcacgttgacttctcttctgaggttactgctgcacttcgtattaccgatggagctcttgttgtggttg

SEQ ID NO: 23649 - DNA, 287 bp, Glycine max
  Clone ID: 700909215H1
gttcagcacaccggtggaggaagaggaaacggtcgagttttgttgggatttgatcactgcaatatcaatagccaatgttcatagattccacatattctggcccatcttccatgagtaccttctttcagttgctcagtttcccatgttctccccaatcccatttgtagaaaaaggtattttaggccttctcaaggtctgtctcaagctcttttctgcaccaagagacgaaaaacaagccgaggaacttattttcaagtccgtaaacttaatgtggaagcttgatatag

SEQ ID NO: 23650 - DNA, 295 bp, Glycine max
  Clone ID: 700909217H1
gaagttacaaagaaaatgacccatgtggtgtttattggtgaagggggaaaaaagacacgaatatctggtaacaaaaacttcatagatggaacgaacacatatagaactgccactgtcgctattcaatgagatcactttgtggccatcaatatggggtttgagaattctgctggacctcataagcatcaaacggtggcattgagagtccaagcagacaagtccatcttttacaattgctcaatggatgggtatcaagacacactttatgcacacaccatgcgtcaattctatagag

SEQ ID NO: 23651 - DNA, 290 bp, Glycine max
  Clone ID: 700909218H1
ttggtttgtttgaggtcttgtatgtggctgcagatatccaaaccttaaattcggtcctcgaatctttctgatcattggttgttcattattctttcaaatacattccaaaatctcttggaaattgcgagattcactgcttatcctagcagcagattttgggttctgacccaattattcattttccccaactgggtcttgtggatttgtcgttggggttttaaatttcgtgatgctgggattgaaagttatttcctatcttccccgactggattcaactcccaagtaattgc

SEQ ID NO: 23652 - DNA, 282 bp, Glycine max
  unsure (1)..(282): unsure at all n locations
  Clone ID: 700909219H1
cagacgtatggattggtgtatgcttcaggaaggagttaaaccgttcattatggtcttgtcttcccccaacaaccgttctcatctcttntattcatgacacaccacactctctctcacatcttccatctcctccatcttttccacacttttctcccacatcactatcacattattacgttgcattaatacaatggaccaaacaaccgccgctgccaacgaggttgtccgcgatttcccctgcctcctccgcgtctacaaagacggccgtgtcgatcgcttcct

SEQ ID NO: 23653 - DNA, 291 bp, Glycine max
  Clone ID: 700909220H1
caattcttgtcatcaaattgtgatgctgtattttcccattttaggcccagattgatcaccttcaaattttgctatatgcaggctggtggttgaatttgacggatgcccttttgagattttggcctttctttcccttgtacacgttcaaacttggatttttatgtggaagggaaagagggcataattccaagccttaaacttttgtaatgcccttcatttatttggttgttttttgttagtattggaattataaaaaatgagtaaggtttctggtgttatatcccgccaagt

SEQ ID NO: 23654 - DNA, 293 bp, Glycine max
  Clone ID: 700909221H1
cacaagtcataactcgttagagagagtttgtgtgtgtttttgtgtgtcaccttggtgcatacaacacaagatggaggaccaaaatggtagtggtaagttgagccaagggcttcgcaaggtgaagccttaccttgctatattgtcccttcagtttggctactcagggatgtatatcatcactatggtttctttcaagcatggcatgagtcattggatactctcagtgtaccgtcatgtagttgctgctattataatagtccctattgcacttgtccttgaaagataaataagac

SEQ ID NO: 23655 - DNA, 291 bp, Glycine max
  Clone ID: 700909223H1
agaaaagcaaaggaagaaaagaaaaacatgaaagaaagaaagaaaagaaaagaaaagcaataaagaaagggaaaaaaaaagaagaagagagaaaacaaagacaaaaggttctcaaaactccatgattattcaaattctctaaaaaacagtaccaagcagtagtagtgttccctctacttaatcaacccacaggagaggacctctacaaagaccctgtttaggcttgggttggaacaacatcaaaaaagagaaagcaaactttcttttctcttttgtagatcgagatcgtag

SEQ ID NO: 23656 - DNA, 292 bp, Glycine max
  Clone ID: 700909225H1
ctcacagtacttttgcttctctcgaagatgtctctacgagtgctgaaccctaacgccgaagtgctgaacaaatcggcggcacttcacatgaacatcaatgccgccaagggtttgcaagatgtcctcaaaaccaacctcggtcccaaaggaaccatcaaaatgctcgttggtggtgctgacgatatcaagcttaccaaagatggcaacactctcttgaaagagatgcaaatccaaaacccgacggcgattatgattgctagaacggctgtggcgcaggatgatgctagtggtg

SEQ ID NO: 23657 - DNA, 287 bp, Glycine max
  Clone ID: 700909226H1
gaaacgctgaagctgagttggagtcacagttgttgttggtagccatggatgcagtagctacggcgaaaccgcttctgtcactgtcgtttttgcttttgctaccgtcttttcttccgatcgccgtcgcttacagacccggcgacatcgttcccatgagccgcatgggtcaataccactcctcgcgaaccgtgtggcaggacctcattggccgtcactgccccatcttcgcagtgaatcgcgaggtgttgatgcccatacccaagcccacgggttacactggtgcggat

SEQ ID NO: 23658 - DNA, 242 bp, Glycine max
  Clone ID: 700909186H1
aggaaagtttggctattctttattacacctgatttttctcactcaaacaaatgatattagaaatccacattatgaaagtatgtatgtggatttctaatatcatttgtttggctgagaaaaataaggtgtaataaaggaggaaagtttggctattctttcaaccatgtgacttgatggccaattgtactctatcaaataacatatgttaatctgtcattcattatatgtttttattggctcgt

SEQ ID NO: 23659 - DNA, 249 bp, Glycine max
  Clone ID: 700909141H1
atttcgcatcttctccttctcattccaactccaaaatacacacacacgatggaaaccttcctcttcacctcagaatcttgaaacgagggccaccccgacaagatctgtgaccaggtttctgatgccatcctcgatgcttgcttggagcaagacccagagagcaaggttgcctgcgagacctgtacaaaaaccaacatggtcatggtctttggggagatcacaaccaaggccaaggtgaactacgagaaa

SEQ ID NO: 23660 - DNA, 246 bp, Glycine max
  Clone ID: 700909144H1
gcataagatagagagtggtgtaggcgttaagatttccgtgaatgatattttgaagtaggattcttctgtggggcgaagataagtttctaaagccaacgggaaatgcaaggagcaagaagaaacagtgaatgtgactgtgaatgtgaatacgtgttcttacaatggtagtagtgcactttggtcagagagcaatgaagataacaaatcactagacatggaaacctcaagtagtggctactactctga

SEQ ID NO: 23661 - DNA, 248 bp, Glycine max
  Clone ID: 700909147H1
cttcttgtggttacaaaaactctgaaaaacacacacacacacacacttcttatgcctatggctggtgagcaaggtgatagattctcctccattaccataccccttctcgatgatgaaaaattgcaccaagtgaatggttcagatgaggctttggtggccaaaacttgtgatctacacacacctcatgtggataacacctcctttttcaagacctgcttccacctcattaatgccctctcaggagttgg

SEQ ID NO: 23662 - DNA, 246 bp, Glycine max
  Clone ID: 700909149H1
agtttgcagagggagaggctccggttcaatcaagcaatgaaaccatacatgctctccttcagtgcgtgccttatttgtctcaccaaaactgtactcgatgcttggagtacgctatgtccaggatttcatattggtgtgatggaaaaacaggtggttggtatctaggacgaagctgttctttaagatatgagacctacctcttctttgagctcatattccacgatgcaccagcaccacagccttccc

SEQ ID NO: 23663 - DNA, 245 bp, Glycine max
  Clone ID: 700909151H1
ggcagtgatagcaaagagaagatcatttcataatcagactcacctaactccgccatggctgctgttccctctactttcgctctaaccaaatctgcattgtccataaacaagctggaccactctctggtcaagatcaaaccatacagcttctctctgaatctaaaccgtctagggaggatggaaacatctttaaccagaaggcctctaacaattcaagccacatatagtgatggtggaaggcccag

SEQ ID NO: 23664 - DNA, 243 bp, Glycine max
  Clone ID: 700909152H1
ggagacgatgatgatgatgagctgcgtttcgatttcgagttcagtgacaagaggcgctattagcgtgggttcctcttcatctttgtgtttcggcacacccaagttgttcaattcagcaagggtagcggtgaatggtcggcgaagaaacaaaggtttgagttgcaacgccatgttcggtctgggggtgcccgaactggtcgttattgccggcgtggccgccctggtttttgggcccaagaaatt

SEQ ID NO: 23665 - DNA, 227 bp, Glycine max
  Clone ID: 700909155H1
ctctttctttcgctttctctctcttcctcgttcgcttctctccccgaaatggagcagtctctgctgagaggcgaaagccgtgaccagagtaaccggtcgcggggaatattccggcgctccgatgctatcacctacggctccaactacgagaaagccgctgcgttcatcgatctggctgaagatggtgttggtctccctgaggaaattctcgactcagcaaacttcca

SEQ ID NO: 23666 - DNA, 245 bp, Glycine max
  Clone ID: 700909157H1
attacaattactactttctctctctttgtaacttgtaagcatggagtcctcaaagatctatgcttacctcttcctttgcatgctcttcctctcctccgccactcccattctcggttgtggctactgtggcaaaccccccaaaaagcacaagcctggtaaaccaccaaagacacccacagtacccgttgttaagccaccagtcacaatccctcccattgttaagccaccagtcacactccctccca

SEQ ID NO: 23667 - DNA, 244 bp, Glycine max
  Clone ID: 700909159H1
tgagtcagcacaaggatcatcagatagcctttgtaccattgaaattaaggatgcgcttcttccaccttggagtatttgtggtatatgtgcattgatggcctctgaaggaagaagctttgtggcaagttttgtgacggaacctaactcaattggcttgaatgttgccttaaaatcaacttgtgagaagtcggaatctaaagctgccggcagtgaaagcttacaagaccaaggaagtacgtttggc

SEQ ID NO: 23668 - DNA, 102 bp, Glycine max
  Clone ID: 700909160H1
gtgaagagtgagagagatagagagagagaggcactttgaatccaaaaatgagatacatcatcagcattcacataggtcaggccgggatccaggttggcaact

SEQ ID NO: 23669 - DNA, 246 bp, Glycine max
  Clone ID: 700909161H1
attttgttcttccttacaccctaaatccctaatctccttcagcggtgtttatagtttaacccaaaaaatcaccgaattctgatcggatcaccgcagtgccccactctccaccaccgcgccatcgcaaaccctagatggacctactgaagcaagagcttctcaagaagcgccaatccctggcgcaagacaccggcggcaagaaattcttcaagcgctccgagatccagcagaaggaaatccagaaac

SEQ ID NO: 23670 - DNA, 244 bp, Glycine max
  Clone ID: 700909163H1
tgattttccctcttctctttttctctctcgtgagtctcgtccctgaagcgaaattctagaatggcggaagaagctcctgcatctgaaacctccgtcacaatgcctcaaccggcggaagtcatcaccgtcgacggaaccctaacctcttccgagaatgacaagagcggaatctccgtcgatgccgccgcgcacggcggtgaaaagacggtgtccaacgctgaaccttccggtagcgatcctcaga

SEQ ID NO: 23671 - DNA, 242 bp, Glycine max
  Clone ID: 700909164H1
atagttttgcattgttttacttaatctacaatggctgcttcaacaatggctctctcttcatcatcattggctggccaagctatcaagcttgccccctccacccctgagcttggtgttggaagggttagcatgaggaaaacagcctccaaaactgtttcctcaggaagcccatggtacggcccagaccgtgtcaagtacttgggcccattctctcgtgagcccccatcctatctcactggtga

SEQ ID NO: 23672 - DNA, 243 bp, Glycine max
  Clone ID: 700909166H1
ctccctcttctttccacccatttcccctttcctctctctctccaaaacccacttctttcaaccctcgccctctcttccctcgcaccatgcacgcctcgcgcatccaagatgccgttggaggggcactggccctcgtccaatcgtcccccgctacgtggcagtccgcgcttctcagcaacgcgctgatctttttcttggggtctccgattttggtcagcgggttgtctctttccgggatcggtg

SEQ ID NO: 23673 - DNA, 72 bp, Glycine max
  Clone ID: 700909167H1
gggttttgttgttgctgtcaatggatttgagatggtgattgggatttgagccaacaataaaaatatgattcc

SEQ ID NO: 23674 - DNA, 241 bp, Glycine max
  Clone ID: 700909168H1
aatacctccactacttgaaaaaaggaggacttttttgccctcaaagccttttgttggtgacaatcggttccttttgccttttgtcaccttcggcttcctccctgttagtaaaattgatcataatccataaggaggacgaaaaaggacacagacaatccagatgtgacagaattaacacaaagcacaaagcattgtgttacatcaaatcaaaccatctgtgcccttacgatctttctgctac

SEQ ID NO: 23675 - DNA, 245 bp, Glycine max
  Clone ID: 700909169H1
agtgaaagagaatccgaggcgaagagaagagaaaaattaagatggaggggaaggagcaggatgtgtcgctgggagcgaacaagttcccggagagacatccgattgggacggcggcgcagagccaagacgacggcaaggactaccaggagccggcgccggcgccactggttgacccgacggagtttacgtcatggtccttttacagagcagggatagcagagtttgtggccacttttctgtttcta

SEQ ID NO: 23676 - DNA, 244 bp, Glycine max
  Clone ID: 700909171H1
ggaaaagtacttttttttttaaaaaaaattatcttatttgagtgtgatcgatggcatacccaaacccttatccggcgcaaccgtatccctccacctccgtgccgatgccggcggtgcccaccgccgtgatcggcccccagttctgtgcgccctacccgctggatctggcggtggtgaagaaggtgatgacgctctccgacggtaactttgtggtcaccgacgtcaacggcaacgtcgtcttcaa

SEQ ID NO: 23677 - DNA, 245 bp, Glycine max
  Clone ID: 700909174H1
caattcacaaccgaaacagtttccatctctctcacaaaatgacaacaatatcaaattgctcccttctcttcctcttcctcttcctctccaccctccacatagcttccaccctctcaacccccaccaacttcatcaagtcctcctgcagcaccacccagtacccagccctctgcatccagtccctctccgtctacgcctccaccatccagcaagacccccacgagctcgtccagacagccctctcc

SEQ ID NO: 23678 - DNA, 244 bp, Glycine max
  Clone ID: 700909175H1
caccgcagctatgtcagagatgcttggaaaccccgtgagcctgagaggcgccaccaggtctgctccatcaccgtctacacctgttactttcaagaccgttgcgcttttctccaagaagaaggcagcaccacctcctccaaagaaaaagcctgctgctgtatcccccgccaatgaggaactcgccaagtggtatggtcctgacagaaggatcttcttgcctgagggtctcttggaccgatcagag

SEQ ID NO: 23679 - DNA, 242 bp, Glycine max
  Clone ID: 700909177H1
gaggaatcctgcaagaatccaaaggaagacatgaagacaaaaatttcaagagtttatatgaggacagaagcatctgatacaagccttattgtgaaagatggatatcaatggaggaaatatggacaaaaggtgaccagagataacccttctccaagagcatatttcaagtgctcttttgctccaagctgcccggtcaaaaagaaggtgcaaagaagtgtggatgatcaatctgttctggttgc

SEQ ID NO: 23680 - DNA, 234 bp, Glycine max
  Clone ID: 700909179H1
gatgctatcaatattgcagtaagatgcaaggttcctatacaagtcaacaagtacttggcatacagtgatggtatgagagtaattgaatcaggcaaattgtcaacacagttccctggtatggatggccgaatattcactgaaatggacgggccaagtggtcaaccttgtgccgagaccacggagtttaatcttttacacaatatgttgaaagctgttgttgaagaacgctatgaa

SEQ ID NO: 23681 - DNA, 241 bp, Glycine max
  Clone ID: 700909181H1
ggcatggcactctgctggaacctttgacaagggcacgaagaccggtggacccttcggaaccatcaagcaccctgccgaactggctcacagcgctaacaacggtcttgacatcgctgttaggcttttggagccactcaaggcggagttccctattttgagctacgccgatttctaccagttggctggcgttgttgccgttgaggtcacgggtggacctgaagttccattccaccctggaaga

SEQ ID NO: 23682 - DNA, 238 bp, Glycine max
  Clone ID: 700909182H1
agcagccatcagctgcaacctcaagtgagaagtcactggagttgtctgtcccagaaaatgaaggatgggcaacatttgatatgcctcagcacacatctactgcacaagtagaaattcaaccagcagtacaggaaaaatttgatccatttttgaacttaaatgcaaatacgctatggccatgttttgaaacttctagtgctagcgctctttcttcagttacatctaatttatggcgtga

SEQ ID NO: 23683 - DNA, 242 bp, Glycine max
  Clone ID: 700909184H1
ccgccgccgtatatcgtagaatcttctcctactgcctccccgccacctccagctccaccggccgcctctccttcggcaccaccaccacttcctacgtcaagtacacccccttctccaccatctcccgcggctcctccttctacggcctcgacatcaccggcatctccgtgggcggcgccaaactcccagtctcctcctccaccttctccaccggcggtgcaatcatcgactccggcaccgtg

SEQ ID NO: 23684 - DNA, 241 bp, Glycine max
  Clone ID: 700909139H1
ggaagaggaagaagaagatgatcaacaacaacaacaacaacaagcaacacagcaacaccaactgaaacatcatcatcagaatcatcatcatcatctacgaccctaaattttttcactttctctctctctctctctctctctccctccctctctctgtctgtgtctgtgtctgtgtctgtgtcttttttttttttttttttaagtggggggaggggggggacataaagaatttgaaggaaac

SEQ ID NO: 23685 - DNA, 244 bp, Glycine max
  Clone ID: 700909185H1
ctaggcaggtcgattgacataacacccgaatccaagtgaaccgaaaaacactcatcatcatggattcagttgcattaaatggcaaaagcaatgataagcctcttcacgttgccatgctcccatggctggccactgggtcacatatacccttacttcgaagtcgccaagattcttgctcaaaagggtcactttgttaccttcataaacagccccaaaaacattgaccgcatgcccaaaaccccga

SEQ ID NO: 23686 - DNA, 251 bp, Glycine max
  Clone ID: 700909101H1
gaaatacttgctgaaattagagatgcggttttttcatttattcgtaaaatggaacctaggcgattaatggataccatgcttgtttcccgtgttagaatcttgtatataagatctttgcttgctagatcaccagagttgcaatccattaaggtattgccagttgagtgcttcttgaaaaggccaacactggacccagtagaagttccagccgagcaagcagtcctggaagatcttccatgcaatatgttgat

SEQ ID NO: 23687 - DNA, 250 bp, Glycine max
  Clone ID: 700909102H1
cgagaaaagcagcatactgagatactacgtatactacgtagtactacacatttcatttgcctcttgtagtagccatggttttccaaacaaacattaatcctcacttcgtattgtttcctctcatggctcaaggccacatgatccccatgatggacattgcaagactattggcacggcgtggtgtgattgtttccatattcaccaccccaaaaaatgcatcacgattcaattctgttctttctcgtgatgt

SEQ ID NO: 23688 - DNA, 253 bp, Glycine max
  Clone ID: 700909105H1
ctcaatctgggatacgaagcttgcaatagctgcagcatctgaataggaatggattatatctgtctttttgtcaccttcactgcgattgcgctcttagggtttgtctttgtagtgttttttgaagcatataaaagaagaaacaaccatcagcatatcgaagttccggctatttttgaagatcctagctcattgaaacaggttccttgcccacatattgttgatccagccacaaagtatatttctttgattatcc

SEQ ID NO: 23689 - DNA, 250 bp, Glycine max
  Clone ID: 700909106H1
gcttgttttcattgcatgatcaaccgccgagaaggcagacccttgatcagattggatctggtgtgaacagtgttgcaatgagtgatcgctctgagttggtaattggtcgaccagaggcagtatatttttatgaagttgatgggcgtggtccttgttgggcttttgagggagagaagaaattgcttggatggttccgtggataccttttgtgtgttattgcagatcaaagaacaggcaagcatactttcaa

SEQ ID NO: 23690 - DNA, 253 bp, Glycine max
  Clone ID: 700909107H1
gcattgactcatctttttgatttggatcaccatggaacataaattagcaacaactgaaggacaacccataagatgtaaagcggcggtttgtcgcaaagctggtgagccactgggtattgaggagatcatggtggcgccaccaatgcctggtgaagctcgcattcgtattatatgctcctctctctgtcgaactgatatcagtttccggaacatgcaggggcctccggcgaatttcccaacaattctgggtcat

SEQ ID NO: 23691 - DNA, 253 bp, Glycine max
  Clone ID: 700909108H1
acgattgttgcaattgtggttccaattacggtcgctgtgcttatatttatagtcggaatgtgtttcttgagtagaagagcaaggacgaagcagcagggttctgtaaaggaaggaaaaactgcgtatgacatccccaccgtggactccttgcaattcgatttcagcacaattgaagcggccacaaacaagttctctgccgataacaagttgggggaaggtggatttggtgaggtttacaagggcactctttcaa

SEQ ID NO: 23692 - DNA, 251 bp, Glycine max
  Clone ID: 700909110H1
gaacgaatcgaaaaaagaaagatcatggcgatggcaaacttggctcgacggaagggttacgccgtcgttttgtcgtcgaggtcgtcgctttgtctgacaaggtggagggggttcgcgtccggatctgacgaaaacgacgtcgtggtcatcggcggcggtcccggcggctacgtggcggccattaaagcggcgcactgggtctgaaaaccacttgcatcgaaaaacgtggcactctcggcgtcacctgcctc

SEQ ID NO: 23693 - DNA, 250 bp, Glycine max
  Clone ID: 700909111H1
tgagggctaataaagatgttttcgagagtatgaggaaaaacccaaaagtaaaatatgatggggaaagattctcttacaagtcgaagcatgccgttagggacaaaaatcagctgcttttcctggtacgtaagtttccagagggcattgctgtggttgacctaaaagattcttacccaaatgtgatggaagacttgcaggctttgaaagctgcaagggagatttggctgttatccaactttgactctcaaga

SEQ ID NO: 23694 - DNA, 250 bp, Glycine max
  Clone ID: 700909112H1
cgctcttcgttatcttttctcagactccgcggcgtagatccgaggagttcgggaaatcctaactcatcatctcaactcaagtcatggctggacttgcacctgagggatcacagttcgatgctcgtcactatgattctaaaatgagtgacttactttcatctgatggacaggacttcttcacatcctatgacgaggtttatgatagttttgacgctatgggtttgcaggaaaatcttctcaggggaattta

SEQ ID NO: 23695 - DNA, 249 bp, Glycine max
  Clone ID: 700909113H1
tttctctttctgctttgctagttcatgtcatggcgtttctgaaccctttctctctccacattcccatgtccttgttgctcttcctcctcttctttttttgcttctgcaaagccagtactactactaccacctctactacaacaaagtcactgtccccttcttcttcaccctccaccactacttcctcctctgatgttcaacttctcttgggaaagatcaaagcttcactgcaaggtagtaactctgaca

SEQ ID NO: 23696 - DNA, 250 bp, Glycine max
  Clone ID: 700909114H1
tactcctaacagtaatagcagagagagagagagagaggcttaagacagagcactgtctgagtgaaacatccattctcttcctcctcctcgtgattcccgaacattctcttcttattcccagctccacgcgcgcgactccatattctcaccactcgcgccattcttcttcttcctccattagggttttctcacattgctgaatgtagcttcgctctcacattgacccttgaaaccacaatgtccggcccgc

SEQ ID NO: 23697 - DNA, 251 bp, Glycine max
  Clone ID: 700909116H1
caaatggcttcagcttctgttcccatggcgttgtcactgagctctgttaccaacaacaacaagccttcatccgaagccttcttcaggccactacccctacgccaaccaaagaggaccctcttcaccacgaaggcagtgtcaaactccaagcctcaaatcaatgcagctttgaaggagaaggcagttgccggactcacagcagcttctgtgacagcatctatggtggttccggaggtggctcatgctgctgg

SEQ ID NO: 23698 - DNA, 248 bp, Glycine max
  Clone ID: 700909118H1
ctcgagccgacgaaagtgtttagctttctctgacttacatcatcacttgctcgctgtgatactatctaacaaattcttcatttcattgttcatacacactcgcacctaactccgccatggcttctcttcccaccactttcgctataaccaaatctgcatcctccataaacaaggtggaccactctctggtcaagatcaaaccatacaacttctctctcaatctaaatcgtcaagggaccatgcaaaca

SEQ ID NO: 23699 - DNA, 250 bp, Glycine max
  Clone ID: 700909119H1
ggctcgaaacatcgctacccgaagcatacttgtgaaggggatgtatgagctgtagggtgaagggagtagctatgaggagttgaaggagtctgtgttgaattaccctgatgaaaggaagttgccgtacttggattctgatagcactttcaagataaccgttgattgcattgggaaggtcattagcttggaggagcaaaaggagctcattcaagggctctcttatatccctgtcaagggccgagtaaagttg

SEQ ID NO: 23700 - DNA, 247 bp, Glycine max
  Clone ID: 700909120H1
caaaaagcagggaaaaaagcaaaatgactctggtttgaaaaaagctgtcttgttaagtggaactcctggtataggaaaaacaacttcagcaaagttggtctgccaggagcttggtttccaagccatagaggtaaatgctagtgacagccgtggaaaagctgatagcaaaattgaaaaaggaattagtggaagcaaaacaaattccgttaaggaacttgtaaccaacgaggccattagtgttaatatg

SEQ ID NO: 23701 - DNA, 253 bp, Glycine max
  Clone ID: 700909122H1
cagccatcactaatcagcactagcgacagccatgggagaggtagacacagctttcatccaagaaccagaacacaggccaaagctctctcccaaccaagcagaaggaattcccataattgacctctctccaataaccaaccacgcagtttcagatccatctgccattgaaaacttagtgaaggagatagaaagtgcatgcaaggagtggggtttcttccaagtaaccaaccatggggtgcccctcgctctaagg

SEQ ID NO: 23702 - DNA, 252 bp, Glycine max
  Clone ID: 700909123H1
caaatccattctcacgtcacggcacggcacagcagcattcaaccttgtactcaaatccaagtaacgatcattacagacagttaccaccttaacatgcaatatcatctctgtctaaagcaaaagctgccatttctcactctctcagtccatcatattcgcccattcgggtgtaacagatagataaaaaaaggtattttggtaaaagggaggaggaggaggagaaaaaattattcgtccaagtttcaagtaatc

SEQ ID NO: 23703 - DNA, 251 bp, Glycine max
  Clone ID: 700909125H1
aattcgcagagcaactcaacacaacgaaccaaaccaacaatgtcgcagccgcagcctcagtcgcagccgcaacacgggccagcggcgctggagcaggtgcagtgcttcggtcgcaagaagacggcggtggccgtgacctactgcaagcgcgggcgcggcctcatcaagatcaacggctgccccatcgagctcgtcgagccggagatcctccgctttaaggccttcgagcccatcctcctgttgggaaagag

SEQ ID NO: 23704 - DNA, 251 bp, Glycine max
  Clone ID: 700909126H1
gcatcctaatctcgctcagattttctccagaaaagggaaaataaataaaaaaagagaataataataataccttttgtaattcgcaaaacgtgatcgacgctggcgcaaattgaaattaggaattagggttagggttttcattatcttcgcccggaaaagaaaggggggaagaagaaagaaccgttcctttatgatcgaaaaggtgcctttggtcatcatcgcggtgttaatcttggtggtgcaatcctctg

SEQ ID NO: 23705 - DNA, 250 bp, Glycine max
  Clone ID: 700909127H1
ccatcacagtcattcagacagtgcacctacaaggagtttagtttcatttgctcaagattataggaaactggcaattgattgccttaaggttttacgcatagagatgcaattggagacagtattccatatgcaggaaatggcaaatacagaatacttggatgaccaagatgctgaagagccggatgacttcatcatttcgctcactgcacagataacacgaagagatgaggaaatggctccttttatttca

SEQ ID NO: 23706 - DNA, 251 bp, Glycine max
  Clone ID: 700909129H1
ccgccgccgtatatcgtaaaatcttctcctactgcctccccgccacctccagctccaccggccgcctctccttcggcaccaccaccacttcctacgtcaagtacacccccttctccaccatctcccgcggctcctccttctacggcctcgacatcaccggcatctccgtgggcggcgccaaactcccagtctcctcctccaccttctccaccggcggtgcaatcatcgactccggcaccgtgatcacccgc

SEQ ID NO: 23707 - DNA, 250 bp, Glycine max
  Clone ID: 700909131H1
gtttatcgcgttaagcaaaaaacccaatcaaaattcaaagtctctttgtttaccttgtttccctcattgctttgctcacattcaatttcgaaggcgtagagtgagatccgaacgatgaagagagtattcggcgtcaagaagaacaaggatccacccccttccattcaggatgcttccgaaaggattacaaaacgaggtgacacggtggatgacaagattaagaagcttgatgccgagcttagtagatata

SEQ ID NO: 23708 - DNA, 215 bp, Glycine max
  Clone ID: 700909133H1
gaagatgctcttgctgtatgcgtcacctttatgatgataacaaggatcctagtctttggttagtatgcacatctgaatttgctcaagggggggactcctgtgggttgtcttgccatattgaatgtgcccttcagcatgcaaaggtgggagtccttgatcatgggcaactgatgcggctagctcgtggctctggatgtgcatcatgcggtaaagtt

SEQ ID NO: 23709 - DNA, 249 bp, Glycine max
  Clone ID: 700909136H1
gtggagtaaaagagaacatctttccaggtgttggaaaacctggtggaaaattcattgccttatctcaagtatagctataaaaagtacagggttcgacacaagaagaatgataaaggagaagcaagagaaaagttccagtttagttctagagtagagacagaatacctgaagccctcttactctgctagcattggtgaggagcttgaagatgggctatttgatgatttcttagaattggccttgcagttt

SEQ ID NO: 23710 - DNA, 249 bp, Glycine max
  Clone ID: 700909138H1
aaagaaacaggctttatttgagcactttgggactctcaattctcagggttaccttctctatcagcttctgcagattagctggaagaaataaagaaagaaaaagataacaaaagttgttcaaaggccatggatgttgcacattttttgtttggaatctttgggaatgcttccgctctgttcctcttcttggctccagtgatcacattcaagaggattataaagaacagatccacagagaagttctcgggc

SEQ ID NO: 23711 - DNA, 244 bp, Glycine max
  Clone ID: 700909096H1
cacaacactattcttcttcgcagcaatggcgctagtggatctggacgggaaccccatgaaggcacttacgatctgcatgatcggcgctggcggcttcataggctcgcatctctgcgagaagctcatgtccgaaacccctcacaccgtcctcgccctcgacgtctacaacgacaagatcaaacacctcctcgaaccctccgattccccctgggccggccgcatcaccttccaccgcctcaacatc

SEQ ID NO: 23712 - DNA, 263 bp, Glycine max
  Clone ID: 700909066H1
ctgcttagtggttggttaactctatcaaccccaaatgctattgattccaccatttccattcactacccaaatgctcttcacagattccctatttctctcttcttcaactttctcaggtattcgaagaaagaattctgggtgtattgaaagtttgaatcttttaagcctctaaatttcctccatacatttacctgcatttccaaattttgaagtttggatacggtaataatcaaaatggcctcttgcgtgtcaacaatttgtgc

SEQ ID NO: 23713 - DNA, 263 bp, Glycine max
  Clone ID: 700909067H1
accgcggctatgtcagaaatccttggaaaccccgttaacctcagatgcgcaaccaggtctgctccatcaccaactacacctgccaccttcaagaccgtcgcacttttctccaagaagaagccagctccacctccaaagaaaaagcctgccgctgtatcccccgccaatgaggaactcgccaagtggtatggtcctgacagaaggatcttcttgcctgagggtctcttggaccgatctgagatccccgagtacttgaccggaga

SEQ ID NO: 23714 - DNA, 263 bp, Glycine max
  Clone ID: 700909068H1
atcaagatctctctctctgtaatcgaaaatgagcaagggaccgggtctctttaccgatatcggcaaaaaatccaaagatcttttgactaaggactacaactccgatcagaaactcaccatttcctcatacagcatctccggagtggccctcacttcaacatctgtcaagaaaggaggactctccactggggatgtggcagcactgtacaagtataagaacactattattgatgttaaactggacaccgcatcaactatctcca

SEQ ID NO: 23715 - DNA, 258 bp, Glycine max
  Clone ID: 700909069H1
gcagaggactaaaggtccagtgacccctgtaagggacactaatggaggcactgaacgcaggctcttgcaatatgctgcaatgttcatgtcaataaggccacatgaccaccttgaatgaaaactggtgtgtccatgatttttcttattgttgttggttattgatcctcaataaaattgtatttcaaatccattagacctgttgagcgtgaaatgtattaaaaaaaaaaaaacaacaaagtgagtacgagtaattgaaaa

SEQ ID NO: 23716 - DNA, 255 bp, Glycine max
  Clone ID: 700909070H1
ctttgatgacaaagggaatggtggcaaggagtggcggaaggccctcgagacggcggagtcacggtggaccaccgccacgacgtcgttgctgccgaagaggatgacaagccaaggaaaaagggtggtgaggtaattatcaatgagggctttgacttgaacgccgtcgcgccggaagccgcagagggcggtggcgcgtagagttaattgattggcgtctgggacgcacgcgctgtcggtataaccaccgtaagattg

SEQ ID NO: 23717 - DNA, 252 bp, Glycine max
  Clone ID: 700909071H1
gtgtctttcaaacccaaaaatcctcacttgggtctcaatccgaaagcgataggccacaaaagagggcctttacttccttacatactctcacttgcttgtggttccttggtcgttcatatttttgatatttcttcttcttcttcttcttcgttttgttcagtttctttcatggcgatctcggagaacgtgtcacctttgaagctgttgttatgttccaattgggttccacttgtggtttttgcctttgcttga

SEQ ID NO: 23718 - DNA, 251 bp, Glycine max
  Clone ID: 700909072H1
gagagtagtagagtaacgcaacccattccatttccctctaaaatggcgtcaagtaaaatgagggtcgaggagctgcgaacggagctcctccaccgtggactctccaccaccggaaccaaacccactctggtccgtaggcttgaagccgctcttcgtaaacaaacgacgagtgacggtggtgcttgttctcctcgtaggactagaaagagaacaacggattcgaaccactccgaagaaatcgaggttgcaga

SEQ ID NO: 23719 - DNA, 245 bp, Glycine max
  Clone ID: 700909073H1
aagaaagccccgaaagttgaaactgctcctgctaaagagaagcccaaaacacctcctgccactctgaagtctcccactgagccccagcttcctcctaaagagagagacagacgagttcctatgacaaggcttcggaaacgagttgctacacggctgaaagattcccaaaacacatttgctatgctgactaccttcaatgaagttgatatgactaatttgatgaagctccgttctgattataagga

SEQ ID NO: 23720 - DNA, 135 bp, Glycine max
  Clone ID: 700909074H1
gcgattgcgactctctcttcctacgataaccgtttcctctcgccggaaaaccgacattgatctctctctccggcgatccccgcccatccctccgccatgagttccggctgagctcctgccacatgactagcccca

SEQ ID NO: 23721 - DNA, 244 bp, Glycine max
  Clone ID: 700909077H1
attcaatttcaccctcctttttcatttttcattaatttagaatacaatgatgaagtatggcttacgtgcgtcattacgtttttcaattaaagtaaatttgatctcccctgagttgcctttctattaatttaacattccattagggcgtatagcccccacaaagtggaattctggattagaaaccaggataatgagatttgatggcactactttgcaatttcaaccttcatctattgcagtagtc

SEQ ID NO: 23722 - DNA, 245 bp, Glycine max
  Clone ID: 700909079H1
ggcaaacggacggcgggcgcacgcgtcgcttctagcccggattctgacttagaggcgttcagtcataatccaacgcacggtagcttcgcgccactggcttttcaaccaagcgcgatgaccaattgtgcgaatcaacggttcctctcgtactaggttgaattactattgcgacactgtcatcagtagggtaaaactaacctgtctcacgacggtctaaccccagctcacgttccctattggtgggt

SEQ ID NO: 23723 - DNA, 247 bp, Glycine max
  Clone ID: 700909080H1
caaggaagtcccctaatcagaaccagagatggacaccaaacccaccgagatcagcagcggcaagatgttcggaggttacaacaagagattcaagcatttcagccttaccctgggatgctccatgaacttccacatctacttccctccatctccttctccctctcacaaattccctgtgctgtactttctctctggcctcacttgcaccgacgagaacttcatattcaagtcgggtgctcagcgtgcc

SEQ ID NO: 23724 - DNA, 255 bp, Glycine max
  Clone ID: 700909081H1
acgctcaggcggttttgcgacagcatcttctgttggcgtatgttgaggagattggacgtgatgctaggcgtggtgtagaggggagggctaggatgaagttcggcgccttaggagcttgtgccttggctggtacagggcttcctattgatcgattcatgacttctgaagcgttaggatttacggctcccttgatgaatagtatagatgcagtttcagaccgagatttggtgctggagtttctttctgctaatgcca

SEQ ID NO: 23725 - DNA, 260 bp, Glycine max
  Clone ID: 700909083H1
ggttatcatttctccatttccattttctctctcacttttcaagaatcgtaagctatgggaaagtcttacccaactgtgagtgctgattaccagaaggccgttgagaaggcgaagaagaagctcagaggcttcatcgctgagaagagatgcgctcctctaatgctccgtttggcatggcactctgctggaacctttgacaagggcacgaagaccggtggacccttcggaaccatcaagcaccctgccgaactggctcacag

SEQ ID NO: 23726 - DNA, 259 bp, Glycine max
  Clone ID: 700909084H1
gaaagaatcagaaaagtcttgccctcatctttacatttatcaacacttagatcttttcatgcttctggagattatgggaatatggttagagaccccgtctctaacatattgcggtcttactttcaaatgttgccatgggagacacagaaactaaatctgattctgagctccacaccatcattcatttcctctgtttcaggcatagctgaaggtgctcgattgctgctttcccaaacatatcatggtgatagagttattg

SEQ ID NO: 23727 - DNA, 248 bp, Glycine max
  Clone ID: 700909086H1
ctcactcaccgccgggatgtcgccggagtccggagcacacgctcctctcctccagggatccgtcgatgttcctccggcaactgtgtccggtgccgtgttcaatgtcgccaccagtataatcggcgccggagtactgtctcttccggcgattctcaaggtcctcggcgtgattccggcgttggtgctgattctcgtgattgcgtgtcttgccgaactatcggtggagttcctcatgacgttcacgcgtg

SEQ ID NO: 23728 - DNA, 251 bp, Glycine max
  Clone ID: 700909087H1
caacatgataaacatggacgacacatgcgaacttgttgccaacaataatgttggttttccaactgatgcagctaataacggtatccataaaccttctttgttgggtgccaataagaccacccttggccaccacgttgcacggcgtctagttgaaatcggtatcaaagacgtattcaccgtccctggagatttcaaccttatccttcttgattacttagtagcggaacctgagcttaacctcataggttgct

SEQ ID NO: 23729 - DNA, 249 bp, Glycine max
  Clone ID: 700909088H1
tagctgataggatcaagcagcaacttgaggcaggtcaatttgttgatgcaacttactcatgggctgatcttgagaatgagattgtcgctagcagcaacaatgtggatttctataattttctacaagattcaaaaagtgattcggacaccttaaacgcaatggagctgggattattcaaagaagtatcaatgatgcgatactccaagtatcttagttcaaagacttcatatcttggcagtgaggatgatg

SEQ ID NO: 23730 - DNA, 246 bp, Glycine max
  Clone ID: 700909089H1
cggaaacaaacatgtcgtggtgttactgcgctaagcctatgactttgcagttgccgttgcaaccaagagcatcatcatcattccattcccacgttggaggagtaacagtaacatcctcaacactgtctcttcgactctcttctactcttgttttcacccacaacctccacttccaacccaaactcaaacgcgcttccacaaccgttcgatgctcctcggcattgactcctcaattgaagtctacct

SEQ ID NO: 23731 - DNA, 216 bp, Glycine max
  Clone ID: 700909090H1
gtttgtgggaacattatggagcccagattcgtaatctccgcatcggaggccgaatcccaatcaatctccaaactcctcccttccctcgtttcctcttctcagtccctcgcccgtccttccatctccaactttcccctcgccgccgtcggactcgccgcctccggccgcatcttcgtgggtctgaacgtggagttccccggcctccccttccacaca

SEQ ID NO: 23732 - DNA, 243 bp, Glycine max
  Clone ID: 700909091H1
gtcaccaccgctcaccattcactctctttttacccctaaaccattgaatcgatctaaatctctcccaaatcgcaaaccccttttgctcaattgagtcaattctctccctaagttcctctgtcggcgtctgggtgggtaaaagttgttgttttgtcttctgggttttggagcaaagacaaaagatgggtgagggagaacgtttccagcttgggactgtgggtgcgttgactctttctgtggtct

SEQ ID NO: 23733 - DNA, 243 bp, Glycine max
  Clone ID: 700909092H1
ggtggggtgaggtaagcaaaacccacccctgacccgtcccgttgccatgcctactaagggtgcaaggtcgaggaaagactattgaaattgaaaggaaaacaatagtattattaatttatttatcagtcattcactttgttattacaaaggttatattgtgtatatttatacacataactctaatggtcataaacataattatgaaagcagaattatgtacttaatggtggtatatttggtttg

SEQ ID NO: 23734 - DNA, 244 bp, Glycine max
  Clone ID: 700909093H1
aaaatcggcactcatgagttattattagggtttgcaacctttaaactctgaagctgcaatagtacagcacagaatggggcgcaaagagaagcagaacgcgaaggcaatagatgaggaacacgacgtagtaaattttaacggcgcttcaacgccgtccctcgttttcagcagcgacgacgatgaagccaaccaagatctcagcctcaagatcgtcgaaaaggccatgcgaatccgcgccgccaaa

SEQ ID NO: 23735 - DNA, 256 bp, Glycine max
  Clone ID: 700909094H1
ggaattctgctcgagataaggcaatgaatctgatgcaggcggttcgctacgacgcctacgggggaggtcctgccggcctcaagcacgttgaagttgccgttcccagtccaaaggcaaatgaggttttaatcaaactggaagcagttagcattaaccctattgattggaagattcagaagggtcttctccgtcctttatttctccccagaacctttccccacataccgtggacatatgtggctggagaaatagttga

SEQ ID NO: 23736 - DNA, 242 bp, Glycine max
  Clone ID: 700909095H1
tcatgaacctttttttccttccttttttttattcaataattaacggtgtgagctacacagtatatgaataggcaatttctttctttctgtaaatctcctacccagttttctcctaatgaaaattaatcttgacttagaaattgaagtatatttagtattcaatcatttaacttctcttaatctttgaccttcttctttggaaggagctagtaccatgcatggttgtctactttgtcttctat

SEQ ID NO: 23737 - DNA, 260 bp, Glycine max
  Clone ID: 700909065H1
gaacaactttacagcaccagttggagcacgatccagcactacagtttgcgcagttgctgagcctgataggcctctgtggttcccaggcagcacccctcctccatggctagatggcagtttgccaggagattttggctttgatcctctaggtcttgcatctgatcctgagagcctgagatggaatgtccaagcagagcttgtgcactgcagatgggccatgttgggagctgctggcatgttcatcccagaattcctcacaa

SEQ ID NO: 23738 - DNA, 254 bp, Glycine max
  Clone ID: 700909014H1
ttaaacccttcaaattttccaccgcaaaactgtttcatagcatgccaccaccgtttccacacacctatctatacagcttctaaatttctctcctttccttgggggaactgctcggttactgaaaccatcatctgggtcgcgaagattttttggaaaaaaaaagaaagtttaataatctccgatggcttcggctgctatcttctcgtcgctacggcggcgccggtcgccgtcgctggaggcgtttctggcgccgg

SEQ ID NO: 23739 - DNA, 253 bp, Glycine max
  Clone ID: 700909016H1
gtgtgattctacactaacaaggctctaaaattatgaacaaattcagcaaatccgtagtgctttaagaataattgctgaattgtgtcaccgtttaagtcacatagtattgtgctgtgcttgagccttaaggtcctgtgttgtatgtatttgcttttatctgcctttatgacgcgatcatgtgaaagtacgatgtaataactgctcacctgagtactgttgttggtgttttggggtatgatgtatcataatgctt

SEQ ID NO: 23740 - DNA, 270 bp, Glycine max
  Clone ID: 700909019H1
aaaatgggaggttctcgactatccaagccaaagtctggctccgcttccggcagcacaaactgtttcatgctgtatgcgagagcactctcaattacctggggagacactccagaatattggatatgggtacaacagaaagaaacaagtggcacgatagtagagttggctaagttgaaaagggtttgctggctagaagtgcatggaaaatttgacacaagaaagctttcactaggaattctatatcaagtgtcatttctaattatgttggaa

SEQ ID NO: 23741 - DNA, 264 bp, Glycine max
  Clone ID: 700909020H1
gagtgagtgagtgagagaaggagattctgatttgatctcgccttaatctctcagatctgagcttgccgtcgtcggaatccaactcaatctgggtcggattcttaggtatcaccgctccactattagtttaagcctctcaataaaaggtttttatttcgcttcaaattcgaggtttgatttgaagttggaatagcttaactgttgtgtaaaacagccagcacacacaagcatgggaagccaagacaacaacgtagcattgtcatc

SEQ ID NO: 23742 - DNA, 201 bp, Glycine max
  Clone ID: 700909021H1
tacaaccaccacaatcgctcctctactcttctgtacctgtgcttgtctcatcttcttctccgcttcattgtcagaagcaacagtagttggttatggctacaccatctcaactgtcaacaattatcccataaagaattctttgactgcaaaccttaacctcatcaaatcctcctctgtttccggacccgacattccacacct

SEQ ID NO: 23743 - DNA, 258 bp, Glycine max
  Clone ID: 700909023H1
ggctttgatttcgcttccgaagcgacaagcagcacccactctctcttctcggaccttccaaacatggaacgcatcgttggcggcaagtacaagctcgggcgcaagatcggaagtggatccttcggcgaaatctacctcgcgacgcatattgataccttcgagatcgtcgccgtcaagatcgagaatagtaaaacaaaacatccccaactgctttacgaggcaaagctctacaatattcttcaaggaggaagtggcatt

SEQ ID NO: 23744 - DNA, 225 bp, Glycine max
  Clone ID: 700909024H1
caggttgttcaccagtttgagttgttggatctcctccactgcttcttctcctgatcctgttctgtttcaaatttcaacccaaggagcttgggaacaaactcctgctccttcttctccttggtcatagaggcaccatttttggtttattgataggcaatgggaggtgcactgggaaagagtgaatcacctagaaagggatcgatgccagaaactaagctcgaggct

SEQ ID NO: 23745 - DNA, 253 bp, Glycine max
  Clone ID: 700909026H1
gctgaacgtaataatgcaattttggaacgagataatgcaattgcaactcttcagtatcgcgaaacctctttaagtagtggcagtatgccatcatgccctccaggatgccaaatttcacgtggtgtgaagcatatacatcatccccagcaacaggtacaccatatacctaacatgggtgatgcctcttacagcacacgggaaatgcacacaaccgatgccctccctgcagcccccatcccttctgaggccggga

SEQ ID NO: 23746 - DNA, 252 bp, Glycine max
  unsure (1)..(252): unsure at all n locations
  Clone ID: 700909028H1
gaaaaaacgcacagctccagcgcagaggagcaggatccgacccggcgccacctggatcccccacccgggttaactgctgaagagttcgaggacctcaaaccctccgtgctggagcaccacacctactctgtcacacccacccgccaaagctcctccctcctcgcgcaggcnatccacgcgccaccacacgcggtgtggtccgtcgtgcgctgcttcgacaacccacaggcctacaagcacttcatcaagagc

SEQ ID NO: 23747 - DNA, 249 bp, Glycine max
  Clone ID: 700909029H1
cggctcgagataaatagttgctcagatccgtgttactctccccagacccaattgcgtcaaattcacgatgatcaccatcatgatggtcgccgacaccgtcgccgtaaccgccgccaaaggcctcggcgtccttcgggcctatcaatccacctgtaacttttccgtcgccgatcagatctccgccatgattcagacttacgacgccgtcgcgccgccgccggtcaagcctactacctacaggctaagacg

SEQ ID NO: 23748 - DNA, 252 bp, Glycine max
  Clone ID: 700909031H1
aagaagaagaacaacaacaaagagatagagagagaaatagagggagagagagagagagagaaaagggtacattttgatgtttgttaaccatagaggcaaaacccaaaaagcatcttcttcatcttgatcaaagtccaaacctttgtacccttttgtgtatccctcccatttttgtgtcacaacacaatccttaaccacacaaaatccctcccatttgtgtgcaagagggtatttccctctatttgttggggg

SEQ ID NO: 23749 - DNA, 253 bp, Glycine max
  Clone ID: 700909032H1
ggaattgttgtaactttttgattcctagattctctaaaattcgaaattctaatgtcgttaggggaaagagattgtttgtgtgtgagtgagtatggctggaaaaggcgagggtcctgctatcggaatcgatttgggaacgacgtactcttgcgtcggcgtgtggcaacacgatcgtgttgaaatcatagccaacgatcagggtaacagaactaccccatcctacgtggctttcaccgagcacagaacggttgat

SEQ ID NO: 23750 - DNA, 273 bp, Glycine max
  Clone ID: 700909034H1
gagtgaagatggggtcagaggtgtctaaacagatggagcgaagaaagacaatccagacagagaagaagagtctgtccgatctgaaaagcagcggagaagactaccctggctccgactaccgtccccaagacagaaaaaactggatgtcccatctcgaccctcagaaactccgcatcaaccaaatcgtctggcccggcacccacgactccgcaaccaacaaaattggcatccctctcctcactcgccccttcgcccagtgccaatccctctcca

SEQ ID NO: 23751 - DNA, 258 bp, Glycine max
  Clone ID: 700909039H1
tggttgacaatgcatgatgccccatcatctgctccacctgctggaagtcagcaaaatggggtgaatgttgctgagttaatagttggccgtggctttggaactgtcattagacatcgtgactttgaagagagatctaactattatgatgctcttcttgctgctgaatcacgtgcaatttctggaaggaaaggcacccactctgccaaggatcctccagtgatgcatataactgatttgaccacggcatcggctaagaaa

SEQ ID NO: 23752 - DNA, 248 bp, Glycine max
  Clone ID: 700909043H1
ctccttttagcaagttaacaacacttttgtcttcgttccattatctagttctcaattctcttcaccctttgcctctgaaagaaatgggtagtcttgaagcggaaagaacaacagtaggattggcagcaagagacccttcagggattctctccccatacacctacaatctaagaaacacaggccctgatgatgtttacattaaagttcactactgtggaatttgccattctgatctccaccagattaaa

SEQ ID NO: 23753 - DNA, 249 bp, Glycine max
  Clone ID: 700909044H1
gttcatctgcacttgtagtggaaaagcactttttcttaatttggtgatggaatatgttccagactcgatacatagactctggaacatattccatcaccaaattaagaaaaagttccagagtctatgtatcgagtctcaaagttctatagtaatactaatcagagcatgccacttatttatgtaaaactttacatgcgccagattttcagggggctggcttatatccacactgttcctggaggttgccac

SEQ ID NO: 23754 - DNA, 248 bp, Glycine max
  Clone ID: 700909046H1
cttttccgtgattggaatattggacaggccaagtccacagttgctgcttcagctgctgcagctataaatgctagttttaatattgaagctctacaaaatcgagttggtactgaaactgagaatgtgtttaatgataccttctgggaaaacttgagtgtcgttgtaaatgcactggacaatgttaatgcaagactatatgttgatcagagatgcttgtatttccaaaagcctcttcttgagtctggaac

SEQ ID NO: 23755 - DNA, 266 bp, Glycine max
  Clone ID: 700909050H1
ctcccctttgccgctgttgttgttgctgcaccaccgaacaacttcccctgtaaatcgcgtttcgtttgtgcaaggttttaaaagatggctgatgctgaggacattcaacctcttgttgttgataatggaactggaatggtcaaggctggttttgcaggtgatgatgctcctagggccgtgttccccagcattattgggagaccacgccatactggtgtaatggttgggatgggtcagaaggatgcttacgtgggtgatgaagccca

SEQ ID NO: 23756 - DNA, 264 bp, Glycine max
  Clone ID: 700909052H1
gcagcagggagctctgccgcctccaacaagacagagttcagaacacaaaccctcgaaccgaacgtttttgagggttgatagagcacgatggttcagtacaattttaagaagattaccgtggtgccaaatgggaaggatgtggtcgacattatcctctctcgcacccagcgtcagacaccaaccgttgtgcacaaaggatatgcgatttcacggctgcgccaattctacatgcgcaaagtgaagtatacgcagcagaattttcac

SEQ ID NO: 23757 - DNA, 261 bp, Glycine max
  Clone ID: 700909053H1
caaaaatgtcgaagttaatcttcgtgttccttgcactaattcctcttctctgcacctccttctcgccagagaaaccctcagatcggcgcatcctcgttttgctcgatgacttcgccatcaaatcctctcactctctcttcttcaactccctcaaatctcgcggcttcgatctccaattccacctcgccgacgaccccaaaattgcgctccagagatacggccagtacctctacgacgccctaattctcttttcccccacca

SEQ ID NO: 23758 - DNA, 251 bp, Glycine max
  Clone ID: 700909054H1
agggaccctaaattgcagtgggacctagagaggccgagcgagagagcgagggagcatggaggagggaaaatggagagagctgaagcaattcatagagatatgcaagtccaatccctcacttctccacaatccatctctgtgattcttcaagacttatcttctcagcctcggtgctcgcatccctccccaacccaaaacggaaccaggtgattttgatgacaagtcagatctcctttatccgcacaaaatga

SEQ ID NO: 23759 - DNA, 253 bp, Glycine max
  Clone ID: 700909056H1
catggcccgaaccgcccatacgtcgtcgtttgggtcgacccaagcaacaagctctcgacgcgcgtggacgaaagcggcgacactgacgcgaattgggaccaaacgctcacaattccgttgccaccaaagcctctcgaggatcaaacgttgtacatcgacgtggtccacgccggctcggaggaggacaccaagccgcttatcggctcggctcggctcaagctggtggacattctcgacgacgttggaatcggcg

SEQ ID NO: 23760 - DNA, 113 bp, Glycine max
  Clone ID: 700909060H1
aagtttttgagatgttgtcaccccgtcttctattgctatgcctaactcttccgttgtgtttggtgtccttcttcaaataccgtaaaaccttcaagaatccaccacttccacac

SEQ ID NO: 23761 - DNA, 245 bp, Glycine max
  Clone ID: 700909061H1
ttcagcttttccctcgttgaaatgaaaatgggttcttctttgtggactttgtgtctaattttggcttcactagcctcttctgcattctgtgcctttccacggaggccagtggatgttccattcggcagaaactacgttcccacttgggcttttgatcacatcaaatacttcaatggaggttctgagattcaacttcatcttgacaagtacactggtactggcttccagtccaaagggtcatactt

SEQ ID NO: 23762 - DNA, 243 bp, Glycine max
  Clone ID: 700909062H1
cgagcattcaccattttcttgtggtttggtttcctagagacactaagtactcccatggaacaaaacaactaaagccttgggtcttctaaattcttatgttgatgcccgctgatcaccttgatcagcatcattgttgctccacaagcgggagcagcacgagcattgttcgtgtatggcgattcgcttgtcgactacgggaacaacaatttcttggccaccacggcgcgtgccgattcatatcct

SEQ ID NO: 23763 - DNA, 253 bp, Glycine max
  Clone ID: 700909013H1
ttcgattctcttctctgcaactatgcctaaccctaaggtcttcttcgacatgaccatcggcggtcaacctgccggccgcatcgtgatggagctctacgccgacgtgactccgagcaccgccgagaacttccgcgcgctctgcaccggcgagaagggcgccgggcggagcggcaagcccctccactacaaaggctcgtccttccaccgcgtgatcccgaacttcatgtgccagggcggcgacttcaccgccgga

SEQ ID NO: 23764 - DNA, 252 bp, Glycine max
  Clone ID: 700908971H1
aaaaaagtctcctttatatctatttaaattgcatggattccattttttttatttataagaattaattcgattgtaaaaaaatcaagaattcttaagtaaattaagtaaattcagatttatataaaaaattcaaaattagtgtcattactattactgatcaatcaaaatatctatcaaaagtaaaaagcgaagagaagggaaaaactttaatttttttatggtaaaaaattcaattatacctgttatttcaca

SEQ ID NO: 23765 - DNA, 248 bp, Glycine max
  Clone ID: 700908976H1
tgatgatgcaacctctcaatgctacagcacacgcatttattgcacacttcatcagcttgaaactcgctgatcatacttgcaagcaagcccccatccaatagcaatgccacctcaaatcaactttttagcatctccaagtccttcactatttatttatgctctcattgcattgagtgcctcaagtgtgcctttggggtgattctgtagtgttggaaatataaaagaggagtgtggactttaaaagggta

SEQ ID NO: 23766 - DNA, 247 bp, Glycine max
  Clone ID: 700908977H1
tttttctagcttttgctttgcttagattctgttctgcagagagagagagagagagtttcagaatttagagagagaattttattttgttttttcggttatctttattggtttctcttacatcgtttttgtaggcgctgaggaagaagctttggcagcataactttgttggggagcataaaattcaggcaagcccttgaagttggagagtattagatgggaatcttagaattttctctttagaccaaag

SEQ ID NO: 23767 - DNA, 268 bp, Glycine max
  Clone ID: 700908980H1
cggtattcggcttgagatcaatttcgatattgtaattactcaataattctcatcatgggctccttgattgttccaggtgcacatgatcagaaactaaagcttgtttctcgaccctttgtatcaacgagtcacctcattcccgtagtagacatagttaggctctttgacattcatggtgttgatgtcaccataatcatcaccataggcagtgccgccattttgcagagctctatcgatcgcgaccgtgaccgcggccacgctattagaa

SEQ ID NO: 23768 - DNA, 253 bp, Glycine max
  Clone ID: 700908982H1
aaaaaccgctctcttctccaacgctgtctgtcaccttaaaaaacaaagttccacttcatcagattcacctaaaccacaccattcgcatcaacacagcacttgtttgttcccaactccgaaaaatatcatgctcctaacgtaatatcctcggtttccccgttcaaccgcgatctcaaaaaacaaaactatggcatcactctcaggcatttgctcctcttccccgactctcaaaaaattcccaaaccaatcccca

SEQ ID NO: 23769 - DNA, 249 bp, Glycine max
  Clone ID: 700908984H1
gagaaagatgtcgaagcgtggtcgtggtggttcggcggggaacaagttccgcatgtcgctgggtcttccagtggcggcgacggtgaactgcgccgacaacacgggggcgaagaacctctacatcatttcggtgaaagggatcaaaggccgtttgaaccgtcttccctcggcctgcgttggcgacatggtgatggccaccgtgaagaagggaaaacccgatctgaggaagaaggtcttgccagctgtcat

SEQ ID NO: 23770 - DNA, 248 bp, Glycine max
  Clone ID: 700908986H1
ccggttcctccgtctccaacggcggtgccgctccaaactcgacgcccaccgccaccaccatcgtcgtcgcagactcctccgatccgaagcggcggcgcctcgagccagtcgaggagaaaaagccgccgccgacgccggacgactcgcggcggctgtttcagcggctgtggaccgacgaggacgagatcgagctcttgcaaggcttcctagactacacctcgcagcgaggatcctcgcaccacaacgac

SEQ ID NO: 23771 - DNA, 249 bp, Glycine max
  Clone ID: 700908987H1
aaaaggccacctataagagggccgtatgaccaacgaggaagcaatgaacatttttgaggagatgccagactatcaatcatcaacgcaagcccaattgtgctatttataatatttttatcaatggatttgggaaagcaggcaacgttgatattgcttgtgatttgttcaaaaggatggttaaggaagggataaggcctgacttgaagtcttataccattcttgtagaatgtctgttcatgactggtagag

SEQ ID NO: 23772 - DNA, 250 bp, Glycine max
  Clone ID: 700908988H1
ttcatatcatatcaattagatttgttttcagagtgtgctagtgagataccatggacaactacaacagcaatgacttttggaaattcagtgaccagttgaggcttgaatctggtttggccaatctgtctctgaatgattattccatttggagcaacagctacagctccaagaggcctgatcagaggaggaactttgatgtcaagggcagtgatttcaacaactcatcaaagccttttgatgatgatttcaa

SEQ ID NO: 23773 - DNA, 259 bp, Glycine max
  Clone ID: 700908989H1
tcggctcgagttcaaatccaaatggccctttacattacactaataattggcctcctagtagacaccctagtactctataagtagcatgtgcatgcaccttagtcttcaccaaaatactcctcttggcatcttgtagtgtgtccctctagtaagctatttccttctcttaacacaattggttgtgccaattgcgtgaggtcaccaaccaattaacaaaggtatatatatcatcatatcatcaccaaatgaaaaatattgg

SEQ ID NO: 23774 - DNA, 242 bp, Glycine max
  Clone ID: 700908992H1
ctctgaattcctcttattcaggaatttggagagtattgatatatcaaggtaggataaaccagtagtcaaggaagatatggagttttctatgattttcattgttagcaacattatgctgcttttcagttcagcatttgccaaaactgctagtcctccctctctgagcccaactccagcaccagccccggcaccagacttcgtgaacctcactgagttactcagtgttgctggtccgtttcaca

SEQ ID NO: 23775 - DNA, 247 bp, Glycine max
  Clone ID: 700908993H1
catttccctccccccactcccaccgccaacgccaaacaaaccctaaatctctctcgtcttcttcttcttcttcctccttcaaccatgagagagatcctgcacgttcagggaggccaatgcggtaaccaaatcggttccaagttctgggaggtgatatgcgacgagcacggcatcgatcctaccggaaagtacaacgacgaaggcaacagcggcatccaactcgagaggatcaatgtctattacaatg

SEQ ID NO: 23776 - DNA, 245 bp, Glycine max
  Clone ID: 700908994H1
caattggatgttatttagatctggattttttaaagatatgcaccagtgagttctccatggacgctgtcgtatcgtaattcgccaccacactgaccacctcccgtcctccgccgtgaagttcagcggtggcttttattttccgtttgcactgtgtcgcagcactgccgccactatcccctgtttcctcttccttcgccaacaacacaaacaccaacatcaaacagcggtggcttttttagttactt

SEQ ID NO: 23777 - DNA, 248 bp, Glycine max
  unsure (1)..(248): unsure at all n locations
  Clone ID: 700908995H1
tctttgcgcagttccctacctctcctttcaagatgcagatcttcgtcaagaccctcaccggaaagaccatcacccttgaggtggaaagctctgacaccatcgacaacgtcaaggccaagatccaggacaaggaaggaattcccccggatcagcaacgtctcatcttcgccggaaagcagctcgaggacggccgtaccctcgccgactacaacatccagaaggagtcaactcttcnnacttgtcttcgt

SEQ ID NO: 23778 - DNA, 251 bp, Glycine max
  Clone ID: 700908996H1
ctcgagccgaatcggctcgagaccaatcttctctccacgcccttcttgggtcaccgtctgaagtgcagcaatggcagatggattgcattcgcagcatccatcggtagttcagaagttatctggacagtcttatcttgtgtccaggcttgctcctaatcactccagaaactgttctaccactggtagttacttcaatggaggtttgcagtcttcaggtttggttccagtcgcggcacacgcgccggctgaga

SEQ ID NO: 23779 - DNA, 275 bp, Glycine max
  Clone ID: 700909002H1
aagaaaaccattgatggcactccctcactccatctctgccttagccaccacactcacactctcctcgccaacaaccaaaccccagaaagttaacccctttccctttttctcgaaccaaaagacacgatttttaacgaaacaaacgcgacccagaagcagaagaagcctctccctaacccctgcacgcgttgcggcgccaccctcaactgttgaagccgatcaatcatacccggagaccgaaaataacgaaactgaggaagagtttaacgatgaaa

SEQ ID NO: 23780 - DNA, 270 bp, Glycine max
  Clone ID: 700909003H1
tgcagagtgcagagccttctctcctctattttggcttccaacctttttgctccattcattctcaacaacaaaccaatctctatattttgcttagacaatgagggggagcttgtggcaacttgggcaatcgatcactcgccgtcttgcccatggagataagaaggctgttgctcgccgatgttttgcctcagaagctgagctgaaaaagacagtgtttcatgacttccatgttgctcatggtgggaagatggttccatttgctggatggag

SEQ ID NO: 23781 - DNA, 269 bp, Glycine max
  Clone ID: 700909004H1
ccttcccatggccgttgggttcatgttgttgtacacaaagttgtccaatgttttgtcaaagcaagctcttttctacaccgtgattcttctattcattgctttctttggggctttcgggtttgtgttgtaccctctcagcaattatattcaccctgaggcatttgcggacaagcttctcaacatcctcggacctaggttccttgggccccttgcgataatgagaatttggagcttctgtttgttttatgtcatggctgagttgtggggga

SEQ ID NO: 23782 - DNA, 262 bp, Glycine max
  Clone ID: 700909006H1
taaaaatttgaacaatgtggttgtggatgacagcaacaacactagagtagcgtctaatcatggagagaatggatctcaagaagtagatcctcaaattagacaaaatagtacttcacaggatttgccagaaccacattcacacagagataaaatgtataaagctgtatatagaagatcaagatcacatagggctgtgactaatttagctgacagtagtggccagggagaatccaattcaaatgggagacacagtaatttcaat

SEQ ID NO: 23783 - DNA, 261 bp, Glycine max
  Clone ID: 700909007H1
cggctcgagaattataagcatgggtttgtggaacacaacgaatgcagtgtcttgccgctttcacaagtttggtgatgaccaaaagaatctggtcttccaaggtgatgccacgtcttcttccaggggcatagaactcacaaagttagacggtggaggaaaaccagtgggtggcagtgtggggagagtgttatactcttctccagtgcacctttgggaaagctctacagtggtcgcaagctttgaaaccgacttcaccttttc

SEQ ID NO: 23784 - DNA, 259 bp, Glycine max
  Clone ID: 700909008H1
ggccggtgtcgaaaagtttgtacagaaggatcaaccgggtattagcagagctcttgtggctggagcttgtatggcttattgattggtgggcaggagttaaggtccaaatattcacagatcatgaaacctttcgtttaatgggtaaagagcatgcacttgtgataagcaatcacagaagtgatattgattggcttgttggatgggtttcagctcagcgttcaggttgtcttggcagcactctagctgtgatgaagaaatc

SEQ ID NO: 23785 - DNA, 272 bp, Glycine max
  Clone ID: 700909009H1
ggaattctgctcgagtccgggttcacgtttcacaatcactttttgctcttctctcactcactcactcttcttcttcctcttcgtgtggttttttttctcgaactcgaacgaagatgcgtgagattcttcacatccagggaggtcaatgcgggaaccagatcggagccaagttctgggaggtggtgtgcgcggacaccgggatcgattcaacggggaggtaccaaggggacaacgagttgcaactcgagcgagtcaacgtctactacaatgaa

SEQ ID NO: 23786 - DNA, 255 bp, Glycine max
  Clone ID: 700909010H1
ctagacttagctattcttacctcttggcatgaccattcaaatgtgctcttttctcttagcttctcttgctgttttctttttcttctcctccttggagaagagttttgcctttcaagcagcaagaaaggaggacacagaaagcaacaatcttcatcaatatactcatcttgttcacctcagctcactccttccttcatcttcttgcagctcttctaccaaaggtctcaaaacaaaagcatcattagaagtggtaca

SEQ ID NO: 23787 - DNA, 252 bp, Glycine max
  Clone ID: 700909012H1
caactgtttatttgtcagcaggaactgcaacagctttgattcttataggaggggagaccatgaaactgttcttccaaatagtttgtggtcccacttgtacttcaaatcctttaaccacagtggaatggtacttggttttcacttctctatccattgtcctgtctcagcttccaaacctcaattcaattgcaggactctcactcatcggggcagtgacagccataacttactccaccatggtttgggtactct

SEQ ID NO: 23788 - DNA, 252 bp, Glycine max
  Clone ID: 700908969H1
acaagatcccggaaaggcgtgccggcgtcagagactcatcagttctcactcgtacggcgttgtgctttgctttctcaccttcttcttcatttctttcatcatcatcatcatcacaatataaagtttgctcctttctcagttttcacccatacccagatgtgtaacagcaccatctcggatctgtgtccctcctttaagtgaaaaaggttcaatctttggtctctgaggctgttgggttttcgtcattgaaga

SEQ ID NO: 23789 - DNA, 257 bp, Glycine max
  Clone ID: 700908922H1
ctcacattgtcatcctctattgtcttgtgagggtggtggttgaagaggttcgagatgcagaggctcgagttcctctacccactgatgaggttcatacagtgggacaagcccccaatcaattcattcagtggtcaagaagacttgtgaagtctatgtcagccaaggctgttgtcgaatctagcaaagatgctccacacaaaaggttggaacctcaacttgatccgctcgaacgcttgttgataatagtaagcaaaatt

SEQ ID NO: 23790 - DNA, 257 bp, Glycine max
  Clone ID: 700908923H1
ggtcactgacctatcttggaagagttttgaagtttaaaccttcaaacccttttgcctttagattctgattctgagtctctgctgctatatatggcgccacgcgtatttcttgtgttggggatgttgctgatggtgtgccttgttaaggtttcgtctgatccaaagagagaagaagaaatactggaagaagaactacattttcccgataacgagccacttattgtgagagacgggaacagaaggctaatgcaagacat

SEQ ID NO: 23791 - DNA, 260 bp, Glycine max
  Clone ID: 700908924H1
gaaccaccactaccttatccatttccactcctcaccaagccacaccatggcctcaaccaacgccctctcttcagcttccattctacgctctcccaaccgccagtctctgaccagaagagcgaaccacaacggaagagtaaattaccgtcaaccgaatagccgtttctccgtcaaagcctccgccaaagagattgcctttgaccagcattcccgctctgctatgcaggccggcattgacaagctcgccgacgccgtcgggc

SEQ ID NO: 23792 - DNA, 254 bp, Glycine max
  Clone ID: 700908926H1
tttggaattcacgaagaaatgttgaaggacagtgtgagaaccaagacatatcaaaatgttatttatcagaacaaatttttattcaagaataaagtagttcttgatgttggtgctgggactgggattttatcactattttgtgccaaagcaggggcagaacacgtctatgcggttgagtgctcccatatggctgacatggcgaaggagattgttgaagctaacggttactctaatgttgtaacagttttgaaggg

SEQ ID NO: 23793 - DNA, 253 bp, Glycine max
  Clone ID: 700908927H1
gagaattagtgcatgtgaagattccagcaggcaagcgatgtgggtttgtccaattcgcagacaggagctgtgccgaagaggcacttcgggtgttgaatgggaccctgttgggtggtcaaaatgttcgtctttcatggggccgcagtccttcaaacaaacaggctcaggcagatccaaaccagtggaatggtggtgctggttctggtggtggatactatgggtatgctgcacaaggttatgaaaattatgggta

SEQ ID NO: 23794 - DNA, 254 bp, Glycine max; identical to SEQ ID NO: 735
  Clone ID: 700908928H1

SEQ ID NO: 23795 - DNA, 253 bp, Glycine max
  Clone ID: 700908929H1
cttcttcctctctcttcgttctcgctctcttattcctttctctcttgtcttctctccgaatccacgtcctagatctgttgttctcttcccacagttctcactgaatcaggatccattttgataccaagttgctgtttagagatctgtttccttctagacaacggtctgtgctatctgttattttagttgaatcgaagctgcaacaaaatcttcctgatctttgctttgaggttatggcatcggcgggtgtagc

SEQ ID NO: 23796 - DNA, 253 bp, Glycine max
  Clone ID: 700908930H1
ttcgaaaccatttttcgtgaaaataggtgttttttttagttcgtcgttttgctcttcgtgttgttgaagtgcaacgccatggatccagatcagggcacttcaaaagcccggaagcccaagttcaaacccaggaatctcaaagcagtccgagctcccaaaaccgaagcggatgataagcgaaacgaagatagcgaagtgcctcgagctctctcgcgtcgacgacatgaaaatcctgcaaaacgcgagcctaaag

SEQ ID NO: 23797 - DNA, 243 bp, Glycine max
  Clone ID: 700908931H1
tcgaggtgcctgttctctgtaactgtgtttggagtgttaaaacgttcagcctagtcaaagattcttgtttctgctgtagctttagttagtagctaagcacctcagaaaccagatctctgtagaaagtgaagttttttttttggttcgaattctattctttgttgtaccaacatgctctccacggattcccttttggaaaatttccctggttctgtaaacggattcatatttgaaaacggtccg

SEQ ID NO: 23798 - DNA, 268 bp, Glycine max
  Clone ID: 700908932H1
gctcgaggtctttcgccgcaatttcgaagatccaatttctttcattgctttcattgttcttttgtctgtgattcgaaggaaagggactgtgacgatttctgtgattaggtctcgttcgtcgtaattggcctaaccggccttgccgaccatcctgctatatcaccacccatattctgagtcccttttctcatccaattctttttcttgtatcttttttcaattttaaattgttcttcgctgtcagtattggttgtgtggtatcagattc

SEQ ID NO: 23799 - DNA, 256 bp, Glycine max
  Clone ID: 700908935H1
gagaattcgttttctctcctctgtgtctgtcgtctaaagcttaattccgatggggactccggaattccctgatctcggcaagcattgctctgtttcttattgcaagcagcttgatttcttgcccttcacatgcgatcgctgtaatcagatatattgtttggagcaccgaggttatattaaacataaatgcacaaaggccaacaaacatgatgtcacagttgccatatgccctctttgtgccaaaggagttcgcctc

SEQ ID NO: 23800 - DNA, 257 bp, Glycine max
  Clone ID: 700908937H1
ctactgctctctctctccctctccctctccctccaaattttccttcattctcacgcgccgccgtggtttccgccggcggctactccctatccaccgcgcatccatcccgcttccctctcctcgcttttctcacaaaacaaaaaaaattaaaaatttctccgaagactgtgtattatcgttatcgttcactgagttaggttttgctgttcttcctagggttttattgtgtccaataacaagaggagggggaagagaaa

SEQ ID NO: 23801 - DNA, 256 bp, Glycine max
  Clone ID: 700908939H1
accagctatctcagaactcagagaaacttggacttctgttttttggtttgagtcacttgaatctacaagcaagcaaatattacataataagaatctgttggtatttcctcatgtagatatgttacagaagaagatatcaaaacataaattggctggtcaaaatctgaatccttcggaaggccagataaatgatgaaaccatatctattgaatctggttgtcatcttcctgatggttcattgaacaaggtacctgac

SEQ ID NO: 23802 - DNA, 253 bp, Glycine max
  Clone ID: 700908941H1
ttctcacactcattccgtgctctaaatctcaaattctagggttagggttcccaatttctccgccaatcagaagatgacttccaccggtggttctaccaagggcggaaggggcaagcccaaagcctccaaatccgtttcaagatcgcagaaagctggtctccaattccccgttggaagaatcgctcgattccttaaggctgggaaatacgctgagcgtgttggtgctggtgctcctgtgtacctctctgcagtg

SEQ ID NO: 23803 - DNA, 131 bp, Glycine max
  Clone ID: 700908942H1
aaatagactgtgaggttcttgggaaccagaccggagaaacttaatattttgcaaacaatgtggtcaacggttggcagggtgaacagagaccaaggatctaacttctggtttgacctaacaggagattttca

SEQ ID NO: 23804 - DNA, 194 bp, Glycine max
  Clone ID: 700908944H1
ctgaaaatggatcgagaatggggatcgaagccggggagcggaggtgcggcgtcggcgcagaacgaagccatagaccggcgagagcgtctccggcgactggctctggagaccatagacttggcgaaggatccctatttcatgcgcaaccacctcggaagctacgaatgcaaactctgtctcactctccacaacaa

SEQ ID NO: 23805 - DNA, 245 bp, Glycine max
  Clone ID: 700908945H1
cgctctgtttctgtctctgtatttgcggctgaggattccgaacgagcgaccttcttcgattctcgcaaagttttagtcatcatggctaaggaaaagactcacatcaacattgtcgtcattggacatatcgactctgggaagtcaactaccactggtcattttatcaacaagcttggaggtattgacaagcgtgtgattgagaggttcgagaaggaggctgctgagatgaacaagaggtcattcaa

SEQ ID NO: 23806 - DNA, 264 bp, Glycine max
  Clone ID: 700908947H1
gaattcggattgagcgaatattatcgcgatgttgaattcggaggatctggaactgcgtgttgttgcgttggggtgcgcgctggagatagggtacttcgggcggaaggaagcggtggaggcgatgatgaaggaggggttggtggagaagctggtggagttgcagaggtcggagaaaggtggggatttgattgagattggaagggaaaaggttagtggggttttggagagaaaaccttttgcgagctgcgtggcgaggtttgcggt

SEQ ID NO: 23807 - DNA, 251 bp, Glycine max
  Clone ID: 700908948H1
atcgtgtctgattcgtttggaactgtacaagacccagcttcaagagctggcccagcggagtgcttcaacctgccttcctacacgtgtattcggcaaggtcccgatcacgcgccaaggttcaaggccaccgtcaactttaacggcgagatcttcgagacccctcactactgctccactctccgtcaggccgaacactccgccgccgaagccgctctcaattccctctcccaccgtggcccctcccattccct

SEQ ID NO: 23808 - DNA, 269 bp, Glycine max
  Clone ID: 700908954H1
ggaatttggctcgagctcgagccgggctaagacagagcactgtctgagtgaaacatccattcttttcctccacctcgtgattcccacacattctcttcttattcccagctccacgcgctcgtttctatattctcatcactcgcgctcttcttctgcttcttctccctccattagggttgtcttaatgctgaatgtggcttccctcgccgcacattgacccttgacacaccataatgtccggccctctcgactgtttcgcaagaccctgt

SEQ ID NO: 23809 - DNA, 253 bp, Glycine max
  Clone ID: 700908959H1
gttgggtttagaatcttcaatcttgtttgggagagagatgtacatagcttccatgggaaggtctttcaaggactccttgaaactgcttgaagctgatattcaccatgccaataccctggcgtcagattttccaagggaatatgatggtgcgtgccttcagatgagaatgtcatatagtccagcagcacacctgtttctcttattggtgcaatggacagactgctaatcttgccggagcccttggactgttaag

SEQ ID NO: 23810 - DNA, 247 bp, Glycine max
  Clone ID: 700908962H1
actctaaccaacttacccaccaactaataatctttttaattccaaaaaaccaaacaatgcctctttttctcacttcacaacttttatttctgtttgagttctccaatggcagctcctgcaccattctctctttcttctgatcccttcgcttccaaatctgccacatcaacgatctttggtcctgccgcgctgaaaaaagggaactttgagcaaacccatttcggaattttcacggctttaaggagaa

SEQ ID NO: 23811 - DNA, 276 bp, Glycine max
  Clone ID: 700908964H1
tcagacctaaattcggaacgaggtgagcttccagttgtattcatggacttaccggagaagcttttctttgcagcatttctcattctttcagtggccattgatggaacgcaggcagacaccatggtcactggcactgtcttctgtgaccaatgcaaagacggacagagatcccttttcgattatcctattaatggtgcaaaagtaactctgtcctgtgctgacagtaatggacaaattacaatgtcaagagaagaaacaacaaactggtttggaagc

SEQ ID NO: 23812 - DNA, 254 bp, Glycine max
  Clone ID: 700908966H1
ctggaagagaagtggaagtggaagtgggagcagaagtggaagtggaagtgggagcagatgcagcttccacttccacttctgatgccctggaagagaaggcctggtttcgccccaccagtctcgaggatttcgagaagcctcacacccttccttaacaacccctttctttctttcaattaggacatcatatatattatacaaaattaaataaataaacactagtcagtagtagtgactagtgaccaagtggaagt

SEQ ID NO: 23813 - DNA, 228 bp, Glycine max
  Clone ID: 700908921H1
ggaattctgctcgaggattgggggctgctgctgcgagagaaaaaaagaaaagaagaaacagtttgaagtcagatgctagatatgggaagtggagtttcaaccctctgttggtgctctcggatcaacgaacccgacgttattttcaccgccaccgacccattggacgaaaccctaggccactccttctgctacgtcagatcctccgcgcgcttcctttctcccactcgc

SEQ ID NO: 23814 - DNA, 250 bp, Glycine max
  Clone ID: 700908968H1
ctctctttctctttctctctttccctgggttggagaacttgcaggtccttaaaattaaaccatggcttcatctttaaaccaacgcatgttattccctcttatgttcgtaattggtatgttctgcttaatggtaactccttctattgcggaacttcccatattcaaacaccctccaaaaaaacaacaatctcttaatatattggtccttggagattggggaagaaaaggaacctacaatcaatctttggtc

SEQ ID NO: 23815 - DNA, 259 bp, Glycine max
  Clone ID: 700908879H1
atcacttgtggatgcacacaagccattgatgtttcagtggtgatgcttgctcgccccggtgcaaacatcattcttccaagaccaggtttcccactctatgaacttagcgcttcatttagaggagttgaagtgaggcattatgatctgcttccagagaaaggttgggaggttgatctagatgctgttgaagctcttgctgatcagaacactgttgctttggtgattataaatcctgggaatccttgtgggaatgtgtaca

SEQ ID NO: 23816 - DNA, 256 bp, Glycine max
  Clone ID: 700908881H1
gcgttgtgtctaacagtctaagtctaacgttgtggagcatagaagagaaagagatgatattgaactgtgtcagagtgacagctatgcctatgatggctgttcctaggtggagatccacctgctgctgcgcttcttcttcgtcttcagtttcaaccatcaacacagaccaacttcgttctcaacttgatcaacttcatgcagaagctgatgccaccagaaccaaggcaactaatgctagattgaggcttctgcgact

SEQ ID NO: 23817 - DNA, 254 bp, Glycine max
  Clone ID: 700908883H1
ttctctagtctctgtcctaccacaaaaatggtcccaaaaccaatcttagtcacaacaccaccgccggcaacttctgcaccctctccactgctcaacgcagtttcacccctcaaaacagaagaaaaaccccaaacacaaaccctaaaaacccccaccaccaccactcaaaaagctataaccagaccaagcccatcatcatccaccaccaaaacgacgccgcagcagcgcgtggatctaaagagaacaacaaactc

SEQ ID NO: 23818 - DNA, 254 bp, Glycine max
  Clone ID: 700908884H1
caagaagcacaatttctctttctctctttttttgtgtgtccaaaatggctcctagttctgctcacaacaatgggttctatgtgcttatgctagttgggatagtggttagcactatggttgctacctgtgctggtagcttctaccaagactttgatctaacatggggtggtgaccgtgctaagatattcaatggtggccagcttctatcactttccctagacaaagtctctggctctggcttcaaatcaaagaaa

SEQ ID NO: 23819 - DNA, 255 bp, Glycine max
  Clone ID: 700908885H1
aatcttcatattcatcaaactcatcaaaatgaatctgtaccactcctccaccaccaccaccaccaccaccatcttcaccgtcatattcctcctccttgcaatattattcactctcacaccccacaaggccaacggtgccacgtgtcaccctgagcaagaagcgggcctgttgggcttcaaatccggtatccgatccgacccgtccggcctgctcagtaactggatatcgggtacggactgctgcacatggaccgg

SEQ ID NO: 23820 - DNA, 252 bp, Glycine max
  Clone ID: 700908886H1
gctccctgacctctcttcctctgctgaaaatggtgtcaccactcacttccaatcccccgaaagcgtcacaaattcatggatgaagaagaggttctatgtggaaaccttggtgagtgttctgcctcctgagaaggattctgtcccatgcaacttcctccttcgccttctcagaaccgccaacatggttcgtattgacgccatttatagaggtgagcttgagaaccggatttcgtggcagctagaccaagcttc

SEQ ID NO: 23821 - DNA, 249 bp, Glycine max
  Clone ID: 700908887H1
tctggctctctaagaaacatggctgaagagggtcaggttgtcggcgtccacaccgttgatgcgttgaaccagcaactgcagaatggaaaagactcccaaaaattgattgtggtggattttactgcttcctggtgtggtccatgccgttttattgccccagttctggcagagattgctaggcatactcctcaagtgatcttcctcaaggtggatgtggatgaagtgaggcctgttgctgaggaatattcc

SEQ ID NO: 23822 - DNA, 257 bp, Glycine max
  Clone ID: 700908889H1
cttccccttcttcgctccccccccgctcgttgacctccgattctcccctcatcggagctcaaatctccgatccctcccttcatatcgcttcacggcaaccttctcttcacccatcgcaagatctagttgaatctcgaccggttcgaagctctactcactcaaatcctcttcagatctggggggtttgattgcaattctcactctgctgctcggatttgttcgttttgaaatgtcgattttaccgaaaggcgattcgg

SEQ ID NO: 23823 - DNA, 254 bp, Glycine max
  Clone ID: 700908890H1
cccaccatggcagcaagagcaacagcaatctttaacactccctcctcctcctccttcttcacattcacactctttctctctctctctctcctcctccaactttctctctcctccccctctccctccatccacgaccttctccgctccaaaggcttgccccccggcctcctcccagaggaggtgaaatcctacagcttctccgaaaccggccacttggaagtcttccttgacgcgccgtgcctgaccaaatacga

SEQ ID NO: 23824 - DNA, 252 bp, Glycine max
  Clone ID: 700908891H1
ctctcttgaacattcatggatccagtgagcgtgtggggtaacacgcccttggcgacggtggatcccgagatccatgacctcatcgagaaggagaagcaccgccaatgccgcggcatcgagctcatcgcctccgagaacttcacctccttcgcagtcatcgaggccctcggcagcggcctcaccaacaaatactccgaggccatgcccggcaaccgctactacggcggcaacgaattcatcgaccagatcgaa

SEQ ID NO: 23825 - DNA, 153 bp, Glycine max
  Clone ID: 700908892H1
ctcgcttccctctctctgcgttcggcaccagcgaaacgctcttcgttatctttttctcgactccgcggcgtagatccgaggagttcgggaaaccctaactcatcttccacacaacatacgatcccggtctattccctatccatcatctcaact

SEQ ID NO: 23826 - DNA, 261 bp, Glycine max
  Clone ID: 700908894H1
cacaatgtagtagtgaaggtattgagaagcttggaggtgaaagttttggtgaacttcctactggggctgggaactctgaaacaagctttcctgtaatagatattcctgcttcttcttgggccaccagtggcacaattgaagatctccacctagaaccacctttacatctgtccctttttccggagtattttagtccagagcggccgataaggacattaacccgctatgaggacatctactccatactccttgaacactctc

SEQ ID NO: 23827 - DNA, 263 bp, Glycine max
  Clone ID: 700908895H1
aaagtgaacataaccttggtaaagctgttgaaaatgttaaccaagaaattacctcacctagctcagtgatgaacatccatgcaatggaagatttcagaagtagaggagctgaaacattgaagtttctcagtaatttggatcagatcaaattgcctggacttcacccatcaatgtccatggacgatttggtaagccacattggacattgcatttcagaacagatgggatccgacaatccgagtttggctggtgacaccagtata

SEQ ID NO: 23828 - DNA, 267 bp, Glycine max
  Clone ID: 700908896H1
ttctgcttcagcagagtcaggttcaggaatactgcagacacctaactatgttgcccagcagtggcaaactgataggttaggcgctggtttaagttccttggatcaagatcgtcctgataaacttgcagcttcagcacagtcactatcaattcccctagtagctcagcagtttcttccaagttctgcttctcctggtgcctttcctgggtccatggctatatcatcttctgttcaaccagctaaccaagctcctggtgctcatttatt

SEQ ID NO: 23829 - DNA, 289 bp, Glycine max
  unsure (1)..(289): unsure at all n locations
  Clone ID: 700908902H1
tcgcacgcacgctttcgtgatctcggtcttcggtaccccttgttcttctcccaccaactttaccgtgggcnncctcgatcatgtctcacttcaanggcaagtaccatcatgagcttattgccaatgctgcttacattggcactcctggaaagggtattctggctgctgatgagtcaacagggacaattggcaagcgtttggccagcatcagtgtagagaatgttgaatccaacaggcgtgctcttagggagctgcttttcaccgctcccggtgctcttaaatatctcag

SEQ ID NO: 23830 - DNA, 262 bp, Glycine max
  Clone ID: 700908903H1
agaaaatctctggcttatggtggtttgtcgcgtggccttcatgaaggtgcaaaagtgattgagaagcatgctgcacaactctgtgttcttgcagaagactgtgaccagcctgactatgttaaactggttaaggccctttgtgcagagcacaatgttagcctgctgacagttccgagtgcaaagacccttggagaatgggctggtttgtgcaagattgattccgaaggaaaagcaaggaaggttactggttgctcctgtgtgg

SEQ ID NO: 23831 - DNA, 212 bp, Glycine max
  Clone ID: 700908908H1
agttcattcgcaagacacagtattttgagtagctttattactttatggttgggatattatgtactggcgaattttaatgagccaccggtttccaaaatgtactgcgaaatttttttatggttggtacatttcttaaataatgtgccgaactactgatacaaacaaacttttgaactcttaccaaaatgaattgatgtttcacgatattgatt

SEQ ID NO: 23832 - DNA, 260 bp, Glycine max
  Clone ID: 700908909H1
gataacatcacacagcattagtatgtatcagcaacaagggtcagatccaacaaagcaatcaccggcaaccggttttccggtgagctatagcaattcaacaacgtattcgaccaacgaggcttcctacgctccagtcccacctccccagcccaaacctcttgtcgattggtccaccggcctctgtgactgcttctccgaatgtggaaactgttgcatgacgtgttggtgtccatgtgttacctttggccgagttgcagaaa

SEQ ID NO: 23833 - DNA, 214 bp, Glycine max
  Clone ID: 700908910H1
ctctagcattattccataattgaatcaatttcatactggatccaagctaaaggaatgttatggtaaaacttcgtttgaaacgatagtggtaaaaatcaacgttcgactttaaagacatgattagattagctgtggattcttacatccgccattttttctagtatatagagatgaacatgctcttgactcgacatcgtttgttctgttccacaca

SEQ ID NO: 23834 - DNA, 256 bp, Glycine max
  Clone ID: 700908911H1
agaaaatctctggcttatggtggtttgtcgcgtggccttcatgaaggtgcaaaagtgattgagaagcatgctgcacaactctgtgttcttgcagaagactgtgaccagcctgactatgttaaactggttaaggccctttgtgcagagcacaatgttagcctgctgacagttccgagtgcaaagacccttggagaatgggctggtttgtgcaagattgattccgaaggaaaagcaaggaaggttactggttgctcct

SEQ ID NO: 23835 - DNA, 70 bp, Glycine max
  Clone ID: 700908913H1
cttcaatacccaaaacatcttgttttgtgtctttcgttcttttactctcaacaatggatttccacacaac

SEQ ID NO: 23836 - DNA, 255 bp, Glycine max
  Clone ID: 700908914H1
ggatttttgttattattttgtggcagcagtgacagagtgattggtgtgagtgcggcaattactggaacagcggttgagtgtgcgatcgagaaagcagagaaatggggttggaatcggtgggagatttagcgattcacgtgattctcagtaagttaggagcccaagacactgccagagtcgcgtgtgtgagcaaaaggttctgttcttccgcttccgacgacactctctggatcaatcactgcttccacgaactcg

SEQ ID NO: 23837 - DNA, 253 bp, Glycine max
  Clone ID: 700908916H1
gttgtgtagcggtggattgggtagaagaagatgagaggggtgaagagagcagtatttgtaggcagagccctaagaagcaattccaacaccgccgtgtacggtgttggtgccacccttcatcgagatcgaatggctccccatggctgcttaaccccatcaaatccaaatccttctgtttctgttactgggtttagatacctttctgcttctgctgctgccacgtctcttgcccaagacgctcagaccaaggcct

SEQ ID NO: 23838 - DNA, 259 bp, Glycine max
  Clone ID: 700908918H1
atttctacgagaatggagtttacactagtgacatttgcggtacacttcccaggatgtgaaccatgccgtccttgctgtggggtatggagttgaaaatggcgtcccatattggctcataaaaaattcatggggagaaagttggggtgagaatggctacttcaaaatggaattggggaagaacatgtgtggtgttgcaacttgtgcgtcttatccagttgtggcataaattgcataagaatatggtccctggtgactacca

SEQ ID NO: 23839 - DNA, 257 bp, Glycine max
  Clone ID: 700908920H1
ctttctctaaggcaatttgtatgatcatccacatcctctttcaaagattgcgtacaacactgaaatatagcagagatcaaccaaagactaaagaaaagctatgctgatcaattcagtcagttggttttacctcccctctcattttcatgtctgtttacaatttgaattgcaagtattttcctattaatttatgtgttaattaaggagacaaagcttggattgctaaacaagcgaaagagtagctagttattcaatca

SEQ ID NO: 23840 - DNA, 259 bp, Glycine max
  Clone ID: 700908878H1
gataattgtaaaaaattggatttgggcgtattgttttgttattagttatggttcaacttcaatgacatagtaaattgtctgtttttgttagatgggattccaatttgctggcaaagctgtttactctgcggtatggatagctgccttttcactcactatggaattgctgggcttctctacccagaaatgggttactgcaggaggtcttgggacagttttgttgacccttgctggtcgtgagatatttacaaacttcctt

SEQ ID NO: 23841 - DNA, 212 bp, Glycine max
  Clone ID: 700908834H1
gcattgccaatggatgggcctcaagtgtctggtgtccacgtacaatggagtcaggaggcgcatctcgtggcccattagcagagacgaggtttggatcagtaatgtgctccatacgcgtctagtcgaggatagaggaggtcgtgattggctgtcagtgaagagggctgaatttggatttcctggtggaggtactcaatgtatacatggtgcag

SEQ ID NO: 23842 - DNA, 258 bp, Glycine max
  Clone ID: 700908836H1
cactgcattccctttactctctctgtcttttcttcaacctctctcggtttcgaagaatcgcaatgacgaactccatgggtcccccaccccccaaaaaccctaatccacctgacaccgcgccaccgtcaatgcctcctcctcctcctcgtgactcagcggccccgtcaccgccgccgccaccgccaccagctcgcgattcgagcaatgctccctctcagggtgtggcagttccgtataagatacctccgtggggcgccg

SEQ ID NO: 23843 - DNA, 169 bp, Glycine max
  Clone ID: 700908837H1
tagttatgttccgtaacttatgggctcttaattaaactatatctgcacaaaattatatatatatcaaatgtgatggtatgtggactataaaaagatatggttgagaaccacaaactttgaaacttcgaataatatattgccagtgacagtcttgttgatttgttatagc

SEQ ID NO: 23844 - DNA, 254 bp, Glycine max
  Clone ID: 700908839H1
caaaagacaaaaaaataaccaccaaataaacatctttctccacaaacctagcgggtctccacttatccaaaaaaagaattcactatccatcatggacattaggaaggttacctgtgccgttctcattgccgctgcctccatgagtgcagcattggctaccacagaggtctctgcacccgcccctggccctagcagcggtgcctccgccgccactgttggctccttggttggtgcctcagtcttgtccttctttg

SEQ ID NO: 23845 - DNA, 255 bp, Glycine max
  Clone ID: 700908844H1
cactgcattccctttactctctctgtcttttcttcaacctctctcggtttcgaagaatcgcaatgacgaactccatgggtcccccaccccccaaaaaccctaatccacctgacaccgcgccaccgtcaatgcctcctcctcctcctcgtgactcagcggaaccgtcaccgccgccgccaccgccaccagctcgcgattcgagcaatgctccctctcagggtgtggcagttccgtataagattcctccgtggggcg

SEQ ID NO: 23846 - DNA, 169 bp, Glycine max
  Clone ID: 700908845H1
tagttatgttccgtaacttatgggctcttaattaaactatatctgcacaaaattatatatatatcaaatgtgatggtatgtggaatataaaaagatatggttgagaaccacaaactttgaaacttcgaataatatattgccagtgacagtcttgttgatttgttatagc

SEQ ID NO: 23847 - DNA, 267 bp, Glycine max
  Clone ID: 700908848H1
aagaagttcaaccttccaatcctcccaaccaccacaattggatccttccctcagactgttgaactgaggagggtgcgtcgtgaatacaaggctaacaagatctcagaggaggagtatgttagttcaattaaagaggaaatccgcaaagttgttgaactccaagagaatcttcatatcgatgtcctggtacacggtgagcctgagaggaatgacatggtggagtactttggtgagcagttgtcaggctttgcctttaccgttaatggc

SEQ ID NO: 23848 - DNA, 259 bp, Glycine max
  Clone ID: 700908849H1
gatcctctatacctctctctcccgtaagtggaggttcagccgttggatcatacaaaatggctctgataatctaaatgaattaaagtttcggtgtctcgcacgcacgcacgcttcatggatgacatgaacgagttgaggaagaagagaaaaaccgcagacgccgagtgagagccgaaacttctctcatggaatcgcaaacggatctgctgaaccgacccggaatcttcttaattggatcctctaacgtcggcaaacgcac

SEQ ID NO: 23849 - DNA, 256 bp, Glycine max
  Clone ID: 700908850H1
gacttacgattggctgatgctcttttctgtaattacccttgggtatgttggctggatgatctatcttggtcttcatgttctgcagtcttatacctcactgtcaggagatgcttttggaatggagcaagcagttcagaaaaataaccgtggacaaatatatctatatggatctatggtgacgggaatgctttgtttgcttatgctgctggagcagtctcctcctctttaccatgcatacatcatcgtgacttcattt

SEQ ID NO: 23850 - DNA, 227 bp, Glycine max
  Clone ID: 700908851H1
ttctattccatcatcaatggagaacaccgagggatccggatctgcgacgaacggggtgctggctccgccgcgcaaggtggcattgataaccggaattaccggacaagacggttcgtacctgacggaattcctcctggacaaggggtacgaggtgcacggcctgatccgccgctcgtcgaacttcaacacgcagcgcatcgttcacatatacgtggatccacacaaca

SEQ ID NO: 23851 - DNA, 258 bp, Glycine max
  Clone ID: 700908852H1
tgtgattatccaattaaagcagttcacaaggctgcaatgcttgcatatcattgcttgaaccgcaacccgaaagcaaggcctctaatgcgagatattgtggattcattggagcctttgcaggcacacacagaggtccctattggaaaaacattgaccataatcagtgaggttcctgaatctggtttgaaaatgaaagatgatgcaatatgacttaaatgagggtggtgttgtaggcttatcagtttcacttcttgttag

SEQ ID NO: 23852 - DNA, 258 bp, Glycine max
  Clone ID: 700908856H1
gccttattgtcatgtgtaaaggattctgatttcaagacaacaatctatcctttgaggttaagttcaatgactttgaatacaagctctatgtctatggcggaggagaatccaacatccaaagaaccaccatctgctcaaggtcatggtgcagaactgcagcttagtgatggcagtagcatatatgcaaagttggtggttggcgctgatggaggaaaatcacatgttagggagttagcaggaatcaaaacaactggatgg

SEQ ID NO: 23853 - DNA, 257 bp, Glycine max
  Clone ID: 700908857H1
gaaatttgtttctctctaaagagtctccgctgaactttttggtttcttgaagatgtcgttactctccgatcttatcaaccttaacctctccgacatcaccgataaggtgatcgccgagtacatatgggttggtggatctggcatggatatgaggagcaaagcaaggactctctcgggactggttaatgacccttccaagcttcccaagtggaactatgatggttccagcactggtcaagctcctggacaagatagtg

SEQ ID NO: 23854 - DNA, 256 bp, Glycine max
  Clone ID: 700908858H1
gtctcgctctctcattcatgtcccaactgtacgacggaggacaggttgcgtaactgccaccaacccttcgccgcacggtgggcgtggtgctttgccttctgaaggtggtagcccttcagacttgctcttcttagctggtggtggttctgctgtcttctagcttcttcttaactcttttttctttttactacttttaagctaccttgttctcaaaataacaaaaacaaacactttcttacttcataagatcaccttt

SEQ ID NO: 23855 - DNA, 257 bp, Glycine max
  Clone ID: 700908859H1
aaagagttcattcagaaaccccgacgaactaaattttcagattttgtttccgatctctgaagaagagagtgatggcggaaccttggagaaacatcgacgtggagaagctgatctcgtacagcgacgacctcgtcaaggtgttgtcggagggtccgcgcgacctcaacaacctctctgcatctctccaacaaacacgcgctccctcttcctcctgcgactccgacctcaatgaagctcgctccttcctccatgactat

SEQ ID NO: 23856 - DNA, 261 bp, Glycine max
  Clone ID: 700908862H1
ggaatgtatgattccctgaagccagtagttttggttggtgggttgcaggatagtttctttgctagtttccttttgggatggggaatcacaattggtgctggtttggcttcttaccccattgacactgttcgtagaaggatgatgatgacttctggagaggctgtgaagtacaagagctctttgcatgcattccaaacaatcgtcgcaaatgagggtgccaagtcactcttcaaaggtgctggtgcaaacatattgcgtgct

SEQ ID NO: 23857 - DNA, 262 bp, Glycine max
  Clone ID: 700908863H1
gtgaatgcgtatccgtttttcgcttacgctgcaaactctgataaaatctctttagactacgcgctattcaaggaaaaccccggcgtggttgattccggtaatggtttaaaatacacgaacttattcgacgctcaaatcgacgccgttttcgctgccatgtcagcactcaaatacgacgacgttaagatcgcggtttcggaaacgggttggccttctgctggggactctaacgagattggagccagccccgacaatgcggcgt

SEQ ID NO: 23858 - DNA, 255 bp, Glycine max
  Clone ID: 700908865H1
ctacctctcccttcaagatgcagatcttcgtcaagaccctcaccggcaagaccatcacccttgaggtggaaagctctgacaccatcgacaacgtcaaggccaagatccaggacaaggaaggaatccccccggaccagcaacgtctcattttcgccggaaagcaacttgaggacggccgtacccttgctgactacaacattcagaaggagagtactcttcacctcgtcctccgtctccgtggtggcatgcagatct

SEQ ID NO: 23859 - DNA, 255 bp, Glycine max
  Clone ID: 700908866H1
cacacactagctctcttgttttctttcttcttcaacataacatgcagtctccaattgcctcatgaatcatcattagtcagggtttatcctctaagaaaataaacatactatagcaatgagtgcgtccaggttcatcaagtgtgtcactgtgggtgacggtgccgttggcaagacttgcatgctcatctcctacaccagcaacacttttcctacggactacgtgccaactgtctttgacaatttcagtgcagatgt

SEQ ID NO: 23860 - DNA, 255 bp, Glycine max
  Clone ID: 700908869H1
catggaagcaatatatatggagtgctatagagatagagagagagagagaaagaaaagagtgtatgtatttatgcgtttgtgtgagagatagagagatagagagagagaaagagttgttgataaaaacataattattttttcttcttggtctttggagggtcatgtagatgtagtagctatagatttttggtttatttgttgataccctttttcttctttatcttatttttgttttgaaatctgaaacctttcaaa

SEQ ID NO: 23861 - DNA, 251 bp, Glycine max
  Clone ID: 700908870H1
gtgaaagtgagaaaaaataaaaatcaaagagcataatgtcagggatcattcacaagattggggagacccttcatgtgggagggcacaagaaggaggaggagcataagggtgagcaccatgctggagaatacaaaggggagcaccatggtgaacccagtagtgagtacaaaggagagcatcatggtgaacacaaagctggagagtaccatggtgagcacaagccagagcacaaagaggggttcctagacaaa

SEQ ID NO: 23862 - DNA, 252 bp, Glycine max
  Clone ID: 700908873H1
agttagggtttttaggtatcagagagaacggtgtatatagaaaccctatgtattcctccgatgcaccaggggaattgaatatatatagtaagaaaaaggcaaaaaaaagaggtgaaaaaaatttgtctggtagattgttaattctgttgttttgcgtgtatctggactcaggtaatttctaaagcttatctcggttttccatgcgctattcgattgaggattttaatatctgccagggtttaggactttttt

SEQ ID NO: 23863 - DNA, 255 bp, Glycine max
  Clone ID: 700908874H1
ctggtgaatgcgtagaaaaggaaaataaagaaattagcgtgaaaaatgttgggtgtgttcagcagctccatagtgtcgccgccggaggagctcgttgccgccggcagccgtacaccgtcgccgaagatgacggcggcggcgctgcggaagtggttcgaggagaagaacccctccgcagtgtcggtggaggtcggagagcatgtccagcacgcttatacccaccagaacgagtcgccgtttcagcccagatccttt

SEQ ID NO: 23864 - DNA, 256 bp, Glycine max
  Clone ID: 700908876H1
cttatagcttcatcccaaaaagctcttttccttctaaatttgattccttagttcagcattctattattatatatggcttcttcaccttcctcagaaaacaaaaacctagagggagtagctggtggtgccggagagaaacccattccacttggtgagaacgttctgcagaagcatgctgcattctttgacttgaataaagatggtgtcatctacccatgggagacttttaaagggttgcgtgaaatcgggactgggg

SEQ ID NO: 23865 - DNA, 257 bp, Glycine max
  Clone ID: 700908877H1
gttctgaacgacttttcaagagaatcaaaccatggcagtgaaagtatacggtccccactgtgcttccaccaagcgtgtgctgtcttgtctggttgagaaggaagtcgaatttgaggttgtccctgatgatgtcactaagggggagcagaaggatcctgagtacctcaaactacagccatttggagttgttcctgtcatcatagatggagattataccttatatgaatctcgtgctataatgaggtattatgcagaaa

SEQ ID NO: 23866 - DNA, 266 bp, Glycine max
  Clone ID: 700908831H1
agctcttcagttttcacgtcttacattgttttgagtctagtgatggcactagcaattagcggtttcaatttcaaaggggcagaggcagcacgtgccttctttgtgtttggtgattctctcgttgacaatggcaacaacaactacttagccaccacagctagagcagacgctccaccttatggcattgattatccaactcgcagacccactggccgtttctctaatggcctcaatattcctgattttatcagtcaagaacttgggtc

SEQ ID NO: 23867 - DNA, 246 bp, Glycine max
  Clone ID: 700908794H1
cgaagagtataaaaaagaaattcttcgttacatgtactatcaccagaatgaagatggaggatggggactacacattgagggtcacagcgacatgttttgtactgcactaaactatatatgtatgcgagttcttggagaaggccctaatggaggtcatgacaatgcttgtgctagagcaagaaaatggattcatgatcatggtggtgtaacacacataccatcatggggaaaaacttggctttcgat

SEQ ID NO: 23868 - DNA, 250 bp, Glycine max
  Clone ID: 700908796H1
catgacttctctttacatctgatacagtctctttcttttctggcttttctcttgtttgataattgatatgccacttctaatctttggtagtattgtagttaaaaaccattggcaaggacataacatattaacattagagtgcaagaagtagggcttcaatctgaaggagaataagatcatgagaaagatattcagcagtgataacttcaaaggagaaaatcagaattcgtcagaggccaaaaaggaaagt

SEQ ID NO: 23869 - DNA, 262 bp, Glycine max
  Clone ID: 700908801H1
caaacactaacaacaatgctgataaaaaacaaaatgcggcctaggtcaagtacatattgcgtggggatgacaaccggacaacgctcatgataaaaaatattcccaataagtatacttcaaagatgcttcttgttgccatagatgagcaatgtcgaggaacttatgattttctgtatttgccaattgatttcaagaacaaatgtaatgttggctatgcattcatcaatatgattgatcctggacaaattattccattccacca

SEQ ID NO: 23870 - DNA, 258 bp, Glycine max
  Clone ID: 700908803H1
ctggaaccctctccttcttcctcctcgtttttcttcactcaaacatgcttttccaacaccattcggttcccgtagctcacaattcagtctcagaaaccgttcccattcataaggaaaaggaacaaaccctaccttctgtcaaacctacttactcccccatccctcccaatcgaggccttcgaacccctcacatcgggtaccatgttgatgggactactcgcaaattcttcgagggttggtacttcaaagtctccattc

SEQ ID NO: 23871 - DNA, 258 bp, Glycine max
  Clone ID: 700908804H1
ttcttgtcttctggtgcttatataatgacgtactagctagcctcatttttcttcatccttattatttctctctctttctttccctatattcattttctgtgctttgaaagatgactggggttcctcaagaagcacccgtttctcttgatcagctcaagcagacactggatgagtttgcaaaggagagggattgggagcagtatcatagcccaaggaacctccttttggctttggtgggtgaagtgggagaattgtctg

SEQ ID NO: 23872 - DNA, 246 bp, Glycine max
  Clone ID: 700908805H1
ctgatattttctcttccctataggcatagctggctgtgagcaattgtggtttcacagaacgtgctcttttcaactatggcggagaaacacaacatcaagaacccagccgtgaagcggattctccaggaggtcaaggagatgcaatcaaacccttccgatgactacatgagcttccctcttgaggttcttttctttggtttcgctttctctactattattcattcttcaatttcactaattgtgtag

SEQ ID NO: 23873 - DNA, 251 bp, Glycine max
  Clone ID: 700908806H1
ggttaatccatttaccaagtatgcattgcctatatctccagtggcaatgagtctggaagagttgataccgtcaaaccatgccaagtcttatctatattccatcttcatcagaacagggctggttctttctaccctatttattggtctctcagttctcctttttggtctggtgatgtcattgattggatcattactcacaatgcttgttactttgatactaccctgtgcttgtttcctaagaatctcggggc

SEQ ID NO: 23874 - DNA, 260 bp, Glycine max
  Clone ID: 700908808H1
gattgattcaatgagagcttcttccccaactcgtgccaaatcagaaagccaagaaaaaagatcttggattctttatcacccttcagctctgaacacgtttgagcaaatagtatgtagtgccaaaggaaagcaagtcgtagtttttcttgactacgatggaactctctccccaattgttgcagatccggataaagctttcatgactagaaagatgagagcaacgctaaagggcatagcaaggcattttcccacagcaatag

SEQ ID NO: 23875 - DNA, 261 bp, Glycine max
  Clone ID: 700908809H1
caaaacgtagcaagagcagttacaaacgttcagtgttgtattttcaattcagattcagaaggagacgatggaagaacccgtgaaggaacagcccctctctgctgggaactctgcgcgacccaagcttcagagatacgcgcttcgttcgtcctctaaatccaaggaaaacaagcaagacaccgcacccgatctctccatttcttctgaatctaagagggggttaagtactccacacgtaagcagaagtgtaggtggtcttga

SEQ ID NO: 23876 - DNA, 257 bp, Glycine max
  Clone ID: 700908810H1
gacacatcccatttcttctgcctgcgccatattacacaaaattttcttcgcggtaactcaaaagacaaacatttaaagaaaccactcttgctggctggtttcgcataaacggagaagatgcacttgtgacatcttggggtatccgtgccaataagccaagtgcagctaaatggcttgatcaactacccaaacaaaattgggtacaatgcttcgataagggaaaatgttaaggacatatgactacaaatttgtctgag

SEQ ID NO: 23877 - DNA, 259 bp, Glycine max
  Clone ID: 700908812H1
cactctctctgatgaacttcacattcacgcgccctcctcatgctgcacccttccctaacactcctcctcctcctcctcctctttcaccccaacgccggggaccctaacgacgccaaaatcctccggcaactccgcaacgggctggacaacccagaacaactgccatggccggacgagggcgacgacccatgtggttggaaatacattttctgcgacacaacaaacgcgtgaaccagattcaacccaagggcttaaacct

SEQ ID NO: 23878 - DNA, 267 bp, Glycine max
  Clone ID: 700908813H1
caggagcattttacatcaaaaattttatgcaatctgaatttttcctcgtgagtgtcactcttgaagacattccaaatcatggaaccattcactttgtttgcaactcatgggtttacaatgcaaaaagttacaaaatggatcgcattttctttgctaataagacatatcttccaaatgaaactccaactccactagtgaagtacagaaaagaagaattggaaaatctaagaggagatggaaaaggagagcgcaaggactatgatagga

SEQ ID NO: 23879 - DNA, 263 bp, Glycine max
  Clone ID: 700908814H1
cacttctacagattcttttcttttcttttctttctcttcttggtttggttgctggaatactatggaatctaatccaacaaccatggacgcaaaacgcgaactcgaagtgcaagactgggaactgctccacccaaacgacgacgattcaatcgtgttgcgtgggcccccactcgactctatcctccccgatcacttctcccttaatcccaattccagttgcagttccaattccaattccaattcctcctccgaggtcgatcgca

SEQ ID NO: 23880 - DNA, 266 bp, Glycine max
  Clone ID: 700908815H1
cgctctctctctccttctcgctctttcagctttgacttttgttggaaactaaggcctaatcaaaatggtgaagttcacagctgaagagctacgtcgtattatggactataagcataatatccgtaatatgtctgtcattgctcatgttgatcacggaaaatcaaccctcactgattctcttgtggctgctgctggtattattgctcaagaagttgccggtgatgtccgtatgactgatacccgtgcagatgaagctgagcgtggta

SEQ ID NO: 23881 - DNA, 259 bp, Glycine max
  Clone ID: 700908817H1
gttcattctctttgcgcagttccctacctctcctttcaagatgcagatcttcgtcaagaccctcaccggaaagaccatcacccttgaggtggaaagctctgacaccatcgacaacgtcaaggccaagatccaggacaaggaaggaattcccccggatcagcaacgtctcatcttcgccggaaagcagctcgaggacggccgtaccctcgccgactacaacatccagaaggagtcaacccttcaccttgtccttcgtctc

SEQ ID NO: 23882 - DNA, 261 bp, Glycine max
  Clone ID: 700908818H1
cagcgactgagtcgcggtctcttcccaactcggaactcagtccattccgcatttatcttcaaaccaaatttcttctgaagaaggagatttgaattcagaattgagtgagaagaagagaatagaaatgggctccgaattgattttcagaggccacgaggctcagcccgtggacgactcgtactcgccgaagccccacaagccctggttcaccgtgactcgcccgattcactacatgctccgcgagcagcgactcgtcttcgt

SEQ ID NO: 23883 - DNA, 245 bp, Glycine max
  Clone ID: 700908819H1
ggaaaaggcgtcttcataaacgccgcccaagacttctcatacccttttattcattccattcgtttctagggttcttcttttctttgccgagaaaatgagagagtgcatttcgatccacattggccaggccgttatccaggttggacacgcctgctgggaactctattgccttgaacacggcattcagcccgatggacagatgccgagtgacaagaccgttggcggaggagacgacgtctcaacac

SEQ ID NO: 23884 - DNA, 192 bp, Glycine max
  Clone ID: 700908820H1
aagtatagttcgatagtgtttgaatagttggcagtgattttgtgtttagaataccttcccggtccttctatattttagaagcctaagattaccaatccgaattgatctgtattaccagaaggtttaatgttgtatcttgtatgcttaattattttatcccaattttttaaaagaattttgagtttttcgacc

SEQ ID NO: 23885 - DNA, 259 bp, Glycine max
  Clone ID: 700908821H1
ctcagtgaaagagaatccgaggcgaagagaagagaaaaattaagatggaggggaaggagcaggaagtgtcgctgggagcgaacaagttcccggagagacagccgattgggacggcggcgcagagccaagacgacggcaaggactaccaggagccggcgccggcgccactggttgacccgacggagtttacgtcatggtccttttacagagcagggatagcagagtttgtggccacttttctgtttctatacatcactgt

SEQ ID NO: 23886 - DNA, 258 bp, Glycine max
  Clone ID: 700908822H1
ggtttttgaagactgctgcctatggacactttggaagagaagaccctgacttcacatgggaagtggtcaaacccctcaagtgggagaaggcctaagtaattcattccactgctctatgctggaagttttttgagcgttgcccttataatatgtctaatatccataactttccacgtctcttactctgtgtgtttctctcctcttcctcctattttgttatttgtatgttcttttgtaattttttacgtgatcaactaa

SEQ ID NO: 23887 - DNA, 257 bp, Glycine max
  Clone ID: 700908823H1
gtctgccttatctgctgttctagtttattggcattgggatcagtaactgcaattcccaatgcaaattttcatcgggcgccaaggagcactagtgtgcttctggttgttgtctgtgttttttgtggtaacaggattcaacaatgaagagcacaggacagtggaggtagttggcctaggagaatgcgcagactgcaggcagaacaatattaagaataaccacgctttctcagggttacgtgtgacggtagattgcaagt

SEQ ID NO: 23888 - DNA, 258 bp, Glycine max
  Clone ID: 700908827H1
ggattagagggtcgccacgtttagcaataaccaaaccctctctatccttttttcttctccttctcttcgctagggttttagcttcttcctcttcacttcgttctttttcgtctctacaatgagcaacgacaaggacacattcaacgtcgccgatctcacttctgctctcaacgaggacaatagagcagaccttgtcaatgctctaagagcaagatacagagtttggctggacaacactcggatattctagagtctctg

SEQ ID NO: 23889 - DNA, 162 bp, Glycine max
  Clone ID: 700908828H1
aaaacaaaaacctagagggcagtagctggttctgccggagagaaacccattccacttggtgagaacgttctgcagaagcatgctgcattctttgacttgaataaagatggtgtcatctacccatgggagacttataaagggttgcgtgaaatcgggactggg

SEQ ID NO: 23890 - DNA, 261 bp, Glycine max
  Clone ID: 700908830H1
gcagcttgtcgcgtgcgtgcctctccggcgaggccgtaacaatccacaaacaacaagcttccaaatttctccttcgtttcgcttccaatggcatcaaatagccattcaccatctctcgagatattagttcgaggaccagaggatttctcgctctcgacaggaccccccttcgcgaacgatcaaccaagcgtcaagctcgagaaagtgagatgcatcaatgcgatattcagctacgacggatccaatctcatggtgacgaaa

SEQ ID NO: 23891 - DNA, 245 bp, Glycine max
  Clone ID: 700908793H1
cttttccgattccgtcgcgaatttccgattcatcgaagaagaagagaaaacctaaatcgcagatccgaacgcagtaaaaaaaccatggcggaagaacaccgatgcgaaactcccgaaggtcacctactctgcgccaacaactgcggcttcttcggtagcaccgccacgatgaacctctgctcgaaatgctacggcgcgatccgcttgaaggagcaagaagaagcgtcgacgaaatctacaatcga

SEQ ID NO: 23892 - DNA, 244 bp, Glycine max
  Clone ID: 700908759H1
tgctgataaggccattacacaaaattaaagtgagattccaaatctagatcaagaaaggacaaaatataacaacagaagattatatttcgcctaataattatactaattaaaagcacactttgtagaagcaattttgttttatttcttttcatgagatttacaaatatggggtcgtcctccacttttagaccttgaccatgagaagatttggcaatttatgcagggattaaaccttgttctgagg

SEQ ID NO: 23893 - DNA, 240 bp, Glycine max
  Clone ID: 700908763H1
aatgatgaaatttggaggggtgtgtgaatgacccttttcccctgtgaggatttgggaaattggggtggagtaaagttgttaactttctcagagaccatgcaggtgcattgagcttgtgttcctggttactctcctctcacttggttttgttttgtggcaagtttgaaggatgatgatctgtatagagagctgtggaagctatgttcacggccattggtggatgttcctcgtaatggggac

SEQ ID NO: 23894 - DNA, 254 bp, Glycine max
  Clone ID: 700908764H1
ctttcgcttttgcttcctaggtttttttttttgtgtcgatggcgggaaaaggagggaaggggcttgtggccgggaaaaccacggcagcgaacaaggacaaagacaaggataagaagaggcccgtctctcgttcatcccgtgctgggatccagtttcctgtgggacgtatccacaggcagttgaagcaaagggtgcaagcaaatggacgtgtgggggcgactgctgctgtgtacttggcctccattctggaatat

SEQ ID NO: 23895 - DNA, 256 bp, Glycine max
  Clone ID: 700908765H1
agaatcactcccttatccatttccacaccacatcatagttcacaaccaacgctctctcttcagcctccattctacgctctctcaactggcagactctgacgcgaagatcgaaccataatggaagagtaaattaccggataccgaataaccgtttctccgtgaaagcctccgccaaagagattgcctttgaccagcattcccgctctgctatgcaggccggtattgacaagctcgccgacgctgttgggctcactct

SEQ ID NO: 23896 - DNA, 251 bp, Glycine max
  Clone ID: 700908766H1
ccctttcattcttttatgattcttcactcaatttcattagaagctgcttctgagataaaaatatcagcttttgtagttcacactctagttgcttctgcaaaatggtaggaagtgttgatgttctagctcatgattccagcattaatggaacaatgaaacagtggcctgaagatttcagttccatgacgattatgagagatcatgtgacactcacaattggagagaatggcattggcaatggggttgttcag

SEQ ID NO: 23897 - DNA, 250 bp, Glycine max
  Clone ID: 700908767H1
caccactaccgacattttatagagtttgtaagaagaaatcaaccgaagggttccaatcaattccatatgtggctgcactcttcagtgcaatgctttggatcttttatgcctatgtgaagaccggagaaatgcttcttatcaccatcaatgcattcggttgcgtgattgagaccatttaccttgccgtatttatcacttactgccccaagaaagctaggatgtcgacattgaggatgattgttttgttaaa

SEQ ID NO: 23898 - DNA, 247 bp, Glycine max
  Clone ID: 700908769H1
cgataaggagccgtcgtcggaactcggaagtgggtttgcgtcgttgtgaggtttaacgagacgatgagggcgctgtttctgttcttcgttctcttctctttcagctatgccaccgaacaaatctttcctgctcatatcggtagcatttttcgtggtggcggtggtggccgctctcgcgaacccaaatacaagatcgaatttcatcccgaagattccccttttcaccctgatgatgatcaggaatcta

SEQ ID NO: 23899 - DNA, 245 bp, Glycine max
  Clone ID: 700908771H1
ttttgaaatttgcacgagctcaggttcaaaaacgggctcctaatctccaacatcctttggtttgcattgatgttattgaagcaggagtagttgctggtccccgtgcaggactctggaaggaagttgaagcatctgaaggacttataaagtcagatactagcaaaagcttaattcacgtatttttttctcagagaggaacatccaaggtacctggggttacagattgtggtttggttccaagacac

SEQ ID NO: 23900 - DNA, 144 bp, Glycine max
  Clone ID: 700908772H1
ctggtgcagcttgtcgttgatactttgccatttgggggagttggggagagtggaatgggatttcaccttgaggaaacgaagcttattctacaaatgaactatttcaaccgagaatattattatttgtggtattataattacgtt

SEQ ID NO: 23901 - DNA, 241 bp, Glycine max
  Clone ID: 700908773H1
tcgtatttcacttcctcacacaatccacaccaataacaaaaccctccccaaaactaaaaacgtcgaaatcaaaattcacattactacaaaatttgtctgttattctttctctccaccaccatggctactaccatagcagagcaagaagcctcatcacgtgccccgcactgctcgactacgccaccactacatccgacgacgacacggaataggaggaggaggagctggtacacgagcaaaa

SEQ ID NO: 23902 - DNA, 238 bp, Glycine max
  Clone ID: 700908774H1
gatggccagcatcttctcgaagacgagcttcaacttctctgcgaatatgtaaaagagatccttattgaggagtccaatgtgcagcctgtcaatagtccagtgactgtttgtggtgatattcatggtcaattccatgatctaatgaaacttttccagactgggggtcatgtgcctgaaacaaattatatttttatgggagactttgttgatcgaggttacaatagtcttgaagttttca

SEQ ID NO: 23903 - DNA, 245 bp, Glycine max
  Clone ID: 700908777H1
caccaacaacaacacaccatgttcacagttctgcttctcttctcactccttcttaccacctctacttcccacaacataatatcataccctcatttccaacaactcaatgtcaaacaaatcctcacagaaaccaaactcaacccaacaaatacctacaaacacctccaacaccaaaaactcaacattgccaccgaagcatcttcaccggcaaaatataaacttaccaggtccagacatagtaagga

SEQ ID NO: 23904 - DNA, 244 bp, Glycine max
  Clone ID: 700908778H1
ctttccttttccttcttgttgctggagattacccttgatctcgaaaccaagggagaagcactatcaggtattcaagttgaggcttaaaaaaaaaaggcgtgtgcatgtaaatgattaaccagatagttccatttgagagttaaagcttccatttcattgcaaggcttgatttgcttgtcgtgaattggataactccaatcaaaacaccgccacctctgtcttcgcgttcaccactgtgcagtaa

SEQ ID NO: 23905 - DNA, 246 bp, Glycine max
  Clone ID: 700908779H1
taagcactcggttgcagaacagaacaaacttctttcactctttcgcttctgaatcttcaacaatggtgctcgaggcgacgatgatctgtatcgacaattctgaatggatgcgtaacggagattactctccttctcgatttcaagctcaagcagacgctgtcaatctcatatgcggtgctaaaacgcagtctaatccggaaaatacagtgggagttctcacaatggctgggaaaggcgttcgtgttt

SEQ ID NO: 23906 - DNA, 251 bp, Glycine max
  Clone ID: 700908780H1
gccacctgaatgctttgtaaaggatgtgacaaaatgtgccaaagcctccacacaacatacgacatagtgctatggtgcactttacactctagcagtgggaactggaggaagcaagcccaacatctccaccaattgaagaaggttagcttgtgtaacttctctttagggtgaaaatcatcaaattgatcagctcctatggtggcgttcctatcatcacttctcaaatctcgaaccctctcgttcgtgccgat

SEQ ID NO: 23907 - DNA, 251 bp, Glycine max
  Clone ID: 700908781H1
ggctcagacgaccagaaactgtgccacgaggttctgtcatcttcgaacagcacagacccaaaggagtacatcgcaaccgtggtgagaacctcgatggacagcgtgatcaaagcgttcaacatgagcgacaggctgacggtggaacacggctacagcagcgccggaatgaagatggctctggaggattgtaaggacttgttgcagtccgccatccacgacctagaggcctcaggcgtgttggtcaaagagag

SEQ ID NO: 23908 - DNA, 247 bp, Glycine max
  Clone ID: 700908783H1
gtggtgccttatcgctgtggttatcatcttcttcttcctctttcttagatctcttctttctctacgccgcacgccgaaaccatggccggaaaaggagagggtcctgctatcggaatcgatctcggaaccacctactcttgcgtcggtgtgtggcaacatgaccgcgttgaaatcatcgccaacgaccaagggaacagaaccacgccgtcttacgtcggattcactgacaccgagcgtctcatcggtg

SEQ ID NO: 23909 - DNA, 250 bp, Glycine max
  Clone ID: 700908784H1
caggatagaaaatttcaatggagagtggtgaagactattccctgtttgagactaggaaagacaaaggaaggcacattcgaaggatctatgcaatctctttgtttgttcgccatatgcttcatctgggcttacagattgagccacatacccgcatatggcaaatgggcttggcttggtttgtttgctgcagaactctggtccggtttctattggctctttggtcaagccctccgctggaacatgctgttca

SEQ ID NO: 23910 - DNA, 246 bp, Glycine max
  Clone ID: 700908785H1
ccagcagcttggttccaacgcaggaacctcaagctgcggttattcaagcggaaaatcgaatctttgggaggaagaaggaggcatggacgagcttcttgcagtggtgggttacaaggtgaggtcatcggacatggcggaagtggcgcagttcctggagcgtcttgaggaagccatgggaaatgtccaagatgacctcacggacctttcaaacgacgccgttcattacaacccttccgacatctccaa

SEQ ID NO: 23911 - DNA, 245 bp, Glycine max
  Clone ID: 700908786H1
cccaaatggaacatctctatagagagaaactaagggttggattttttcggttcagttgccaccacagcctctgactgtctagagggacattggctccccacggatgtgcccagagcaagattgttgcacctactgtaagcacaaatcaaatgccatccctaaaaatgaagagcaaagtaagcgtgactgtttaacagaaacaaaggatcttcatgtgtgtccgaaatcaaaaataatttccaaaa

SEQ ID NO: 23912 - DNA, 241 bp, Glycine max
  Clone ID: 700908787H1
ggaagatagaaaaaaacaaaaacaccttattgacaccaccttttctatcatccttcaagtcatcatctttgatgatgcccatcctcctggtcattctcttggccttgttttctccttcattaggctttcctttagcatctttccaaccaaaagacaatttcctcattgattgtggtgctgaaaacacagccactctccctgatggaagacatttcaaatcagaccctcaatccagatcctt

SEQ ID NO: 23913 - DNA, 240 bp, Glycine max
  Clone ID: 700908788H1
cttggcaagagagtcatttcactgctgagggcgatgtcgagttcaaggcagtcctgtttgtaccacctaaggcacctcaagatttatacgagagctattataacgcaaacaaatccaacctgaagttgtatgttagacgtgtgttcatttcagatgaatttaatgaactgttgcctaagtacctaaactttttgctgggtcttgttgattctgacacattgccacttaatgtatcgcgag

SEQ ID NO: 23914 - DNA, 244 bp, Glycine max
  Clone ID: 700908789H1
ctcctgaatatgatgcgttagctaagaaccctgagaaggagtacttgaagactattactggcaagaaagagaccctcattgaccttacaattatagaaattttatcaaggcacgcatctgatgagttctaccttgggcagagagatggcggtgactactggacttctgatgccgggccattagaggcctttaagaggtttggaaagaatcttgacgagattgagaagaagcttataggagaaga

SEQ ID NO: 23915 - DNA, 241 bp, Glycine max
  Clone ID: 700908790H1
tcctaacctaaaccctactcattctccatacctcaacgaagctgttaaagagacggcaacactttgctgtccgccttgaccgagcagagcttcgtcttggccctcgattttgccctaaagtactctcagtcacaacagacaccgtcgtcgtcgtcgtcgtcatcaatggcaccgaagcagaccaaggctgagaagaagatcgcttacgatgcgaactgtgcgacctaatggaggagtacgg

SEQ ID NO: 23916 - DNA, 242 bp, Glycine max
  Clone ID: 700908791H1
gtgaggagcaagatgatttatgcaagctccaaagacagattcaagagggagctggatggaattcaagtagagttgcaagcaactgatcctactgagatgggtcttgatgtgttcaaaagccgtgccaactaaaatgattatataaaatagtaggctttctggtgggagcagcacccctgaagccttagttactcatatggaaaatatcctagtttgtgggatggtcaacttgggtagttatg

SEQ ID NO: 23917 - DNA, 241 bp, Glycine max
  Clone ID: 700908758H1
gtgaagcagtgtagggggaagaatctcttcttcagcactgatgtcgagaagcatgttgctgaggctgacattgtgcttgtctcggtgaacacaccgacaaagactcagggtcttggagccggtaaggcggctgatctcacatattgggagagtgctgccaggatgattgctgatgtatcaaaatcggacaagatcgtggttgagaaatcgaccgtgcctatgaaaacagctgaggcaattg

SEQ ID NO: 23918 - DNA, 251 bp, Glycine max
  Clone ID: 700908722H1
cacaaaccaaaaacccaacaaaagaacgttcatttttcattttcgtttctaatcaagagcatggccggtggttctatcaagagacattctttctccgaagaggaccatggtttcgcttcttccatggagcctgggtattctgggcacaaccaccacttccatcatggtttcgtgtctaggactttgggttatggcactttctacaaccgaggtgttaggagccattcgattttctcgccgagatctgggag

SEQ ID NO: 23919 - DNA, 247 bp, Glycine max
  Clone ID: 700908723H1
gaaagaagaaaacaatggctgttgccaacaatgtgctttgcattgctttcattatcactttaacgtgggcagttgaagctcgaattccggggatttactctggtggtgcatggcaaagtgctcacgccaccttctacggaggatccgacgcttccggcaccatggggggaacgtgtgggtatgggaacctgtacagccaggggtacggtgtgaacacggcggcattgagcacggcactcttcaacag

SEQ ID NO: 23920 - DNA, 241 bp, Glycine max
  Clone ID: 700908724H1
tgtggtcaaaagtcccctgttgaatattgaatgttcacaagctttggtcaatagtcatggtgcggtatcctgccaagagaaatgtagcccagttgtatccgtgactctggtgagacaggttgataaacggaatgatgagagaaagagaattagcttgagcaccgagagtagtgaatttctgttttcagatgtgattcctggaaaatacagcctggaagtcaaacatagtgcccctggatca

SEQ ID NO: 23921 - DNA, 248 bp, Glycine max
  Clone ID: 700908725H1
agaaaaaatgggttcttcttcttctatgtggacggcctgtgtgatttcggcatcactggcctctgcagcactctgtgccaacccacgcaggccagtggatgtacaatttggccgaaactacgtgcccacatgggcctttgatcacatcaaatatttcaatggtggttctgacattcagcttcatcttgacaagtacactggtactggcttccagtccaaagggtcttacttgtttggtcacctcagca

SEQ ID NO: 23922 - DNA, 248 bp, Glycine max
  Clone ID: 700908726H1
cccaaaaccctaggtagagagctcttcctcactctcattcgcaatggccgcagcagcacgtcctctcgtcaccgtgcaggccctcgacagtgacatggccaccgacgcctccgccaccgtccctatccctgacgtcatgaagtcctccatccgcccggacatcgtcaacttcgtacactccaacatctccaagaacagccgacaaccctatgcagtcagccgccgcgctggccaccagacttccgccg

SEQ ID NO: 23923 - DNA, 243 bp, Glycine max
  Clone ID: 700908727H1
tcttccatgccttcataacatgcataatcttcgccttctccggtgctaccaatgcatgttatgaaggcatggaaggttcttgggcgacccttgaaccttccatgccttcataacatgcataatcttcgcgctctccggtgctaccaatgcacttgtggcattcaataagtcaagattttctaggctttgtgggtattatgcaatggcttctaacgcttctgctttggcaattctcttgtgggc

SEQ ID NO: 23924 - DNA, 246 bp, Glycine max
  Clone ID: 700908728H1
gttactttgtgacaaatggagggtccttagttctgtttctctttcttctctctgttctctcaaccaagttctcaattcaatcttcttcacacttttgatctgctaattctcaaggtattcaaaattgggaggttttcgtttgaattgtgatgtccaagccactgctaggcataggggaggaggaaggtcaaagcaatgtcactttgttggtttcttcctcagtcatcatggaacgtgtgtgcctga

SEQ ID NO: 23925 - DNA, 249 bp, Glycine max
  Clone ID: 700908729H1
cacagaaattaagctagagcttcatagtttcttcttcttttctcaccttccttctctcccttcagacaaagggacaaaaaatcagtgtgtgagagagagagagagaaattccaaaaccatgtcccacagtcatctaagtttcgcctttgggattctaggtaacattgcctccttcgtgtgctttctggcaccactaccaacattttatagagtttgtaagaagatatcaaccgaaggttccaatcaatt

SEQ ID NO: 23926 - DNA, 250 bp, Glycine max
  Clone ID: 700908730H1
aatacactggcctttcagatgcatatctttctgttctgaaggcacttttacatgcttctgttgctcgaaaccgtaaacttattgtggactgggctccagctggggatcttgaagaagctacttataatgaggatcctgaggcgcataaagctgctttgagtcttttaaagggtgctaatggggttctagttccaggaggttttggtgatagaggagtgcaagggaaaattcttgctgctaagtatgctcg

SEQ ID NO: 23927 - DNA, 251 bp, Glycine max
  Clone ID: 700908731H1
cgcgaaaaagacaaaggggtttgtatgtgaatctgatcatctagagttgagaatggaaggagggaaacgaggcacgattctggtcaccaacgacgacggaatcgatgctcctggcttaagggcattggttcactccatcgtcaacgccaaccttttcaacgttctagtgtgcgctcctgatagcgagaaatcagctgttagccacagcatcacttggctccatccagtagctgttaagcaagtacagatcg

SEQ ID NO: 23928 - DNA, 258 bp, Glycine max
  Clone ID: 700908732H1
gcgtcgcctccttcaagattctgagcttccgtcatgggttgatcaacatagactccttaatgaaaatgccggtccattcaaacgcaagcctaatgttactgtagccatagatgatagtggagatttcaaaagcatcaatgaggcattgaagcaagtgcctgagaaaaaccgaaagccatttgtgatctacatcaaggagggcgtttaccaagagtatgttgaagttacaaaaaaaatgacccatgtggtgtttattgg

SEQ ID NO: 23929 - DNA, 255 bp, Glycine max
  Clone ID: 700908733H1
agtcttagtaacatcaagacttggcctgaggacattataccctagcagcctgttggtcgcttggtcctgaataagaacatagataatttctttgctgagaatgaacaacttgcattttgccctgccattgtggttcctggtgtatactactcagatgataagatgcttcaaaccaggatattctcttatgctgattcacaaaggcacagacttggaccaaactatctgcaacttcctgctaatgctcccaagtgt

SEQ ID NO: 23930 - DNA, 250 bp, Glycine max
  Clone ID: 700908734H1
gaggaagatgattcagcttctgttcacggtgatattttcggaggcttcgatgatagcgttgctgctgttcaagacccctttgaggaagctcgtgataatgggcttggatcggttgtctcgatgtactggaccacttgataggtgaagaacgtctctgggaacgttctcgttgtgttgttgtatacagtgtagagcatgtagaatattcagaagcttgggatccaagacggtactgttgttaaccccatcg

SEQ ID NO: 23931 - DNA, 250 bp, Glycine max
  Clone ID: 700908737H1
attctctttgcgcagttccctacctctcctttcaagatgcagatcttcgtcaagaccctcaccggaaagaccatcacccttgaggtggaaagctctgacaccatcgacaacgtcaaggccaagatccaggacaaggaaggaattcccccggatcagcaacgtctcatcttcgccggaaagcagctcgaggacggccgtaccctcgccgactacaacatccagaaggagtcaactcttcaccttgtccttc

SEQ ID NO: 23932 - DNA, 247 bp, Glycine max
  Clone ID: 700908738H1
ccttggcctagccagctagcgcttcttctctcgcattccgtggagatctagtgctgccaaacctcgctgaaaattagggtttcgtttcggaggtagacgaagatgttcggaagggcaccgaagaaaagcgacagcatcaggtactacgaaatcctcggcgtttcgaagaacgcttcgccggatgatttaaagaaggcttacaagaaagccgccattgagaaccaccctgataaaggcggtgatcctg

SEQ ID NO: 23933 - DNA, 244 bp, Glycine max
  Clone ID: 700908740H1
aaaagagcactgaccaaaccattttattttatttttgaatcaagggtgagggccttccatggcttccgcttgtgcttcctctgcaattacagctgttgccatctctacgccgagttccgggcagaagaatggatcaggaggttgttttcttagtggaaggaaattgagggtgaaaaaggagagagcagcaattggaggacgatcgatgggcactacagtgtgcgcagttgctgagcctgacaga

SEQ ID NO: 23934 - DNA, 248 bp, Glycine max
  Clone ID: 700908741H1
gcaggatgccgctgatgctgctagaagtgctatggttagtgtgataggactggactcagagaaggtccaacaattgtgtgatgcagccaatcaggaagttcctgaagctgagaaggttcagattgccaattacctgtgcccaggaaactatgctgtctctgggggattaaaaggagttgaagtgctagaatccaaggcaaagtctttcaaggctcgaatgacggtgcgcctagctgttgctggtgctt

SEQ ID NO: 23935 - DNA, 245 bp, Glycine max
  Clone ID: 700908742H1
catggcttccttagactctctcgatttctccctcttccgtctcagcactgacttctgctctccttttgccattttcgttcaggcgcagggatgtataataaacctaatccttgcttttgggtgggcttgtgctgcatttgtcaggaaccgagaaataaatagaataaagaagagtatgcggaatggcaataactttgcattcctttgtcatgatattagtgaacttgagcactccaatcaggctg

SEQ ID NO: 23936 - DNA, 246 bp, Glycine max
  Clone ID: 700908743H1
ttcttccccctccacccacccagcatatctctctattcctatttattagcacccctcacattaccttgtgtcaccaactactttgactcctttaccataccattacaataattatcaaacctaaccagtaaaaatggtgaccgtggaggaaatccgcaacgctcagcgttcccatggacccgccaccatcttggccttcggcaccgccacgccgtccaactgcgtctcccaagccgattaccctga

SEQ ID NO: 23937 - DNA, 242 bp, Glycine max
  Clone ID: 700908744H1
tttcaatttctctctcttctgctctcactctctcacttgggcaatcatcagcagctacaccaccatgtccatttcgcttttagtgtttgcttcctcttccctctccagtcctgccaaaaccaagttcctgccctcactttctagattttctgtcaagcgtctctgcttcctttcccatactcgtccgcacatttccgtgttttagcgctccgtgaacctgttgaatagactcgggtgtagca

SEQ ID NO: 23938 - DNA, 250 bp, Glycine max
  Clone ID: 700908746H1
gtttctttcttcaacgtttccatcatacacagatcccaatcctctctcaagccctaatttcccctcatttccatggccacagaagagcccactgtcgcggtggaacccgctcccgaacctgcctccgccgatcctcccccggaggagaaggaggagaccaaacctgaagccaaggctaagaaaaccaaggagcccaaacctaaaaaggtttccagacctcgcaaccctcccactcatccttcctacgaag

SEQ ID NO: 23939 - DNA, 251 bp, Glycine max
  Clone ID: 700908747H1
atttgtttgagattattttaacttatttggtagtgttgaatttgagattttttaagttattttttttggaggcaattttttttagtcgattaaaattattataattgataaagtttttcgtccaaataattaatactatctatgtaagccaaaggtgcggaaaatgagtagtaaagcatagaaaacagtaggagtaaagagaaaaaggatgaggtagagagaaggtgggagtggcagagagaagattacaa

SEQ ID NO: 23940 - DNA, 253 bp, Glycine max
  Clone ID: 700908748H1
attgcaacggacttggatcagttcacaaaagatctcaaaaacttgatgaataccttaaaaggcaaagctgcatcaggtgactctcgtctcaagtatgatgtaggaagcatacctggtcctgataataagcacatatatggtcttgttcagtgcacaccggacttgtcagggtcagagtgtgatgattgcttggggcggtccattcaagtcatcccaacagattgttgtgaaagcagaacaggtggtaaggttg

SEQ ID NO: 23941 - DNA, 251 bp, Glycine max
  Clone ID: 700908721H1
caatttgctttcgtttgttgttgttgttgtttctgttccttctcttgttccttaaactctttgtttcaaacatccttagaaaaggtaaaaatttaaaaaaaagaaaagaaaatggtggctgtggtttcccaagaaaatgttgcggcattggtttaacgtaccggtagggagttgcaacgttatagaaaaggtcgtcgccaagttgtgggatgcataccgtacagatttaagattggggagaagacttcctt

SEQ ID NO: 23942 - DNA, 253 bp, Glycine max
  Clone ID: 700908750H1
cctctctctctttctctttctctctcatccagatcttgcaaaaagcaaaagacccaatggcatcgagcgcgcccactccaggcgaagagttcgtgtacatggcgacctgtcgaaacaggccagtcgctacgcggagatggtggagttcttggagacggtctccgcctccgccgaaaccgaggacctgaccgtggagaagcgaaacttcctctccgtcgcctaaaagaacgtaatcgctgctctctgcgcctcc

SEQ ID NO: 23943 - DNA, 243 bp, Glycine max
  Clone ID: 700908756H1
cactttcctccctcttcttcttttgcttctgtttttgaggcgaagaaggatggaattgtaatgctgggaatataattggagaattgggggaggagtaagggaggaaatcatacacaatgcccgagttccccttgagctcgaggttggaaagggtgcaaaatagcttgagagagaatggttctctggtgtatctcaatgtgtatgatcttacacctgccaacaattatctttacgcctttgggg

SEQ ID NO: 23944 - DNA, 250 bp, Glycine max
  Clone ID: 700908676H1
agaagttctaaggaagagggaatatgcagaatacaaggtgctagttgtctatttgcaataacaacatcagcgatccaaccttagtattcttcaacccagagagatttgtaataataaattacaacaacttaaacgatggcaggaggagcttatgtagattcgggaaatgcaaagcaatttgatgggaaggtcacggcattcgtattggttacatgctttgtggcagccatgggaggcttactcttcggtt

SEQ ID NO: 23945 - DNA, 255 bp, Glycine max
  Clone ID: 700908677H1
aagagatctctttgaggtttctcatcaaacacctttagccaacaacaatggcacctttgaacaaagttcttttgctcctcaccttattgttccctgcggtggatgccacatacaaaaacaagaaagacaagaagaacagtgtttttcataagattcccaaatttccaaaatttccagttcctatcattggcggtgaccagaaagttgttgtggatggtggtaatcatgccattgccaagcccgattttgaaacaa

SEQ ID NO: 23946 - DNA, 253 bp, Glycine max
  Clone ID: 700908679H1
cttgtgttgtgatagagtcttacagagaagagtgtgtgtgtgtgacaattgggataagctctaatcaatcaatttcaatggcatcatccaattcgactcagcaagaagggaacaaacccgcaaagagaaaacccgtgttcaccaaagtggatcagctcaaacctggaaccaacggtcacacgttggtggctaaggtcttgtcctccgacaccgtcgtacacaaaccgagaccctcttccgcacacaacctcaa

SEQ ID NO: 23947 - DNA, 254 bp, Glycine max
  Clone ID: 700908680H1
aaggttttcagccatcctgatgttgttgctgaagtgccatggtacggtattgaacaagaatacaccttgttgcagaaagatatccaatggcctcttgggtggcctgttggtggtttccctggacctcagggtccatactactgtggtgttggcgctgacaaggcttttggccgtgacattgttgacgcacactacaaagcctgtatttatgctggcatcaacatcagtggaattaatggagaagtgatgcccgg

SEQ ID NO: 23948 - DNA, 249 bp, Glycine max
  Clone ID: 700908682H1
acaaattgtggtcaggttcatatatatggcgaatacactgtatataaggctaggacgaccaactctggacccaccagcagactaaacggataagggtctttactacttcctttcaaaccttgaccagaacatagcacatccagttcgaacggtttacttttataataagtctgcatgtagagggaacgaggaagcagcacaagtaataaaggatgctttgtcgaaggttcttgttcactattaccctat

SEQ ID NO: 23949 - DNA, 237 bp, Glycine max
  Clone ID: 700908684H1
caaggggcaggagcaaaagcttctggatgaaattgatcggctttcagcagaactccacgactgtgatgcgaacatacacagacgtaacatcagacattactacattggaatctctcatctctcagtcacgtgaacgcactaatcgttacacagacgagacagactagttacatggggagagacagtccctatggggcaaagagattgaacttactgctgacattgataagctgagag

SEQ ID NO: 23950 - DNA, 217 bp, Glycine max
  Clone ID: 700908685H1
acaatatcagcaatggccatgatcaacgccaaatgcgtcaacccaaagttccccaatcccaccaagctcgcaccatcaaaaccctcccttcagatcaaccttccaagggcctcatagcctcaccgaaagcatatactttccccgcgaagccatgcagagcatatcacaacctcgacctcgagcgatcgtgtcaacaatgcgactagcaaaggcacgc

SEQ ID NO: 23951 - DNA, 247 bp, Glycine max
  Clone ID: 700908686H1
cagtcggagaggggggatcgggatagagcggcgccggcgccgtcgttgcaccggtcgctgacttcgacggcggcgagtaaggtgaagaaggcgctagggctcaaaacgaagtcgtcgtcgatggggagtagcaagcgtgcggcgacgacggtggagttggtgagagtgcagatgaggatttcagagcagagtgataccagaattagaaaagcattgctcagaattgctgcatgtcagcttggaagac

SEQ ID NO: 23952 - DNA, 203 bp, Glycine max
  unsure (1)..(203): unsure at all n locations
  Clone ID: 700908687H1
cacacatcctcaaccatggcagcaccatcttcagcgacaaagtcaccatcatcctcgaacacgcagcttccgctgacaccactccccggcagctacggcctcccgttttttggcagcataagcgcacagacacaacctacttctacacaccaagcgacgcgtccacgnttcttcgacgacgagagattgcaaacacacaactc

SEQ ID NO: 23953 - DNA, 228 bp, Glycine max
  Clone ID: 700908688H1
ttcgtttctgaaattctcccgagatggacgagaacgtgctcgacgatattatccggacgctcatcgcggcgaagaacggtacgacgaagcaggtgctgcttaccgaggcggaaattcgtcaactctctgcttcctccaaagagatctttctcagtcaacctaatcttctcgaactcgaggctcctattaagatttgtggagatgtacatcgccaatactcagatcttt

SEQ ID NO: 23954 - DNA, 247 bp, Glycine max
  Clone ID: 700908690H1
ttcacattttagaagaataccccctcttttgctgcatcagaggagttgtaaattaagagcatggctgcacaagctcttgtatcatcatcttctcttaccttctcagcggaggctgcaagacaaagtcttggaccaagatcactccaatctccatttggcttctccagaaaagcctcctttcttgttaaggcagctgtaagccctcctgtcaagcaaggatcagacagacctttgtggtttgcatcaa

SEQ ID NO: 23955 - DNA, 249 bp, Glycine max
  Clone ID: 700908692H1
cacttaagccactgtgtggaactaacaacaacacaaggccatcatcatggcagctgcttctcctatggcaagccaactcaagtccaccttcactaaaactcttgtagctcccaagggcctctctgcctcttcaccactccacctcctgccttctaagaggcaatttagcttcactgttagggccatccaatcagaaaagccaacctatcaagtgattcaaccaatcaacggtgatcccttcattggaag

SEQ ID NO: 23956 - DNA, 256 bp, Glycine max
  Clone ID: 700908694H1
tgtgccctccctctttctagctatttccctctcttaacacaattaacaaccctatatcatatcatatcaactccaaatgatgaaaaatattgggttgtttcttcttgtggtggtggctacttttgtggtggcagccacagctggtagcttttaccaagactttgaaataacatggggtggtgagcgttgcccaaaatctatgaaaatggaaatcttctcaccctctccctagacagagcctctggctctggctttc

SEQ ID NO: 23957 - DNA, 259 bp, Glycine max
  Clone ID: 700908701H1
ctcgttgattcggatctagagtcttttttcactcttcagttctcgttgttgttcttcgctttcctgaaactagggttttcaatttcgattcattcgttaataattaaagatgtttgggagggcaccgaagaagagcgataatacgaggtactacgaaatcctcggcgtctcgtagaacgcttcgcaggatgatctgaagaaggcttacaagacagccgccatcatgtatcaccctgactaaggcggtgatcccgagaag

SEQ ID NO: 23958 - DNA, 257 bp, Glycine max
  Clone ID: 700908702H1
gcagacttaacaacagcacaaagcgggttactgtctgttcaagctaccatctctctctctctttcttagtgcctccttgccagaagttaaaatggcccaagaaactttcctattcacatctgaatcagtgaacgaggggcaccctgacaagctctgtgaccagatctccgatgctgtgctcgatgcatgcttggagcaggaccctgacagcaaggttgcctgtgaaacctgcaccaagaccaacatggtgatggttt

SEQ ID NO: 23959 - DNA, 256 bp, Glycine max
  Clone ID: 700908703H1
cgcactgtgtaatgctatctacgatggctctctctgcgcatatttgccgtttccccgccacgcgcgctgacactgctttgccggagactctcaccagaatccggtgccagaagcctctctctgtccgatgctctggcgattccccttccggctctgtgggttcggagttcgatccgaaggtgtttcgtaagaaccttactcggagtaagaattataaccgcaaaggatttgggtacaaggaagagaccctccaact

SEQ ID NO: 23960 - DNA, 243 bp, Glycine max
  Clone ID: 700908704H1
gaagtatatccctagggaaaaataatttcttcacatttacaatgaagcaatccactctattcctgttcctattcctattccccctcgttcatgctctttcttacgaagctgcttatattagagatggcctcaaatcctattcccagcttgatctccctcactccgtttttggttctgaaagtgtagccttcgattgccatgggaaaggaccatatgttggagtgtctgatggtagaattctca

SEQ ID NO: 23961 - DNA, 254 bp, Glycine max
  Clone ID: 700908705H1
ctccttcgttctgaaaatcgtagatttttgttttagggtttctcttatataatcttttcgtaacacaaaaaaaaatcacataaatcttcctttatatttattactatttcgttttttctttggattaattaactaggcttgagctatccgaataataataataatagtttcggagaatggaaaagaaaaaggtagcagttcccctcgtgtgccacggacactctcgccccgtggttgatctcttctacagtccc

SEQ ID NO: 23962 - DNA, 249 bp, Glycine max
  Clone ID: 700908706H1
gtctccattgcccctcgctctctctattggttcacgcgcggcaattggagattcacgcgccaccatggcctcaccaccgacactccctatctcctcccaatccagcgcctccggcggctccgcctcgcagtcccagcctccgatcgcaacgccggcgttccgcgccttcatctcccgcatctcctcgtccctccgtcacgcctttgcgcacgccgcccgtgggcggactcatcgaccggagctccatgt

SEQ ID NO: 23963 - DNA, 245 bp, Glycine max
  Clone ID: 700908711H1
cttctttattccttttgtaatttcattcattcttaatctttgtgaaaactaatgttcatcgagaattttaaggttgagtgtcctaatgtgaagtacaccgagactgagattcagtccgtgtacaactacgaaaccaccgaacttgttcacgagaacaggaatggcacctatcagtggattgtcaaacccaaatctgtcaaatacgaatttaaaaccaacatccatgttcctaaattaggggtaat

SEQ ID NO: 23964 - DNA, 249 bp, Glycine max
  Clone ID: 700908713H1
gtagtgtgtggttgaaagttaagaagtagcaaagatgtttccattcgggcacaagggtcaaaagataaaggggactatggtggttatgcagaagaatgtgttggatatcaacagcatcaccagtgttgacgggatcgtcggcaccggcttagacttcttaggcagtgcactcgatacagttacttttttagcctcctccatctccatccaacttattagtgctaccaaggctgatggtgggaaaggaaa

SEQ ID NO: 23965 - DNA, 257 bp, Glycine max
  Clone ID: 700908716H1
ctccgctggatttagagattggtcttccttgatgatgagtttttgcagtgaagaagatgaagaatctaccaaagggaatgagtatttttctaggcaaaggaatgtgatacagacgaagggcttccgcataaaaagtatcatgagcagtcaaatggatgctttggctgttgcagatagaggaataagatttgttttgcttccggaccctatatttgacaagtttgagcagcaaaagagagcatagatgctggatatat

SEQ ID NO: 23966 - DNA, 262 bp, Glycine max
  Clone ID: 700908717H1
ctctcccccacctttgaattaatccaccttctctcccaatccaccaccgacacctacttccctcccaataatgccgccaaccaaccttctctcggccacgccaccgccgtgctcaagctgcaaaaggtctaccgtacccgccttgcaggttggccgactccgccgttgttgccgaggaggtggcaagccatagactatgtaagggtaaaccacagcaccatctcgttctttaatttgccggaaactgctgcgtcgtgctgga

SEQ ID NO: 23967 - DNA, 254 bp, Glycine max
  Clone ID: 700908718H1
aaagaattgaagaagtggttttaatattttaccaccatgaagctctaattatacttgccaacatttgtaatggcaagtccaataattagacatggtggattatttgtttgttgtttagtgtgtaacaatatgtagtacttttccctcccaataatagaatgtcaagtcttgcatatatttttcatctctctagttcattattaatttgactcagatcaagaacttttacttttgtgttattatgcaaaaacttg

SEQ ID NO: 23968 - DNA, 248 bp, Glycine max
  Clone ID: 700908675H1
gcaaaacctctcttcttctgattgattcacttctcgatttttctgttttcgttttcattttcggtttccgatctaatatcgatgcgattcgccattgccggaaaatgagtcctccggcgagtgtccggtgatgatcgctctcgagagaggctgttgttgttgttcttcttcgacgtcatggttttgttctgagattctgctcactttcaccaaaacggctttactatttaccgcgtttcgctttcgtg

SEQ ID NO: 23969 - DNA, 255 bp, Glycine max
  Clone ID: 700908720H1
gcaactgcgattttggatcggaacctcttcagcggcgtagcaatgggacactccaacgtttgcaattctcatccaaaaaactacggtcctggttctcgcacttgccgagtgtgtgggaatccacatggattgatcaggaagtatggccttatgtgctgcaggcagtgcttccgtagcaatgccaaggaaattggcttcatcaagtatcgctaaaagagctgttgtcacctacggaccaatattatgttctggcac

SEQ ID NO: 23970 - DNA, 256 bp, Glycine max
  unsure (1)..(256): unsure at all n locations
  Clone ID: 700908637H1
gtgaagacctggacccatgaccctttccatgttttgagagttgctaatctgaactgaagatagcgattgaggaaaaccagtagctactggctgtctgtccagagtgatcgatagctccgaaatcaagtcaacagcagaaggctnacaacaggggacaccatcaaattcactgcgtagaaagacgctagccatatacttcattgagtctgaggatagaacgatggcctttggtcgtgggtatccagcaggatctaca

SEQ ID NO: 23971 - DNA, 268 bp, Glycine max
  Clone ID: 700908638H1
tgcaagtgaaaccaccccttctcagaaaaaggctagagggcgccctcctggctctggaaggaagcaacagctagctgctttaggtgaatggatgaatagttcagcagggttggccttttcacctcatgttatcactattggagttggggaggacattgtggcaaaattattgtcattatcacagcagagaccaagggctctgtgtatcatgtcgggcactgggacagtatcttcagtcactctgcggcagcctgcttctaccaatgcc

SEQ ID NO: 23972 - DNA, 257 bp, Glycine max
  Clone ID: 700908639H1
gcctgattaacaacaggtgctcgggaagctgctttcagaaacatcaagacaattgctgaatgcttggctgatgaacttattaatgccgctaaaggttcatccaacagttatgctatcaagaaaaaggatgaaattgagacagttgccaaggctaatcgttaaaccaacaaaggatacagtattggtgaccagaaagattttgtttcgacctttgaacttcattttcaaatattgtgtactagttttgatggctttag

SEQ ID NO: 23973 - DNA, 254 bp, Glycine max
  Clone ID: 700908642H1
ctcgctcaaagaaagtggggatgatgattacaatgagaagaagatcaaggtaggggatttgagtcatatattatttggtgttgaaccgatgaagttgacgagtccatccactgatgctgaagttgcgctcgctcttagagtcttggaagggtgttgtttgcttcaccctcagagtacggctctcgcccatcaacacaacgctattcaggttttaatgaatatattatccactcgtggagtgcttgagcaaggtg

SEQ ID NO: 23974 - DNA, 254 bp, Glycine max
  Clone ID: 700908643H1
atcgagccgctcgagccgattcggctcgagtgttctccttctcagaaatcaagagcctcacctggggaactcaaggatcaaattgggccaaacatgaccaagggtgtgctaccgaacaatcacctgattgcagttaaagacctgaatgcatccatagaagaaaggaagttccggagtgctgttatgaagttgggcaacatccaccacaagaaccttgtgaagctggaaggttattgttgcgagtttaaccatag

SEQ ID NO: 23975 - DNA, 240 bp, Glycine max
  Clone ID: 700908647H1
cttctctgcaaatgcttcattccaagatggttaggactctgtaggctgataaagacaacactcataccgttggaaagaaggatgctgctggccatgttgcttaatttagttcttgcttcctttgtcttcttgagttttatcagagacgggagtgcagggatcactatctctttcattcggtcagagtggccggcagttgacatcccccttgatcatgaaccattggcaatcccaaagggt

SEQ ID NO: 23976 - DNA, 262 bp, Glycine max
  Clone ID: 700908649H1
agcaaagtttctccctaaaaaacgaaagccttctcaattcttgcaagttgcaacccatcatccatggcctcaagcaaacccttcatcactgctttccttcttcttgtgaccttctcaagcatgagtttgagcctagcatcatctcgtcacctcttgcaaacaaccacaacgccccatttgcctggcactcccactttgcctaacccaacaacactgccacctttgccttcaaaccctacactgcctcagggcaatgttcccc

SEQ ID NO: 23977 - DNA, 258 bp, Glycine max
  Clone ID: 700908650H1
gactttttcctcagtggaacaaacctcagaaaaagattttacaaattaaatattgtttaaaagaaagatgtcaagtggagcaacacactggtgttatgcatgcagacagccaattgtgcttgatgggagagatcctgtttgcccttactgtgatggaggatttgtgcaagaacttgacgagttgcgaggaattgcacccaaccataaccataccttttcgtcacagtcaggagactttcatcaaatgcctgacatttt

SEQ ID NO: 23978 - DNA, 255 bp, Glycine max
  Clone ID: 700908651H1
ctcgagccgcgctgtggttatcatcttcttcttcctctttcttagatctcttctttctctacgccgcacgccgaaaccatggccggaaaaggagagggtcctgctatcggaatcgatctcggaaccacctactcttgcgtcggtgtgtggcaacatgaccgcgttgaaatcatcgccaacgaccaagggaacagaaccacgccgtcttacgtcggattcactgacaccgagcgtctcatcggtgatgcggccaag

SEQ ID NO: 23979 - DNA, 258 bp, Glycine max
  Clone ID: 700908652H1
ctccgctcaacaactataagattatcttcttcttcttcttctcttcaattcttctccaatcccaaccgcaccctcttccgtccctttcttcacacttccttcaaaccacttccttcgtctttctctttccgaacagatcacactatggccacctcaaacgccaaatcagtccatgatttcaccgttaaagatgccaagggaaatgatattaaccttggtgactacaaaggaaaggtccttatcattgtcaatgttgcc

SEQ ID NO: 23980 - DNA, 252 bp, Glycine max
  unsure (1)..(252): unsure at all n locations
  Clone ID: 700908653H1
attttgtccggatgggaccgaacaagggacgatgaaatcagtgtggtggaaagaagttgtgtttgtgtttgtgtttggtgttgggacaattgatatcggtggctctcaaattgtgaaccgcacatatacccaccctgcctcccacgccacatcgtacccgctctngctccctctctctctctctccgctnctctctctctctctaagctctttcaagtagagactgtgtgtctatgtgctttgtcgcggagc

SEQ ID NO: 23981 - DNA, 255 bp, Glycine max
  Clone ID: 700908654H1
caacatttcacgcttcctctgtttgctcgcacacgtcgtttttttctttttgttgcttcggagccaactcaacaacaacgccgtgcctaatccttaagaataacgaattacaacaaccaaccatgttgcattgtctcaacacttcctgttcggacatcacagtcttggaaagacaacgggaagcaaccatcaagtgccagaaccaccaaccaccctacttaacggactttaacgccgtcttcccttcttcttctt

SEQ ID NO: 23982 - DNA, 256 bp, Glycine max
  Clone ID: 700908655H1
gccaatttagatgtgttcgtattctccactccaatagcaacatcaattccaattctgatttggttcggaaagaagtgaagtcataagtaatctctcctctcttgtaaacatggcagccgaaacggaaccaaagaagatcataattgataccgaccctggcatcgatgatgctatggcaatattccttgctctacaatcacccgaggttgaagttattggactcacaaccatctttggaaatgtgtacaccactctg

SEQ ID NO: 23983 - DNA, 255 bp, Glycine max
  Clone ID: 700908656H1
aacccttgttgaaccttccttcttctaacccaagtcgcgcgcacgcagcacctcttgcttcttcttgaaccctagcctcttcgttgttgttccattgaatctcttccacattgaagcaaccgtagcctcttcgtcgagttccttccgacgagttcgaccttcccggctggaacttccgaatcaaggactgccagcagggcgttcgctccaacgtcggcaacaaagacattggtctcacttcgaagaaaccaggga

SEQ ID NO: 23984 - DNA, 193 bp, Glycine max
  Clone ID: 700908657H1
cattacaactcccagaaacttatatgggtcacataataacgatttgagtgcttatgatcaataatgtctatgtaaaagttattctagatgtagtggaattggtaagatttccctgtaacttcgttgctttgcaaatggtgagaaacccatggatgtcaccccagggcttagcatgcatagggacttgtatctt

SEQ ID NO: 23985 - DNA, 254 bp, Glycine max
  Clone ID: 700908661H1
gaaagagaagcattagcaaaagcaagaagaactagtctaagcagaaatggcctcttcagtgatggcatctgtggccctcaaacctgcccctttcactgttgagaagtcctcagttagaggccttccctccctctcaaggaactcctcttcattcagagttgtggccagtggtggcaagaagatcaagactgacaagccttatggaattaatggtggcatggctttgagggaaggagttgatgcatctggcagga

SEQ ID NO: 23986 - DNA, 260 bp, Glycine max
  Clone ID: 700908662H1
agcttatctcagcggcagactctgaaagctgtttgagtagcctcaacccggagaatagcaccaatgggagaggaggaaaacaaaccagaggaacccatggcaaaggagaaaaacccagaggaagaagcaacccaagagaaaaaaccggagcttgagtccaaagaggaagttgctgctgctgctgctgctccgccaccgccaccgccaccgccaccgcccgagattgtgctcaaagtgttcatgcattgcgagggttgcgc

SEQ ID NO: 23987 - DNA, 220 bp, Glycine max
  Clone ID: 700908663H1
caaaaacaaagtaagagttcactcaatctcactgtgttgtgagttgtgtgtgagcaccaaccaacaatggtctctctgactccgttatgtttctttattacctcgttgatcgctggtgcagacgcagcggcggagccccaaacggtgcgttttgacaccggggggttgagcagagacacctttcccaaaggattcttattcggaacggccacgtctgcgt

SEQ ID NO: 23988 - DNA, 256 bp, Glycine max
  Clone ID: 700908667H1
gaagattttcaggtgtctgagggatctggtgatgaagcagaagcttctgcaccaccttcttttccagaacttgaattgaaaattaaggacttcattgagtcccttgggggtgcagtcttccctaagctgaattggagtgccccgaaagattcagcttggataagcacctctggtacccttcgatgcatcagtttcagtgagattgcacttttatttcgagcatctgactcattggtccatgatttgtgccatgctt

SEQ ID NO: 23989 - DNA, 252 bp, Glycine max
  Clone ID: 700908668H1
tcgagattgaagaagatgatgcaggctggacccggcggcatggcccaacaagcgaaccaacaatacgcacagcaacagtaaccaccctacatgatgatgccgccgcagcctcagccccctcagatgtgggccacatcggcccagcctccgtcccagtcggtggctcctccgcaacccaccagcgccgattatgtccgtaccctctggatcggtgatttgcagtactggatggacgacagatatctctacacc

SEQ ID NO: 23990 - DNA, 254 bp, Glycine max
  Clone ID: 700908670H1
tttcagtctaacccggatttacttagttagttgggacttgcttcttagcgtgtagtggatcatccaggctagctttcctgtagtagaacgcggggagcttgaccatcagggtcttgaatagggtgtgccttttagatcttttagtaggagtactcttgaatgtactatgcagtaggttctctgtgcccttagatcccaatcccagatcgggttccaatcgcagaagtgttttcatgcgaatggctaatactcat

SEQ ID NO: 23991 - DNA, 222 bp, Glycine max
  unsure (1)..(222): unsure at all n locations
  Clone ID: 700908671H1
cacgacacgaatccatgaggagttcagagtgacccacgtcaccagcttccgaatccaactccattccgcaaaatggtactttcttcaacgatggttgagaaatcgacgctagggcgcttccacgatcaaatggtcatcctntgccgatgggatccctcgatcttcacctcgcacaagattcgcgtgaccatgctatggatcgccgccttcgcattcgttttt

SEQ ID NO: 23992 - DNA, 255 bp, Glycine max
  Clone ID: 700908672H1
gcagagctcaaaaccctagagaggaggaagagagagcgtgcaagttccggccaccaccgaccatgacattcaagcgcaggaatggaggtcgcaacaaacacggccgcggccacgtcaaattcatccggacctccaactgtggcaaatgctgtcccaaggacaaggccatcaagaggtttctggtgaggaacattgttgaacaggctgcagtcagagatgtgcaggaagcttgtgtctatgaacaatatactcttc

SEQ ID NO: 23993 - DNA, 253 bp, Glycine max
  Clone ID: 700908673H1
cggagaacgagaaaaaaacggaaaagaaggaaaacgtggacccttccgtttcgagcggaagtggaaggagttccaagaggtgggttttcttgagggatttcttaagaagcaaaagcgagggaaggagtaataacaagttctggtccactatttccttttcccccgccgcaaaggacaagaagccccaaaatcagggaaatgggccgcagaagcccaagaaggtcgccggaaagcccactaacggcatcgggaa

SEQ ID NO: 23994 - DNA, 260 bp, Glycine max
  Clone ID: 700908634H1
ccaactcttttctttgttatattattctctttcactttctgccaacccttggagtcaacatgactatcctcattgagcaatctgatcactttggggctgaagtagaggcaaagactgaaccaataaatgagagagaactggtgttggatggtggatttctgataacacagaccaactcatttgggcacatgtttagggcttataatgatgctgaaagtgagaggcatgaaggagtggagaacttctacagaaaaaatcac

SEQ ID NO: 23995 - DNA, 160 bp, Glycine max
  Clone ID: 700908589H1
gtctcgtgtcaaatattaattttaggttcttcgttacgcgttgtgttgcgttgtgcgtgagaaagtgcgcgtggtgaaaaagcatggcttctcagctcctgagacgaaccttcggaagtcgtttccttgcaaaccctagggtcttctcctccgctgcttc

SEQ ID NO: 23996 - DNA, 226 bp, Glycine max
  Clone ID: 700908594H1
cacgatgcatggtttgctgatgaagaacgagtccgaaaagcagttggtttgttggagaagccaattgtctggcatcctaatactagagagcttacttgcggtatctgttttgaaaattatcctcgtgctaggattgaaatggcttcctgtgggcatccctattgtatctcatgttgggaaggctatatcagcacatccattaatgatggtcctggatgtttgatgt

SEQ ID NO: 23997 - DNA, 87 bp, Glycine max
  Clone ID: 700908595H1
tgaccctatatttggccatgcaagtcttgataattctaatgagctttggtcctctaaagatgtgagtaaaaatgcagcacctttacc

SEQ ID NO: 23998 - DNA, 203 bp, Glycine max
  Clone ID: 700908602H1
ctctgtgacatttgtgctgctagttcatatatttgcggctgacaccgacaaggaaagcaggaaaaaaacaaaaaggagcagatgggtagctcaggtttctcatggaaattggcggatcatccaaagcttccagagggtaagactgtggctgttgtggtattcgatggttggggagaggccacacccactgagtacaactgcat

SEQ ID NO: 23999 - DNA, 265 bp, Glycine max
  Clone ID: 700908603H1
cactcgagccgattcggctcgacaggtcccaaccaggaaaaatggttctgtcggatgccgctaattttgctcggaattacgcacttatggtcagacttcgtggccctgacccaaaagggttgaagatgagaaatcacgcttttcatcaataccgttctggtgaaacaaccctttcagcttcgggggtatttgtacctgatactctttgcgattctcaagtagctacgcgtcttaatggtgataactgtgaggatagggtattggt

SEQ ID NO: 24000 - DNA, 263 bp, Glycine max
  Clone ID: 700908604H1
ttgaattgaagagggttgggaaaagtagttatggtgtgccaagcagcgagtcaaacgagatttcgggcattgaaacatgaaaatggaatcgccgggagctccaccattatagttaaagttatagcatgttttcaacctctccgagaatgccaggctgactatttccgtcatttgctcaaacctgtgacgtaattgttttgccttgattcgtctgggtgggttaaaccggttcttttatttgttttccttgttcgtgaaacaaa

SEQ ID NO: 24001 - DNA, 256 bp, Glycine max
  Clone ID: 700908605H1
attgattgaaacctacaggtaggattctcatatgttatattactggagagtacagttactggctatcttcttcactgtagaggatggagatcaacttacctttaccccaaaagaccttgtttcttgggatgtgcccccactgactccatggaaggcatgcttcagttggtgaaatggagttctgaacttttcttgctaggaatatccaaatacagccctttcacttatgggatttcaagaattcctattccacaca

SEQ ID NO: 24002 - DNA, 262 bp, Glycine max
  Clone ID: 700908606H1
caaaatcaaattttgattttgccaaggttgctgctgtttctggcagtggccaacagcatggtagtgtgtattggaagaatggcagttctcagatattgtcatcattggatcctaagaagccattgttggatcagcttgaaaatgctttttccattaaggaatcctcaatttggatggacagtagcaccactgctgagtgtagggctatagagaaggcttttgggggagccttggagttggctcgtgtcacgggatcacgtgc

SEQ ID NO: 24003 - DNA, 260 bp, Glycine max
  Clone ID: 700908607H1
gattttcattttatcctcagttcttccaccctcgtcacctgcacttgattctttcttccaatcgataattgaagaacacaacatttcaattcctctctcgatttgttttgcaagttcgataatcgaaagtgcctggtgattcgatgttgtgtttacataggagttgtttgtgaaaatgagaaggcaggggcactatggggatccatctgccaacacttgtgttggtggtagccagatgcatcatatggctggtcaaaggg

SEQ ID NO: 24004 - DNA, 261 bp, Glycine max
  Clone ID: 700908608H1
ctggaagccgcggcaatacaaaggctgcgtttgctttgctcgctcgcgcactcacaaccacaacaaggcagcagtgacaagagaaagaaagagaagaagcgcttatcgaactcggacggaagcactgagttaactcagagcgagtgaaagtgttgctgcgtgatgtatggtggtatcgcccgtggacgcctcaccgaggagcgcaagtcgtggcggaagaaacatccccatggttttgttgcgaaccggagacgctgcccg

SEQ ID NO: 24005 - DNA, 257 bp, Glycine max
  Clone ID: 700908611H1
gaaaccaaaggtatctgtttgaacagtggtgaatgcttttaatgatgtgaatatacagaagcccctcaacatatcattgaactctccttccagtatactcatgattggaagtaactctgttaccgcagaccttcactaccctctgctgctaatagttcaacgccaaaatggtccagaccatcgctagagttcatcaaatgtaatctggatgcctcactctttcgcaattatcttcttcatggacttggggcatgcaa

SEQ ID NO: 24006 - DNA, 260 bp, Glycine max
  Clone ID: 700908612H1
aaggaagagaagtttaaggtagaggtacacaagaataaccaaggggggttccatctaaatcagatggaaccagatcattcctaattctgatctgaagtttggtcaccctagcaatattgttcttatctatgtctagtgcttacccctttctctgtgccttggcaaataagtagttttacaatgtgtgtatccctttattaactgggaagctaccggtgatgttacattagtaactttgtaacgtaaatattactttagta

SEQ ID NO: 24007 - DNA, 259 bp, Glycine max
  Clone ID: 700908613H1
ctttagagaggaaacctagtggagaaaacaaccttgctaacggacaccattttgtcaagccacccatgttccagaggggggttctcagaaccaattgcatagactgcttagatcgcacaaatgttgcacaatatgcatatgggttggctgctcttggccaccagcttcatgctctgggaattattgaccaccccaaaattgaccttgatgatcctctaagtgatggtttgatgggattttatgagcggatgggtgacac

SEQ ID NO: 24008 - DNA, 264 bp, Glycine max
  Clone ID: 700908615H1
cttttcctcttcctcccattgaagcattttttcacaagcccgtgattttttcgctatctccatcatcaaatgatccgatgctgctagatcgaatttgacaaaacccacttcgtgtctgatcgaagcaacaactgggttctgtctgaattttgagataagatggaatcggatcttggcaagctcttcattgggggaatatcttgggacactgatgaggaacgtctaaaggaatattttgggaaatatggggaggtgatagagact

SEQ ID NO: 24009 - DNA, 266 bp, Glycine max
  Clone ID: 700908616H1
gacaactctcacctcctccaattccttcccaacaccaccaccagcaccagcacgcccaacacccccttcttccatgctgcacctcacactcacaccatgcaccaccccctctctactaattcctccaataatactaattactaccccttccacctctcccaaattaccgaaacaccctcccaccatgatagagcccttgctgccatgaagaaccacaaggaggctgagaagagaaggagggagagaatcaactcccacctcgacca

SEQ ID NO: 24010 - DNA, 216 bp, Glycine max
  unsure (1)..(216): unsure at all n locations
  Clone ID: 700908617H1
cagtatgtaatttctgtatgtatgcatgacatatacaagtggtaaatccaagtaaattctacagtgntcacggacactggacgcatcacgatgtctccgttacggacgagaggacccttctcttcggtgacaaggcagtcactgtttttggacacagaaaccctgaagagatcccatgggggtcaactggagctgacatcattgttgagtccaccg

SEQ ID NO: 24011 - DNA, 263 bp, Glycine max
  Clone ID: 700908618H1
tggcgatggtgttagtcacactgtgccaatctatgagggctatgcactccctcatgccattcttcgtttggatcttgctggccgtgatctgactgactctttgatgaagatcctcactgagagagggtacatgttcaccacctctgccgagcgggaaattgttcgtgacatgaaggagaagcttgcttatgttgccttggattatgagcaagaacttgagactgcaaagagcagttcttcagttgagaaaaactacgagcttc

SEQ ID NO: 24012 - DNA, 262 bp, Glycine max
  Clone ID: 700908619H1
cgcaatgtgatggagctgatgcgtgtttgtgaagctttcagaaatggatcggatccgttggagcgccaagtgagggaggacctccagaagataatggcatgtcgaactgaggggctcgattatcttggcacgccaagccatacagagcaatgaaaatggtgggttgttgatgagctatcagatgtacaaatttgcggaactgtgtacattttacatcttaccatctttttctgaggagtgactcggcaagataagcagacaa

SEQ ID NO: 24013 - DNA, 258 bp, Glycine max
  Clone ID: 700908620H1
gtccaaaacaggcagatgtttaacatcatctgtgagcttcccgaaactgttgctagaacactagttccacgcatgcgggttgttaagggaacaggcaaagctatcaattacttgacccctcccagaatcttacttgctttggtcactgcttggttacggcgaggtcgctggtttgatgatcagggaagagcattatatgcagctgaagcagaccgacttcgtaattgggctgaagatcgagcccgattttctttcacc

SEQ ID NO: 24014 - DNA, 260 bp, Glycine max
  Clone ID: 700908622H1
agcaaattaattagcttcaccatggactcattgttacttctaaaagaaattgccacttccattttgatcttcttgatcacttgtctctccattcaaacattcctcccaagctatcgcccgacactcccaccggggccaaaagggtggccagttgtgggtgcactccctctcatgggaagcatgcctcatgtcaccttagcaaagatggcaaaaaaatatggacctataatgtacctccaaatgggcactaacaacatggt

SEQ ID NO: 24015 - DNA, 260 bp, Glycine max
  Clone ID: 700908623H1
atagcaatctcatctcattcatttcaatggcaactcaaggtcaagtcattacctgcaaagctgcggtggcctgggaacccaacaagcccctaactgtccaagacgttcaggtggctccgcctcaggccggcgaggtccgtgtacaaatcctcttcaccgctctctgccacaccgatgcttacacttggggcggcaaggatcccgaaggtctcttcccctgtattcttggccatgaagctgcagggattgtggagagtgtt

SEQ ID NO: 24016 - DNA, 255 bp, Glycine max
  Clone ID: 700908625H1
cggcaccgtttttcggcttccttggcgccgcagctgccctcgtcttctcctgtctgggagctgcctatggcacagcgaagagtggcgtgggcgtggcttccatgggtgtaatgagacctgagctggtgatgaagtcgattgttcctgttgtcatggctggagttttgggcatttatggccttattattgctgttattatcagtaccggtattaatccaaaggccaaatcctattacctctttgatggttatgcac

SEQ ID NO: 24017 - DNA, 256 bp, Glycine max
  Clone ID: 700908626H1
ttaaaattttgatcatcatggcctgtgaaaatgacaaaaaaggccacctattacttgccctagggctagtgctctgcgtcaccctgaccttcttcccaagggtgaccgaaggagggtgccctttgcatgcgaccctaggaacgggctcacgagggggttcaagttctgcaacacgcacgtgccgatccacgtgagggtgcaggacctcatagcgaggctcacattgccggaaaaaattaggctcgtcgttaacaat

SEQ ID NO: 24018 - DNA, 254 bp, Glycine max
  Clone ID: 700908629H1
tcacacccaaagagaaaagaaaaaaaaaacaacagtggtacgtgatgccaccgaagttcgatccctcgcaggtggtggacgtgttcgtccgagtcaccggcggcgaggtcggcgcggcgagttctctcgccccgaagatcggtcccttgggactctccccaaagaagatcggagaggatattgcgaaggaaaccgcgaaggactggaagggcctccgcgtgacggtgaagctaaccgtgcagaaccggcaggcg

SEQ ID NO: 24019 - DNA, 235 bp, Glycine max
  Clone ID: 700908588H1
ttcttctccttgctttgaccttttgccggttgttgtgttgcattggtgcaaatggcgttcttcagaagcgtttctgcactttctcgacttcgctctcgcgtgggccagcaatctaatcttgcgaattcagttagatggctccaaactccgagctccattaacactgatctttattctgagttgaaggaactagttccagagtatcaggaacgtgttaagaagctgaagaaagatc

SEQ ID NO: 24020 - DNA, 259 bp, Glycine max
  Clone ID: 700908632H1
tagatttgtaatttttttttaatctgaggcactaaactaggctagagtgtttctcttttgttttgtggttatatatatcagcatctttcacttgttgatactctgttctctcctgcttgggcgagtgaagaggtgaaagcttgagagcatataaagcttgaggcctgatttctgcgtttctcggagaatttggcttcagaaaagacggccaaccaggggatttaggcctccggggttattcggccgtgaatgggggccc

SEQ ID NO: 24021 - DNA, 192 bp, Glycine max
  Clone ID: 700908533H1
aaatctttaatgaatttaatgctcgaaagccagatgaattcaacatattcaaaggagtcacaagaaactacccctttatgggtatcattggattaacggttgtgcttcagattgtcatcattgaatttcttggcaagtttacatcaacagtgaggcttaattggaagcattggctcatctctgtcgttattg

SEQ ID NO: 24022 - DNA, 258 bp, Glycine max
  Clone ID: 700908534H1
catgaaagcttggacatactctgagtatggaaaatccaaggaagttctcaagtttaatcagagtgtggctttgcctgaggtgaaggaagaccaggtcctcatcaaggtcgctgctgcttcccttaaccccattgatcataagagaatggaaggctatttcaagaacagcgactcccctttacctactgctccgggttatgatgttgctggagtggtggttaaagtgggaagtgaagtgaagaaatttaaggttgggga

SEQ ID NO: 24023 - DNA, 249 bp, Glycine max
  Clone ID: 700908536H1
gaagatgaagatgttcgatggaaacaagcatgagttaacctgcattacatttggttttgatatagggtttggttcctctgtggctgatagctaattgaaattggtcatcgaaatctatgatcagaaacagatctatataaattacttgtacaaactgcaaagtacccttatgttaccagatcctgaattaagaatcagaaagatgtggggtattttctgggatttaaaacacaaactatgtgtttcttt

SEQ ID NO: 24024 - DNA, 248 bp, Glycine max
  Clone ID: 700908537H1
ttcttcccgtttcatctctcccatttcttcttttcttccgctctggttcagtaaagcgaagagggttaacgttattcataatggttgcaacagccgctacggcgtcgtttcttcccgtgcctttgccagacgctggaaaagggaaacccaagaaactgggtggtggtggcggtggcggtggcggttctgtgaacctcggaggactcaaacagaaacaaggtttgtgcggtggcttgcaggtcaaggca

SEQ ID NO: 24025 - DNA, 237 bp, Glycine max
  Clone ID: 700908541H1
atccctcctcagtcattcgtgtctgcagcgtataatgttccttccaagtctaccattctcccttctgccctgcatccattttcacaatcccaatccactaaatatattaaatctaaacaccatcacactcctagagtacacatgtaatagtggaaaccaaaacaaaggagaaaaaccagatattcatatagaacaaaggaggaacattctacttggcctaggagaggtttgtggtgc

SEQ ID NO: 24026 - DNA, 237 bp, Glycine max
  unsure (1)..(237): unsure at all n locations
  Clone ID: 700908542H1
ctttggaagaagaagaaaatggaggaggaacaaaacggcggtcgtttcgacctcataatcctgggcgcctcaggcttcacaggcaaatacgtcctccgcgaaccctcaaattcctcaacaccccatcctcccccctcatatccatagccatagcgggccgaagcccacaaaaactaacccatgcccttcagtgggcctccaggcccaaccctcccccctcnctccccatcctcaccg

SEQ ID NO: 24027 - DNA, 232 bp, Glycine max
  Clone ID: 700908544H1
tggaaatggaagaaggtgttggcgctatctttctcgactccaattcagagactgtcggacttggaggtacaaaagcaaagaaagtgaaagtgctgaagggagattccgttcctgttggaacggaagtgagagcgaacgtgggagcttcccagaacaaaattcttgctgacataagcaactttccccaacaaccaaagcaccacatctctgttgaccacttctcaaggaaaag

SEQ ID NO: 24028 - DNA, 235 bp, Glycine max
  Clone ID: 700908545H1
ctcttcttcctttctctctctcctcggtgtccttctttcccacttcccctcctccgcatgccccttcttcttcctcccttccccttctctggataaggaaagacggagcaaagcgtaagatcaggcaggatgagtaaaaaacaaagagagcaaaatcactttgtcctggtgcatggtataggccatggtgcctggtgttggtacaagcttaagccactgttggaatccgccggcc

SEQ ID NO: 24029 - DNA, 231 bp, Glycine max
  Clone ID: 700908546H1
acgatatctgcggtggctagaattagaaatgctcttgcgtatgctacacatacatttttcaacaaggaagggtttctatatcgtgcacacccccattgttaccacaagtgattgcgagggtgcgggtgagatgtttcaggtgaccactttgctgagtgaggcggagagattggagaaggagttgttgcagaatccacctccgtcggaagcggatgtggaggcggctagggt

SEQ ID NO: 24030 - DNA, 232 bp, Glycine max
  Clone ID: 700908547H1
gtccgaaccattgccatggatgccaccgaaggggtcgttagagggtggcgcgtcctcaacactggctcccctattatcgttccagttggtagggctacccttggccgtatcataaatgtcattggagagcctattgatgacaagggagaaatcaataccgagcattatttgcccattcatagagaagctcctgcttttgttgagcaagaaaccgcacagcagattcttgtta

SEQ ID NO: 24031 - DNA, 234 bp, Glycine max
  Clone ID: 700908548H1
ggcagctggcgttttacactggagatactgttgggggtcttttaaatgctacatttggaaatgcaacagaactgatcatctcaatatatgcactgaaaagtggaatgacacgcgttgtccagctctctttgctgggttcaattttgtccaatatgttactggtgcttgggtgtgcattcttatgtggtgggattgttaatcacgagaaggagcaagtgtttaactaggcagcta

SEQ ID NO: 24032 - DNA, 246 bp, Glycine max
  Clone ID: 700908551H1
atttcacagtactcaaaggtgaaagagcagtttcttgattatgaggaaggcaggtttctcttaaaatgcttctggtactgtgaaacactgctaaacgagcattcgcctaaagtattttcccagttgcataacagttccttgtgtcaatctatactttttaatttgcctatggtagacatatttgagtattttatgtgaattgcccaatctaaaatattggatgtctcaaaacaaatgccgtgatga

SEQ ID NO: 24033 - DNA, 240 bp, Glycine max
  Clone ID: 700908552H1
acacaacacaaaacgcaagtcaattggcgtcggcacgattcagagatttggttcgctgcctgaaacctaatggctccgaaggccaagccggcgccatcgcagcctgctcctcctcctgccctcgaagatctcttcaccacgctcaaccgccacatccaggcttccgcatacgccaatgcccgcaagctcacagatcagattctcgccattgctcccggcgacgaggacgcgtccgatgca

SEQ ID NO: 24034 - DNA, 245 bp, Glycine max
  Clone ID: 700908553H1
ggttatgtgctttaccagcattttgggtagggttattgtacgatgaagtttctctacaaagtgttttggatatgacagctgattggactccagaagaaagacaaatgctaaggaataaggttcctgtaactggtttgaagacaccattccgagacggtttgctgaagcatgttgctgaagatgttctaaagttggcaaaggatggcttggaaagaagaggcttcaaggaatcaggatttttgaat

SEQ ID NO: 24035 - DNA, 241 bp, Glycine max
  Clone ID: 700908554H1
atcacaaccattgctgcaggcttgtaaaaagcttgtagatttgtctgtttcacgaggctctttggatgatacaagtgtcatgctaatcaaattggagcactatatttaaagttaccttagtacgactaaggtttcaagattattgcagttgagatcgcattgaggtcaagattgcgttgcagtttgtgatttttgaacaaccttggtggtgcctgatgatggatagagagtagctgattct

SEQ ID NO: 24036 - DNA, 240 bp, Glycine max
  Clone ID: 700908555H1
gtcttttctctctctctctctctataataagattcttccctctcccttctctctctctctctagaacttcgtcctccctctgcttctttctttcttagttgcagcgcgattgctgcatcgtcctccaataagagctcgctgctagtgaaccctaacacggcggcaacgagaggtgttcggttgaagctcagatcagcgatggcagcagcaacccgcacttctctgcggttcctcctctca

SEQ ID NO: 24037 - DNA, 239 bp, Glycine max
  Clone ID: 700908556H1
gtctctgcgactaatagctacagcagttttcccaactccgaacttatcgaagaagatgactcgcggcataaaacaccgtcagaaagccaagagcaagaagaaggtctcgaagaaagagagtgggtcttcttcatctttggcgccagaaattcccgcgaaggtgtggcaaccgggtgtggataagttggaggaaggtgaagagcttcagtgtgatccttctgcttacaattctcttcatg

SEQ ID NO: 24038 - DNA, 233 bp, Glycine max
  Clone ID: 700908558H1
gcattctgctatttaattccactacgtacacgcacattctcctcaaagacaacaatggcaccaacagccaagactctgacttacctggcccaggagaaaaccctagaatcgagcttcgttcgggacgaggaggagcgtcccaaggttgcctacaacgaattcagcgacgagatcccagtgatttctcttgccggaatcgacgaggtggatggacgcagaagagagatttgtga

SEQ ID NO: 24039 - DNA, 237 bp, Glycine max
  Clone ID: 700908564H1
cgtgaagcagcgtcgtcgtcgtcgtcgcttccgggcggtgcgagattgaaggtcttcgtcgtgttctgtgcgatgtacggacacgtggaggggctggcaaaaaggttgaagaaaggcgtggacggtgtggagggtgtggaaggggttctgtatagggttccggagacattgccgattgaggtgctgaatcagatgagggcgccgcccaaggacgacgccataccggagattacggcg

SEQ ID NO: 24040 - DNA, 244 bp, Glycine max
  Clone ID: 700908569H1
gaagaagaagaagatggagaagtatcagatctggagcaggagaatagcgttggcagcgtttgcgtttgctctgctgttccaatcggcctcagcagacgacgtcgttgtgctctctgaagataacttcgagaaggaagttggtcaggacagaggagctctcgttgagttctatgctccttggtgtggacactgcaaaaagcttgctccagaatatgaaaagcttggtagcagcttcaagaaagcc

SEQ ID NO: 24041 - DNA, 237 bp, Glycine max
  Clone ID: 700908572H1
gccgcattcaaatttccgccaccgacgcattaaccccttccaagccccgacggttcccgagtggtgatggcggaaacgcacgaagacacaccgaaagaaaccgttcacaaagaagaagaagaagaggaccaaagcttcgaagagctcggcgtggacgctcgtctccttcgcgccctaatcaagaaaagaatcgagaaacctactccaattcagcgcgtcgcgattccactcattctg

SEQ ID NO: 24042 - DNA, 233 bp, Glycine max
  Clone ID: 700908573H1
ttgtgaatcagcaccacattcacctgagctttttgtacaggattccgaagcattgcttcccttgcagcatcctcggctgctgcttcccttggcatgtcagttatgctttgtaaccccatcaacctcagtggtgccacatggccagctccatctgcctctagccctgcctccttcaatactgttgctcttttctccaaaaagaatgctgcacctccaataaaagcttcactgct

SEQ ID NO: 24043 - DNA, 232 bp, Glycine max
  Clone ID: 700908574H1
ctaaacccccttcttccaaattcccaatttcttctgccgttcgatttcagactcttcattcgggatttgccatagcgattccttggttctcattcattcgttgcgtgctcgttcggctgttctcgtcgttccagtgaagagttccgtttcagtcatacgaccttgcatgagaattgatggcgccaatcctgcagagctctcagccatgggtcgagaaataccggccaaagca

SEQ ID NO: 24044 - DNA, 228 bp, Glycine max
  Clone ID: 700908578H1
cccgtgtctttttctgtgtatccaaggcatcttcaagctctgaatctgcaatggcttctctactcaacatggtttctgttccaccaagaatatcacctacctcacacaccagaatcgcttcgcttcaagctcgacccgttttgccacccttttctgtctcattttccaggaggagactatcaattagagcaacagaaactgataccaatgaagttcaatctcaggcac

SEQ ID NO: 24045 - DNA, 229 bp, Glycine max
  Clone ID: 700908580H1
gcaaatccttggtcaatgcagacggtattatagagaaaacatttttgtggggtaggtacgctttggaaatgtctgctgttgtttacaaggactgggttttcactgatcaagcactgcccaatgatcttgtcaagagaggagttgccgttaaggatccatctgcttcccatggagttcggcttatgattgaggctttccctataaggcgcaagtgtataactaggcagct

SEQ ID NO: 24046 - DNA, 249 bp, Glycine max
  Clone ID: 700908532H1
acggtataccgttcaagatcgttcctcggtcactgcatacggtattatagagaaaacatttttctgcggcatgtacgcattggatatgtctgctgttgtttacaaggactgggttttcactgatcaagcactgcccaatgatcttgtcaagagaggagttgccgttaaggatccatctgctccccatggagttcggcttttgattgaggactatccttatgcttctgatgggctagagatatgggatgc

SEQ ID NO: 24047 - DNA, 239 bp, Glycine max
  Clone ID: 700908585H1
cttttacctagattttctctttgtattctgcaccagtttgtccactggttttccctgacacaaagcaagttgccaagggttgtgtggatgagatacgtaacaaaacagcatgctgtaatgctatggaaagctatgtgtctcacttgcaaaaacagagcttcatcacgaacttgcaagcgttggattgtgctgagactttggcaatgaaaatgaaaagatcgaatattactgcagatgtt

SEQ ID NO: 24048 - DNA, 252 bp, Glycine max
  Clone ID: 700908488H1
ctcataacacaaagcacaaagcaaagctcatccttgagttaaaaaatggcagcagcttcttccatggctctctcatccccatccttggctggcaaggccgtgaagctgggcccatcagccccagaagtgggaagggtgagcatgaggaagaccgtcaccaagcaggtctcctcaggaagcccatggtacggcccagaccgagtcaagtacttgggcccattctctggcgagcccccgtcctacctaaccggt

SEQ ID NO: 24049 - DNA, 246 bp, Glycine max
  Clone ID: 700908491H1
aaaaactcaatatcaaattctttgtcccacaaaagatggggttcactcccacaagtactgcaacatgctttcttcataatagcacctctggttgtgctatggtgttggaagctactaaagtgggtgtggctgaggccaaagagattggagagagcattaagggcacagggccttcaggggaatccctacagcctcttgattggggacactaaggaaatgtacacagtgctcatgcaagctgccaga

SEQ ID NO: 24050 - DNA, 245 bp, Glycine max
  Clone ID: 700908492H1
aatcaaaccaaccaccaacaagatgatttctgagtccctcttgttagtattcctcattgtcttcatttctgcttcccttctcaaactcttgtttgtgagagaaaacaaaccaaaggcccacttgaagaacccaccaagcccacctgcaatacccataataggtcatctccacctccttaaacccctcatccatcactcattccgagccctctctctccgatatgggcccctcctaagccttcgaa

SEQ ID NO: 24051 - DNA, 242 bp, Glycine max
  Clone ID: 700908493H1
atggaaggcccttaaactttctttctctctctctctctgcttcactttctcacttttgcattttcttgtgaaaaaaaaaatcctcagaaccaaaatcggttttcttctgtctctgatctctcaaagcttcaaattctccttgtttggtttgtttgtgtgtttggagtatgatgtcgccgccggcggtggtaacggaggaggaggggcggacaacgtgtcgtcgaccgtggcgtccggttctt

SEQ ID NO: 24052 - DNA, 242 bp, Glycine max
  Clone ID: 700908496H1
tcggtttatgcgttccttttttatgtgtgtgtgcgtgagagagagagagagagagagagagagagagagagcgctatattcaattagcacccttatctttacaaataggtgaattcacgagtgttagaatgaaagatgattatgaatatgaggaagctatgctcatgctctgtacttcagtttagcttatgataaaacttgttaatttgttagtttttgttagtgggaacgattgaatccgt

SEQ ID NO: 24053 - DNA, 263 bp, Glycine max
  Clone ID: 700908501H1
gagcttttctgtcatggctcatgcaatcaaagtgaagaatactttgatattcaatgcatttgttctctgtcaaatctttaatgaatttaatgctcgaaagccagatgaattcaacatattcaaaggcgtcatctactagtaatcacgtgttcctgcaatagaagctgcagagccaggggattgattgaaacagaagacaaattcgtcaaagcaacctcaaatgatcatcatgaaacagaacatgcacatgctcactctcacgt

SEQ ID NO: 24054 - DNA, 250 bp, Glycine max
  Clone ID: 700908506H1
aaaatcaagcgttacatgacaatgatggattcaatgacaaacgaagagttggatagttcaaaccccaagctcatgaatgagtcacgaatgatgcggatagctcgaggtgcaggtcgtcaaattagggaagtgatggagatgttggaagagtacaaacgtcttgcaaagatatggagcaaaatgaaagggcttaaaataccaaaaaaaggtgatatgagtgccctatcccgaaatatgaatgcccaacaca

SEQ ID NO: 24055 - DNA, 229 bp, Glycine max
  Clone ID: 700908508H1
tccacattgccttgacaaatggagagatgcaagagagtgtatttatgtggagccagatcaaagtaccgagagcaaaggtgacattttggtacaacaataagttgtgatgattaatgtagccgaggcttctttgaactttcccttgtgactgtttagtatcatggttgcttattgggaataattttgttgaaaaaaaaaacaaaacaaaaaagaaaaaaatataaagaaa

SEQ ID NO: 24056 - DNA, 78 bp, Glycine max
  Clone ID: 700908509H1
aaaaaatcgtttctcgttccccattctctactttctaccccaaaaccccaaccgcggcatcatcttcgacaccataaa

SEQ ID NO: 24057 - DNA, 241 bp, Glycine max
  Clone ID: 700908510H1
atatatcctccccctaaagcttcaacctttgggacgccctactttttttcttctatcttcattgatcatcacttctctttcttcattttccttttcggtgggaattaggataaccctcctcaatttttcaactctaaatttgatcatcaccttcacccactttactcttactaggaggaacccttctctctgtgtgtgtgttctgagttgattctgtgcttcagctttccacaaagtaaag

SEQ ID NO: 24058 - DNA, 238 bp, Glycine max
  Clone ID: 700908511H1
caaaaaaaaccccgtaagcttcgttttcacgatctttcgctccgtctggcatgtcatcagtgtgaattttcggtaaccctgggattacaacgtgcgtgttgaggtccttgagggacttggtgcaggtttcgtgaaagatggtttgataaagaagagcggcgagggtggaggcgccggaagtgtagtagaagtaagtggggatttgaagcgtgttggtgacacgtgcggcgctgtagtt

SEQ ID NO: 24059 - DNA, 234 bp, Glycine max
  Clone ID: 700908513H1
tagctgtgaagggttctccactgatggccttgctgctttagctgcaaattgcaggtttcttagggagctggatctgcaagaaaatgaggttgaagatcacaaaggccagtggctaagttgctttcctgacaactgcacatcacttgtttctcttaattttgcttgccttaaaggagaggttagtttgggagcactagagagacttgtggccagatctccttacctgaagagttt

SEQ ID NO: 24060 - DNA, 233 bp, Glycine max
  Clone ID: 700908514H1
gtttgccacttaggggaacaatcacagcatctggtgatcttgttcctttgtcctacattgctggtttgctaactggtagaccaaactccaaggctgttggaccctctggtgagattctgaatgccaaagaagcctttgaattggccaacatcggtgctgagttctttgagttgcaacctaaggaaggccttgcccttgtgaatggcactgctgttggttctggcttggcctca

SEQ ID NO: 24061 - DNA, 236 bp, Glycine max
  Clone ID: 700908515H1
cctctctctcatacacaaagaggccatgggttacttggacgatgatcatgatcatgacacattccacgaccacaacgacttcaacagaaggatactcatcatggctatagtttccttatcagtggtattggttcttgtctttacacttcacctctacgcaaggtttttcctcgcccgcagagccgccatataccaactcagcctcaacgtggcacagcacacgccgagccagacaa

SEQ ID NO: 24062 - DNA, 237 bp, Glycine max
  Clone ID: 700908516H1
ggcatcttgtgttgtgtccctcttttaagctatttccttctcttaacacaattggttgtgccaattgccatagtcaccaaccaattaacaaaggtatatatatcatcatatcatcaccaaatgaaaaatattgggttgttttttcttgtggtggtggctacttttgtggtggcagccacagctggtagctttgtaccaagactttgaaataacgtggggtggtgagcgtgccaaatc

SEQ ID NO: 24063 - DNA, 63 bp, Glycine max
  Clone ID: 700908517H1
gcgcaccttagcatggattcctcttcgtcctcttctctctcctctctcgcttcgtccacacaa

SEQ ID NO: 24064 - DNA, 256 bp, Glycine max
  Clone ID: 700908518H1
agcaaatggccaagctaattgccttttcaggaattttgaataacagggaaatgtttaatccagatttctacaactggaacagaatcaaggttaggtattgtgatggttcatcatttactggtgatgtggaagcagtgaatccagtgactaagttgcacttcagaggaggtaggattttcaatgctgtcatggaggatttactagcagtaggtgtggataatgaacgaaatgcgattatcgctggatgttcagctgg

SEQ ID NO: 24065 - DNA, 249 bp, Glycine max
  Clone ID: 700908520H1
cgttattctctctccgagcttcactctcttttcgcctctgctaaagggagaaaaatggggtactcctcctttctgggtcgtgttctctttgcctccctcttcatcctctccgcatggcagatgtttaatgaatttgatgccaatggtggacccatctcgaaagagttgattcccaaactcagtgtggtgaagaataatttatcctctaaattgggggtagcgctaccagatattgatgcccggcaattc

SEQ ID NO: 24066 - DNA, 246 bp, Glycine max
  Clone ID: 700908521H1
ccctctttctcattgtccggtgacatggagtccaagtttggtggagcccccgccagcatcatggcggcgaatttcgacgacttcaagtggatcgcctccatgttcgatcccggaaacgacgacgtcaagcccatctccgacgcagctttccaaaaccaggatgcagtaactgcattttcaacttgtggtggagtaacagatgatacccttgttcgttcccaaaacctcactcccattcaatccacc

SEQ ID NO: 24067 - DNA, 243 bp, Glycine max
  Clone ID: 700908522H1
tgccaacctgcacactcttcactcgatcatacagacaatggcaaagaatcgtggggatccttgccattgacatctacttccctcccgcttgcgttcagcaggaagcattggagtctcatgatggtgccagtaaagggatgtataccattggtcttggacaagattgcatgtcattctgtaccgaagtagaagatgtcatctcaatgagtttgacagtggttacttctcttcttgagaaatatg

SEQ ID NO: 24068 - DNA, 243 bp, Glycine max
  Clone ID: 700908523H1
ggaaggagtcgaggccggaattcaatcccttgcaggcggcggcacgccgaacgagttcgtcataatcgacgacggctggcagtcggtgggcggtgacgacaagaactcaaattcgttgcagaggctaactggaataaaagagaacgcgaagttccagaagaaggaggagccagaattagggattaagaacatcgtggagatagcgaagaagaagcattcggtgaaaaacgtgtacgtatggca

SEQ ID NO: 24069 - DNA, 240 bp, Glycine max
  Clone ID: 700908524H1
gctcgctcgtgttctgtttctctctgtttctccgttctctgtttttttttcagatctcgaaaaatgcagagcgcggctttcactttctctccctctctccctctccgcaacccttcccctaactcttggaggagaccctctctttctctccgtctccacgccaaacacagcatcaacaacaacaacagtaacagcaccgaagcgttaactccaatggcgtctcttccacttccttcactc

SEQ ID NO: 24070 - DNA, 237 bp, Glycine max
  Clone ID: 700908527H1
ccgtatcactccaagttataggtcacattgtcacaatgtggtcaccaattgttctactgttgtgccttattcctcctgtgttcttgctattcttcttccaataccgtagaaccttcaagaactcaaaccttccaccaggtcctagaggccttcccataatagggaatctccatcagctagatagctcgaatcttcatcttcagctatggaaactctcaaagaagtatggccctatat

SEQ ID NO: 24071 - DNA, 233 bp, Glycine max
  Clone ID: 700908528H1
aaaggatgctagtgggtgctgtcagagttcaacattttctgagttcactcactttttctcgcttccaaccttccttttctctgcgagcattttccgctatggccgaagaatttgtgaagggcactgttcatcaaaacggcgtcgctgtcatcaccctcgatcgccccaaagctctcaacgccatgaacctagatatggatgtaaagtataaaagttatcttgatgaatgggaa

SEQ ID NO: 24072 - DNA, 71 bp, Glycine max
  Clone ID: 700908529H1
ggtagagtaaatggcttacaatctttgctcttccccttcctctctcttcgatgacgttcgctccaggtctt

SEQ ID NO: 24073 - DNA, 235 bp, Glycine max
  Clone ID: 700908530H1
ctcaactattatgaatgctaaggatccatcgaagaatgtttttcaccttgttactgataaactaaattttggagccatgagcatgtggtttcttttaaacccgcctggaaaagctacaatccatgttgaaaacgttgatgattataagtggttgaactcatcctactgccctgtcttgcggcagcttgaatctgctacattgaaagagttttatttcaaggcaggccatccaaac

SEQ ID NO: 24074 - DNA, 251 bp, Glycine max
  Clone ID: 700908486H1
gaaacatcgtgtgcacagtaccccagaagatcgaacaaggatctccacgaagacaaacctctgttctcaactgtgtttctttacctctcacctactttcagaccataccaggctgagaagatgcagcagacaccgcctatgattcctatgatgccttcgttcccacctacgaacataaccaccgagcagattcaaaaataccttgatgagaacaagaagctgattctggcaatattggacaatcaaaatct

SEQ ID NO: 24075 - DNA, 233 bp, Glycine max
  Clone ID: 700908531H1
gaacttcatggccatggccatacttgtgatcactatgattgtgaacatctgcatacagtttgtcactggtgttatttatttgttctgggtggaacatgctgtcatcatgctcatcatgctaattttgttgatgaccatggcctcctcagccataagtcttccaaagatgaaacactactttgagctgaagtataagatgaatgaagaggcacttaaagagggttccaaaacta

SEQ ID NO: 24076 - DNA, 249 bp, Glycine max
  Clone ID: 700908447H1
gaaagatctaaaatcagacacagttcttattctccgttcgaacatattaccatcatttctccaaaaactggaaaaggatctggcagaaattcacaaaatagcttatgttgttgatgcatatgtctcttatgggagatccgatgatttgaatgaaaaagtcactattgcatcatcaggaagactagatgccattgcaagagcacggcctattctttccgcaatgtgtgaaaatctcttcacttttgaggg

SEQ ID NO: 24077 - DNA, 258 bp, Glycine max
  Clone ID: 700908449H1
attgggtgatggtaacaaaaatataactgtccaaaatgtgaactgtggacctggtcatggcattagtgttggaagccttgggaggtacgataatgaagaggccgttgaaggtcttctagttaagaattgcactttgaacaatagcgataacggtctgaggattaagacttggcctagcacgccattaacaattacagttactgatatgcattttgaagatattaccatggaaaatgtttcgaaccctgtgatcataga

SEQ ID NO: 24078 - DNA, 258 bp, Glycine max
  Clone ID: 700908451H1
cccagttcatccacatccaccccatgtcgcagaccctcatccaaagcctccagtgcatccccatccaccttatgtcccaaaaccaccagttgtgccagttacaccaccatatgttccaaaaccaccaattgtgaaccctccctatgtcccaaaaccgcctgttgtgccagttacaccaccttatatccctaaaccaccagttgtgacaccaccatatgtccctaaaccaccagtggtgccagttacaccaccatatgt

SEQ ID NO: 24079 - DNA, 257 bp, Glycine max
  Clone ID: 700908452H1
tcgatgaaactcgaatcttcagcgccatagcaagagagagaatagacatctatatcagcttcttgacgatgaatgcagaatccaatttctaaactcccgatgaattgtcttattcaaatgataacttcactttgaaggctcaagcatttcctagcaacatcagtgtcttttcccttgaatatgtagcaagtttgtctttatggagacatttgatttgactttgaagaagacaaaatagaggagaaaacaagtgaatg

SEQ ID NO: 24080 - DNA, 230 bp, Glycine max
  Clone ID: 700908453H1
atctccagttaatttttttatgtaatactcatcaaccttgacttttggatgatagtaaataatcatgtattgatattcgtttcttttgtcatatgattgttttaagatgcccggtggacctgtgtttgttctgtcctatcagatgccgtgctaatacggatattacatgtgttgtgtgttggcatgtttctagcatgccatttaaggaaatatgactcattgagtaacac

SEQ ID NO: 24081 - DNA, 257 bp, Glycine max
  Clone ID: 700908454H1
attggttggtagttgtctcaaaaatctcttcttgccctttggccataatcaaaagccaagacactgttcatacagctgctcaattatcaagccaaccttgctcggttccactgcagaatttcagtttattcttatctaggtagactccttataagtgcgcagaagttcaagtgtagagaatgagtcagcctaagattaaacgccgagttggtaaatacgaggtggggaggaccattggtgaaggtacatttgcaaag

SEQ ID NO: 24082 - DNA, 253 bp, Glycine max
  Clone ID: 700908455H1
agagcacagaatgggatgtaaaattattgaatcaatctgtttatgaccagacttctacaatagatatggctgaacattctggagaaaaagaagccgtcaacagcaatgaatcctgtggaactcccagcagtgtaattagcttaacagatgaatcaaactccagattgtcagaattacctcaaaagaatattaaggaacactgtagtcctacgaggagtggaatacttagtgctacaattgaggaaggagaaga

SEQ ID NO: 24083 - DNA, 255 bp, Glycine max
  Clone ID: 700908456H1
agcttttccctcgttgaaatgaaaatgggttcttctttgtggactttgtgtctaattttggcttcactagcctcttctgcattctgtgcctttccacggaggccagtggatgttccattcggcagaaactacgttcccacttgggcttttgatcacatcaaatacttcaatggaggttctgagattcaacttcatcttgacaagtacactggtactggcttccagtccaaagggtcatacttgtttggtcacttc

SEQ ID NO: 24084 - DNA, 254 bp, Glycine max
  Clone ID: 700908457H1
caacaacacccccccttccaacatgggcggtatctgccttgaggaaatcaaaaacgaaaacgtcgatctggaaaaaattccagtagaggaagtgtttgagtcgctgaaatgttcaacagcaggtctaacatcagacgaaggagccaacaggcttcaagtttttggaccaaacaaattggaagagaaaaaggagagcaaacttttgaagtttttgggtttcatgtggaaccccttatcatgggtcatggaagctg

SEQ ID NO: 24085 - DNA, 251 bp, Glycine max
  Clone ID: 700908458H1
ctgcactcgatcaaacacaaaatggaaaagaatgtggggattctcgccattgacatctacttccctcccgcttgcgttcagcaggaagcattggagactcatgatggtgccagtaaagggaagtataccattggacttggccaagactgcatgtcattctgtaccgaagtagaagatgtcatctcaatgagtttgacagtggttacttctcttcttgagaagtatgggattgatcctaaacaaatcggtcg

SEQ ID NO: 24086 - DNA, 247 bp, Glycine max
  Clone ID: 700908459H1
ctcaatttagattcaatgcattgtgtttaaattaaaaggtgggaagcggaacaaaaggggtttaggtcaaggttgtgacagggaagagaatcaatggaagacggtgagattgaagagggatcaattggcggtgtagaggaagaggagcaatctccagaaccgcacaagtcggaggagtctccctacgaaatgttgcgcaacagcaaggcttccgtggagagcatcgtcgccgatatgctctccatta

SEQ ID NO: 24087 - DNA, 241 bp, Glycine max
  Clone ID: 700908460H1
cttcccaataaagtatattctcttctctgccgtccaagctagtcgttctctctgtctcgtttatattttttggtttattatattcttctgtttgcacgaagcacactatgggttggaaaggaggtctcaaaaacgtggtcacaatgtttactttcatggtggccttggttgttgttcaacatgtgaagtgtggggactcagctcgcatgttacttcagcacggtggcttcgttcaacgaag

SEQ ID NO: 24088 - DNA, 247 bp, Glycine max
  Clone ID: 700908461H1
gtacatcttttggtttggggcgaaagttcagccttttcagatttgcatcaatttcaacagagaacaacgtgatttgtggattgctgtaaagtgcattatttggccattagctaatggacaagggggtgcctcctagcctcttcgtcaatgatggttctttcatggagaggttcaagcaacttcaacaagagcaggataaagggaagaatgtcaaattggaggattctaaaccaattaaggttatttc

SEQ ID NO: 24089 - DNA, 247 bp, Glycine max
  Clone ID: 700908462H1
attctccgtcgccacgacaacaatggctccaaagaaaggtgcgaaaggtggagttgtagcagcaaagaagaaggttcaggagaaggtaacgaaccctttgttcgagaagcgtccgaagcagttcgggatcggaggcgcgctgccgccgaagcgggacctgacgcgcttcgtgaagtggccgaagaacgtccaaatccaacgcaagaagcgcatcctcaagcagaggctcaaggtccctccggctctc

SEQ ID NO: 24090 - DNA, 208 bp, Glycine max
  Clone ID: 700908463H1
ggagactaccctctttcggccaccataatgtctgagtattctaataagatgactcgaggtgcctttatagctgcagtgtttgccatgcagggttttggaattttggcaggaggtgtgtttgctattatcatagcatctgtgttcaagtccaagtttgattctacaccatatacgaatcaaacgttgggttcgactgttccacacaaca

SEQ ID NO: 24091 - DNA, 226 bp, Glycine max
  Clone ID: 700908464H1
ccggtttatgcgttccttttttatgagtgtgtgcgtgagagagagagagagagagagagagagagagagagcgctatattcaattagcacccttatctttacaaataggtgaattcacgagtgttagaatgaaagatgattatgaatatgaggaagctatgctcatgctctgtacttcagtttagcttatgataaaacttgttcattcgtcagtttgtgttagtgg

SEQ ID NO: 24092 - DNA, 256 bp, Glycine max
  Clone ID: 700908465H1
gtaaggaacactcccctcaaccaaacagataatgaagtagcccaagggacccaacctgcaattggatctggaggccagtataaatattatttcaatattggaagtgttgagtcttttgaggagaagctagaggaagcgcaagaagctctgggcatttactctcatgattttgtgcctgtcacatattcttttgaactggggtaccgggaatggattacgttggcttcaatactgttgcttttgggatttctcgtgt

SEQ ID NO: 24093 - DNA, 253 bp, Glycine max
  Clone ID: 700908468H1
gaggtacttgctcacagatatatttttttttttgtctccatcattttctcgagagctttcagtttctgtggttcatctttcttcttcttaatctttccccccctctctgtaacatcccgcttctctgtatccctttctgctaatcatctgtctttcaagctaagattttctggtttgtcttttaattcaccaaaaagcaaacttagaaggatttttcgaaagccaggtgttttcagaaacgagatccaggttt

SEQ ID NO: 24094 - DNA, 121 bp, Glycine max
  Clone ID: 700908469H1
atgccaatacccatgtgcaacgaaattcaagcccaagcccaagcccaagcccaagcccaacctgggtttaagctcgtcggtttcaaaaacttcgtccgaaccaatcctaagtcggaccgct

SEQ ID NO: 24095 - DNA, 248 bp, Glycine max
  Clone ID: 700908475H1
cccaaattaccggggtggcattgttttctgggcagatttggttggggctaatcatatatttaccagcctaaaaaaatgggcacaattatatggtaacttctataaaccctcaaggtatttggaagaaagagcactcaaaggaattcctctgagtgcacctgcttcatctactccaaagtcaatggcgcgtctatgagaaagccaattgttcagcatgttggatgttctacaataaaaaaatgtaacaa

SEQ ID NO: 24096 - DNA, 246 bp, Glycine max
  Clone ID: 700908477H1
ttcaaatccaaatggccctttacattacactaataattggcctcctagtaaacaccctagtactctataaatagcatttgcatgcaccttagtcttcaccaaaatactcctcttggcatcttgtgttgtgtccctcttttaagctatttccttctcttaacacaattggttgtgccaattgccatagtcaccaaccaattaacaaaggtatatatatcatcatatcatcaccaaatgaaaaatatt

SEQ ID NO: 24097 - DNA, 245 bp, Glycine max
  Clone ID: 700908479H1
ctcgagccgcaagttttggattcgttcgacttcgactccaaaagacgaagacgacgtcgtcactctggtcaagtagtcactattcactctctattcggtcagaagcaatcctaattccttaatggagagttctgaagacgaaaatgatggagtctctggtaatcatgctactaaggaactgattcatttagcatctaatggggcaaaatttatagatgaagtactcaatggtcaaaatgaatgct

SEQ ID NO: 24098 - DNA, 245 bp, Glycine max
  Clone ID: 700908480H1
tctcaatgatgatgcaacttctcaatgctacagcaaaggcatttattgcacactttcagcttgacactcgctgatcatacttgcaagcaagcccccatccaatagcaatgccacctcaaatcaaccttttagcatctccaagtccttcactatttattttatttatgttctctttgctttgattgccttctggggtgtttctgtagtgttggaaatataaaggtggagtgtggactttaaaaggg

SEQ ID NO: 24099 - DNA, 247 bp, Glycine max
  Clone ID: 700908482H1
ctcaaagcttaaaagacacactgacagaagcaacctgtgctcccgtgtccttcaatcattgcatttgaacgatgatggtgagctgaagtggaacaacagggttgcaggacatggacactggtatggttgccgcagctcgttggattaagaagcactgcaccactatactacttgaagatctttgtcgacaccccgatttccacgtcaagctgcctccgtatcattggagttagcagaattcgggaag

SEQ ID NO: 24100 - DNA, 250 bp, Glycine max
  Clone ID: 700908485H1
atccgattcgggtcgggtttgtgttatcggaaccttcaccggaaaattctcagtcgacgtagcgaaaatggcggtatccctagcgacgaggctcgtgcggcggcgatcgccaccgcttctctggcggcgcacttttctatgtcggcagtggacgccgaaaaggaagtcgtggtcgtgccggagcttccaccgttcgattactccccgccgccatatgcgggccccaccgctgaggagattctggcgaacg

SEQ ID NO: 24101 - DNA, 250 bp, Glycine max
  Clone ID: 700908445H1
gttgtatccgtattcacaggtaattcttgacatgcttttcagatttcgattgctattgtaacatgatgacatttttcactttggactgagctcattttactggaagtttttcttggtctccgttcatgctattcataaagatcattatctagaaaaagatggcggctgagctagtcaatggtgcaacaagcgagaagctggctgaaactgattggacaaaaaatattgaaatttgtgagctagttgctca

SEQ ID NO: 24102 - DNA, 260 bp, Glycine max
  Clone ID: 700908410H1
gcttcttcaactggctccaacactatgatatcgaagattgtacgcatggttgaggatgctccatcacgtgaagcacctgtacaaaggcttgcagattcaatagcagggccatttgtatacagtgtaatgactttgtcagcagcaacatttgcattttggtattttgtaggatcacacatatttcctgatgttttgctcaacgatattgctggcccagaaggagatcctttgttgttgagtttaaaactatccgtagatgt

SEQ ID NO: 24103 - DNA, 254 bp, Glycine max
  Clone ID: 700908412H1
atttctacatccctggctctgttccgtcgatgacgatggcgtttagggtgcgaaaccctgacctccgctttctcattcttctctctctcttgtccatcacttccgccaaggtcttcttcgaggagcgtttcgatgacggatggggaaatcgttgggttaaatcagattggaaaaaagatgagaacctggctggggagtggaaccacacctctggccaatggaatggagacgctaacgacaaaggtattcaaacc

SEQ ID NO: 24104 - DNA, 253 bp, Glycine max
  Clone ID: 700908413H1
tgcatttgcagcacttgacgaagtggagagacaaatgaaatagttcaaattttagctttgagaattttcctagaatattaagcaggagagtttggtccaatttttattttggtttgcatttcctctcgtgaagttgttgtttattttttcttacaaattttagtgagaccaatgcagtaacaatagtctctgttaagttctaactggtaagggtcttgaagttgattttctaatttatttggtaaggtgatgt

SEQ ID NO: 24105 - DNA, 92 bp, Glycine max
  Clone ID: 700908414H1
gctgattatgatgcttgcagcatcaataaagcagtatataataataatgtaatagtgttaattgaaaagggattgctcttggcttcttgcac

SEQ ID NO: 24106 - DNA, 254 bp, Glycine max
  Clone ID: 700908416H1
tctgaaactaacaacaacaataaaagaccatgtcggtgaaggagtgcgagcaccacaaggggaagaagaggaagatcttccggcaagtgttctggtgcttagtggtgttccttttcatcgtgctggtcacaattcttttgatatgggcaatccttagacccaccaaacccaccttcacgctccaagacgtcaccgtctacgccttcaacgccaccgtggcgaacttcctcacttcgaatttttcggtcacgctc

SEQ ID NO: 24107 - DNA, 262 bp, Glycine max
  Clone ID: 700908417H1
ctttctttcagcttcttgttctacaatgaaaagcctctgccttgggccgtttcttgctgctagtgccccagttggtagaagagcctatggaggccacttaagcagaaagtgctttcaaaagcaacttcacttccactcacgttgtgttagtttctcttcattcatatgttctgcaactatatcagtgatgccagaattagaagagaagcaagtgtttgatggagagaaggctaatttgctagttaaagatctcagaaagagc

SEQ ID NO: 24108 - DNA, 261 bp, Glycine max
  Clone ID: 700908418H1
tccccccctagctacagagcagccaaaggggaggaataataataagcctatattctaaggccggaaaaataaaaaaggaataacaaaaatgtctggaaaggtaattatctcggctgtttctctcatcctggtggttggagtggccataggtgtggtggtggccgtcaacaagaagggcgaggatcccacacttcaatctcaacaaaaatcagtaggggttatctgccaaaacactgatgaccagaagctctgccacgaaac

SEQ ID NO: 24109 - DNA, 263 bp, Glycine max
  Clone ID: 700908419H1
agaagaagaagattgtgtctccgattattatttgaagatttctgaaacaccagagtgtttctgatcatcgtcgtcgctgatctctgtttcctccgttactgtttctgattgcagaggcgaaaaggttttccgcatcaaaatcgaattttgtttgctccatcatcaccatgggtagaatcacgaaactgggttttcttcttctacccagataagtaaaagggttttcttctttctcatttattccgacaagtgcacaaataaca

SEQ ID NO: 24110 - DNA, 262 bp, Glycine max
  Clone ID: 700908420H1
agagtttgtgtcttatttttatcaatttcatccgaattactagaattgcacccccattcttttgagtccaaattccatcaacttttgctggctaggttcgctcgaaattcttgaggccttcttaaacacgggattagttttatatatagcaatactatttatttataacgtctatttactcattgttttgaaagagatttttattcttccactatgtttttgggtgccccagaaaaaaattctgggtgctcctagtaacacc

SEQ ID NO: 24111 - DNA, 263 bp, Glycine max
  Clone ID: 700908421H1
agaatagctagtactagctcttgacccttcttcccacctttttctggtccctcctagaaatggcttccaattccattcttcttctttgtatctttcttgtggttgccacaaaggttttttcctatgatgaagatctcaagacagtggttcctgcacctgctccaccagtgaaggcaccaactcctgcctctccagtgaaatcaccatcttaccctccagggtcagtgaccacaccaactgttaaggtgccccctcctcctcag

SEQ ID NO: 24112 - DNA, 260 bp, Glycine max
  Clone ID: 700908422H1
atagattattatgtatcgattgaatcaatgactattcatgattccataattgaatcaattacatactggatccaagctaaaggaatgttatggtaaaacttcgtttgaaacgatgtggtaaaaagcaacgtgcgacttgaaagacatgattagattagctgtggattcttacatccgccattttttctagtatatagaaatgaacatgctcttgactcgacatcgtttgttctgttccactagaacttattgttttgggg

SEQ ID NO: 24113 - DNA, 261 bp, Glycine max
  Clone ID: 700908423H1
ttctacaacagagtgcagattgtaataacaaagtacactgtaaatagacactatcaatcaatgaatgaagaaactggaggaatgaatgatgtcctttatagattatacagcataacgggagattctaagcacctagtgttggctcacctttttgacaagccatgctttttagggttgcttgcagtgcaggctaatgacatagctgatttacatgctaatacacatatcccaattgttgttggatctcaaatgcggtatgaa

SEQ ID NO: 24114 - DNA, 259 bp, Glycine max
  Clone ID: 700908425H1
cttaaatttcaggcataaactgagagagagataacatcgttgcagtggcgcgcccaatggctctgggaatctctaacatactgcactgccccaaattgagtttctcccacaataattttctccccaaagttccaacctctatcagcctcaggtttccccagacagcagcatggagtgatagaaagattatctgtgctgctgcatctgcggcaggaagctctaatcccgatggtgaatttaatccttatgaggtgctagg

SEQ ID NO: 24115 - DNA, 255 bp, Glycine max
  Clone ID: 700908427H1
caaaaacctaaactcactcagtcctacgatacgattctcttccgcctcccttcccttcaactccacggcgcagatccgaggagtttgggaaaccctaattcattcctctttgcttcttctatctctattcctctaacaccagtgatggcaggtttggctccagaaggatcgcagtttgatgctcggcaatatgattctaagatgaatgaattgctttccgccgatggacaagaatttttcacttcatatgacgaa

SEQ ID NO: 24116 - DNA, 250 bp, Glycine max
  Clone ID: 700908430H1
cttagctgaaccctcacctcaatcttgcgtgctagctagctttattccaattcctacagaaccaaattattctgctagctagctagtacgtcaaataaaataaaataatcaaatatggcattcagcgggacccaacagaaatgcaaggcttgcgacaaaactgttcactttgtcgaaggtttatctgccgatggagctgcttatcacaagaactgcttcagatgcagccattgcaatggccttcttgcga

SEQ ID NO: 24117 - DNA, 252 bp, Glycine max
  Clone ID: 700908431H1
caccgattcattaacttcacacacagacacggtttttccaccacaccatagcatacaagtactagtagattaaacgccaaagaaataaattactcactttcacgtaaaccataacgtgcttccaccgcaaccaaccactatgggtgccgttaggtccataacggtgttgctactagtgttattcatggccatgagctccggcgtgcgctcgtgtccgccgtcggacagggcggcgctgctggcattcaaggc

SEQ ID NO: 24118 - DNA, 258 bp, Glycine max
  Clone ID: 700908433H1
ctcattctttcgggtgatttctttcttggggcggtagttgcatgtacactgacaaaacttgtcttaaggttggaagaggttcagacttcaaaagccgaagttaacaaggcaactacacaggccttgttgatcattgtctccatgctgcagctgggtcaatcttcaattcttccacatccaattgataatgattcttttgacaggattgtcctctgcattagattgttgtgcaataccggtgatgagataagaaaaata

SEQ ID NO: 24119 - DNA, 260 bp, Glycine max
  Clone ID: 700908436H1
aatggtttcttctaattgctactatcttgcattggtatgctgctgtgttctgctgctgctgaaccccaccgtgggggagcaggacgagcagaacttggtgctccagtaccacaaaggcgcgctcctcaaggggaggatcaccgttaacctgttatggtacggcagcatcaccccaatccaacgctccacaatcgttgacttcataaagtcgttaagctcctccccgggggccccacttccctcggtggcatggtggtgga

SEQ ID NO: 24120 - DNA, 259 bp, Glycine max
  Clone ID: 700908437H1
agacaattcaacttaagagatcaatatggccaccaccactacccagcctccctctaatatctgttttttccttctgttgttgcttctagcacactttcatttgggcataagccaacttgagctgaattactactctaaaagctgcccaaaagctgaagagatcatcaaggaacaagtcacacaactatataacaagcatggaaacactgccgtttcgtgggtcagaaatctcttccacgattgcgtggttaagtcatgc

SEQ ID NO: 24121 - DNA, 258 bp, Glycine max
  Clone ID: 700908439H1
gagagtagtgtgtggttgaaagttaagaagtagcaaagatgtttccattcgggcacaagggtcaaaagataaaggggactatggtggttatgcagaagaatgtgttggatatcaacagcatcaccagtgttgacgggatcgtcggcaccggcttagacttcttaggcagtgcactcgatacagttacttttttagcctcctccatctccatccaacttattagtgctaccaaggctgatggtgggaaaggaaaagttg

SEQ ID NO: 24122 - DNA, 258 bp, Glycine max
  Clone ID: 700908440H1
gttggcaacagattgaaaataaagcaaaggatgctactgaatgtttggtacaagaaggagcacagtttgctactaggttgactggtattaaagagaatactaaatttcaaaagaaattacagaacaatgagcagatgtcaggtctgaagcatctagtacatggagcaaagcagcatcacaatgtgaaaaatgtatatgtatggcatgcactagctggttattggggtggagtgaagccagcagcaaccggcatggaac

SEQ ID NO: 24123 - DNA, 257 bp, Glycine max
  Clone ID: 700908441H1
gaggagtagtactagtgataaggtgatcataatagagcataatataagagagtgaaaactcatggaggttggcctcaacaagaaggagaacatggggtttgaggaaactgagctaaggcttggactgcctggaaacgtaggaggcactggcactgaagaagtgctcatcaggaagagaggtttctctgagactgaaactgaaactgaggaggatgagtctgctaccactgtggatttgatgcttaatctttcttcta

SEQ ID NO: 24124 - DNA, 256 bp, Glycine max
  Clone ID: 700908442H1
gtaagcaactgcttaatttattgatcaaacgtacagctcctaattttcaagtatttttctttctcttcttgaagaattaagaagaaagtttttgtagttaatttttctccaaaggaaggaaaaggaagcaattatcaaggaggggactacggaaatagaaatggaaggaactcgtgcaaaagagggaaccctaccaccgggatttcgatttcaccctactgatgaagaacttgtcacttgctatctcgtaaataag

SEQ ID NO: 24125 - DNA, 254 bp, Glycine max
  Clone ID: 700908443H1
attcttccccctccacccacccagcatatctctctattcctatttattagcacccctcacattaccttgtgtcaccaactactttgactcctttaccataccattacaataattatcaaacctaaccagtaaaaatggtgaccgtggaggaaatccgcaacgctcagcgttcccatggacccgccaccatcttggccttcggcaccgccacgccgtccaactgcgtctcccaagccgattaccctgactactac

SEQ ID NO: 24126 - DNA, 264 bp, Glycine max
  Clone ID: 700908408H1
aattgatcggtgtgtgcattaatttgtacaattgtgcaacagcctaacacatcccacgtggctcatacatttcctagattttcagcttgctattcccagcatcatgtgattaaacaggctctatggttttttaatatttggatccaccattcctctttttggtgtcatcattatcatcattgtaatctaaccaatactataatgctttgctttgttttgctacccctcttcctctcctgtcatagcctctccatcaaatgatca

SEQ ID NO: 24127 - DNA, 249 bp, Glycine max
  Clone ID: 700908367H1
aaatccatctgcaattttaatggtgtctgaattctgaaacacaatttttattatgccattcagattgcgttagctaatgattcttttgttctgtttcattgtttgcttgttccttaaagatctcaaagggtccacaatcgcacaatttgtgaactgctcacgggataaaatggaatgcccttcaagttggatatccacaaacacatagatcttgtattctttgtagtatatttaataggacattgagtt

SEQ ID NO: 24128 - DNA, 250 bp, Glycine max
  Clone ID: 700908369H1
ctcttttgctgcatcagaggagttgtaaattaagagcatggctgcacaagctcttgtatcatcatcttctcttaccttctcagcggaggctgcaagacaaagtcttggaccaagatcactccaatctccatttggcttctccagaaaagcctcctttcttgttaaggcagctgctaccccccctgtcaagcaaggatcagacagacctttgtggtttgcatcaaagcaaagtctttcttacttggatggc

SEQ ID NO: 24129 - DNA, 250 bp, Glycine max
  Clone ID: 700908370H1
tgcacaatggtgcaggtttccgcaaggggttccttgggtccgttatcaggggacatacaaagatcttaatataagcttgatttggccgggaaaagatccaactttgggggttgatagtgtaggcacgatatcatctgctcttgtaacgtatgctgctattcaagcattacaaccagacttgatcatcaatgcaggcactgctggtggcttcaaggccaaaggagctagtattggtgatgttttcattgta

SEQ ID NO: 24130 - DNA, 249 bp, Glycine max
  Clone ID: 700908371H1
tggaaatatttggtccagaggcttctgggaaaacaactcttgctttgcatatgattgcggaagcacaaaagctaggaggctactgtgcctttgttgatgctgagcatgcacttgataagacacttgcagagtcaattggtgtagatactaagaacttgcttctctcacaacccgattgtggtgaacaagcacttagccttgtggataccttaatccggagtggttcagttgatgcaattgttgttgata

SEQ ID NO: 24131 - DNA, 252 bp, Glycine max
  Clone ID: 700908372H1
tatgtatgatattgtttagaatacttggtgtaaagattctttacaaatgtctttcaaacggaaagattatgtcaataagtttaatgtaacaactattacatgaaaactgggaccctaaataaaatattctacccattgaatttgtttaagtgttatgtatgtgatgcatttttttttacacatgtagatttttgatactggatcgcttgagggcttacatgcgtcatttcaagtgcgtaatgttcaagttta

SEQ ID NO: 24132 - DNA, 191 bp, Glycine max
  Clone ID: 700908375H1
ttcttcttcttcttcttcttcactctctttctctatctctgcgtggcagcatatatcaaatatcagttgcagtattaaagaggcttatccgtcagaatggtttccgcggagaaagattccaatgaaactcatcgaaccatcatcgggaagtccatgcgaacggtgcgctccaaaatattccacacaacata

SEQ ID NO: 24133 - DNA, 254 bp, Glycine max
  Clone ID: 700908377H1
aaaggattacgatgataagttgtcagagaaagaaacttttattgaacagcttaatgtggagcttgaagcttcaaagatggctgaatcttattcacgtagcctgctagaggagtggcataagaaggttgaggaactagaaatgaggattgaagaagcaaacaagctggagagatctgcatcagagtctttggaatctgtaatgaaacagcttgaaggaaacaatgatttgttgcaagaagcagaatctgaagttg

SEQ ID NO: 24134 - DNA, 255 bp, Glycine max
  unsure (1)..(255): unsure at all n locations
  Clone ID: 700908378H1
taaaatggcacttccatacccattttcctctcntcctcttctccttctaatactcttatcttctctcccaaacatttcccaagccacctctcgtgccccaaatcgcatgttagccttggttcaaaaccaaccgcttgtactaaaataccacaagggtcctcttctaaagggcaacatcaccctccatttgctatggtacggtacatttacccccacgcaacgatcatctgtcatcgatttccttgaatccctaac

SEQ ID NO: 24135 - DNA, 258 bp, Glycine max
  Clone ID: 700908379H1
cacgtctctctctcacatcatcatggcctccccaacactaataacccccaaatcagtgaaatcactcacacccatcaagcccaaacccaccaccaccatcgccgccactctcacaccacccacaacaacctccaccgccgccgccacccaccctcgccgccgcgaattcttgtccatcatcaccgccaccacatggctggtccctctgagcccggcactggcttcctcggacgaggaatacatgaaggagaccgagga

SEQ ID NO: 24136 - DNA, 253 bp, Glycine max
  unsure (1)..(253): unsure at all n locations
  Clone ID: 700908380H1
gataaggtgagcattcaccattttcttgtggtttggtttcctagagacactaagtactcccatggaacaaaacaacaaaagccttgtttcttctaaattcttatgtttatgtttgttgatcaccttgatcagcattattgttgctccacaagcggtatgggtgtgagcattnntcgtgtttggcgattcgcttgtagacaacgggaacaacaatttcttggccaccacggcgcgtgccgattcatatccttat

SEQ ID NO: 24137 - DNA, 238 bp, Glycine max
  Clone ID: 700908383H1
ggttcttgatttccttcttttctcttggtttgtgttgtcgttgagaagtcgcacataatcttcttccttctcgattttcctctccttcgacgatttttagggtttcgcttcgttcaccaacgcgcgtggtttctcttctcttcacgattttggggtcgaaatttggagtttagtttgccggcatgtccatgagtgagcgcaagactattgacctagatcaaggatgggattttatgca

SEQ ID NO: 24138 - DNA, 250 bp, Glycine max
  Clone ID: 700908384H1
aacttaagagatcaatatggccaccaccactacccagcctccctctaatatctgttttttccttctgttgttgcttctagcacactttcatttgggcataagccaacttgagctgaattactactctaaaagctgcccaaaagctgaagagatcatcaaggaacaagtcacacaactatataacaagcatggaaacactgccgtttcgtgggtcagaaatctcttccacgattgcgtggttaagtcatgc

SEQ ID NO: 24139 - DNA, 248 bp, Glycine max
  Clone ID: 700908385H1
cgtcacagtgatgaaaacatagcccctctgacgcacagaatgacgaagacaaaaagcggattcctttcctatataatataataatagacaatgagcaccgtgcaatcagcaaccaaaatgactcaagcccagattcaaccagttaaacttggaacccaaggctttgaggtttcaaaattgggattcggatgtatgggccttactggagcgtacaatgaccctctccaagaacaggatggcatatctgt

SEQ ID NO: 24140 - DNA, 248 bp, Glycine max
  Clone ID: 700908386H1
catggctcttctaggcttaatgagttttgctgccttgacccttttcttggtcctaacaactgtgcctcgtcaagcacacgcttcaagccgtggcaacttaggcagaaacatcaacccttcagtgtatggcatatgtgcctcttctgtcattgtgcatggatacaagtgtcaagaacacgaggttacaactgatgatggttacattctgagcctgcaaaggatcccagaaggtcgaggtaaaagcagtg

SEQ ID NO: 24141 - DNA, 249 bp, Glycine max
  Clone ID: 700908387H1
ctttctctctagacgttactttctctattctcaaagtcacacacagcactttctctctcatcttaactctctcccatgtttcctcagtttcatcgatcgagagtgaagccttaactctgcttattccgtgtcccagatctcgttgttgcttccgattctttgattcttcgcttctttcttcttctcacttcacattccgattcgtcgcagattcttttggtttctaaacatcatgatcgtcactgcctc

SEQ ID NO: 24142 - DNA, 250 bp, Glycine max
  Clone ID: 700908388H1
agaagcttgtctctgccaccaaggaagggctcaagcttgacgagagtgaagatgagaagaagaagcaagaagagttgatggagaagtttgacaacctctgcaaggtgatcaaggatgttttgggtgacaaggttgagaaggttgtggtctctgaccgcgttgtagattcaccatgctgtcttgtgactggcgaatacggttggaccgcaaacatggaaaggataatgaaggcccaagctctaagggacaa

SEQ ID NO: 24143 - DNA, 250 bp, Glycine max
  unsure (1)..(250): unsure at all n locations
  Clone ID: 700908390H1
ctcgagccgaatcggctcgagcagttccactcacttgaatgacgggganattgctgcctatcgcagcagaagccgattagagtcccatctcgttgaagataaagaagatgatggaggagaggttgacaatggagtagaatgcgaggaggaatctgctgaaagtgatctgcattctatagagttaaatatggacaacaacaagagttataagtggacctaccctcctgaaagcagatttgatacaagaaga

SEQ ID NO: 24144 - DNA, 249 bp, Glycine max
  Clone ID: 700908391H1
gttcttctttctactcacaacaacatctgaatcagaaacaacaatggccaacactaacttggaagatgttccctctctggatctcatgactgagctccttcgtcgtctcaagtgctcttccaaacctgacaagcgtcttattctcattggcccaccttgatctggaaaaggcacccagtcaccaatcataaaagatgagtactgcttatgccacttagctactggtgatatgttaagagcagctgtagc

SEQ ID NO: 24145 - DNA, 253 bp, Glycine max
  Clone ID: 700908394H1
gggaagtgattcacggaacctactctctaccctccagggttccttctttcacctctgcaatttctactccgccacgccctacgacattgttcgtcgtaaccctctcttcgttccacttaggaagagaaaagggtttgtttggatatggaaggtgacgagcacatgaacgaggttccatcagagaacagcaacttgggaagtgattctttggaaaaggagaacattttggaagatgaaaaggaggatttgcaag

SEQ ID NO: 24146 - DNA, 256 bp, Glycine max
  Clone ID: 700908402H1
tgagcagccaaacactctctctctgtctcgcgaaaattctcagttggcagactgtatccgagtcacctcgaggtaagcgtatgtctacgatcatctgctgtgtgacatcgaaggtaatcactacactcacgctgctatcatcggccaagacggcagcgtttggcgcccagagtaccgacttccctcagttcaaacctgaggagataactgccatcatgaatgactttaatgagcctggatcacttgctccaactgg

SEQ ID NO: 24147 - DNA, 265 bp, Glycine max
  Clone ID: 700908403H1
gttgtggttgatctcctcttaggctttccccaccgcagaatctcattctccaaaatggaggccagggtctcatcttctctcggcctcccttcccccaaaccccaccaattctcagtctcaaacctcaccgatttcccttctctcttcacacacacccccactctccccttcgcctccacctccaaatgggcccggcccaccccaaagcccaacccaaagcccctcctcaaaaccctctccgtcctcgaccgcgccctcatcggcg

SEQ ID NO: 24148 - DNA, 265 bp, Glycine max
  Clone ID: 700908404H1
cacctctgtagtgtagccaccaccaatcacaaatagccctcttggccttcaatttcgtccaattccaaatcatggctagcttttcagttttcacgtcttacattgttttgagtctagtgatggcactagcaattagcggtttcaatttcaaaggggcagaggcagcacgtgccttctttgtgtttggtgattctctcgttgacaatggcaacaacaactacttacccaccacagctagagttctcgctccaccttatggcattga

SEQ ID NO: 24149 - DNA, 264 bp, Glycine max
  Clone ID: 700908405H1
atgaattgcaatccaaattaccaatacctttaccaattaacattccaatatcaatccacttttcaaatcattttacggttgtgtttttggatgaatcaattatcataaataactcaataaattgcaagcataaaatgggaggacatgaattaatgttgcgtttttaagttctgaggaagaggaattggtgattgaagaaatggcagatgcagcgaagggtacctacagagcctcaagatggtcccttaacggaatgactgctct

SEQ ID NO: 24150 - DNA, 262 bp, Glycine max
  Clone ID: 700908407H1
ctcttgttcagtcaaggcaggttgaccgcagcaagaaaggccgggttcaagaagctcttaattattactctatagagtccacccttgcccttgtagtctcctttatcataaatatatttgtaacaacagtgtttgctaaggggttttatggttctgaacttgcaaacagcattggccttgtaaatgctggacagtatcttgaggagacatatgggggtggactatttccaattttatacatatggggtattggattattagc

SEQ ID NO: 24151 - DNA, 248 bp, Glycine max
  Clone ID: 700908366H1
ccgattgatacacccttcttcgttcctcactcaccagccacggattctctcttctctattcagtaaacggctgttttgtatacgagctgtcccggtctcagcctctacatcccaaaacatcaaaacaactggttgggctccttgtatggcttcttcctcagttggtagaagagctacatattcaacacaatctgtatcgacaaatgagccagttgtatctgtagattggctttatgataacctgaagg

SEQ ID NO: 24152 - DNA, 264 bp, Glycine max
  Clone ID: 700908332H1
cttaacgttttcatgggtattcgcttttcgtcctcccaggcgggcgcgtcggaatcgtcgccggcgtcgagtttgggcgaattgcccgagagttgtgtcgctcagatcatgacctacatggatccgccccagatttgcaagctcgcaaccctcaatcgcgctgttcgcggcgcttcctccgccgatttcgtctgggagtccaagctgccgcccaattacgacgtccttctccgccgcatcttcgccgatttcccctcccatttg

SEQ ID NO: 24153 - DNA, 253 bp, Glycine max
  Clone ID: 700908333H1
ttgagaagtggaggcactgttgatatggaggatgaacttgtgggtaaggatcgctatataggatccattgagagcctcataaggaacaatattcaacaatataagatagatatggccgatgaggttatcaatgctggacgtttcgatcaaaggacaacacatgaagagaggcgtttgaccttagagacattgttacatgatgaagaacggtatcaagaaaatgtccatgatgttccttctcttcaggaggtaa

SEQ ID NO: 24154 - DNA, 254 bp, Glycine max
  Clone ID: 700908334H1
attcaaggtcctgtttatgtgggtactggatgtgtctttaatagaacagctttgtatggctacgagcctcctattaaacccaagcataaaaagcctgggttgcttcttcactctgtggtggtaaccgaaagaagagatcaaaatctagcaagaaaggctcagacaagaaaaaatctagcgagaatgttgacccaactgtgcccatctttagtcttgaggatatagaagagggggtggaaggtgctggatttgat

SEQ ID NO: 24155 - DNA, 251 bp, Glycine max
  Clone ID: 700908335H1
ctcttcgcaatcttcttcgtctctctccacaaagcacttttgcgtttcggtttgcttttcgtgctcatggtaattcctgttgatgaaaagagcaaattcggtcgaaaattatccaggtacatatgcaagcacgtttgcgcttactttcccatcacgcttcatgtggaggacatgaaggcctttcatcccaatcgtgcttatgtttttggttatgaaccacattcagttttgccaattggagttgttgcgtt

SEQ ID NO: 24156 - DNA, 255 bp, Glycine max
  Clone ID: 700908336H1
gctcaacgtcgcacctgttctccctccaaaagaattaaggtaatggatattttgttgttattatgtgttctcttggttgcattgccaaacttggctgtagtagagagtcgcagggctcctgttctggactattttgagtattgtgctatgagctgcagagcttacagtgcctcattggaagaatttggaggggttggtgatggaacaactttgaacacaaaagcttttcaggcagccatagatcatctgagtcag

SEQ ID NO: 24157 - DNA, 252 bp, Glycine max
  Clone ID: 700908338H1
cccgaccaccggcttgcaacgcgcagtgggtggcttcgggggtttaaggatcttcagccgtctgttgatcccagtgccctatgctgatcccgccgatgagtactgggtgctcatcggtgactggttcggcaagagccacactgccttgaaacaaacattggacagcggacgcagcattggcaggcccagtggggtccacatcaacggcaagcgcggcgggctcgaggccctctacaccatggagcccggaaa

SEQ ID NO: 24158 - DNA, 258 bp, Glycine max
  Clone ID: 700908341H1
cttccatattcatattattcgcttccctactgtgccccatcaaagatacaggatagtgcagaaaatcttggggaagtacttcgtggtgaccgcattgagaattctctctatgtgtttaaaatgcgcgagccacaaatgtgcaatattctgtgtaatcttaaacttgatgctaaaactgctaaggagttcaaagagaagatcagtgatgagtatcgggtgaacatgatcctagataaccttcctctagtttttcccttg

SEQ ID NO: 24159 - DNA, 255 bp, Glycine max
  Clone ID: 700908342H1
atccaattgaaattttaaaaatgactgggataaacttaagaattcaattattgaaattgaataagtaaacaatttaattggattggtcgaatggtatcaaaaaaatggagtactaactcccatttcttatttattattgaattaaccgatcaacttgctttgttatcgaacatttctttttgatttcaaaaattttccggaaaaaatttgaatctatttttatatgcgaatcaatcctactacttctggtcctga

SEQ ID NO: 24160 - DNA, 258 bp, Glycine max
  Clone ID: 700908343H1
cgccctccaagcataaaatttgcaggattagacatttccagcaacacttgaagtggtcaatcaatggccatgaagccctcaacttccacaagtgggtctggagagaagattagaaagccttatactattaccaaatctagggagagctggtctgaggaagagcacgacaagtttctcgaagctcttcaactatttgagcagtgattggaagaaaattgaagattttgttggttcaaaatcagttattcagattagaag

SEQ ID NO: 24161 - DNA, 254 bp, Glycine max
  Clone ID: 700908344H1
catatcccgccctagctacagagcagccaaaggggaggaataataataagcctatattctaaggccggaaaaataaaaaaggaataacaaaaatgtctggaaaggtaattatctcggctgtttctctcatcctggtggttggagtggccataggtgtggtggtggccgtcaacaagaagggcgaggatcccacacttcaatctcaacaaaaatcagtaggggttatctgccaaaacactgatgaccagaagctc

SEQ ID NO: 24162 - DNA, 259 bp, Glycine max
  Clone ID: 700908345H1
atctcctcccccaccataccattacacatcaccacctcctccttccccagctcctgctcccaagtacatttacaaatcacctccacctccggtttatatctatgcttccccacctccacctatctacaagttagctcaaattgtgaaagcaccattcatgatgaatcatgttctagttttcatcgaggaataaaggcaagctctattttgagccaagtgaaacatctatcttcctgtctaagttctttgaataaaagtc

SEQ ID NO: 24163 - DNA, 255 bp, Glycine max
  Clone ID: 700908346H1
gcgcatgatgcctttgtcggcaactggaagcctagcaagaatgatactatggagaatcgtcttcctggatttggcactacaatgaacattctctatggggatggtgtttgtggacaaggtgatgtggactcgatgaacaatatcgtttcccattaccagtattatcttgaccttctaggtgttggtcgagaacaggctgggccccatgaaatccttacatgcgctgagcaggttcctttcaacccatcttccaaa

SEQ ID NO: 24164 - DNA, 259 bp, Glycine max
  Clone ID: 700908347H1
cgcgttccttccgttccgaaccaacgccaaacagggttcataacacctccatttcattcccttcttcgaatcgctcacaactaagaagttttgcagttaaaaatactgcaaagtacggttattccaatattcttctccgaaggcgtaatctagcgcacgagtaagatgaaacggagaaagcgcaccacagcgagagcagaaacgaagaagacagactgagcgacttacccgaatgcgttctcctgcacatactaacatt

SEQ ID NO: 24165 - DNA, 261 bp, Glycine max
  Clone ID: 700908348H1
cttttcttcaagcttggtttcggaaaaaaaaaaacttaaaagagacaaaaaaaaaaacccctagaagcgaagaagctgaaaaaaggctccaaagatggatttcaaaaactcttctcttctatgcctagctcttttccttgcatgctcttcggctattcgtgcatttggcatcacacaattgctaggtcaatatccagagttttccacattcaacaaatacctaaccgaaaccaagcttgcagaccaattaaacagccgcaa

SEQ ID NO: 24166 - DNA, 81 bp, Glycine max
  Clone ID: 700908349H1
ctcatgcattcttaattaatgagttgagcaatagcggtacccaaactaagtcactacattactaaagtagtactacattaa

SEQ ID NO: 24167 - DNA, 252 bp, Glycine max
  Clone ID: 700908350H1
atcttcctttcatttttcaataacgagagagagagagagaaacgtagttcagttcaattcaattcaccactgtcattcccaaatccgatcgcaacttcaattcttcttcatttttctctcttctctctctctgacaacaattattttgtggtgacaaactcactcaccggagtagcttcttcgcgtttcgttccgtctcccgaatccgttcgatttccttttgagggtttgaccgcgccgacgccgatgtct

SEQ ID NO: 24168 - DNA, 254 bp, Glycine max
  Clone ID: 700908352H1
aatgcgttgttgttgttgttgttgtatactattttgccaagagtcgcacagatcgaattgtttttaaactctttggcaaggatccatctgattttccccttcttatccgatcacagattctcaactggttatcccacagtcccacggagatcggagagctatataaggccaggttgtataatattgacgatatacctccgtcttgaaaaatctgcatgggaggagctctactgtaatctaggatcaagcttgag

SEQ ID NO: 24169 - DNA, 256 bp, Glycine max
  Clone ID: 700908353H1
ggctcgagccgattcggctcgagctgctttgccaccacctttgaaaagcaaccacccttttgctgctaactgcaatcgtcaacggcaaacagcacctacaaatttctagacacaaacttttttcgcggtcgcatgatttttcagaaaagaaaagctttaaagcccctcactcatgcaattaacgtggaaatatactgcaagtttacatttcagtttcctatcactgagatgtggagatatagtatgatgcaaagtc

SEQ ID NO: 24170 - DNA, 252 bp, Glycine max
  Clone ID: 700908355H1
cttgctttagccatcactaacactcagtctctgaattggggctgagggtttcgagtaacgtttatttttcacgagtttaagatatcatgggtaaagagaaggttcacattaacattgtggtcattggccatgttgactctgggaagtcaaccaccactggccacttgatttacaagcttggaggtattgacaagcgtgttattgagaggtttgagaaagaagctgctgagatgaacaagaggtcattcaaat

SEQ ID NO: 24171 - DNA, 252 bp, Glycine max
  Clone ID: 700908356H1
gtcgtcgcttccatgactttcctcagacaggtttggcttcacggaaaccagttcagtgggacaattccacagaacattcgaaacaaaacttccttgcaggagctcaacctcaatagcaatcaacttgttggtttgattccagattccttggcaaatatggaccttcagatactggtgtttaaataataacgggttcatgggtccaataccaaagtttaaggctgacaaagtatcttatgattctaatttatt

SEQ ID NO: 24172 - DNA, 253 bp, Glycine max
  Clone ID: 700908359H1
aaggcagacaaagatctcgatttcttgcagttgggtcatatgacaagaccatccgcatcttatcacttgatcctgatgattgtatgcaggctctaagtgtacaaagcgtttcttcagctccagagtctcttctttttcttgaagttcaagcatctgttggcggtgaggatggtgcagatcatcctgctagccttttcttgaacgccggcttacagaatggtgtcatgtttagaactgtggtggatatggttac

SEQ ID NO: 24173 - DNA, 256 bp, Glycine max
  Clone ID: 700908361H1
agagagcctgctgctccttcacaggctcctccagctgctgaggctgaacatgttcctgaggctccaaaggatgtggctgaggagaaatctgtaattccagtgccttcttctgatgacaaacctgatgagtccaaggctcttgtcttagttgagaagactcaagaagttgccgaagtgaaaccaactgagggctctgtcaaccgagatgcagtgcttgcaagagttgcaactgagaagagattgtcactaatcaaag

SEQ ID NO: 24174 - DNA, 257 bp, Glycine max
  Clone ID: 700908363H1
gcaaggacgataaggacaaagaagcaggtttagtaaattgtttggaacggattcatccaattgagggaaatgctgatatacagataagcaatcttcctaatgatgtggtaacaatttcaaccagtgcagaagacaatcttgagaccaggatggctaatcttaccagctacatagttgaatcttctactagtattagtggctcaaaagatgggtcaacaacatctgaatcaactatttgcagtgtgtgcaaggaggac

SEQ ID NO: 24175 - DNA, 259 bp, Glycine max
  Clone ID: 700908364H1
gttgtgtttccggcaataccacgacggaaggcccagatgccccacttggaaagggtaaaagctcattggcaaagaagcgcttattgtcatatcggggtttaagaggtttaacgatgacgaggataagcttcacaagttcatcaaaactcacgttgtcagactcttgaagatggacatgatcgctgttctcactggacttgagcgccaagaacaagtttctctcgctctcatgatgtgtaaggtgatgcaaaagcaagat

SEQ ID NO: 24176 - DNA, 264 bp, Glycine max
  Clone ID: 700908331H1
aattagttcattctctttgcgcagttccctacctctcctttcaagatgcagatcttcgtcaagaccctcaccggaaagaccatcacccttgaggtggaaagctctgacaccatcgacaacgtcaaggccaagatccaggacaaggaaggaattcccccggatcagcaacgtctcatcttcgccggaaagcagctcgaggacggccgtaccctcgccgactacaacatccagaaggagtcaacccttcaccttgtccttcgtctc

SEQ ID NO: 24177 - DNA, 255 bp, Glycine max
  Clone ID: 700908295H1
ataaagttctctctgcttctctctcttagactcaaaaccctattgcgtgctttgcaatcgaccccgattatggccaacagtaacctccctcgaagaatcatcactgacaccagcgtttgctcagtgagccagcacctggaattagtgcgtccccttcggaagacaatatgcggtatttcaatgtgatgatccttggcccaactcagtcgccttatgaagggggagttttcaagttgcgaattattcgtgccagaa

SEQ ID NO: 24178 - DNA, 255 bp, Glycine max
  Clone ID: 700908296H1
gcagatgcagatgcaacaaacgcagcagcagctgcaggccacggcggcaccattctcgacctccactcctcctcctcctcctccttcctccggcggctccgcgtccgaggaccgccgaagcaggtggctcaagcaatggacaagctcggacaagccgaacgaatcatcgccgacatccgaatcggcgccgaccgcctcctcgaagcgctcttcgtcgcggcggcgcacctcgaccaaggcaacaagcctctccaa

SEQ ID NO: 24179 - DNA, 261 bp, Glycine max
  Clone ID: 700908301H1
ctcactgggatggggtgcagtgctagtctcatttccttggacatcataaggtacattttcaagtcacaaaagaacaagattgctcttttggtgacttccgagtctctaagtccaaactggtacaatggcaacgacagatcaatgtttctcgccaactgtttgttcaggacgggtggatgtgtcattctcttgacaaacaaaaggtccttgaagcaaagggccatgttcaagttgaagtgcttggtgaggactcatcatggt

SEQ ID NO: 24180 - DNA, 260 bp, Glycine max
  Clone ID: 700908302H1
agatgatcaagtatctgattcttcttctgatgaaagaacacgatcgagcacgcctcaggacaataacactgaagctggaacaagagatggagcgagaaataacaatggtaataaaagcgagttgggtagggaagagagtccagactcagaatcacaaggttggggtcccaataagcttcagaaagtgaacccttccaatcctatggatcaatccactgcagaagccacaatgagaaaagctcgtgtctcagttcgtgccc

SEQ ID NO: 24181 - DNA, 260 bp, Glycine max
  Clone ID: 700908305H1
attttatgagatgggtactagggtgcagctaagaagctcaaaaagattcaatttcaaggtttgtagtggaagttatgatgatggttatgtgattggtgaagaggaagcaagggatatttcagggttagaggagcctgtaacaaccaaggttctgattccaggtctgcctgatgattcaaaaggtgaatctggtgctccaataagtagttgtttttggggatggaaacctaaactcaatgtgcactatgagaaggccgggt

SEQ ID NO: 24182 - DNA, 259 bp, Glycine max
  Clone ID: 700908307H1
ctaaaatccttaaaagcaatggtgctatcaccaacccccctatgtttgctcgatattcttcttcttcttcttcaccctcagtgccttatgtttctaactaccagaaacaaacagctccatccccaacttcttcatctgggaatagaataagccctgcaattcttgtcatcatagtaattttagcagtggtgtttttcatcttgggtttccttcacttgcttgttagatttctcataaagcaaaggtcttcctccaattc

SEQ ID NO: 24183 - DNA, 260 bp, Glycine max
  Clone ID: 700908308H1
gtccgcggcaagatatccaagtccattcgacaggccttggaccagcccctgaattacgccagaatatacctggccgataccataccagaaaacgtgaaacgtgtgatatattaggactctgacctggtggtggttgacgacatagccaagctttatggtgttgatatgaaaggaaaagtcgtggctgcgccggaatattgtcatgcaaacttcacgctgtatttcacggataatttttggtcggacccggttcttgccaa

SEQ ID NO: 24184 - DNA, 261 bp, Glycine max
  Clone ID: 700908309H1
cgcacattcgtcccggcaagggaaaaatgcgtaaccgccgctacatctctcgccggggaccacttgtggtgtacggaaccgaaggtgcgaaggccgttaaggccttccgtaacgtccccggcgtcgaggtcgccaacgtcgagaggctgaaccttctgaagctggcccccggtgggcacctcgggaggtttgtaatttggaccaagagcgctttcgagaagttggattcaatttacgggtcttttgataagccctctgaga

SEQ ID NO: 24185 - DNA, 262 bp, Glycine max
  Clone ID: 700908310H1
cgacatcttctgcaacacaacaactaaacattgttttgtttactcaactcgcactttcccttctccaatttcgaggtctcaattccggccacaagcacgcattgtttgttcaaggttcaagccatcattcaagacattcatggaagtagttaatgaaactagacctgttttcatctgatatacttaaaaagggttcacatggtttcttcagacaaaagtgcggatcaaaatatcccttctgataaattgcagcagagagtga

SEQ ID NO: 24186 - DNA, 261 bp, Glycine max
  Clone ID: 700908311H1
aacagagaaaaaaaaagttgtgaattttccagttgcgtttctgttccatacaatttcgaatagaatggcgaggcctaatcaggaggcagttgagacgttcgtcagcatcactggtttgccagaagcagtagcgctacaaaaacttgaggagcatggtggtaatctcaatgaagcagtcaatgcacattttactgaaggagacagaaatctaacgaccggttctcacaacagctctgctgtatttcctcaagatgatttcat

SEQ ID NO: 24187 - DNA, 256 bp, Glycine max
  Clone ID: 700908312H1
tttatgtttgtttttgcgagcgtaaggttgaggagaagagatggtgggagcacggccacgggacatagatgacttgcccaagaacgccgccaactacacagcgcttacgccgttgtggtttctagagagagctgctacggtccaccccaccagaaactccctcatccacggatctcgtcgctacacgtggcagcagacttaccaccgttgccgtcgattcgcctccgctctttctaatcattccatcggtcttgga

SEQ ID NO: 24188 - DNA, 263 bp, Glycine max
  Clone ID: 700908313H1
gatggcctcacaggtttgcaaagctgcttccagagccgcgaggtcccttctctccgcttccagagcctcccatggacgtgcggttggggctgctacggctgtttcattgagctgcaaagtgcctcttttctacggaaagaacggttctggaagtggttccgcttcatcatcatcatcatcatggatttcaggagcacttgctcttcctgccgcagcttacatgttccaagatcaggaggtgcgcgcagctgagctggagcgca

SEQ ID NO: 24189 - DNA, 260 bp, Glycine max
  Clone ID: 700908315H1
tgaagcctttccagtgtgcagctgcatctgcagccggttcaatcattcaaaattgtcaagttgtttggtttggagcaatcatcattgtccaaattgcaattttttcagaaggatagcaagaatttgggaagttgctgaagcaatagggagtagtggatacggtttaggatcattgttataataggcaaaattgatggtaatcgtacatagtggctaggaagggatataatggctactgctgcagttattggactcagtgg

SEQ ID NO: 24190 - DNA, 266 bp, Glycine max
  unsure (1)..(266): unsure at all n locations
  Clone ID: 700908316H1
gacattgtgaccaccacgactcacaagagcttgcggggcccacgtgcggggatgatcttttaccggaagggccccaagccgccgaagaaggggcagccggagaacgcggtttatgatttcgaggacaagattaacttcgcggtgttcccttcgctgcagggtgggccccacaaccaccagatcggtgctctcgccgtggcgctgaagcaggccgcgtcgcccgggtttaaggcctacgcgaagangttaaggcgaacgccgttgcg

SEQ ID NO: 24191 - DNA, 256 bp, Glycine max
  Clone ID: 700908317H1
gtaactaacccagtcccttgacttggctttctggttcgattcgatgcgattctcggagatgaagaagggcttgatgcatagctatggcgttgctgtgattgtgttggctttgagtttgtgtttgggttcatcatcggagcaattaagttcacgagaatgcgagaatctcggtttcaccggactcgccttgtgctccgactgcaacactctctccgagtacgtcaaggacaaagagttggtatcggattgtttcaag

SEQ ID NO: 24192 - DNA, 253 bp, Glycine max
  Clone ID: 700908319H1
ctcttcttctcttgcggctacggttttagcgcagttcttctagatttaaggaagatgggtaacgaaaaggttcacatcagtattgtggtcattggccatgtcgactctgggaaatccactaccactggtcacctgatttacaagcttggaggcattgacaagcgtgttattgagaggtttgagaaggaagctgctgagatgaacaagaggtctttcgagtatgcctgggtgctggacaaacttaaggctgagc

SEQ ID NO: 24193 - DNA, 258 bp, Glycine max
  Clone ID: 700908320H1
gcgatggcgatcttgctgggcgaaattcttcaatcgctggagctgtggctgaagctgatcaagaacccgcagcctcagccctacgtgaaccctaatctggaccccgttttgctggtgcccggtgtcggaggctgcatgctgcacgccgttgacgaatccgaaggaagccgagaacgcgtctgggttcgcttcctcaacgccgagtacacgctcaagaccaagctttggtcgcgttacgatccttccaccggaaaaacc

SEQ ID NO: 24194 - DNA, 237 bp, Glycine max
  Clone ID: 700908321H1
gtcaggtgacatgcggggaaccttatggtcccgcaccttttgccgacgaggggtaaacgagcccgttgacgtgcagagactaacatcgtttcctgcaccttttgtcatcctgacccgtgaagtcaggtgacatgcgtggcaaccttatggtcccgcagcttttgtcaaccagagtcaatcgagcacattgacatgcggggaaccatttggtctcatacttttttcacattttgtcat

SEQ ID NO: 24195 - DNA, 255 bp, Glycine max
  Clone ID: 700908322H1
gaaagagaagcattagcaaaagcaagaagaactagtctaagcagaaatggcctcttcagtgatggcatctgtggccctcaaacctgcccctttcactgttgagaagtcctcagttagaggccttccctccctctcaaggaactcctcttcattcagagttgtggccagtggtggcaagaagatcaagactgacaagccttatggaattaatggtggcatggctttgagggaaggagttgatgcatctggcaggaa

SEQ ID NO: 24196 - DNA, 256 bp, Glycine max
  Clone ID: 700908323H1
ctttttcttctttgcttgccaaaaatcttacacacacaggtatctagaaaatgggttctcaccagcaagaaccatggctattggagaatgggaaaccgagggtgttgaccaaggagaataggcatggccgttctgcacacagcatgtcctccacgtctttgcgcaagaagtctagccgaactcttgtctccaagcttccatgtgccacactcagaagcatccttttaaatttgcaagaggttattcttggtaccaa

SEQ ID NO: 24197 - DNA, 259 bp, Glycine max
  Clone ID: 700908326H1
ccgccattttccgatcatcaaatcaaatcctctttatttatttattttggcttaatttacaaaaaaaaataataacaaatggttctatgagactcacgaatacgcatgcgatggatctagaaggtggaacaactcgtcgaaactccgttaagagagagtcgtggagaacggttgtgcatctggcgtaccagagtttaggagtggtgtacggtgatttgagcatttcgccgttgtacgttttcagaagcacgtttgcgga

SEQ ID NO: 24198 - DNA, 256 bp, Glycine max
  Clone ID: 700908328H1
cttcttcccaaccactactactcactcactgcagatctcaattgcatcgctgtccatggctaccatcgttagcatcaaggcccgccagatcttcgacagtcgtggcaatccaactgtcgaggtggatttgacttgctccgatggtacttttgccagagctgctgttccaagtggtgcatccactgggatttatgaggcccttgaattgagagatggaggatctgactaccttggaaagggtgtatcaaaggctgtt

SEQ ID NO: 24199 - DNA, 261 bp, Glycine max
  Clone ID: 700908329H1
tgtgaagatctcaaagtgaagtacaacgaagagatggcaaagagaaagaaactcttcaatgaagttcaagaggctaaagggaacattagggttttctgtcgatgtcgtccattgaataaggctgaaatctcagctggatgcaatacaattgtggattttgatgcagcaaaggatggttgccttggaattttgacaagtggctccaccaaaaagtcattcagatttgacagagtttatacaccaaaagatgatcaagttgat

SEQ ID NO: 24200 - DNA, 263 bp, Glycine max
  unsure (1)..(263): unsure at all n locations
  Clone ID: 700908330H1
actcaacctcactcactcgctcattcgctctcttcacagtttccagtcgagggttcccggtcnnaatcnaaaccgaananananaaaacgtcaatcctacacacacacacacacatatcacctaaccatcgtcggtgggattcgaaggcaacggcgtcgtttcttcgccgccgcaagctctcatcgagagactgaaagactacggccaagaagacgttttcgccctctggttacgagctctaccccgaggaacgcgagtttct

SEQ ID NO: 24201 - DNA, 254 bp, Glycine max
  Clone ID: 700908294H1
agaacagtgtaacaaaaagaagaagaaaaacaatatgaagttcactataatcacaatatttttctctttatttctacttgactttggttttgcacaacagggggatcttgcatatcaagatttggaggaaaaccaaatacaaatataggccaggctttcttaagtgcctggactcaagcatgtgcatcaccaactgctgtcaaaattgtgattccagctggcacataccaaatgggtgcagttgatgtcaaagg

SEQ ID NO: 24202 - DNA, 255 bp, Glycine max
  Clone ID: 700908261H1
ttggcattgagtgtgaaacaggctaataaatgtgagtggttcaccgccgcaacttccaatgtgcgagcacttactcgtctcactgtcttgctatatttgggtgagaacacagagatagtggagttcaacgagatggagcaaataaagcacagaacagttgaagtgaatggcataaaaatgcatgttgcagagaaaggagagggtccagtggtgttgttcctccacggcttccctgagctctggtactcatggcgc

SEQ ID NO: 24203 - DNA, 260 bp, Glycine max
  Clone ID: 700908264H1
aagaagaagaagaagaagaaaaagggaaaaacgcaagaaaaatagaggaagatcgatcgagatctccctcgcgtttgtctcagttgaagaaattaaaaagcagaactagagtaaccaacggtctcagaattttcagggttttcagtacttccatattttttcttccggatttgagttggaagaagatcgaagaggtttctagttgcttcaattgttcctctgggtggtggagacttgttatatttttaaaatattgacaa

SEQ ID NO: 24204 - DNA, 266 bp, Glycine max
  Clone ID: 700908265H1
caaggatggtgttcatcgtccgatggcgcataaaacgcaaccaaagccttagcaaaggcatggtagcctcaagcatccttgagccaggagggtttttgggtgacgagctgctttcatgtgccttcgcaggccgtttatcgatagacttccggcctcctcggctacatttgtgtgtcttgaatcatcagaagcctttggccttgatgccaatcacttgaggtacatcactgatcacttccggtacaaatttgcgaacgagaggctga

SEQ ID NO: 24205 - DNA, 258 bp, Glycine max
  Clone ID: 700908267H1
gttttgatcgtccctcttcccaatttcagggtaagctttggatctcggatcggtgccttacccatcttttcgaaatcttcaaggaacgctttgggacactaaagtttccaaatgtagagggaagaacagaatgagagggaagacttgaatcaggattcaggggtgagatatttgaggatggttacttatggtgaaaggtgggctgaaaaataggaagtaagcatggaaaatttggtgagcaagtaatttgatctgctg

SEQ ID NO: 24206 - DNA, 252 bp, Glycine max
  Clone ID: 700908268H1
ggagagtgagaataataaagaaagaaaaagaagggttttgataaagcaaaagaatattattgaaacataaattttggactttctttgcatttggcacccaccccacaacgaaataaacaaaacaagcacacaaccagagacacgcacacgcatatagagagagagagagagagagagaagaagaagaaggaagcagaggaagaagaaggaggagatcttgagagatcaggtcgcaactgatcatggggagag

SEQ ID NO: 24207 - DNA, 255 bp, Glycine max
  Clone ID: 700908269H1
gttgatcgagataactagaaacagtgtgatgaaaatgaaggtccttgttttcttcgttgctacaattttggtagcatggcaatgccatgcgtacgatatgttccctctccgaagaacactggctatggtgcccgtactccggaggtgaaatgcgcaagttggaggcttgctgtggaagcacacaacatctttggctttgagaccattcctgaagagtgcgttgaagcaacaaaggaatacatccatggcgaacaa

SEQ ID NO: 24208 - DNA, 257 bp, Glycine max
  Clone ID: 700908270H1
ggaaaacaaagtatagagtgaaagaatgggtgagaaaagcaagattttgatcataggaggcaccggctacatcggcaaacatatagtggaagcaagcgcaaaggctggaaatccacttttgctttggtgagggaatccacactctctgacccctccaaggcacaactcatccacaattttgaggctttgggcgttaatttggtccgcggggatctgtacgatcatgagaagttggtgaaagctatcaagcaagtaga

SEQ ID NO: 24209 - DNA, 255 bp, Glycine max
  Clone ID: 700908271H1
gctcttcttccagacagcagcagcaacaacaaacaaactctttctggattcagtttttgatgtgaaaatggcagtgactcttacatcaacactctttctggctttgctatttctgcttcagcttttgctgctcttcagcctagagtacctgaagcttacctccaaaatgggaactttgaggagcagccaaaccctaaatacctgaagaaaacaaagctctttggtaaatacgctttgcctaaatgggagatcaat

SEQ ID NO: 24210 - DNA, 255 bp, Glycine max
  Clone ID: 700908272H1
ctctcgttgtagcgtaggcagcagttgaatttggaaaacaagatctctcaccgcaagttcgaccacccgagacacggttcccttggctttctcccaaggaagcgagcttctgtcatcgcggaaaggtgaaggctttcccaaaagacaatcctagtcaaccatgcaggttgactgcctttgtgggctacaaagctggaatgacccacattgttagagaggttgagaaacctggatcaaagcttcacaagaaagaga

SEQ ID NO: 24211 - DNA, 149 bp, Glycine max
  Clone ID: 700908273H1
catgttttggtgccgaatcatggctcatttcatgtcgggtgcttcattgttgtaaatgattgatgattcatgataacaacaaatggccgactccagatactaaattgttcatgttgttggaatgtaatcttttgcacagacttttggac

SEQ ID NO: 24212 - DNA, 248 bp, Glycine max
  Clone ID: 700908274H1
tactctgttatgctgctccttcctttctgatttcaagggtttaaaccctaaaaaggacccacggcgagaagcttccaactcctctctcacgcgcggacctccccctccggcacttctgcaccgacggacgggtaaaggataaagggatgatctacacagcaattgacacattctacctcacagatgagcagctagcaatctcaccttctagaaatgatggcatacatgaagccactgagaccagcctt

SEQ ID NO: 24213 - DNA, 250 bp, Glycine max
  Clone ID: 700908275H1
gagtgagtaggttactggaaagaggaatggagaaggaagccgaattgggtgaaaaggagtttgaacaaatggtgcgggctttgccttccgatgctgtcaaggagttattgtgcacggggtgggttcgcttcattgcttgcaattcttcttcttcttctgctaaccttctgctatttcacagctcctatatgaaaaccaaatatggatcccaacctttgttccatgaaaacttgcacagtggatgcatctc

SEQ ID NO: 24214 - DNA, 254 bp, Glycine max
  Clone ID: 700908277H1
ctcagatttctgtggggtgttcctcatgtcacggaagtaaaggcaaaaggaggtttctcttcttacctatatgaacttttggtgttgaatttggttggtgtttaaattattaagagtgtattggaggattgtggagaaggaagtgttgaggttgattgtggagttgaaaaggattgaacttgttttgttgattattgtttgttgaagtttggtttttctctcaatggctgtagaggagtctgagcctgtgattg

SEQ ID NO: 24215 - DNA, 257 bp, Glycine max
  Clone ID: 700908278H1
ctcgagccgctatctgcttcctcgtagtacttcattgagagagacatggacactgtactaagtactacgctgctactcatgttggcatgctccatcgtgcatgttcttcgttactacaagcaagaatgagaagaaaatcaaactacaatcttccaccaggaccctctcttctcaccatcattagaaactctaaacaactctataaaaagccacagcagacaatggccaagcttgccaaaacctatggccccataatg

SEQ ID NO: 24216 - DNA, 267 bp, Glycine max
  Clone ID: 700908280H1
cacgtttcccttttcttttgctcggaaagccccagtcacgtcgaactacatcaggttgcacgtaaataccgtggacaaccctagacgatccaacgggcgagatgtactccgcgattttaacaaagacgtcaatgctggtgagtactctccgtactatcttcaaggagcaattacggctctgcagcgttttctgccgtctaacgaaacggacgctgactcggacacggaggctcaacccgacgcggcggtggacgcgtactcgtgcga

SEQ ID NO: 24217 - DNA, 276 bp, Glycine max
  Clone ID: 700908281H1
cgcaatcatattaagccagtgccaccttcaacttctcaattgtgctctctctctgcctagccttctttctactgctactcaccaaggcaaactcaaccaacaccgtttctttcaccgtcagcaagtttccccacgccaacaaaaccttatcttccaaggagatgctgctatctcaccctccggggtgttacgactcaccaaggttgacagcaacgacgtgccaacgacgggatccctaggacgtgccctttatgctgccccaatccagatttggga

SEQ ID NO: 24218 - DNA, 111 bp, Glycine max
  Clone ID: 700908282H1
aaatgatcacaatcaggtgacatgcggataagtgagtgatcaatgagtggctctgcctgcccacttcggcgctctattctatatatagcgatggcatccaccacacctgca

SEQ ID NO: 24219 - DNA, 256 bp, Glycine max
  Clone ID: 700908283H1
ttactaccaagttctctgtctggggagttcttagcaccaccaccagcttctgcagtagctttaagctacgaaagattttccttgaccatggggcaaaagcatttagtgacgtgttctgtttatgggctttgacatgttcccatcttctatctttctcctttggaattctgagaatttgtctgaagaagagacctctagatcttgatagtattaatgctgctagaaaggcaagagcaagtctaagatctgtaagacc

SEQ ID NO: 24220 - DNA, 257 bp, Glycine max
  Clone ID: 700908285H1
ggaaagcaaaacatgcctacacagcataaatcagaagaagcataaaaaaatagcaacacgcaacacattctcaacaaaagaagcaaagcatgtgcacggttacacaaatggaatacgttgaccatttctttgcctccaaaatccataacgttacttctctcatcttccatggataaaacagtgaggttgtgggatttggaaactaagtcgtgcttgaaattctttgcacataatgactatgtgacctgcgtgcagtt

SEQ ID NO: 24221 - DNA, 256 bp, Glycine max
  Clone ID: 700908286H1
ggagaagagaacggaggagaagagcaatagctgcgaaaatatactctggacttcgagctcaggggaacttcaacttgccaaagcactgcgacaacaacgaagttctgaaactctctgcgcagaagctggttggtgcgtggaagaagacggaaccacttatcgcaagggttgcaagccacctctggccaatggtgcagggagctccatgagaaacattaccttttcttcttctcaaaatccaagtcctctgtcttcg

SEQ ID NO: 24222 - DNA, 254 bp, Glycine max
  Clone ID: 700908287H1
cagttcttcacaccaatcatgtaccgctttgcaacctccctcgcctccaaagctagaattgctaggagcagcactcaacagattggaagtagggtcagttggaacaggaatatgctgccaaagacattaagtttggtgtggaggcccgggctttgatgcttaagggtgttgaagagctcgccgatgccgtcaaagtaaccatgggccctaaggggcgtaatgtggttattgagcaaagttttggagcacccaaa

SEQ ID NO: 24223 - DNA, 252 bp, Glycine max
  Clone ID: 700908288H1
ggaaagggtgtgagaagagaatggagagtaaagaggaagatgttaacgttggagcaaacaagttctcagaaaggcaaccaattggtacagcagctcagggtggtggtgacaggactacaaggaggcacccccagctcctttgtttgaacctggtgagctcaaatcatggtccttctacagagctggaattgctgagtttgtggcaactttcttgttcctctacattaccatcttaactgtcatgggtgtcaa

SEQ ID NO: 24224 - DNA, 252 bp, Glycine max
  Clone ID: 700908289H1
tttcttctcctctctctctctcctagggttagggttttctctcttcatcactctctgtgtcgctccgtttcaatggctcagcaagacgctcaaaacggcgggtcggagatgccgctgctgctgctacggtgtcgtttgtcgctgtgaagccgcagctcctcgtcgaagctcccaaagccaacgacgccattctgttcttcaaggctgcgtttggcgctgaggaagttggccgtacgctcaaccctaagcgca

SEQ ID NO: 24225 - DNA, 108 bp, Glycine max
  Clone ID: 700908290H1
gagaaaattgaattgcgtgagtgaaagttacatcagccccttacgcgcaaaccaattccaattccctttgcaagcaagcaatctcagatagctgatccacacaatccc

SEQ ID NO: 24226 - DNA, 256 bp, Glycine max
  Clone ID: 700908260H1
aatttaaagaaatcaacacacacaaacacaacaacatatggaggtgctaagggtgcaaaccatagcttccaaatccaaagatgctgccatcccagccatgtttgttagggcagagcagagcaaccaggcatcacaaccgttcaaggggtgaaccttgaggtgccaattattgattttagtgacccagatgaagggaaagtggtgcatgagattttggaggcaagtagggactggggcatgttccaaattgtgaacc

SEQ ID NO: 24227 - DNA, 252 bp, Glycine max
  unsure (1)..(252): unsure at all n locations
  Clone ID: 700908292H1
atttccacacgtcataatagataaagnccagttgaagtgatactattgaacagccgatatatgacactctcatgatatancntgtatcttgtgaaagtagcattagacaataatgagtgttgactaatctcttgttttactgatctttctaaaatataaagctacagaatacaaagtttgtatggttgaagccaagcaatttgtcgggatttttgtttatctcacaatatgttagagctttgttttgaagtt

SEQ ID NO: 24228 - DNA, 89 bp, Glycine max
  Clone ID: 700908293H1
tgagagcaagagaatatcccttgtcggtggaaatcacactgccgccagattttgcactcgctaaaacaatattcattccacaacctttt

SEQ ID NO: 24229 - DNA, 259 bp, Glycine max
  Clone ID: 700908230H1
aagatggcttcctttgtatccttcctagtgctgcttcttgcagcccttatcctcatgcctcaagggcttgctacttactacaaaccaattaagaagccaccagtgtacaagcctccagttacaagccaccagtgtacaaaccaccggtttataagccaaaaccaccggtttacaagccgaaaccaccggtttacaagccaccatataagaagccaccatacaagaaaccactatatggagagtatctccagtagaggac

SEQ ID NO: 24230 - DNA, 265 bp, Glycine max
  Clone ID: 700908231H1
aagcattgtctggccacaaggatgaggccttcttctctggtaatgctgctgctctggcttcaaggaagtcttctccaagagtgaccaacgaggctgttcagaaggctgctgctgcattgagggttcagatcatcgccgtgcaacaaatgtcagtgccagactggattctcaacaaaagaagctcaaccttccaatcctgccaaccaccactattggatccttccctcagactgtagaactgaggagggtacgccgtgaattcaag

SEQ ID NO: 24231 - DNA, 266 bp, Glycine max
  Clone ID: 700908232H1
attcaaatccaaatggccctttacattacactaataattggcctcctagtaaacaccctagtactctataaatagcatttgcatgcaccttagtcttcaccaaaatactcctcttggcatttgtgttgtgtccctcttttaagctatttccttctcttaacacaattggttgtgccaattgccatagtcaccaaccaattaacaaaggtatatatatcatcatatcatcaccaaatgaaaaatattgggttgttttttcttgtggt

SEQ ID NO: 24232 - DNA, 267 bp, Glycine max
  Clone ID: 700908234H1
aaacaatggctcaaccctcaccggtggtgttattgctaaccgagagggtatttcatgggcaacaaaggacaagattcaacaagccaattactttgggtcgctgacccaggcatcagctattgagttgggtctttccaaggggaggaaatatatgccccattcaagagcctgcttccaatggtaaaccctgatgatgttgtgtttgggggatgggatatcagtaacttgaacctggcagatgccatggccagggccaaggtgtttgat

SEQ ID NO: 24233 - DNA, 267 bp, Glycine max
  Clone ID: 700908235H1
ctggcgaggaaggagaatccaaagtaaccgagcaccataccagacacaagactgccaaatccaacgcaaataagaacaacagagaaacctctgcggacacttccaaaggctccgaggttaaaatcagaaaccagactacattcatgtccgagcgcgtcgtggacaagccacggatagtcatagcttagctgaaagagtaaggagggagaagattagcgagagaatgaagtatttgcaagatttaataccgggttgcaacaaagttgc

SEQ ID NO: 24234 - DNA, 260 bp, Glycine max
  Clone ID: 700908237H1
cgcaatcgcaatccagcgaatatgaaggtcgtcgctgcatacttgctcgcagtgttgggagggaatccttccccttctgccgatgacatcaaacacatcctcggcgcagttggagctgggctgagaatgagttgattgagttgctcttgactgaagtcaagggaaaagacttcaatgagctaattgctagtggaagtgaaaagatgtctgcagtgtctggtggcggtgcagcggttgccgttgctgctgcaccagctgga

SEQ ID NO: 24235 - DNA, 263 bp, Glycine max
  Clone ID: 700908239H1
ggcacacttacgttttggccacaccgaagcgcaaccgttccgatgacgtggacggcggctaggcgaagaagctgctgttgcagcacggcgaggcagacccggcggcggcgctggcgaggcgcggcacgagttcggggaccacggcggggtgaacatgtcgatcgaggcgtcggcgacgttcacggtgatggagccggagacgatgcggcgcatgttcgccggtgaactcggccccgaccgcgacttcttcatctacagccgcc

SEQ ID NO: 24236 - DNA, 262 bp, Glycine max
  Clone ID: 700908240H1
gtgaaaccccaatcccaatacactcccaactcacaaagccatgtctccaggtcctgttgtcgacgcttcccctgaggttgaagcagagcaacaacttccctccgtcgatgacgcaaccagttgaagaaatcccaaccgcaggaggatgatgctcccgttgtcgaggacgtgagggatgatgacaaggacgacgacgatgaggacgacgacgacgatgatgaagatgacaaggaatacgatgctctaggtggtgctgagggtt

SEQ ID NO: 24237 - DNA, 259 bp, Glycine max
  Clone ID: 700908242H1
ctcctcagctgtgtgatgattcatttctaaaccctaattctccttgtttccattgctgcttcattgttttttaagcaattccgagcattgatcaaatgggttttggttcacttccattttctgaaacagcgtactctcaaaaaaaatatctgatcacattttctacttctgcaaattctgcatttttttccctctctttctttctggggtgtctgcagaacaagggaatctcacagattccttgtgtttctctttggtt

SEQ ID NO: 24238 - DNA, 260 bp, Glycine max
  Clone ID: 700908243H1
caattacagaggctaagacctcaactacaaatagtgctaggcttcatgtcagttctcactcgtgaagttaaggaagttggccatggtgggaaagaggtgactagggcggtgccagcgtatcagaaaaagtgaaggattctcttgtgaagaacattagaagatgaatgaccccccaacccttgaaaattagggcagatattgaaatgaaatgaaatgtttccaggttccaagaaaacttgcacagtggatgcatctctaca

SEQ ID NO: 24239 - DNA, 257 bp, Glycine max
  Clone ID: 700908244H1
gtctcgtttcaaatattaattttaggttcttcgttacgcgttgtgttgcgttgtgcgtgagaaagtgcgcgtggtgaaaaagcatggcttctcagctcctgagacgaaccttcggagtcgtttccttgcaaaccctagggccttctcctccgctgcttccactccgatccgcgccactcttttccccggcgacggcatcggccccgagatcgccgattccgtcaaacagatattccaagcagctgatgtcccaatag

SEQ ID NO: 24240 - DNA, 259 bp, Glycine max
  Clone ID: 700908245H1
cagaaccaacaatgtcgttccccttcaaccactctcaccgcagggacgacgacgacgacgacaaacgacccgccgtttaccctcctccgggtaacaccttcaacaaccctccaccaccttctacggcgtccatcagccagaaacccacgtgtcccatgtcttcaacaacagcaactactccgctcccccgcatccaccaccttcccataaccaccaccatgactccttcactcacggaggcggcagcaccgtgcaccac

SEQ ID NO: 24241 - DNA, 248 bp, Glycine max
  Clone ID: 700908246H1
gtggtttcaacagtgaggcaattcctgaagcaaaggatgttgtaagaatcgatttggtgggaggctttgctttgcaaaaggtgacatcagaaagaagttactttcggacaatagcaatatggatataaaactgaattttgtgcctccatcccttataaactttatttcaagacagctcattggcaatggtttcagactctatcagaagactgtgtcttctatgatatggcccagtttgcggaaatcca

SEQ ID NO: 24242 - DNA, 240 bp, Glycine max
  Clone ID: 700908247H1
agctgatggaatactaatatggtctgcaatagaagactgggttcgaacctatgtgaaccattactaccctcactcaagccttatatgcaatgacaaagagctacaatcttggtactcgagtcaatcaatgtaggccatgcggatcttaggcacgaaaattggtggccaacattgaacaatagtgaggatcttgtgtccattctttccacattgatttggacttgatctgcacaacatgct

SEQ ID NO: 24243 - DNA, 261 bp, Glycine max
  Clone ID: 700908248H1
cacgtttcccttttctttctgttgagaacccctgctattcttccactcaggggtcccactcgttggtaggagaataggtggtgtttccggcaacgtgcttttttggacacaaaccttcgccggaaccctgaattaagcacttaatgtgaattctgagatacaataacaataacaatgtcttctcctcataactcttctcctgatgactctagccctgataatgcaacacctgataactccacccctgatgactctgacaac

SEQ ID NO: 24244 - DNA, 263 bp, Glycine max
  Clone ID: 700908250H1
cgctgctgccgaaacccttcccgatccctaaggtaagtgagtaatcggtggttgagaatggtggagaaggcgaagggtaggaaggaggaggtggttaccagagagtacaccattaactccacaagcgcctccatggctgcacatttaagaagaaagctcctaaagctattaaggagataaggaaatttgcccaaaaggccatggggaccaatgatgtgagggtggatgtgaagttgaacaagtttgtctggagccagggaatc

SEQ ID NO: 24245 - DNA, 139 bp, Glycine max
  Clone ID: 700908251H1
ctagttctagatcgcgagctgccgcctttttttttttttttctaccgaggaaaggaaagaattggaaaagggggaaaaaaccacggggcccaagattccctcttctctgcttgggaaaaagagaaaacaaacaaaccat

SEQ ID NO: 24246 - DNA, 261 bp, Glycine max
  Clone ID: 700908252H1
ccagcaccagcacctgcacctgcagcagcagcagcaccagcacctgcaccagcaccagcaccagcaccagctgataagcaaattccagctggaattcctggaagtctcaaaaacaataccatcgcgctgatgggcaaaactgtggcaactttctcactgatcggccatctaccaaggttcatgctgccccgggtggtggatcttccttgcattacctctttggtggtcctccagggaactgattcatacctaccatgtgat

SEQ ID NO: 24247 - DNA, 261 bp, Glycine max
  Clone ID: 700908253H1
ggaaatgggtgtgaagatgtattctgacatggtcactcttcaaactatggacagcatattctatgaagtgcagtcgcaaggtagactttccttctacctcacccaaatgggggaaaagcagttaacattgcatctgctgctgcactttctcctgatgacatcatattgcctcagtaccgagagcctggagttctattgtggcgtggttttacactgcagcaatttgttcatcagtgctttggaaacacacatgattttgga

SEQ ID NO: 24248 - DNA, 260 bp, Glycine max
  Clone ID: 700908254H1
attaatttatcttctcccatctaaaatctatatataatatattacatctgaggttcaattttcctaagctcacatttcctttgtgtttgtgagtaatttgcaaacacaccaaaacatctctctctctctctctctctccaattcagacccctagttctgttggatcttgcatatagtaaccctttattgattcgcaaagatgaaggtcacagtggtttctcggagtggaagagaagtggttaaaggtggcattgagctca

SEQ ID NO: 24249 - DNA, 261 bp, Glycine max
  Clone ID: 700908255H1
attgcatttgcattaccattcacaatggcaatctcctccacttccaactccctcattcccaccaaatctctaatcccccaatcccaccccctcattcccaacaccaggcccgcccccggcccaagcccggcccatccccttccatcttcgccgttcacgccgccgagcccgccaaaaaccccgtcgtcaccgacaagcccaagccccaagcccaacaacctcccccggcctcggcccgggcaacgaaatgggccgtggaca

SEQ ID NO: 24250 - DNA, 261 bp, Glycine max
  Clone ID: 700908256H1
ctctttttcatttcccacttcctcaccaaatccaactactccctctttcttcttccacactgtcattcacatatctctctctctctctctctctcgctgttattcaatttattatatttctctttctgatcgtgtcttattctgccttctctccactttcgattgtgaagctccgtgtcaattggatacctgccactgtcttttcctttttgcaaaaagttattccaggagattgcttctaaatatcagttgcaatgcgtg

SEQ ID NO: 24251 - DNA, 237 bp, Glycine max
  Clone ID: 700908258H1
aaagaaaaaaaaaaacccttagccaacacaaccatcatggccacctctgctattcagcaatcagcattcactggtcaaactgctctgaagcagctcaatgagttcgtccgcaagccggtggcgccggcaaaggtcgcactaacatgcgccgcaccgtcaagagtgctcctcagagcatttggtatggccctgaccgtcccaagtacttgggtccattctcggagcacgttccatcat

SEQ ID NO: 24252 - DNA, 254 bp, Glycine max
  Clone ID: 700908259H1
gttccaagtctgccttatctgctgttctagtttattggcattgggatcagtaactgcaattcccaatgcaaattttcatcgggcgccaaggagcactagtgtgcttctggttgtgtctgtgttttttgtggtaacaggattcaacaatgaagagcacaggacagtggaggtagttggcctaggagaatgcgcagactgcaggcagaacaatattaagaataaccacgctttctcagggttacgtgtgacggtag

SEQ ID NO: 24253 - DNA, 264 bp, Glycine max
  Clone ID: 700908229H1
agagaacccttccgacagactctttactctcgttcacagcataaaaacagcaccgctttacaaatgacaccactattattgtgagataacggccattattcttcttccgaccatccccagaatgcttttctcacccttcctcactctcactttcttcctcctcttctcttcttccgttgctgcgatttactcagcggcaacatgttctaacatagtgccgctgagataccgcagcgacagaatctccataacggacttcggtgg

SEQ ID NO: 24254 - DNA, 258 bp, Glycine max
  Clone ID: 700908186H1
cttcaatctcatctccgatctcaaaatgcccgctgtttatggagctcgcttgaccaccttcgaagactccgagaaggagagtgaatacggttacgttcgcaaggtttcaggacccgtcgtcgttgcggatggcatggctggtgctgctatgtatgaactcgtgcgtgttggtcatgataatctctgtggtgaaattattcgtctcgaaggggattctgctaccatccaagtttatgaggaaactgctggtttgatggt

SEQ ID NO: 24255 - DNA, 258 bp, Glycine max
  Clone ID: 700908188H1
gctaggatggttcgtgaactatttcagatggctcgttcaaagaaggcatgcattgtgttttttgatgaagttgatgcaattggaggtgcacgatttgatgatggcgttggtggtgacaatgaggttcagcgcaccatgcttgaaattgtgaatcagcttgatgggtttgatgctcggggaaacatcaaagttttgatggcaactaattggcctgacactctagatccagcactactgcggcctgggcgattggaccgt

SEQ ID NO: 24256 - DNA, 240 bp, Glycine max
  Clone ID: 700908192H1
cgagtgtctaatgtaaatgatcgagttatgttgggtgacaacacattcaggagtggacaaactgaaatgtcaatggagatgactcagggtcctcggggtcattacgacaattttcttctacaaccatcacttgttgaggatgcacttgcaatcagaatatgttgagacgaatatcacctgtcagatttccatactgactacgaaattgctaaatgttaagtgattagaatcttgcaatga

SEQ ID NO: 24257 - DNA, 260 bp, Glycine max
  Clone ID: 700908193H1
ctccacctggccgcacaggccggcgtccgctacgccatgcagaacccccaatcctacgtcaccgccaacatcgctggcttcgtcaaccttctcgaggctgccaaatccgccaacccccaacccgccattgtctgggcttcgtccagctccgtctacggcctcaacacccaaaaccctttctccgagctccaccgcaccgaccagcccgccagcctctacgccgccaccaagaaggccggcgaggaaatcgcccacaccta

SEQ ID NO: 24258 - DNA, 260 bp, Glycine max
  Clone ID: 700908194H1
ggatcaacacgtatcccagctgttcaggagcttgtaaagaagttgactggcaaggacccaaatgtcactgtcaatccagatgaagtggttgcccttggagctgcagttcaggctggtgtcttggctggagatgtcagtgatattgtgctgttggatgtcactccattatctttgggtctggaaactctaggtggtgtgatgacaaaaattattccaagaaacactactcttcccacctcaaagtccgaggttttctcaac

SEQ ID NO: 24259 - DNA, 263 bp, Glycine max
  Clone ID: 700908195H1
agctaatgataatcttattgaagatcttccctctttggtgtgcaatctttctcacttgaagtcactttgcttggataacaataatgtgaagcagatacctctgaatttattgaaagactgcattgctcttcagaacatatcactgcatggtaatcctatatcaatggatcaatttcagcagatggaggggtttcaagagtttgaagcaaggaggaaaaagaagtttgacaaacaaattgattcaaatgtgatgatcggttcca

SEQ ID NO: 24260 - DNA, 273 bp, Glycine max
  Clone ID: 700908201H1
ttctgcagttggtgactgcttatatctataatagatgacttgaactatccggaaaaggcagacacatactatattggtaatgcaccatatgtattctcagcgtgttggaaggtttgtgcataccttctgatgtttgaagagtttggactgcttcacttgcatccttaatttcataaacatcgttcagatcccaagatgaacagctcaaatatcttttcttcaataatatgtggaaggttgtgaagcctcttttgcaataaagaaccaggagaa

SEQ ID NO: 24261 - DNA, 273 bp, Glycine max
  Clone ID: 700908204H1
cagtaggggtcccaagtggaatgtattgtttctacctatcgcatgcatccgttttgtcttcttcttattttagatgtggtgttgtgaaatctaatggcatgcttagaaatgtacaacaactcagagacaacaagaacaacaagggtgataatcatcaccatcatcatcaatgcgctccaatgagcccaagaatctctttctcaaatgattttgtggatgtgcaacaagccatgaagctgcaagaacaaagaggtggctcatccagatcagaca

SEQ ID NO: 24262 - DNA, 267 bp, Glycine max
  Clone ID: 700908205H1
ttttccctcgttgaaatgaaaatgggttcttctttgtggactttgtgtctaattttggcttcactagcctcttctgcattctgtgcctttccacggaggccagtggatgttccattcggcagaactacgttcccacttgggcttttgatcacattcaatacttcaatggaaggtctgagattcaacttcatcttgacaagtacactggtactggcttccagtccaaagggtcatacttgtttggtcacttcagcatgaacataaaga

SEQ ID NO: 24263 - DNA, 267 bp, Glycine max
  Clone ID: 700908206H1
cttttcttgtttcatttctcgctttatccttagtttttgttcttcaacggatgaaggaatcatcttgatcgtacggaacttgttctatctttccgtaatcgaacttggtggccactgtatataataagttcagttcaacaacacaatcattttgtatatgatcaaattaagtgatggggggcatctgttctaggaagagagatgagcatgagcatgttgtggaagatgaattacacagaggagtctcggggaggtattgtaggagtg

SEQ ID NO: 24264 - DNA, 265 bp, Glycine max
  Clone ID: 700908208H1
tgttaatggcaactcttggcttgcaagcagttcgtcctcctccattaacgtccacttccgacccaacacctctttttgatggcaccaccaggttgtacatcagttattcctgtccctatgccaacgagtatggataactaggaactacaaggggcttcaagacaagatcaaattggtccctattgatcttcaagacaggccagcttggtataaggagaaagtctaccctgaaaataaggtgccatccttggagcacaatggcaag

SEQ ID NO: 24265 - DNA, 262 bp, Glycine max
  Clone ID: 700908210H1
gtagtattatttcattgatttctccctcttcgctctctctcagtgaccagagacagatgatgatggagatggcgaacgaaacgctgtcgttgcggcactcgcggcgttggtgctactcgggcgagtgtggcggtggatgctcaggagaactcggacgtgaagacgctggtgaagtacaagcacgggaagaagtactgcgacaaaggatgggaatgtaagggctggtcaatttactgttgtaacctcaccattaccgattatt

SEQ ID NO: 24266 - DNA, 262 bp, Glycine max
  Clone ID: 700908211H1
gctcaacgtcgctgataatctcatctccgggcccattccgagaaacttcggttctctcagcatgctgagccgggccttgctcagcggacacaggctaagtggggccatcccgagctcggttctcagatttaccgtctggcggatctggatctgtctcgtaaccagatttctgggcccattccgtagtagctgtgtaaaatggtggttttatcgacactaaacttcaatttgatgaaattcttcacattaagggggcaatgcg

SEQ ID NO: 24267 - DNA, 257 bp, Glycine max
  Clone ID: 700908212H1
ctctttctctctctttctaaaaaccagaaacaacaaacacaaaccgaaaaggcgaaaggggttttccgagtgagatctagggtttccatcgattcggagagaggatattgatagaacgacccaacgagcaaggtcaggaggtggagtactagaacatggattcggtgccttcgaattcgcatggaaacctcgatgagcagatttctcagctcatgcagtgcaaaccctggtccgagtatgacgtacagctcttgtcc

SEQ ID NO: 24268 - DNA, 177 bp, Glycine max
  Clone ID: 700908213H1
gtttagaacaggcctgtcttctcttaaacgaggttgtgttgtttggttttgaatttgaagtgatttgatgatggagatgaatatattggcttcttcgttctctggttatgcaaaacccttttaagagtaaacccttctcttcttacgctcagggcatcttctctgcgccatgactac

SEQ ID NO: 24269 - DNA, 264 bp, Glycine max
  Clone ID: 700908215H1
gaaaaacagagaaagcgacagggcagagaaaaagaggttccaaagcagccaccataacagtgaatacacatagttacaaaacaagcataaggtaaaatttacctagaaaaaggtcttcgatctcgtggcataaacattaaacaaaagggtgttctatgttttaattattgcaattggggttaattgttttatagagatttccgcctgtttcaatccgtgtaccaaggtagccacttttttccttttcttttgtttttcctgtta

SEQ ID NO: 24270 - DNA, 123 bp, Glycine max
  Clone ID: 700908217H1
attggtataggcgtgccaaggtcttgttaattttgagcgttaagtgctgcaactaatcagatcccaagaccttggcctaccttgccatacagagaaaagataagccaaatataagccaagttt

SEQ ID NO: 24271 - DNA, 267 bp, Glycine max
  Clone ID: 700908219H1
ctcacttgccttatttttggtcttgagattgagctaaaggccaactcaaccatcgaatttgttggtgattgaaagagaaggaagaagaagcaggaaatggaagcagtgagagctggtcgaaaggagcaataggtctaggtcaaggtgatggcgtagctaaggacagcactgagactgaactcaccagaatccgtctcctcagggcaattgttgagacccgtgatccctcttccaaggaagaggatgattttatgattagaagattcc

SEQ ID NO: 24272 - DNA, 266 bp, Glycine max
  Clone ID: 700908220H1
atctttgctattacctctttttccaaactctaaaaatttttagttccacaaaaccaaaccaaaatggcagcagcctcggcctcatccaccatgatatcaacaccagccttatctccaagccaagcatccaaaagcaccatcatttgaagccatccaacgtgtgctttcaaggccttagacccctcacaaggttcacaaccaaagtgagcagcaccaccagaagggttattccaaagggtggtgtcggtgttagagctgaactcaac

SEQ ID NO: 24273 - DNA, 255 bp, Glycine max
  Clone ID: 700908222H1
gttttcttgcaaaaaaaaaaaactcttaattggatagaatcagcccccaaagtgctcctaccacagttacaaggcctcattttctatgagaagctgagacttatgtgaagccacatcttgtaaggaacaaaatgtcttccaagggagacaggccaagaattgcttgccaaaagggtttaggcataactcagctccaggcggattcgtgaactatgacacgctaggctctagtgggtgttccggaatgcgttcgga

SEQ ID NO: 24274 - DNA, 265 bp, Glycine max
  Clone ID: 700908224H1
tcgtaactcgcacatagtatccctcagtcattccgtgtccatagttgcaagttatctaagcccagtttgtgtatccctcacacaccgtttccagtaacaacacaacatcatgctttctcgccctcacatcaatttttctgtttctgagatccgcgccttctcttcactttcagatggttctgtctctgtagctcggaatcagacgacaggagaatttgctgggggagagtttcaatttttcaaatcctgtcgttgattcatttgg

SEQ ID NO: 24275 - DNA, 262 bp, Glycine max
  Clone ID: 700908226H1
ggaactgagcaagcattggttgctgaattgagtgccttggatgaacatctcaagacccatggtccatacattgctggggagaaagtcactgctgttgatctgagtttggcaccgaaacgtaccatcttgtggtagcgctgggctcacttcaagaattgccgtattccaggaactttggtacatttggcatggcactgtaagctcctggtctttgggtcatttctcggagcagattccatcatacctgaccggagaattccct

SEQ ID NO: 24276 - DNA, 259 bp, Glycine max
  Clone ID: 700908227H1
gtttctgactcagagaaccaagagcaagtttgtgatctctaaggaaggaaatgctgccgagacactctacaaatttatgagacctgaagacattcctgttcagtatggaggactgaatggcccagtgatttgcagaatggtcccccaaaacctgcatctgagttcacaatcaaaggaggagagaaagtgaacatacaaatagaaggaattgaggctggtgcaactatcacatgggacattgtagtgggagggtgggact

SEQ ID NO: 24277 - DNA, 261 bp, Glycine max
  Clone ID: 700908228H1
cttgtgggtggaggaaggaacgagaaatgaaagaaacatttgttgtgtctgtgtgtgtgggtgggtggtacttagccaattgtgagcaaataacaaacgagtggctttcccttcttctatcctatatataccattcccatcactccccatgccctctcaattcacttcctatccccttctctgattctctccatatattatctcaaacccctctcacagaatgggaagtgctggaggaactgactatggtgcatacactta

SEQ ID NO: 24278 - DNA, 256 bp, Glycine max
  Clone ID: 700908185H1
tagtgacactgtttggtagcattcatgagatgctccccgagacaggagcaggaggaagcatgcgaagactctgtttccaaattttggaagcatgttcagcacagctgagccgcatgttaaaaatgaacagtgggatgaagagagcttacaaagggaaggtgaggactacatgtcagatgcagctgatggggactctgatgataatttgcatagtcctttaatctcacgtcaaacaacaagccttgaaaaagacttg

SEQ ID NO: 24279 - DNA, 265 bp, Glycine max
  Clone ID: 700908152H1
cttctcttaaaagagcctttgctttttctttaggcctttccgaattaagtacttgtttcattttctctcgaagcaagaaaaatgttcatcgagagtttcaaggttgagagtcctaacgtgaagtacacagagactgagattcagtccgtgtacaactatgaaaccactgaacttgttcacgagaacaagaatggcacttatcagtgggttgtcaagcccaaaactgtcaaatatgaatttgaaaccaacacccatgtccctaaac

SEQ ID NO: 24280 - DNA, 163 bp, Glycine max
  Clone ID: 700908154H1
aaaaacaaaattgatcatcttactgatgtattctccgaaaatggttgatttacattggagatcaaagatgccaagttccgacatgccttccaaaactctaaaactctctctctccgacaacaagtccttaccctctttgcaactacccttccgcaccacagat

SEQ ID NO: 24281 - DNA, 264 bp, Glycine max
  Clone ID: 700908156H1
cttcagagttggaaataccccagaagaaggagcataattcatcacttgtaaattaggttcttatgatgacaccaaccggcggagaaggagctgagaagatggatgcagaagatggtgtaaactgcagtgattatgagcatgacatagaaaatgaagaaagtggagggtactggtcagggatatatgacagacacatggctcatacaatgccacttcttatgaagagggctaacaccacctacccagattgctattgttggtgcc

SEQ ID NO: 24282 - DNA, 261 bp, Glycine max
  Clone ID: 700908158H1
ggcagtcaaggcttgaaagggtccataagtgatcagattagtcttttgtcagatttggaatttgagttctaatttgttcgtgggtgaaataccttctggacttggtcagaaatccctgatacacctggacttgtccaacaatcagttaacaggccccataccagatagtattgcctcttcaagtttgcagctcgtgctactgaatggtaacttattggaaggacgagtaccagagcaactttattcgattggtgtgcatgg

SEQ ID NO: 24283 - DNA, 263 bp, Glycine max
  Clone ID: 700908159H1
caaagaagaagataagctagctaaggcagcaatgggtaatccttctaagcttttcccatttttctttgcattcattgtgtttctgatgcccttagtttccttatcccacaatgacttctctacctttgccataaaaaccgtttcatacctagtttcctttagtgaaaatccaaaccataatggccacatcaccacaagctccaatgaaagagacaaatcacgtctttggaggaaagccttcattggcttacaaaatactcacg

SEQ ID NO: 24284 - DNA, 262 bp, Glycine max
  Clone ID: 700908160H1
gtggtggcaatgggtagcgaagaagagagggttcttgagaatcaactggaacttcaattgcaagagcaaagggattctctctctgctatcggtcaagctcttctctctgatccaactaaccctgaacttctggcggtacctctctctctctctctctcacccacacacacacacacatttcaatcaacaacatttgattttttcaataaccctttcaaatttctggccctgttcgatttcccatttcttaatcgcgtcagaa

SEQ ID NO: 24285 - DNA, 265 bp, Glycine max
  Clone ID: 700908161H1
cgtagtttccacatttctcctaccgcaaagtcaaaactacccactcacccaggtaggcacaggcagcgatggacgtaggagccggcgacgatcattccccggaagccgtcatatcgcggtggaaattcgcggtgtcgcagcagtaccagcacatgctggacaaaacgacgccgcacgttctccggcggtggatcgggtgcctggtggttgccgccgtgtacgtgctccgcgtgtacttggtccaaggcttctacatcgtctccta

SEQ ID NO: 24286 - DNA, 268 bp, Glycine max
  Clone ID: 700908164H1
ctcgagccgaatcggctcgagaatcaatcttctgagagtgtttgcgttgaaagtagcaaagatgtttcctttcgggcaaaagggtcaaaagataaaggggactatggtggttatgcagaagaatgtgttggatatcaacagcatcaccagtgttggagggatcgttgaccaaggcttagggctcataggcagtgcagtcgatgcacttacttttgcagccaccaaaatctccatccagttgattagtgctaccaaggctgatggtggg

SEQ ID NO: 24287 - DNA, 266 bp, Glycine max
  Clone ID: 700908165H1
catcttcttcccaaccactactactctctcactgcagatctcaattgcatcgctgtccatggctaccatcgttagcatcaaggcccgccagatcttcgacagtcgtggcaatccaactgtcgaggtggatttgacttgctccgatggtacttttgccagagctgctgttccaagtggtgcatccactgggatttatgaggcccttgaattgagagatggaggatctgactaccttggaaagggtgtatcaaaggctgttgacaatg

SEQ ID NO: 24288 - DNA, 268 bp, Glycine max
  Clone ID: 700908166H1
cttcccctatggctcgtcactccttgctcttagccctcctcctcatcgccgccgtggccaccgccgcgatggcggtggccgcgtaccgacgccgacgacatcctgatccgtcaggtggtgccagatgttggcgaagcgaagaggaggacaacctgctgaacgccgagcaccacttcgcgagcttcaaggccaagttcgccaagacctacgccaccaaggaggagcacgatcatcgcttcggcgtcttcaactccaacctccgcagagc

SEQ ID NO: 24289 - DNA, 264 bp, Glycine max
  Clone ID: 700908168H1
cttacgtagtgtacactatccagtggagcttgaatttgccaagggcaccgaggcagtggaaggaagacaatggcggtttctctatcggcgctcacaacctccctctcttcactttccttctcttcccacatttcccagagaccaaacactctctccttcgccagaaccgaatccctctccgtctccgtctcgcgcttccccaaaaccccctcctccctcgtcgtttccgccaccgcactcgcggaaccggaaaccgaagacctc

SEQ ID NO: 24290 - DNA, 145 bp, Glycine max
  Clone ID: 700908169H1
cgtggacgccataatggaaaccggaggcagaacactgaaaagcagagaaacgatggcctttgaatcggtgacgcagtcagcacctcctccgagatcaagaggaagaatcaccttgctcgaaaaccccaaaacacccttcgccctt

SEQ ID NO: 24291 - DNA, 262 bp, Glycine max
  Clone ID: 700908170H1
agaaagagtaataataataaagtggaagaaaaagaattaggagagtgaaacaagaagaagaagaagaagaagaagaagaagaagaattgagaagatggtgtttgaggaaactgagctgaggctgggactgggactatgtctccctggaaatggaaccacggcaacaactgaagctgctgctgcggaattaggagtgaggaagagagggttctctgagactgaaactgatgaaacagccaccgttgatttgatgcttaacctc

SEQ ID NO: 24292 - DNA, 258 bp, Glycine max
  Clone ID: 700908171H1
ggccaatcaactcacaatggtcagcttaatggaattcaatgcaataatttagttgaatcaatctatatgaattcttcatgtgacatgctgggaaatatagtgcactcgttaaagattgaaggtccatattctggtgtctgtccatccaatggatctttaccttgtataaggtattcagtttctttggctgtagagggtgagaatctgaaagaagttattgaagtttgtgatgagtttgagtttgaagtgggaattggt

SEQ ID NO: 24293 - DNA, 262 bp, Glycine max
  Clone ID: 700908172H1
ctcgagcgattcggctcgagaaaaaatgtcatccactgctagcatcgggttatggggctccaacctgcttcaacaacgttacatcacacaaagaagcagcaagcaatgaggaacagcttcttgagcaataagcacaacagtgtgagagtgatgaagggttggagaggaagacatggtaacactaacaacacatccaaaagggtaggaattgtgcagtgtagagggttaggggacttcataggtggagacttgataaagtttg

SEQ ID NO: 24294 - DNA, 261 bp, Glycine max
  unsure (1)..(261): unsure at all n locations
  Clone ID: 700908173H1
agcaaacagcaaatgtccgatcattatgggacatgggcttacaacttttccacacaacatacgaatttgaaatactnaagtagaacacaaaactgttacaggtcttctacgaattattaaaagtgatagaaaaggtgaagcagtggatagaactctttaagtccaccttttgaagatgtttactgctctgggaatttatgcagaaagctttgagaagccatccttgaatgcacatctgaatttgatgctgctgaaggtgtg

SEQ ID NO: 24295 - DNA, 261 bp, Glycine max
  Clone ID: 700908174H1
caacgcacgaggttgaagttaccgcgccggcttccgctgttcttgcgccaccgggtttctatctgactgtttgtggtccatcaagaagttccaagccacggtatttgggtccagatggtgtgaaattgtgaattctcgtctctgcctgctcgacaacttcgttcgtatatgttctttttattcaagttatttattgttgtgaatgtctgggagtgaacagattcttgagtgagtatttaaactgtaagatatgggaagata

SEQ ID NO: 24296 - DNA, 261 bp, Glycine max
  Clone ID: 700908176H1
cggaaagagagagagaagctagagagagaaagagaccaaactaattagtgtagaagaaacagagacgctgtgtgggtgtgggtgtgggtgtgggagagagagggagagagaaagcagagaaaatccgaagcagttttctcacactttttgatcggaacctctcattccgcgttcagattgcgccccccatttggtccttacaatggagcggttagggcgggccagcgaagggtcgcagtctgatccgtcgccggaatggac

SEQ ID NO: 24297 - DNA, 258 bp, Glycine max
  Clone ID: 700908177H1
ctcccaactcgccctcgactcacatccttgtccgattccgcgaactagtcgagtcaatcgggttggtaaggtaagatctattctgtttcttcgtcatggcaaccggacaactattctcgcgtactacacaggctttgttttacaactaccagcaacttcccatccagcggatgcttgattttgacttcctttgcggcagggaaacaccatcagttgctggaataattaaccctggttctgagggatttcaaatacttt

SEQ ID NO: 24298 - DNA, 263 bp, Glycine max
  Clone ID: 700908179H1
gacaaaatttaataatgtctatgtgaaaaacttatcagagtcaaccacggatgaagagttgatgataaattttggagaatatggtaccattactagtgctttaataatgagagatgctgatggtaaatcaaggtgttttggctttgtcaattttgaaaacccagacgatgctgccaaagctgttgagggacttaatgggaagaaatttgatgataaggaatggtatgttggaaaagcccagaaaaaatctgagcgtgaacaag

SEQ ID NO: 24299 - DNA, 263 bp, Glycine max
  Clone ID: 700908180H1
tctctccccatcttttattgaattgattccaaatacaaacatggcactgaagaagttcttgtgggttgttctgtccctttctttggtccttggagtggccaatagctttgattttcacgacaaggatttggagtccgaggaaagcctgtgggacttgtacgagagatggaggagtcaccacacggtttcgcgaaccttggtgacaagcacaagcggtttaacgtgttcaaagcgaatgtgatgcatgtccataacaccaacaa

SEQ ID NO: 24300 - DNA, 259 bp, Glycine max
  Clone ID: 700908182H1
cacctttgtaaatacaattgggacactactaggattgggaagaagggtctttacatttatagtttggcaaatagatattgcaactacctttgtataattctatttctgaagaagcaattacaatttacaagggatggtgccatttacggcataaggattaaggagggataaagggaccaattgctttggaatatccactcattacaatgcatgtatgacaacacatagtaatatgatgtgtgtttttattcagtgggca

SEQ ID NO: 24301 - DNA, 262 bp, Glycine max
  Clone ID: 700908183H1
gaaaaatagaaaagcgaggagccaggtgatgctaatgtgaaaagaggagcagaatctcggccatgtccacgtcaccgtccggcagtaccctcggtaaggccacggcggtgatgaagagcctcaacttctacctttcagatcaccccgcaatcgtgactttcagatggagtcacgacctatgctggggttccacctggtccttcctcttctcctcaatcgcctcttacgtcgtcgtttcgatcttcctccacctcacattagc

SEQ ID NO: 24302 - DNA, 197 bp, Glycine max
  Clone ID: 700908184H1
ttaaggctggtgtctatgacgagtacatcaccgttcccaagagttcaaagaacattctcatgtacggtgatggccctgctaagaccatcatcaccggtcgcaagaacttcgtcgatggtgtcaagaccatgcaaactgccactttcgccaacactgcagaagggttcattgccaaggcaatgacattccagaacact

SEQ ID NO: 24303 - DNA, 269 bp, Glycine max
  Clone ID: 700908150H1
acaaggcagaaagcaagctcatcctagagttttaaaaatggcagcagcctcctccatggctctctcttccccatccttggctggcaaggccgtgaagctgggcccatcagcccccgaagtcgggagggtcagcatgaggaagaccgtcaccaagcaggcctcctccggaagcccatggtacggcccagaccgcgtcaagtacttgggcccattctctggcgagcccccgtcctacctcactggcgagttcccaggtgactacggctggg

SEQ ID NO: 24304 - DNA, 215 bp, Glycine max
  Clone ID: 700908122H1
gtgctgttcttatcattgattcgaccactggtggttttgaagctggtatttccaaggatggacagactcgtgaacatgctctgctttcattcacccttggtgtgaaacagatgatttgctgctgtaacaaaatggatgctactacacccaagtattccaaggccaggtatgctgaaattgtgaaggaagtctctgcctacttgaagacagtagga

SEQ ID NO: 24305 - DNA, 266 bp, Glycine max
  Clone ID: 700908123H1
caaataaccaaacttatcctatgtctgacttctacctttgtttcaacaccaagttcagacacaaagcagcgaggtttttcataacaaaggagaatgaaggctttttcagttaaagttgaggaaggaagggaaggtaaaaatggtaacctttctgttggtccagtataccgtaacctcctctcagaaaatgaatttcctccaatggatcctgatttcagtaccacttgggatattttctgtgtgtctgtcaaaaatcatcccaataa

SEQ ID NO: 24306 - DNA, 268 bp, Glycine max
  Clone ID: 700908124H1
gaggccttcaatttcacccttcacacgtggtggtggttttgttcttcttctcttcccctttctttttcttcttctgagcttgtttaagctctttctatttgattccattaacatatattattacaatgtgtggtattcttgctgttcttggttgttctgatgactctcgagccaaaagggtccgcgtgcttgagctctctcgcagattgaagcaccgtggccctgactggagtgggctccatcaacatggtgactgctttttagcaca

SEQ ID NO: 24307 - DNA, 269 bp, Glycine max
  Clone ID: 700908125H1
gggtaagggtaagcattcaaaaccttcttgttataaatattgaacaccacattcaaagcccaccaggttgctgtcgccccaaagactgatcctgagttttggaagtctttgttccctgttgctgttgcacatacaattggacatgtagcggcaacagttagcatgtcaaaagttgcggtatcattcacacacattatcaagagtggtgaacctgcttttagtgttctggtttcaagattacttttgggtgagagctttcctgtgccagt

SEQ ID NO: 24308 - DNA, 271 bp, Glycine max
  Clone ID: 700908126H1
tgccacaccatggcctcaaccaacgccctctcttcagcttccattctacgctctcccaaccgccagtctctgaccagaagagcgaaccacaacggaagagtaaattaccgtcaaccgaatagccgtttctccgtcaaagcctccgccaaagagattgcctttgaccagcattttccgctctgctatgcaggccggcattgacaagctcgccgacgccgtcgggctcactcttgggcccagggggaggaatgttgtgttggatgagtttgga

SEQ ID NO: 24309 - DNA, 266 bp, Glycine max
  Clone ID: 700908127H1
tgaacttgtttctcaagtctattggtcttagagagtattcaaggtacattagtttcaaccacccttatagtcatgagaggccccttctaggccaccttaagtttttcccttgggtggtgaatgaagggtactttaaggcttggagacaaggcagaacaggttaccctttggtagatgctggcatgagagagttgtgggcaactggttggttgcatgatcgaatacgtgttgtggtttcaagtttctttgtgaaggtgctgcagctt

SEQ ID NO: 24310 - DNA, 269 bp, Glycine max
  Clone ID: 700908128H1
ggaaaggtctgacagaattcatgttatcgatttcgatattgggtttggagtgcagtggtcatctttagtgcaagagattgccttgagaagtagtggagcaagttcatgctgctctgatccagctaagcctgaacttctggcggtacctctctctctctctctctcacccacacacacacacacatttcaatcaacagcatttgattttttcaataaccctttcaaatttctggccctgttcgatttcccatttcttaatcgcgtcagaa

SEQ ID NO: 24311 - DNA, 269 bp, Glycine max
  Clone ID: 700908129H1
agagcgagcagtttcagacacagagagaggggtttgggattggagggattgacgctgcgtctcttcctcttctctttcgatccatccctcattcctaatcctccaatccaaccacctcagcctcacactcacatatacacatatctgaacgcgtatcgtccctcctatggcttcaaagcgcatcctcaaggagctcaaggacttgcagaaagacccaccaacttcttgcagcgctggtccagtagctgaggacatgttccattggcaag

SEQ ID NO: 24312 - DNA, 271 bp, Glycine max
  Clone ID: 700908130H1
atttaggattgtggtgtgttgttgttgtattgtaggtattggtgggtgaaatcaaaaaccctagccctcactctcatcactttttttgagctatgtttcaagagagttagttagggataatagggcagggaagaataagagggatgtacaaagaacgagagcgagttggtgtttctgtttccgcttccaaatcggaggatcggaagcgaatcaacgacgttctcgataagcacttggaacgatcctctccttccacttctcgccccatcac

SEQ ID NO: 24313 - DNA, 267 bp, Glycine max
  Clone ID: 700908131H1
aagggcatgtgagaaaaaacatactaatcaaattaaacagcgaagaagagtttcaaatttattgcttcgaatctccagcttcgtcagggaaggaaaacagcataacgtgtggtctcgggggaaccaaaaactgtgaaattctgaagccactaggccttttaaaaaccaaactaaggaagacggtttagacagagagtacttcaagctaagaaaatggaaagtggggttgtggctgtgaacaacaacatcaacaactatgaatccaag

SEQ ID NO: 24314 - DNA, 272 bp, Glycine max
  Clone ID: 700908132H1
gtccaaattaactgttctgatggagatggattaactgaacttgagaagctgattaaagcagaagactttcaccagatcagagatagagcatttgacagaacttatgcgttcaagaactgtgggttcatgctgttgggtatcaagtgacgagcccatgtttgggtccatcagatccaatgttgcctcgtgaacaaaagggagaatatcccaaaactccagatccagaaaatgcgattgaaaaccagcttgtttcaaccccatacgttactaag

SEQ ID NO: 24315 - DNA, 273 bp, Glycine max
  Clone ID: 700908133H1
caaaaatgagtgacaaaaacaacatggttatagcctccaaaacagccactggtagttcttcatcatcttcaagaatgtccacaaaaacattctcgggactcggaaacctcgtcaagctccttcccaccggcactgtctttctgttccagttcctcatccctgtcgtaaccaacagcggacactgcaccactcttcacaagtacctcactggctcttaccttgtcgtatgcgcattcaactgcgccttcgcctccttcaccgacagctacaccg

SEQ ID NO: 24316 - DNA, 269 bp, Glycine max
  Clone ID: 700908134H1
gtcaaacataacaggatgcatcagattcatggggtttgtctgtgagcttcctaagcataatcttgctgccgatagttggcaatgcagctgaacatgcaggagcaattatatttgccttcaagaacaagctggtgagaactgagagagtgataatattatcatattggccaagcaataaatttatttaattaaaatgttaatttagttaaactaaagtaattccttgaacacaggacatctcattgggtgttgcattaggttcagcaact

SEQ ID NO: 24317 - DNA, 81 bp, Glycine max
  Clone ID: 700908135H1
gttaagagaggccatttgccttttcaattttcatattaattcgatatttgtagtggctagcgagagaattctgaagccatc

SEQ ID NO: 24318 - DNA, 249 bp, Glycine max
  Clone ID: 700908136H1
tcgcggtgttcttggttcacttggcaaccatccctatcaccggcactggtatcaaccctgctcgtagtcttggtgctgctatcatcttcaacaaggaccttggttgggatgatcactggatcttctgggtgggacctttcattggtgctgcacttgcagcactctaccaccaggtcgtaatcagggccattcccttcaagtccaagtgattcaatcacaccgttcatgcttaatcaagttggggacaac

SEQ ID NO: 24319 - DNA, 259 bp, Glycine max
  Clone ID: 700908137H1
ctcatgcatgtggctagcagcagcagcaagtgcaaggtggccatgagcatgaccatggtcaacgaccctttgaggagaattgggaggtgtgaccaaaaaaaagaagccattagtggctctgaaattggagctgacaattctcctgcagcaggagcagcttcttcattctaatctggtgctatcctatctgagctttttactactactactaccctttctttcttcatctaatttctaccacacttttctctttgttttt

SEQ ID NO: 24320 - DNA, 259 bp, Glycine max
  Clone ID: 700908138H1
gttcagaacctatacgattcccttgatgtgcatgttgggcaatcagttgcagtggtagtaaccttgaatcagcctccaaaggactgctacattgttgcctcaacaagatttaccgagacacctctcactacaactgcagtactacactatgcagactctttttcctctgcattaggacccgtgcctgctccccccgttgataaatatgactttgattggtccatgaagcaagctagaacctacagatggaatctgagag

SEQ ID NO: 24321 - DNA, 266 bp, Glycine max
  Clone ID: 700908139H1
attctcttcactttaaagttacatagtttttcattgttttacttaatctacaatggctgcttcaacaatgactctctcttcatcatcattggctggccaagctatcaagcttgccccctccacccctgagcttggtgttggaagggttagcatgaggaaaacagcctccaagactgtttcctcaggaagcccatggtacggcccagaccgtgtcaagtacttgggcccattctctggtgagcccccatcctatctcactggtgaat

SEQ ID NO: 24322 - DNA, 263 bp, Glycine max
  Clone ID: 700908142H1
atcacttgtggatgcacacaagccattgatgtttcagtggtgatgcttgctcgccccggtgcaaacatcattcttccaagaccaggtttcccactctatgaacttagcgcttcatttagaggagttgaagtgaggcattatgatctgcttccagagaaaggttgggaggttgatctagatgctgttgaagctcttgctgatcagaacactgttgctttggtgattataaatcctgggaatccttgtgggaatgtgtacagtta

SEQ ID NO: 24323 - DNA, 264 bp, Glycine max
  Clone ID: 700908143H1
cgtgatgcagtatggtgatgtagggcttagcagagatgttctcttccattatttgggtacagatcctgctaatgataatttcacttttgtggatgaaaactccttatggtcaccttcaaaaccagtcaaccaacgtgatgctgatctcatccatttttgggataagttccgcaaagctcctgagggttctctcaggaaaaatacagctcagaaacaagttttggaagcaatgtctcacagaatgcatgtagacaacagtgtaaa

SEQ ID NO: 24324 - DNA, 260 bp, Glycine max
  Clone ID: 700908145H1
cggcaaggcaaatctgcattgcgatggcgcctccgaagctcttcgtctttgcgctttctgtaaccctaattttcgccatcgtaggggccgaagccgatatttccatcgaaggaagcactccagagccttatacctccgccatcaggatccaattagatcaactcaattccaagatccaaattctcgagtctcaaatcagcgaaaagttggaagaagtgaagaagaaggacgacattatggcagaaaaagaaaagtccatt

SEQ ID NO: 24325 - DNA, 268 bp, Glycine max
  Clone ID: 700908146H1
cactactttacagcacactcttgactcttaactctccctcccagtttcatggcttcttcagggacaagagcagcctcaggcttcagcttctcagagatctggctcttgatagtagccacagcactcatctgtggctttctcgggtacatagtttatgatgcaatcatggccactgcttctgagttgctgcaacgtttgctggtaatttctccactgttcttgatcatcattgttcactggctctccactgcaacccaaataagcttcc

SEQ ID NO: 24326 - DNA, 268 bp, Glycine max
  Clone ID: 700908147H1
ggagagggtatagcttcaaaggactcgtctctcggttcctcaggctctgataggctataggatttgctggcggtgattacaaatcacaagcatttatcatggtccttttcccatcttttgtgaatggattggtaagaactgtgtcaatcaagaaagagaagaattgtcaaaaggaggatggaagaaaagctgtggaagaattggcaaaggaagcaaggaagaatgaattgctattgagttcatctggagttgtgaagtcaaccaaggc

SEQ ID NO: 24327 - DNA, 178 bp, Glycine max
  Clone ID: 700908148H1
caggattttatgcctcagaacaagcagtgttatcactctatgctgtgggacgtatctcaggctgcactgttgatattggacatggaaaaataggtatccacacctgaatgcacttgtccatttcttgccattgtatataccttgtgccttgtgtattctagataacatttttttttac

SEQ ID NO: 24328 - DNA, 144 bp, Glycine max
  Clone ID: 700908121H1
cttctctgttaaaaaaaaattaggcgtctaaagggccaaagcttagaaagttgaagcttttttgttgaggtgaaagtgaaatggttggcaaggataatctgagggctgaggacttgaacttgtgctttaagaagcttatgatgg

SEQ ID NO: 24329 - DNA, 254 bp, Glycine max
  Clone ID: 700908067H1
caacttttatacacactctctcagtcactcagataccctggatctagtggaaatcccgatgctgtgaaggccctctgttggcatagagcttattagcaggattcattgtcaagagagtaaggaagaaagctcagaagcagagtctgtttgttcacttggatgccacatatcgcaggaggtcaagcatttgcgtgaagggataaaacatgggttaaaatccgagttagaaaaggcttcacttgtgttgggccgta

SEQ ID NO: 24330 - DNA, 249 bp, Glycine max
  Clone ID: 700908069H1
caaaatcttcatattcatcaaactcatcaaaatgagtctgtaccactcctccaccaccaccaccaccaccaccatcttcaccgtcatattcctcctccttgcaatactattcactctcacaccccacaaggccaacggtgccacgtgtcaccctgaggaagaagcgggcctgttgggcttcaaatccggtatccgatccgacccgtccggcctgctcagtaactggatatcgggtacggactgctgcac

SEQ ID NO: 24331 - DNA, 242 bp, Glycine max
  Clone ID: 700908072H1
cctgaatggatgaattttgagagtgatttggaggccaaggagaaggaacttgccaatgggagattggctatgttggcattcttgggattcatagttcaacacaacgtgacaggtacaggaccatttgagaacctcttgcagcacctctctgacccgtggcacaacaccatcatcaatacaattcgtggctactaagtttgtatccagtggacatggataagcctgtgtccttctcgtgtaat

SEQ ID NO: 24332 - DNA, 245 bp, Glycine max
  Clone ID: 700908074H1
cccaatcgtagccgtcgcactttgcgttttctgcgtcatgtgcgattccccgacaatggccacccaaatgagcaagaagagaaagttcgtagctgatggagtgtacttcgctgaactgaacgaggttctgacaagggagttagccgaggacggatactccggcgtggaagttagggttacgccgatgcgcaccgaaatcatcatcagagccaccagaacccaagccgttctcggtgagaagggaa

SEQ ID NO: 24333 - DNA, 235 bp, Glycine max
  Clone ID: 700908076H1
gtgaatcatcatgactggctctagcatttaaacaacatccaatagagatttgtggtttgcatgggaaggaaagtattgggtccttttcattcatgtaacattattcatcatagtgtatattttcttttaattgtattaactaaccagtgtaattagataccctacaagttaggtactgtcccctggcatgtagttgtattttagggggaataatggggtggtccttaggctttgt

SEQ ID NO: 24334 - DNA, 251 bp, Glycine max
  Clone ID: 700908078H1
aagagatcgcagacacagagcagaatggcttctacccaatgtttcttgcaacaccatgctcttaccacccctgccagtgccagatccccatcactacgcatcttggttagcaccaagcctaaccagcttgtttgcaaggcacagaaacgacagacaccacaagaggatattgatgtcagcccaatctctcgccgtttagctctaactgtgctcattggtgctgctgctgttggctccaaagtccaacctgc

SEQ ID NO: 24335 - DNA, 99 bp, Glycine max
  Clone ID: 700908081H1
cacaccactacccccccaccgaccccttatccgccagcaccaacaacaactcatggcacgctgtccagaagcactacgatgatcagggtcgcaaggtcg

SEQ ID NO: 24336 - DNA, 242 bp, Glycine max
  Clone ID: 700908084H1
ggaagtttcaccctatgtggagagttgcaacaggaaagaagacaaggtacccaaggatgagagcacacatgatgtcaactcgtggagaacaagaactgaaaatgggtcattgatgagagatattccacttgatcacatctcagacaattcagcctccaaaagttgcaggagagaaaatagtggtactgatgatcagatgcttgaattatgggaaactgccgagcaagattgcttggctagtt

SEQ ID NO: 24337 - DNA, 246 bp, Glycine max
  Clone ID: 700908086H1
agacaattcaacttaagaggtcaatatggccaccaccactacccatcctccctctaatatctgttttttccttctgttgttgcttctagcacactttcatttgggcataagccaacttgagctgagttactactctaaaagctgcccaaaagctgaagagatcatcaaggaacaagtcacacaactgtatgacaagcatggaaacactgccgtttcgtgggtcagaaatctcttccacgattgcgt

SEQ ID NO: 24338 - DNA, 171 bp, Glycine max
  Clone ID: 700908088H1
gtgtaattatcagagttggggagcctggtaagggcgagtggaatttttggtgccattgtttgccatttgtaatttaacttgccagtcctttcatgtacagaaataaaaggaaattccgtgtgggactttgatttcaaataatctctatcgaatttgaactagttggaattg

SEQ ID NO: 24339 - DNA, 240 bp, Glycine max
  Clone ID: 700908089H1
gcaggtttgggagtatggatgggtttcgttagcctgtgtcttctgtctgtatcagtatgaggtctgctccaacgcctagagcaccctgtcaaagctgatggctcagttagccttatggtcattggagactggggaaggaaaggaacgtgcagtaaatctcaagttgccactcagatgggaagggttgctgcaaagttagatatcgactttgtgatatccactggagacggtttctacgat

SEQ ID NO: 24340 - DNA, 244 bp, Glycine max
  Clone ID: 700908091H1
ccctgattaaaggttatctctaaggtcctaaacaatcctctttcaaaaacataccgagataagtgtggaaatgacgacaccatcattggtagagtctctagttcttcaactccatgagatctcagctgtcaaatttggcaacttcaagctcaatctggcatcttctcaccaatctacatagagctccgcctcatcatatcttacccttctctcctccaacagatctctccgaaccttatttctt

SEQ ID NO: 24341 - DNA, 250 bp, Glycine max
  Clone ID: 700908095H1
gaacaagcagcattagcaaccaagcaagagaatggcgacgacagcagccttgtgcggcactatgatgagcagctccttcctgaggagaaaagcagtggtcacaagcctgaaggcattccccaatgctaacgcagtgtttggtgtaaagggtggacgtggaggtggtgtgactgccatggctagcttcaaggtgaagctgataaccccagagggagagaaagagtttgaatgcccagatgatgtatacatt

SEQ ID NO: 24342 - DNA, 280 bp, Glycine max
  Clone ID: 700908101H1
tttagaacctataatgaatattaatggccgacgaccctcggccgagtctttacttcctcctcctgactttgagtctgcaaactatccgaagggctggctgattggcaagaagagaaaactcgttaatgtcgatgttgttgaaagcatgagaaggattgccatccaagaaatgaacagaaaggacagggaaattgatgggctgaatgaacagctggaggaggattcacggtgtctagagcacttgcaactccaacttgttggatgacaaaagcatacgcgc

SEQ ID NO: 24343 - DNA, 277 bp, Glycine max
  Clone ID: 700908102H1
tgagcagccaaacactctctctctgtctctcgaaaattctcagtttgcagagaaaatctgaatcatgtcgtggcaagcgtatgtcgacgatcaccttctgtgtgacatcgaaggtaaccacctcactcacgctgctatcatcggccaagacggcagcgtttgggctcagagtaccgacttccctcagttcaaacctgaggagataactgccatcatgaatgactttaatgagcctggatcacttgctccaactggattgtatctcggtggcacaaat

SEQ ID NO: 24344 - DNA, 268 bp, Glycine max
  Clone ID: 700908105H1
gtgaaaacggacgatccgaagaatattaccctctctctataacattattcatcagatcagtttgatcttatgtaaatgaagtatttttagacaaaacccagattcactgaaaaacctcgaagcggagaaaaaaggcaacaacttttcatctctacgcaagtggttatggcggttgctgagaatgttggggccaaaatcggttcttcgagccagagcttggagaacgggttagtgtcagcggattcgggtgaggttgagaaatcgaaaa

SEQ ID NO: 24345 - DNA, 271 bp, Glycine max
  Clone ID: 700908106H1
gtttagttaacagcaagtggcaaatggcatgcatatccgcaacggaggcagagattgagcgtatgatatgagagagaagacggaacaaaatcaagggcggagaatgccccatggctgacatcatgtcggttaacactttattcagacaacactatacttcttaatcaaaatcaaatgacctaaccactctctctttttcccaattttcgaatctctctcctccatggacccaacttcgatccctccccctccggccaccaacgtccccttc

SEQ ID NO: 24346 - DNA, 269 bp, Glycine max
  Clone ID: 700908109H1
cagcaaaagacctgaagcagttgctgtgtgaaatgcccatgtggttcaatattcaccgtatgctccaacacagtactcatgaattagtggcctatcgagcaccattatgttgcctggcctgctgtcaccactggcaatttgcttttctctggaaataactataagaaatcagtccaagtaaggctgctgctgtgatgcgtagtttgtgtataatcttttggagtatcaggacaagtttaattcaagataaagccctttactctgtatca

SEQ ID NO: 24347 - DNA, 269 bp, Glycine max
  Clone ID: 700908111H1
gtggtattcagcccgggaatccaatttaggggaccgtcactcgtcacgcactgaactgcaaagaaatttccgtagaaatttccgtgaagaaagagtaaatacctaaagtagtaaacgttcacaattacatgaataatcaattgatcgattccccttgatcgctctgttttactgtccgtttcaaatccgacagcagcccagcccggcccggcccaatcatgactcccaaactccaaaccgcggcctccgtggtggccaccgcgatgctc

SEQ ID NO: 24348 - DNA, 208 bp, Glycine max
  Clone ID: 700908113H1
gtggcaccatttgaggcatgttatgattcaaccagcattagaaattcctcaactggactagttgtgccaactattgatctagtgctgcgaggtggagtgcagtggactatttatggagccaattcaatggttatggcaaagaaaaatgtagcatgtcttgcaattgttgatggagggacagagcctagaatgtcgttcgttagagctt

SEQ ID NO: 24349 - DNA, 272 bp, Glycine max
  Clone ID: 700908114H1
gtgatagcaatggcggtggcggtgacgacagcagcaaggccatagttggagcagtgcttggcataggaagcgtgcttcttattttggtcattgtttgcgttgtttgctccaggaagaagaagaagaatagaatgtactattatgcaggagagcaatccatgggaaaagggaataataataactattacaatagcgggcaacacccaaattattacggaggtccacatggggaccatgttgtgaggatgcaacaaaatggaatgggtcctggt

SEQ ID NO: 24350 - DNA, 271 bp, Glycine max
  Clone ID: 700908115H1
aatggatcctcattctgtggtggacctgactgaggataaagatgttgatgttgagttcatgtacactgcaaaatggaaggaaacagatacatcttttgagaagagaatggataaatactctcagtcttcttctttgccacatcacttggagattcactggttctcaatcataaactcctgtgtaacagttcttcttttgactggttttctggcaaccattctcatgcgtgtattgaagaatgactttatgaagtatgctcaagatgaggaa

SEQ ID NO: 24351 - DNA, 84 bp, Glycine max
  Clone ID: 700908117H1
ctattttctagtatttggcacatagtgcattgtttgggccattattaatcaaccaaggataaacaccaccttttggcttcttct

SEQ ID NO: 24352 - DNA, 143 bp, Glycine max
  Clone ID: 700908118H1
gagcgtctaacggagattcggtacggtagtctttctccccagttccctgtctgtaggtggggagttcctttctctcaaacattcggtgcggtatactgcttttgatttacaagtcaccttcgctttgagtttcttttagccat

SEQ ID NO: 24353 - DNA, 273 bp, Glycine max
  Clone ID: 700908119H1
cgccgttggagaacgctccaattttctctccaacaattcgttctttcccttctcaatttccggcgagttatccctcttcaattactcgtaagattcatcgatcacaaacttatattgatttcgtttttctgacactgatcttatttttccaatcggttttcttctccaacatttatcgcttccagaatccagatctggatgcacatgaaccattgtttgcatttggggcaaccttgatttgggtttttaagtgctttatggaaactgtggtct

SEQ ID NO: 24354 - DNA, 270 bp, Glycine max
  Clone ID: 700908120H1
gatctgccaaacgctacatggtcaactctgaagacttatgggaaacccccggtctcacgtggcggacaatcagttacctttgtgggtacaagcttagtaatttttggtggagaagatgcaaagagaactctattgaatgatttacatattcttgatttggaaaccatgacatgggatgaaattgatgctgttggggtgcctccttctccaaggtctgatcatgctgcggctgttcatgtggagcgatacttgcttatctttggtgggggt

SEQ ID NO: 24355 - DNA, 257 bp, Glycine max
  Clone ID: 700908066H1
gcaagattttccttggttctcttctctcgatcgggtgtgtacgtaattaacataacatgtttcgataaccacacaccccttgtgtcatggcatgatgatgatgatgattagaccagtaacgtggccctgataaagttttcaaagtctaagcatcttcttccttgttctcatgcatgcctgatggaatcgacgacgcaaaagaacaaaagcaaaaagtcatcgctgttgatgcgtctcaaacccgttatgggcttcga

SEQ ID NO: 24356 - DNA, 259 bp, Glycine max
  Clone ID: 700908003H1
gtgatatcatttcatttcagagggattaattattgttttatttttaagtgtggagtgctgtgcaggtcaaggcccttttacttgttcgtccggttgttcccatcttctctctcgtaccaatcaaatcacacttttgtgttgtgttgggaaaccctaaaccccgttttcggtgagatcgagatcgatcgaacatggatgaggagtacgatgtgatcgtgttgggcacgggtctcaaggagtgcattctcagcggtcttct

SEQ ID NO: 24357 - DNA, 257 bp, Glycine max
  Clone ID: 700908006H1
catcacttctgtgtttctctcttcacctacactttcctctttcaattcagttcaattcttctttttggttcagaaactctgtacagttaatcaaaccctacctcacctcaccggttttagctgttaatttaatatatagatagaaatccaaggaagaagatgaagcagtttgccgtccaaaacgtcgtcgttccatcccacgatgagattagcgttgtttgccccaagccccgccgcctcggcctcttcaacttccc

SEQ ID NO: 24358 - DNA, 255 bp, Glycine max
  Clone ID: 700908008H1
gaaaaaaaacacacacacacaaacacaagcacagttgaaaatggctctgcttaccctctcttcgctgcaatgagtagaacgtttgtatttcttctccgaagaagaaaaatggctctcggcgacgatgcgcagaccactctccctcgttcctcgatgcccttctctgcgaagagcgagaaaccttcgaggaagactttgatgagaacggttatgagcgtgagaccgaaaacaacgaacccactgtgataaagtcgc

SEQ ID NO: 24359 - DNA, 253 bp, Glycine max
  Clone ID: 700908009H1
cttatcaagaatcttgagaatgtcatgcggaaattccttcagtccttggagcttttcgaggaaaatgagaggaaaaagttggcaatcttcacagcacttgctttttcccagaagctgtctggtctcccaccagaaactgtgttccaaccacttcttaaagatgaccttgtggccaaagggctagttctgtcatttatgactgacttctttaaggagtatctgattgacaacagtcttgatgatcttgtttcaa

SEQ ID NO: 24360 - DNA, 251 bp, Glycine max
  Clone ID: 700908010H1
cacaatctcgctcttttggtccaaaaataaatcaccatgcccagatctcgtcctgccactgatttcgctgatcttgaatgtttgaaatgaaaatttccatgaccaaagtcttctttaccttctaatttggtttggaattttcgtgggcatgaaaacaaggcctttcatttcccaaggttgatttggattggaggatgggtactaagagtctcttaatgcttaagtcccacattgattccatcaacatacga

SEQ ID NO: 24361 - DNA, 253 bp, Glycine max
  Clone ID: 700908011H1
gcaaactctatgaaggtggagttacactacctacaaagtttcttagcaagatcgcccctataccagtggtcaaggaaatttttcgaactgatggcgaacagttcctcaagtatccaccacttaacgtggttcaggtggataagtctgcatgggtgactgatgaagaatttgctagagaaacgattgctggtgttaatccagatgtcattaagattcttgaggagttcccaccacgtagcaacgtagattctcc

SEQ ID NO: 24362 - DNA, 233 bp, Glycine max; identical to SEQ ID NO: 23209
  Clone ID: 700908012H1

SEQ ID NO: 24363 - DNA, 264 bp, Glycine max
  Clone ID: 700908016H1
gaagcttttaacactcatggatgatttttgtgaaaagattgatgatcatcaatcaagtttctctctttttttgttcccacccttttgaaaagcttttgatcagcatcttagttgtcaatttgttggatctcacatttcttgattgggcatggaatttttaatctcccttttcttgggtaaggaataaaatgatgatcacttgttattatgcaaaattcatatcagattcagaggctattctggtgggttcagcaagaaatctat

SEQ ID NO: 24364 - DNA, 267 bp, Glycine max
  Clone ID: 700908017H1
gcaaagactaatcgatgattgtctcagaaagtcatatgaaattgcccttgggaatgctgaatttggttattgcctggctgtcaatgcggatactgctctttcagagttgagaagtgaattgggacatcaattagctactaaaagccagaaaatgaatttgaggggtattggtgctgttgtttataatgtaccagagcttgaaaatgatcaaaggctaaaaataagtctgaggagtgtggagaatgaagataccacgcctatctctca

SEQ ID NO: 24365 - DNA, 259 bp, Glycine max
  Clone ID: 700908018H1
gagaggtggatccagacgcgttggcaaaggcattcgtggagcactactacagcaccttcgacaccaacaggaacggcttagcgaatctctaccaggagggttccatgctcactttcgaagggcagaagatccaaggcgcttccaacatcgttgccaagctcacctccctccctttccagcagtgccaccactcaatctccaccgtcgactgccagccctccggcgtcaacgccggcatgctcgtcttcgtcagcggaaa

SEQ ID NO: 24366 - DNA, 199 bp, Glycine max
  Clone ID: 700908019H1
tttgtggttaagtacaaaacaatctcaggaatcttctccgtggaacgcatgtgtgaattattcaattgcaactactgctatgtgtattttctttttgcctaatcatataccataaacatgaagttgtgcttccttttattgagaatgctttagcatgcatgattatttatagagcgtttcatatataagtatattttaa

SEQ ID NO: 24367 - DNA, 253 bp, Glycine max
  Clone ID: 700908023H1
cacattcaaatccaaatggccctttacattacactaataattggcgtcctagtaaacaccctagtaacctatgaatagcatttgcatgcaccttagtcttcaccaaaatactcctcttggcatcttgtcctgtgtccctcttttaagctatttccttctcttaacacaattggttgtgccaattgccatagtcaccaaccaattaacaaaggtatatatatcatcatatcatcaccaaatgagaaatattggg

SEQ ID NO: 24368 - DNA, 243 bp, Glycine max
  Clone ID: 700908025H1
acacactaccctcaacatagtaaagtagctggtgcaagtgaagcagtggctcaaaccatgttgctcatgtctagtgtctctagcagttattccgtggatttgaagaaagaccttttcctccaattgcagagtcaaagtttaaggcctaagttctctcaactctcattcaacccacttccaccatcaacttcttctccttcttcaccccgtagattcacaaccctggctctcttcaaatctaag

SEQ ID NO: 24369 - DNA, 249 bp, Glycine max
  Clone ID: 700908027H1
caaaaatggagagagtagataaggtgttggtgatgttgagcatggtggtgttggtgcttgcatcaaatgctgaagggggacgattagttgaggaagagaatgtggatcagccccagaccttccttggatcaggtggaggccttggtgggatatttccaagcccaagcccaggcttcagcttcaccggcgtgggctttgagccatctgggttttgcactttccctggtggttgcaccggtactccttctt

SEQ ID NO: 24370 - DNA, 258 bp, Glycine max
  Clone ID: 700908030H1
ggaaaagcagctgccaaataaagggtaatgaacaaggaagtgaagctcccaaaattaaaccaatgcgtttcactcttgctgtctaacatgcactttcccgattgctagtgtttctgttttagtttgtcagtaattgataggtgttctactttcagggcagtgctctgaggtaatgctgttcgattttacttctcagtctactacagtgtgtatttggtaccaaacttttatgctaaaataatccaaggcgtgtgtttt

SEQ ID NO: 24371 - DNA, 261 bp, Glycine max
  Clone ID: 700908031H1
aaaatcttcaggaaatgatttatatagtttctgcttgtaagcaaagaacgatggcagaaaaatttcaatattcttgtttcctctaaatctgtttccctgggcctgcaagaaatagatattggtcaccgaggacatgaatagaaagattgcataatttgcacaagatattgattttttgggtgccacttattccctacatccaccgagaagggtcagagcggattacaattttctgccattgctgagttgaatgcacacaaa

SEQ ID NO: 24372 - DNA, 148 bp, Glycine max
  Clone ID: 700908034H1
gggtgatgcaggatggaactccatggccagggaacaacactcgcgatcatccaggagtgattcaggtatatttaggaagtgccggtgcgctagacgtggaaggcaacgccgcacccccacttgtgtatatttcacgtgaaaaacgtcc

SEQ ID NO: 24373 - DNA, 250 bp, Glycine max
  Clone ID: 700908038H1
tgagaacaagaagctgattctggcaatattggacaatcaaaatcttggagaacttgcagaatgtgcccagtaccaagctcagcttcaaaagaatttgatgtatttagctgcaattgctgatgcccagcctcaaacaccagccatgcctccacagatggcaccacaccctgccatgcaaccaggattctatatgcaacatcctcaggctgcagcagcagcaatggctcagcagcagcagcaaggaatgttc

SEQ ID NO: 24374 - DNA, 250 bp, Glycine max
  Clone ID: 700908041H1
ctggcggaaacagagaaaggcacaaaaccaagtccctcttcttacctacaaactcacaaccttttccttccgccatataaaatctactattatttctcattttcatttcaacgtaacgttgatgggtcttcgcttttcgtcttccgaggcggcggcgtcggaatcggcatcgccatcgtccagtttgggcgaattgcccgagagctgcgtcgcccagatcatgacctacatggatccgccccagatttgc

SEQ ID NO: 24375 - DNA, 260 bp, Glycine max
  Clone ID: 700908043H1
ggaattctgctcgacgcgtgctgtgccggggcttgctcagcggaaacaggctatgtggggccatcccgagctcggtttctcagatttaccgtctggcagatctggatctgtctcgtaaccagatttctgggcccattccggagtcgctgggtaaaatggcggttttatcgacactaaacttggatatgaataaactctctgggcccattccggtgagtctgtttagttccggaatcagtgacttaaacctgagccggaac

SEQ ID NO: 24376 - DNA, 251 bp, Glycine max
  Clone ID: 700908044H1
gcgttaagcaaaaaacccagtcaggattcaaagtctctttgtttaccttgtttccctcattgctttgctcacattgaatttcgaaggcgtagagtgagatccgaacgatgaagagagtattcggcgtcaagaagaacaaggatccacccccttccattcaggatgcttccgaaaggattacaaaacgaggtgacacggtggatgacaagattaagaagcttgatgccgagcttagtagatataaagagcag

SEQ ID NO: 24377 - DNA, 252 bp, Glycine max
  Clone ID: 700908046H1
cagtcatgcgatgcatcattactgttagcgacggtgagcgatgtggtgtcggagcagacatcggatagaagttttgggatgagaaacttcaagtacgtaaacactgtcaaagcagcggttgagaaagaatgccccttcacagtgtcatgcgctgacattgttgctctttctgccagaggtgccattgctttgttgggaggaccaagcattgaagatgggacagggagaaaggacagcaaagaaagctatgca

SEQ ID NO: 24378 - DNA, 260 bp, Glycine max
  Clone ID: 700908049H1
ctcgagccgctcgagccgatttagaaggaaaaccaactgcacattattatgatcccaaattagcattgactagtgcgattaaaattgggaatcatatatatgctggttccattttctacccctttgtaacacgttttgatgttgagaaatatcctgctctccccacagtttcagcaacagtgaacatcttgtaaggttaatgatgtacaagaaaatgtttagtttctggagtgtcatgatgtgaaaatgtttagtttctg

SEQ ID NO: 24379 - DNA, 245 bp, Glycine max
  Clone ID: 700908057H1
tttccatctttcttgggtgatacgatccaatggctgcgacccttttccagggattgggagttgtgaccccatcattctcttcttcccactccaacaagttcatgctttcttccctctcagagaggaaagatggcatatttgtggtcagatctgatgctgatgcaaggattctgaagactggagctcgttagcatgaattgttggttactaatgcagttgcaacaaagggagccagttctgcggcc

SEQ ID NO: 24380 - DNA, 218 bp, Glycine max
  Clone ID: 700908065H1
cttaatttctctctgccttgctcatttacacacctctccaacctatcactttcagctttatttgaatccctctctctcctttccaaatggccagcgttgaggttgcacatcaaacaccaacaacagttccagaaaatgaaacaaccgaggtaatcaagacccaggaaacaaccccggaaccagtaccagccactgaggctcctgcaacagaacaagca

SEQ ID NO: 24381 - DNA, 272 bp, Glycine max
  Clone ID: 700908001H1
gaaatcctaagattgtttagttggaagatggaggcagtggaatcaatagcggttccggaaccggacgaagacgatccttcatcgacgcttctggatctctcgagttaccagctccacgaccttgactcggtcgagttgccacccagcctcaccgagttggacctcaccgcgaatcgcttgtccacgctggacccgcgcatagggaacctctcccatctcaagaagctctccctccgccaaaacctcatcaccgacgccgccgttctccctct

SEQ ID NO: 24382 - DNA, 249 bp, Glycine max
  Clone ID: 700907939H1
cgttacttaattccttcgttcatcacttctactttctttcttttcctctcgcaagtcttagtgcttggcgattgattaccccagaaggactttgtttgttacaagaaaccaagggcaagtttcatgtctgaattcgacacaaacatcccaactgcttttgatccctttgctgatgcaaatgctgaggactcaggtgctgggacgaaagagtatgttcatgttcgtgtacaacagcgcacggaaggaaaa

SEQ ID NO: 24383 - DNA, 254 bp, Glycine max
  Clone ID: 700907940H1
ggaatgtatgattccctgaagccagtagttttggttggtgggttgcaggatagtttctttgctagtttccttttcggatggggaatcacaattggtgctggtttggcttcttaccccattgacactgttcgtagaaggatgatgatgacttctggagaggctgtgaagtacaagagctctttgcatgcattccaaacaatcgtcgcaaatgagggtgccaagtcactcttcaaaggtgctgggcaaacatattg

SEQ ID NO: 24384 - DNA, 251 bp, Glycine max
  Clone ID: 700907942H1
cttcatttccccttcagccgcagagatcaaaaccctcaccataacctccgacacccgccccatgatcctcttggagaaattcggcttcacccacaccggccacgtgtcgatctctgtctcctccgtcttcgtggtggcctcaggtgggtcccaacccgatccctcccgattagggttctttctcctgagcgaagagtccctcctgcaagtcctgatcgagatccagcaaaaccctagctctgcgtcctcga

SEQ ID NO: 24385 - DNA, 249 bp, Glycine max
  Clone ID: 700907943H1
gcaagatggaagtgcttcccacttcttccatagagcaatcaccgattacaacaccgaaacccgaaagcgccgaaaaatactagggcaagattttggtgatgtccgctggcacaagactggaagaactaaaccagttgtctttaatgggattcaaaaaggctgtaaaaagattatggttttgtatgttagcaatgtaaggggaggaagagctgagaaaactaattgggttatgcatcatatcacctagga

SEQ ID NO: 24386 - DNA, 248 bp, Glycine max
  Clone ID: 700907945H1
gcgagagagagaaagaaatggcgaccaacattgggatcatggatgcggcttacttcgtcggcagatctgagattctttcttggatcaactcaactctgcaactcaatctctccaaagtcgaagaggcttgttcaggcgccgttcattgtcagcttctcgatgccgctcatccagggatcgtgcctatgcacaaggtcaatttcgacgccaagagcgagtacgagatgattcagaacacaaggtccttc

SEQ ID NO: 24387 - DNA, 249 bp, Glycine max
  Clone ID: 700907948H1
gattgagcaggctgcctacgtcaaatccatcgacaacaatcatatgttagaaataggactcgaagggttctatggtgaaacaatgccagagaaaaaacaattcaatcctgggtaccaacttattggcactgatttcatttctaacaacctagttcaccaagttgattttgctaccatgcatctctaccctgaacaatggttgccaggctcaaacgaagctgctcagggtgcatttgttacaaatggtta

SEQ ID NO: 24388 - DNA, 259 bp, Glycine max
  Clone ID: 700907949H1
gaaaaaaaacacacacacacaaacacaagcacagttgaaaatggctctgcttaccctctcttcgctgcaatgaagaaacgtttgtttttcttctccgaagaagaaaaatggctctcggcgacgatgcgcagaccactctccctcgttcctcgatgcccttctctgcgaagagcgagaaaccttcgaggaagactttgatgagaacggttatgagcgtgagaccgaaaacaacgaaccctctgtgataagtcgcaatctt

SEQ ID NO: 24389 - DNA, 253 bp, Glycine max
  Clone ID: 700907951H1
gcgcttcttctctggtctctggcttccttggtacgggaagaactcaatcttgtccatttccctttggtttttctctcttcgatctcttcaccttccattcgaccaccctcttatcacagctcgcgttaacttaagccctctccgttgagggtttctccaggtgtggtttgattttcagtttctgatgctgaagaaataaaaaagcttgaaggctttgctcttctgtgtgaaaaatgttggaagtggtgcgaaa

SEQ ID NO: 24390 - DNA, 253 bp, Glycine max
  Clone ID: 700907953H1
cttgctgaggccattgatgatggcaagagtggaccaagggatgaccccaaggttcgttccaagatcgtgtctgaagagttcggttgggacaaggatcttgccaagagaatctggtgctttggccctgagacccttggacccaacatggtggttgatatgtgcaagggagtccagtatttgaatgaaatcaaggattctgtggttgctggattccagtgggcatcaaaagaaggtgctttggtgaagaaaacat

SEQ ID NO: 24391 - DNA, 253 bp, Glycine max
  Clone ID: 700907954H1
attctaactctgaaaggttgcaagttcaacttaaaggagctggcaagactccttacagtcgctttgccgatggccttgccgtcctccgcagcagcgtcacggagttcctttgcagtgaggcaatgcaccaccttggtataccaacaactcgtgcactttctcttgttaccaccggcaacctcgtcacccgtgacatgttttatgacggcaatccaaaggaagaacctggcgcaattgtttgcgagttgcccaa

SEQ ID NO: 24392 - DNA, 251 bp, Glycine max
  Clone ID: 700907955H1
gcaacaattagtaaatcataaaaagtgagatatatacaaagcccagatttaaaatcacaatctatagagagaagcaagcacagactatgataccatctatctcccaatttctctctctaaaaccgccgtctccttctcagactagccgctgcagcattttctctgcgactctcgctcggaccagcacttggatgtgactggtttcggcatcggttagatcgaccatggcggaggtttccggcgagggagta

SEQ ID NO: 24393 - DNA, 122 bp, Glycine max
  Clone ID: 700907960H1
caccagcgaagtacacgacttggccgttctagttcagttgttaacactcatatcctgttacaaatcacttctgctcttatcgttgtttgttcctcacttgttgctttcattcagtttcagtg

SEQ ID NO: 24394 - DNA, 246 bp, Glycine max
  Clone ID: 700907963H1
ttctttgccagcagggaatctcaatgaggaagaatgggtaactgtgtatggattttcccccggtgatactaacatggtgttaagggagtttgaaaaatgcggtgaaattttgaaacatgttcctggtcctagagatgctaactgggtgcacattttgtatcagaatcgatctgatgcccataaagctctcaacaagaatggaatgcaaattaatggagtactaattgttggtgtaaactgttggat

SEQ ID NO: 24395 - DNA, 255 bp, Glycine max
  Clone ID: 700907966H1
agaagttctaaggaagagggaatatgcagaatacaaggtgctagttgtctatttgcaataacaacatcagcgatccaaccttagtattcttcaacccagagagatttgtaataataaattacaacaacttaaacgatggcaggaggagcttatgtagattcgggaaatgcaaagcaatttgatgggaaggtcacggcattcgtattggttacatgctttgtggcagccatgggaggcttactctcggttatgatc

SEQ ID NO: 24396 - DNA, 254 bp, Glycine max
  Clone ID: 700907967H1
agcaaaggcagtgctaggaaagtattatcgtgagcctcagaaatctgggccattgccacttcatctaataaagtacttgctccacagcataagtcaggatcacttcgttagcgactctggcgacattgtgtactaccagactgattcccagctccacaaagattcttggacccagtccaactaaagtttttgatgctacatttacctatttcactcttaaatactatttcctatgtaatatgaatttagaatat

SEQ ID NO: 24397 - DNA, 95 bp, Glycine max
  Clone ID: 700907969H1
gagacattttttttttctcgtttctcttaagccatataccactttggtcatactcataatccgttgtcttcattttcactaggtccacacaacat

SEQ ID NO: 24398 - DNA, 250 bp, Glycine max
  Clone ID: 700907971H1
tgtcaccggcgcttccggttacattgcatcctgtatagtcaaaatcctcctcaatcgcggctataccgttaaggccaccgttcgcgacacaagtgatccgtataaaataaaccacttggttggcctcgacggtgctaaggagaggctgcacctctacaaggcgaatcttcttgaagaaggttcctttaactctgtcgttcaaggttgccatgctgtgtttcacactgcttctccctatttcacaatgtca

SEQ ID NO: 24399 - DNA, 245 bp, Glycine max
  Clone ID: 700907974H1
gtaacagctatcggttctatcttggggtagaacttctaaaatgtgaaggcagtgagtccattctcaagtctctttggcatcactcggatgcagttttgtgctgctctttaaaggcattacccgttttcacgtttgcaaatcaagctggacttgacatgcttgagacaactttggttgcacttcaagacatcactctggaaaagatttttgatgacaatggaaagaaaactctggcactgagttcc

SEQ ID NO: 24400 - DNA, 242 bp, Glycine max
  Clone ID: 700907976H1
aaaatgggaggtgcctgatggaacaattccggtccgaagagaaaaaggatgacatgttaagggcaagctctgttcagcattttggaaagaagaaggataggagcttccctcagccaaaacctgcaaaacctctacctgacatcatcagtcagagtggccaccagcatgccatagcgtatgtggagggagataagtattatggagccaaggcaaccataaacgtctgggaccaaaaattcaac

SEQ ID NO: 24401 - DNA, 244 bp, Glycine max
  Clone ID: 700907978H1
gccccagatcagatcctctctcttcaattcaacttcaagccaaaccaagcaacatggctcaacaacaggaggacgaaatggagtatgttgctgatgataatgaaatggcggaagtagaagatgacatgtatttccgtggtagagtgtttggtgattcagagtccgaatcagatgacgatgatgaatatgactccatggaaaatcggatgacagatacctctgctgcagaagccggaaaggaaag

SEQ ID NO: 24402 - DNA, 255 bp, Glycine max
  Clone ID: 700907979H1
gaaaaagcatatggtctcccgtcacagatccaagaagtggtttcaaccgggaatccagaactttccacagcctcaagccccccctccgtctccctccccccaacgccgccgtctccgcagccgccttcgccctcttcctccgccgcaactcgcagttacccgggactcctccaccgccctttatcgactctgtccaccggccaaccgcctctgcactacggcgatgctcctccaccgcgccaaaacccttagcct

SEQ ID NO: 24403 - DNA, 246 bp, Glycine max
  Clone ID: 700907980H1
cactcctcctcttctcacggccagggttttagggcagcttctttctttgagattaagtttcagtagtaatgggtaaggaaaaggttcacattaacatcgtggccattggccatgtcgactctgggaagtcaaccaccaccagtcaccttatctacaagctcggaggtattgacaagcgtgtcatcgagagattcgagagtgggaagctgctgagatgaataagaggtctttcaagttgcctgggtg

SEQ ID NO: 24404 - DNA, 164 bp, Glycine max
  Clone ID: 700907983H1
ggcttatggtggatacctaggcactcagagacgaggaagggcgtagtaagcgactaaatgcttcggggagttgaaaataagcgtagatccggggattcccgatataggtcaacctatcgaactgctgcccaccctggaaacggctcagccggaggtagggtcca

SEQ ID NO: 24405 - DNA, 249 bp, Glycine max
  Clone ID: 700907986H1
gtcactttacccaatcctaacactttcttctctctgttttccttcttcctcgcatcaatggatccggacggcgttctcctcggcatgtgcaaccctctcctcgacatctctgccgtcgtcgacgacgctttcttgcaaaaatacggtatcaagttgaacgatgcgattctcgccgaggataaacacaaacctatgtatgaagaattggctaacaatcctaatgtggagtacattgctgaggtgctactc

SEQ ID NO: 24406 - DNA, 243 bp, Glycine max
  Clone ID: 700907988H1
ctgatattgatcgtcgaatatcagagcatgtccttcgtatgcatcgatttcgttctgctgttgatggaggtgaggcagcacttgatgggagctcaagatatggaagagaagatgaagctgatatggactcatctgtctttgtcaaatataacagaatgttacatgggaagaaaactggaagaggtcaaaaacgtgatacgcttacaattaagtttcttaaaaaatttatccactagctaagca

SEQ ID NO: 24407 - DNA, 243 bp, Glycine max
  Clone ID: 700907995H1
ctgatattaatcgtcgaatatcagagcatgtccttcgtatgcatcgatttcgttctgctgttgatggaggttaggcagcacttgatgggagctcaagatatggaagagaagatgaagctgatatggactcatctgtctttgtcaaatataacagaatgttacatgggaagaaaactggaagaggtcaaaaacgtgatacgcttacaattaagtttcttaaaaaattcatcactatgctaagca

SEQ ID NO: 24408 - DNA, 260 bp, Glycine max
  Clone ID: 700907937H1
ggaagagcagtggcagcagcatgtggcgccagaggaggtttctgtggagcattttcctgcagagagttctccagatgttatcaatgaaggaagtgccacgtcgtcaacaccagtgactgaagatagaaaccatgccgttgcctttgcagcagcaactgccgctgccgccgaggcggcggtgcgcagctgctcaagcagctagctagagttgtaagattggcgggttatggacgccagccgaaggaagaagagctgcaata

SEQ ID NO: 24409 - DNA, 267 bp, Glycine max
  Clone ID: 700907894H1
gaactcatcacttactggaagccttgttgtgagtaagagaaaaggcttcctgcaccgagcacaccaacttgatacctctgattctttctttgcttagaattccacagaatatggagactatacttttcaatcactccccacctttggaattcaagggtttgagcaaggaggaggaagactcattgctagggcaagtggaaatatggaggtacatgacatgcttcacggactccgtggccttgaaagctgtcatagagcttcgtatag

SEQ ID NO: 24410 - DNA, 265 bp, Glycine max
  Clone ID: 700907895H1
gccaccaccaatcacaaatagccctcttggccttcaatttcgtccaattccaaatcatggctagctcttcagttttcacgtcttacattgttttgagtctagtgatggcactagcaattagcggtttcaatttcaaaggggcagaggcagcacgtgccttctttgtgtttggtgattctctcgttgacaatggcaacaacaactacttagccaccacagctagagcatacgctccaccttatggcattgattatccaactcgcag

SEQ ID NO: 24411 - DNA, 256 bp, Glycine max
  Clone ID: 700907896H1
attgtgccctccctctttctagctatttccctctcttaacacaattaacaaagatatatcatatcatatcaactccaaatgatgaaaaatattgggttgtttcttcttgtggtggtggctacttttgtggtggcagccacagctggtagcttttaccaagactttgaaataacatggggtggtgagcgtgccaaaatctatgaaaatggaaatcttctcaccctctccctagacagagctctggctctggctttcg

SEQ ID NO: 24412 - DNA, 211 bp, Glycine max
  Clone ID: 700907901H1
gagaaaaattacaacaacattattatttattgtaactaattagctaattaattggttattaaaaattataaggccatgtttggcgaaaccgttccgcgaccacagttcattcaatctgagcctataatgtcgacgacggatgcgctcaccgacgacgagttcacgatgcaaagcagtagcacggcgtcaccgatgatcccacacaacatac

SEQ ID NO: 24413 - DNA, 168 bp, Glycine max
  Clone ID: 700907902H1
atcaatgtatgataacaacctcagaatcaagttatcagtgtgtcaccctgacttttcaaaaacaattatttgttgcttcatattccactgtgatttcataatagattttcactcatcttacttgactccaagcattctatatatctagtgcctccacgcatctctacc

SEQ ID NO: 24414 - DNA, 262 bp, Glycine max
  Clone ID: 700907903H1
ggttgacttagttaatagtagtttagatgatttatatttgatatcttgcacttgttgcataccgttgtgccaaaataggaaaggaaagctatcaagtaactcccagttttgctccccagtgttttctaatagttgtgaaggaggttgtgaaattcgtcatccgggtcaggtgcaaatttaccatgctagctagatagtgagagagagagagataaaatgtttgatgtcattttgtgtacaaagtccataagctgttagagac

SEQ ID NO: 24415 - DNA, 262 bp, Glycine max
  Clone ID: 700907904H1
ggaagagaagaattaacatgaaaattcagtgtgacgtgtgtgagagagctccagcaacagtgatttgttgcgcggatgaggctgctttgtgtgccaaatgtgacgttgaagttcatgctgcaaacaagcttgcaagcaagcaccaaagacttcttcttcaatgtctatcaagcaagcttcccacatgtgacatttgccaagacaagccagcattcatattttgtgttgaagacagagcactcttctgtcagattgtgatgaa

SEQ ID NO: 24416 - DNA, 263 bp, Glycine max
  Clone ID: 700907905H1
agaataaccatgatgaaatcgactttgagtttttggggaacattagaggcaaagactggaggattcagaccaatgtttatggcaatggtagcaccaacattggcagagaggaaagatatggtctctggtttgaccctgcagatgatttccatcagtacactattgtctggacagactctcagatcatattttatgtggacaatgttcctattagagaagtgacgcgaacagaatctatgggaggagatttccttctaagccaa

SEQ ID NO: 24417 - DNA, 260 bp, Glycine max
  Clone ID: 700907907H1
acgtaacgtgctaacttcccttctctttggaaagaaatctcaaaactctacaaacaaaggcaccaataagctttcttctgttggtgttgtggaggaattatttgaagagggttctgcaatgcttacagagaggttaggcaaggattttccatctaatacgaatcctgagattttccgctgtgcggtttgccaagcagatcagccctctgtggacagtttatcaatgaacactgggccttttttcccccagtatctaagcc

SEQ ID NO: 24418 - DNA, 260 bp, Glycine max
  Clone ID: 700907908H1
gaaagggccattttctgaatgcgctctatctatctcttccgatctggctactaaccctaacccgcttcgaaccgtggcttcctcggcctcgcagaacctctctcgaagaaaatcttcttcttcgtcttcgttttctcaacaaacttccgggtcgacccggatcgtttaccgcgaacctcggatcccatcggaatccaattttccgatctggcagcagaactggttcatcgcattgctcttcctcatggtctcggattctt

SEQ ID NO: 24419 - DNA, 184 bp, Glycine max
  Clone ID: 700907909H1
caaacttgtagaagccatggagaggagtataccagtggttagggaggcttggttgattgacagtattgaaaagcaagaaccacaacctttggaagcttatgatcttgtctgcggatcgttctgtggatggcaagggtatcccctgggacaaacaagatcctggggaagaggctatcgaatcact

SEQ ID NO: 24420 - DNA, 86 bp, Glycine max
  Clone ID: 700907911H1
tgctcctcgaacccttgagagcgagaaagcacgtttctctcttgaggttaattattagtatgattgagtattgagcatggaggcgc

SEQ ID NO: 24421 - DNA, 253 bp, Glycine max
  Clone ID: 700907912H1
tcgttctttcactcaaacacacacccttgattatatcactttctcttgttctcttaccgtagaacattgcatttactcctatctctcactctggatcttcaacttcttcctgattttgctgatttgggggattgagttggaaggggaaacatggctgcttcttctgcatctctttctggtgcttctgcttcggatcttctgaggagttcaaccagcggtttcaatggtgttcctttgagaccatggggaaggg

SEQ ID NO: 24422 - DNA, 255 bp, Glycine max
  Clone ID: 700907913H1
gtgaccaacaatcaagcattgacccccgcacttttaaagtacgaggaccaaattatttaaaggccaagaagaaagaatttgcttcaaaccatgctgcatattacccatttggtgttgatgtattcttatcgccacagaaaatagaccatcatagctcggtttgtggaacttcctgtgatgagctcttcagggaaacttccacccatactagtagtgaatgttcagattcctatttaccctgccacactttttcaa

SEQ ID NO: 24423 - DNA, 254 bp, Glycine max
  Clone ID: 700907914H1
gagggtctccttcttgccagtaatagtcttcaaaaggtttggaaagaagcttcaagagactgaacaaaagcttatacagaagaacaaggacgagacgttgagaaaccgcagtgggccggctaaaatgccttacactttgctctatccttctagtgaggagggattgactttcagaggaattcccaacagtatctccatctaggggctctatggttgttgcagtactttccctggttttcaataaagtgaataga

SEQ ID NO: 24424 - DNA, 254 bp, Glycine max
  Clone ID: 700907915H1
ctttaagtttccttaaggtccatgatgcgggtcacatggttccgatggatcagccgaaggattcgttagaaatgctgaagaggtggactcagggaaccctttcagaatctgcagctgatgcggagaaattggttgcggagttgtaatcactttcgttattgcaattagtccagaaaagggatacaaaagtattatgcaataaagagaagggaattaaagtgatcagcatgtgttattaattaaaagtgagattg

SEQ ID NO: 24425 - DNA, 264 bp, Glycine max
  Clone ID: 700907917H1
tgctaattgcttcgaccgagtgattcagaggaggagaagtaatggctgcgatcgcgggaggcacgtgtttggtgttgtgagttttaagctcaagcaagctgaaatgccctttgcatgttccagcttaatccgcaagcatatcggagattctcctcagcgcaatgtggctctaagacgcagagcaaatggaacaattcttccccaaatcagagcccagaacgttcttccagactatgttccaaaatcggagtttataaagtagaa

SEQ ID NO: 24426 - DNA, 259 bp, Glycine max
  Clone ID: 700907918H1
gtatttctggggaacagttgctggacttagagatgctgctttttttgttgctacggggaacagttgctgaacaaataattacggtttgtatgtctgatgctggttcacacctaagtttgaagatgggatagcaaaaactagtggcaaacgagtgaagattggatttggttttggttctttctgattaattttggttttaacttgggaaatggtttctgaaaatgtggatagaaagctcgcagcccccattattgaagaa

SEQ ID NO: 24427 - DNA, 260 bp, Glycine max
  Clone ID: 700907921H1
ggaaaagcagctgccaaataaagggtaatgaacaaggaagtgaagctcccaaaattaaaccaatgcgtttcactcttgctgtctaacatgcactttcccgattgctagagtttctgttttagtttgtcagtaattaataggtgttctactttcagggcagtgctctgaggtaatgctgttcgattttacttctcagtctactacagtgtgtatttggtaccaaacttttatgctaaaataatccaaggcgtgtgttttgg

SEQ ID NO: 24428 - DNA, 259 bp, Glycine max
  Clone ID: 700907922H1
ctaacttttcccgagaaaattttagtttccattttcatttctccctcagattcccggaaaatatattcacaacattaatttcgcacttcgccctctgccaactaccaagctacggcttcctctgccaattcaatccgtcgtcgttttcgccaattccgaatgcgtcgatttcgggttggagaatgagttctccgacctcttcttggatctctgttcaaaccgtcacacagtctctgcgttcggatttcttgtccaattt

SEQ ID NO: 24429 - DNA, 250 bp, Glycine max
  Clone ID: 700907926H1
gaaaatgagtccaaaaataacacctatagatacggagcaagatcttatgaatttaatgggagctatttttgctgctgttttctttcttggaggctccaacacttccactgttcaacccatagttgcaattgaaagaacagtcttctaccgtgaaagagcagctggaatgtactcagctctaccttatgcaattgctcaggtggcaatagaatgtatttatgttgcaatccagacatttacttcagtctta

SEQ ID NO: 24430 - DNA, 250 bp, Glycine max
  Clone ID: 700907927H1
ggtggatttcccagtggaaaatacctctttgctggagtggttaatggaaggaacatctataccaatgaccttgctgcttctctcactacattgcagggtcttgagggcattgtaggcaaagataagcttgttgtgtccacctcctcctcccttcttcacactgctgttgatcttgttaacgagaccaagttggatgacgagatcaagtcatggctagcatttgctgcacaaaaaattgtgaagttaacgc

SEQ ID NO: 24431 - DNA, 67 bp, Glycine max
  Clone ID: 700907930H1
ataaaagggaggccaatgcattatatagtaattatacgtgggaatgttgctccagcaaaatcacccc

SEQ ID NO: 24432 - DNA, 122 bp, Glycine max
  Clone ID: 700907932H1
gcagctcaagctcgttgctggcaactctgctggcactgtcactgcttactacttgtcatcccaagggccaacacatgatgagattgatttcgagtttttgggaaacctaagtggggaccctt

SEQ ID NO: 24433 - DNA, 262 bp, Glycine max
  Clone ID: 700907933H1
ctcataacacaaagcacaaagcaaagctcatccttgagttaaaaaatggcagcagcttcttccatggctctctcatccccatccttggctggcaaggccgtgaagctgggcccatcagccccagaagtgggaagggtgagcatgaggaagaccgtcaccaagcaggtctcctcaggaagcccatggtacggcccagaccgagtcaagtactcgggcccattctctggcgagcccccgtcctacctaaccgggagttcccagg

SEQ ID NO: 24434 - DNA, 257 bp, Glycine max
  Clone ID: 700907934H1
cacagatcagaagtgttcaagtttggattttgtgcttctggaagttaaaatggcccaagaaactttcctattcacatctaaatcagtgaacgaggggcaccctgacaagctctgtgaccagatctccgatgctgtgctcgatgcatgcttggagcaggaccctgacagcaaggttgcctgtgaaacctgcattgagaccaacatggtgatggttttcggagagatcacaaccaaggccaacgtggactatgagaaga

SEQ ID NO: 24435 - DNA, 264 bp, Glycine max
  Clone ID: 700907893H1
caccaacagccaagactctgacttacctggcccaggagactaccctagaatcgagcttcgttcgggacgaggaggtgcgtcccaaggttgcctacaacgaattcagcgacgagatcccagtgatttctcttgccggaatcgacgaggtggatggacgcagaagagagatttgtgagaagatcgtggaggcttgcgagaattggggtatattccaggttgttgatcacggtgtggatcaacaactcgtggccgagatgacccgtc

SEQ ID NO: 24436 - DNA, 266 bp, Glycine max
  Clone ID: 700907834H1
cagatctatgatatattccagttgcttccatctaagattcaagtgggagttttctctgctacaatgcctcccgaggcacttgaggtcacaaggaagttcatgaacaaacctgtgaggatccttgtgaagcgtgatgagctcaccttggagggtatcaaggaatttcatgtcaatgttgagaaagaggaatggaagcttgacacactgtgtgatctttatgagacattggcaattactcagagtgtcatttttgtgaacaccagaag

SEQ ID NO: 24437 - DNA, 246 bp, Glycine max
  Clone ID: 700907843H1
tgcggttattatcagcactgggataaacccaaaggctaagtcttactatctctttgatggctatgcccacttgtcctctggcctcgcctgtggcctcgctggcctctctgctggaatggccattgggattgttggtgatgctggtgtcagggctaatgcccagcagccgaagctgtttgttggtatgattcttatcttgattttcgctgaagctcttgctctgtatggcctcattgtgggtatcat

SEQ ID NO: 24438 - DNA, 258 bp, Glycine max
  Clone ID: 700907845H1
cacctattgaagctccagccttgtctttagatgagcttaaggagaagactgacaactttggttcaaaggcattaataggtgaaggatcgtatggtcgggtgtattctgcaaccttaaacaatgggaaagcagtggctgtgaaaaagcttgatgtttcatctgaacccgaatcaaataatgagtttttgacccaggtttccatggtctcaagattgaaggatgacaattttgttgagttgcatggttactgtgttgaag

SEQ ID NO: 24439 - DNA, 260 bp, Glycine max
  Clone ID: 700907846H1
ctgagatcaacatgttgcggaggcttctctcttctcacctcaaaaccctagccgccaccgctttttcttccactccccgatctgcttccgccgccgccagattcgccgctctctctcgctcctcccgctacttctcaacccagtccgaggatgctactgccatcaaaaagaaggttatggatgtaatgccaatcgctactggtcacgagcgcgaggagcttcaggctgagctcgagggaaggaatattcttgaaatagac

SEQ ID NO: 24440 - DNA, 259 bp, Glycine max
  Clone ID: 700907847H1
ctcaaggagatggctctgggaagaggcagtgcagtggttctactactttgcttcttgctgcttcactctcagatggctcgtgctgccacctacacagttggagattctgggggttggacctttaacactgttgcctggcccaaaggaaagctctttcgggctggtgacacacttgctttcaattatagccctgggactcacaatgtggtggccgtgaacaaggctggatatgatcgctgcaagactccaagaggagcca

SEQ ID NO: 24441 - DNA, 260 bp, Glycine max
  Clone ID: 700907848H1
gattggcaaggctatgggctggcaaatgtcactgcaagatatcagctgagggtcctcgtgcaagttatagggtcttggtttgtgataagcgccttcgttaatgcaaactcgctcacttgttttatatctcttcaatggggaaatcaacagaataaggtcacactcattttagcagagaagcctacgatgacgatgcaagtgtaaatatcacactttcttgtatttgtctgctggctcttgacatcagatcgccagagcag

SEQ ID NO: 24442 - DNA, 116 bp, Glycine max
  Clone ID: 700907850H1
tcggcacgcgcattaccagagtggttctagtaattcagtgctgctagaagatggaaactagtgaatggcatatcgagcgaagatctagcttcggctctgaatcccccttagcaaga

SEQ ID NO: 24443 - DNA, 260 bp, Glycine max
  Clone ID: 700907851H1
gagtgatcggtgttcacttgatctcatcataatcgtcagcgtcaattgtagaagctgccgatcagaaacatcgccgtcggactgcctgaagaggcgtctctccccgtcacgttgacggcggctttggctgagttcatctcaaccttcatcttcgtgttcgccggctcaggctccggcatcgcctacaacaagctcagcgacaacggcgctgccagccctgccggcctcatctccgcctccatcggccatgcattcgccct

SEQ ID NO: 24444 - DNA, 253 bp, Glycine max
  Clone ID: 700907853H1
gatgcagcctatgatggcagcctactaccccaacaacgtcactactgatcacattcagcagtatctggatgacaacaagtccttaattctgaagattgttgaaagccagaattcaggcaagcttagcgagtgtgccgagaaccaagcaaggcttcagagaaatctcatgtacttagctgcaatagctgattctcaaccccaaccacccaccatgcctggtcagtaccctccgagtgggatgatgcagcaggga

SEQ ID NO: 24445 - DNA, 252 bp, Glycine max
  Clone ID: 700907855H1
gcggatgttatccaattggggggttaaatcatttgaaggcgagggaaagatagttggtccaaaggaagttgaggtgacacaattggatggcactaaattgtcctacacagcaaagcacgtattgattgcaactggcagcagggctcaacgtccaaatattccaggacaggtgttgggtataacatcagacgaggcactaagtttagagcgtcttccaaaacatgctgtggttcttggaggaggttatattgc

SEQ ID NO: 24446 - DNA, 250 bp, Glycine max
  Clone ID: 700907856H1
tttttatgtcattaaagggagcaatggaaatcttaagacttccttttgtgctgatcaatcaaggtcttctcaggcaaatgatgtccgcaagcaaatcgttggcagcgctgttccagttcttaaaggcgaaaagttttccttgcggatactggtggaccattctattgttgaaagctttgctcaaggtggaaggacggttgtgacatctcgggtttatccaacaaaggcaatctatggagctgctaggttg

SEQ ID NO: 24447 - DNA, 248 bp, Glycine max
  Clone ID: 700907857H1
gagagagagaaagggaaagaaacctaatacaataccctttttctcagaaatcacactctcacacccacttcccccaattcccattctctctgaattacgagggttttcgagatcgaagagtctctgatcgatttcgattcggaaaaatagcgtcttcgagcgcaaccggtgctggatccaccgatcccacagctgccagaagaaataccaagcgacccaagtattcaaagtttactcagcaagaactt

SEQ ID NO: 24448 - DNA, 262 bp, Glycine max
  Clone ID: 700907860H1
aaaagatcccaacagtgagaagccgagcgattttgtttaccttccaagagatgaagcatttggtcacttgaagtcatcagattttctcgcttttggaatcaaatctgcatcccaagatgtcttgcctgtcttgactgatgcattcgatggaaatattttgagccttgagtttgataattttgctgaagtgcgcaaactctatgaaggtggagttacactacctacaaactttcttagcaagatcgcccctataccagtgatc

SEQ ID NO: 24449 - DNA, 91 bp, Glycine max
  Clone ID: 700907862H1
ctcgtaactcgtaacggcttcataccggacctttgcttttctgtgtgtctctcaacttcaaagtgagaatctttcgttcactcactgggcc

SEQ ID NO: 24450 - DNA, 266 bp, Glycine max
  Clone ID: 700907864H1
gctcgaaattgtgccctccctctttctagctatttccctctcttaacacaattaacaaagatatatcatatcatatcaactccaaatgatgataaatattgggttgtttcttcttgtggtggtggctacttttgtggtggcagccacagctggtagcttttaccaagactttgaaataacatggggtggttagcgtgccaaaatctatgaaaatggaaatcttctcaccctctccctagacagagactctggctctggctttcgtt

SEQ ID NO: 24451 - DNA, 102 bp, Glycine max
  Clone ID: 700907866H1
caaggagggtttatttgggattgggttgatcaagccatggtgaaagtttatgaagatggtaccaagcattgggcatatggaggtgaatttggggatgttccc

SEQ ID NO: 24452 - DNA, 258 bp, Glycine max
  Clone ID: 700907867H1
gatcaacaaggtttactactcttgcttggtgaaggctatgcctaaatcgaatattccttcagagcctgagcggaatctggaccagatcatatataaaataaagcttcctggaccagcgattttgggtgagggtaagcccgaaaatcagaatcatgccataattttcacacgtggagagggcttgcaaacaatagatatgaaccaggataactacatggaagaagctttgaaaatgagaaatttgttgcaagaatttct

SEQ ID NO: 24453 - DNA, 255 bp, Glycine max
  Clone ID: 700907868H1
gttttcaacaatagaaggacatatgaaaatggcctatttccataatacctgctttctggtttttatgcttatcgcatcactgttggtccccggcaaaatacggtgactacggtcccgaagaagaaaaacttctatcaaaaactataggcattcaaggcattgtctattgcaaatctgcctctaaactcaccccacttgaaggggccttgacaaggatagcatgcgaggctgttgatgaatatgggtttgaaacga

SEQ ID NO: 24454 - DNA, 245 bp, Glycine max
  Clone ID: 700907870H1
atcttgtacaagctaggatcaatccagaagatgcgtatgctggtacttacactcattgtgaaatccacccatcactgattttcggtgtatgtgcttccatcataccatttccttatcacaatcagtccccacgtaatacttaataatccgcaatgggaaagcaagcaatgggaatatatgttaccaactaccagtttcgaatggataccttggcctatgttttatattatccacaaaagccactg

SEQ ID NO: 24455 - DNA, 248 bp, Glycine max
  Clone ID: 700907872H1
atcatcaattataagcatgggtttgtggaacacaacgaatgcagtgtcttgccgctttcacaagttttgtgatgacctaaagaatctggtcttccaaggtgatgccacgtcttcttccaggggcatagaactcacaaagttagacggtggaggaaaaccagtgggtggcagtgtggggagagtgttatactcttctccagtgcacctttgggaaagctctacagtggtcgcaagctttgaaaccgact

SEQ ID NO: 24456 - DNA, 265 bp, Glycine max
  Clone ID: 700907880H1
tgcttagaagtttctttttcttttttgggaaagtggtcaccctgaagctgtttacccttgcaccctaaggtcacaataacgagctcccaattgttgacacaaatagtggtgctacaacagcgagacatatatctgtcacatactaatctcactttataaatgtgtcactgtgctttccatgtatgccaactacggagggacaatacaataagtttgtactgcagtcattaactagcttgctgcttcaatttgttatattgtgtag

SEQ ID NO: 24457 - DNA, 97 bp, Glycine max
  Clone ID: 700907882H1
tctgcttctgcttgtgtgtgattcagaattggcaagatcagatctggtctcagagatggagaagtcgtgcactctggtggtccacttcgacaagggc

SEQ ID NO: 24458 - DNA, 162 bp, Glycine max
  Clone ID: 700907883H1
aacttgatttgtaatattggagtagggaattaagtatatataaatgcggacaaaggtaataaaatcattgaatgtagctattagatcataactacatatatgtatatataccttgtatgtgtgaaatgacaaattattatttaattataagtttttttttgt

SEQ ID NO: 24459 - DNA, 254 bp, Glycine max
  Clone ID: 700907889H1
ttcgaattcggctgcgccctaacagaattcatttcaattccaactcctctgctcaaaatcctaggctcgttcttgaatccctaattcgatctcctcctcctcctccgaagaataacaggaggatcgatgtgggcagcacttgcctggcgtcgtgctgcgcggcctgcgcatgcgacgcctgcaggaacgtcgtttcgggaatcagccgtcgttccgaccggatcgcctactgcggcctcttcgccttctccctt

SEQ ID NO: 24460 - DNA, 252 bp, Glycine max
  Clone ID: 700907890H1
ctttccaacagcatttgcaacattcagacataaataacataactttcctgcgaaggaagttttatgtcattacattatcacaactcttttgtttctctggcatgcaactaaaaaactctgctgctgtagctctggcttgcaactaaaaaactagactgctgtagcaaagcctcagttctatggcttcctagttgcccatttgagaaaaaaaaaaccacaaagatcttgaatttggctgattctggaaatggg

SEQ ID NO: 24461 - DNA, 96 bp, Glycine max
  Clone ID: 700907891H1
cacgaaatcgcgaacagaacagcaacgttaacaatgggttctcgctacgaggtggaactgaagctctcatcggcacgcgctctcaagaacgtgaac

SEQ ID NO: 24462 - DNA, 262 bp, Glycine max
  unsure (1)..(262): unsure at all n locations
  Clone ID: 700907892H1
caaagatcccaacagtgagaagtcgagcgattttgtttaccttccaagagatgaagcatttggtcacttgaagtcatcagattttctcgcttttggaatcaaatctggacnccaagatgtcttgcctgtcttgactgatgcattcgatggaaatattttgagccttgagtttgataattttgctgaagtgcgcgaactctatgaaggtggagttacactacctacgaactttcttagcaagatcgcccctataccagtgatc

SEQ ID NO: 24463 - DNA, 248 bp, Glycine max
  Clone ID: 700907833H1
ctcgatcaatggctggcagctacgacaacgaagctgttgctatatttgctttgatattcaccttctacctctatattaagacgctcaatacagggtccctcttttatgccactttgaattccatagcatacttttacatggtttgctcatggggagggtacacttttatcattaatcttattccaatgcatgttctcttgtgcatagtaactggtcgctattcttctcgactgtacattgcatatgca

SEQ ID NO: 24464 - DNA, 239 bp, Glycine max
  Clone ID: 700907770H1
gtacccttcatccattcacatcaaattttgcaactttgtttccaattgcgtgcacccatgtcctcttctctttccttatcgctctctgctccctccatccacgattcttccttcctccatggaacaaagctctttcccttttctcgaagagtggcaccacgccgcttcaattctttctctgccaagtgctccctcgaccacatccccaaacagttccgaaaggaaaatctcaaagatgg

SEQ ID NO: 24465 - DNA, 235 bp, Glycine max
  Clone ID: 700907771H1
cttcaacttaagagatcaatatggccaccaccactacccagcctccctctaatatctgttttttccttctgttgttgcttctagcacactttcatttgggcataagccaacttgagctgaattactactctaaaagctgcccaaaagctgaagagatcatcaaggaacaagtcacacaactatataacaagcatggaaacactgccgtttcgtgggtcagaaatctcttccacga

SEQ ID NO: 24466 - DNA, 239 bp, Glycine max
  Clone ID: 700907772H1
aagaaattgcgaagtctaaagccaaagaagagaagaagaaagtagaggctgagattgagctgctcttggtagtagagaagcttcaagagttacgctccataagaatacaaaagttgaaaaaacaaggccattttctcccagaggaggatgacaagtttcttgagaaagttcaagctgctgtggaagaagaggagcgtgaagctttggctgcagttgaaacagatgctgctaaagatgca

SEQ ID NO: 24467 - DNA, 234 bp, Glycine max
  Clone ID: 700907774H1
ctctccttctcgctctttcagctttgacttttgttggaaactaaggcctaatcaaaatggtgaagttcacagctgaagagctacgtcgtattatggactataagcataatatccgtaatatgtctgtcattgctcatgttgatcacggaaaatcaaccctcactgattctcttgtggctgctgctggtattattgctcaagaagttgccggtgatgtccgtatgactgataccc

SEQ ID NO: 24468 - DNA, 237 bp, Glycine max
  Clone ID: 700907775H1
gatgcagcctatgatggcagcctactaccccaacaacgtcactactgatcacattcagcagtatctggatgagaacaagtccttaattctgaagattgttgaaagccagaattcaggcaagcttagcgagttcgccgagaaccaagcaaggcttcagagaaatctcatgtacttagctgcaatagctgattctcaaccccaaccacccaccatgcctggtcagtaccctccgagtgg

SEQ ID NO: 24469 - DNA, 235 bp, Glycine max
  Clone ID: 700907776H1
aatggtgcgtccgttagtgggtacgtcaacggcgccactaacggtagcttggtcaagtacggttacgaagacggaaacgacgttgctgctgcggaggtggtggaagttgaagcctctaacaagctgagcgaggatgggaggaagaagaggttggaggagattgggaaagaagacgcgtggttcaaacaaaccgggaacgaacaagtggcagttgcacctgggggtcgttggaaca

SEQ ID NO: 24470 - DNA, 238 bp, Glycine max
  Clone ID: 700907777H1
ctcgagccgattcggctcgagcggtcacgagcttcaaagaagaatactgaagccagatgattactctgtcaatcctacttcacttgatcaaatgaattctgcaagcagaagttctgccttgatagatgaatattctgatgatgaagaagattttcaaatagcggaacctgaagaagaggcataccaaattggtcttgagaatgatgtgagaaaaacagccttggaagaagaaccggca

SEQ ID NO: 24471 - DNA, 240 bp, Glycine max
  Clone ID: 700907779H1
ctcagttgtgcatgcatcctcgttacatgcatggtgctgctactagctctgaattaaaggtctatgcatatgctgcggctcaagtgaagaaagccatagatgtgacacattatttggggggagaaaattatgttttctggggtggtcgtgaaggttatcaatctcttttgaacacagatatggagcgagagcttaatcatttggctaggttttttgaagctgctgttgcatacaaaaaga

SEQ ID NO: 24472 - DNA, 236 bp, Glycine max
  Clone ID: 700907782H1
gtttttgttgctgaggtggtgaggaagaagatataaaagttagggtttcttgtgattgagatctgagtagagtagtagaagaagaagaagaagaaagggcagattgatgggagaagaagaagaatcagctctcctcctctcccgcagcaagcgttcttcttccacattcacttataagtatcacctcttgatcgcttccatgttcctcctcgccgtctacttctcctcctcagcaa

SEQ ID NO: 24473 - DNA, 239 bp, Glycine max
  Clone ID: 700907783H1
gccctccctaaccccgacgccgatgaacccaccaacgacttcgctttagcgtctcatcctcaggaaaatttaagccattctgagactgagagttccgaagatgatcaagatgctccaccacaaatggacatctcgtggtcaacgatcacagccccagctggaagtggatccggtggtggcaccagggctggacttttcagaacacccatttctggtggcgtgcagagtgccacctcagc

SEQ ID NO: 24474 - DNA, 235 bp, Glycine max
  Clone ID: 700907784H1
ctcgagccgaatcggctcgagtgaattttcagatttgtgttattggcaagcaaattcatggctcgtgtacactatgttgcaagtgttctacttatttccatgccatgtgtgctataagggctggttatcgaatggagttgcattgtttggagaaaaatggcaagcagacaacaaaaatggtctcttattgtgcttaccacagggctcccaatccagatacagttttgattatgca

SEQ ID NO: 24475 - DNA, 125 bp, Glycine max
  Clone ID: 700907785H1
cgaaagagcaaattacactgatgtaatttgttcaaaattacttctttcctttttaactttacagtaatccccttttacaagaatacactgaggaatgcgaattttgaagaaaaaaaaaaaaacaa

SEQ ID NO: 24476 - DNA, 235 bp, Glycine max
  Clone ID: 700907787H1
ctgactctcacgcgcatcttcttcgtagcatttccccacactttaccctccacggagaggctcgccggacggcgctcggcgctcgtcgccgccgatcgattcggcaacgtagcattttcatggtaacgtcggaaactgaaaacagcgcgttttgagatttggctttttgcgtgcgtcgacgaaagagagagagagacacaaaaatgactaggattgggaacggaggaggaggagg

SEQ ID NO: 24477 - DNA, 202 bp, Glycine max
  Clone ID: 700907788H1
agctcctcgaaaatgctggcacgcctcgccgcgagtcgcttcaacgagatccgtcagattttccgtcagccttctagggctttctcaaccgctctgaactaccaccttgacacaccgcacaacaaccctaaccttccatgggaattcaccgaggccaatcaagcaaaggttaaggagattttgtctcactatccatacaact

SEQ ID NO: 24478 - DNA, 234 bp, Glycine max
  Clone ID: 700907789H1
atatagctctgtcagtgctcaaagcacagctaagattgaggaactgcttctagaagatcaaaatgttaagcgcagaagagatcgaatccagaaacaatcctcccttctctcaaaattgacacgccaattgagtattcatgacaaccgagcagctgctgcctctggctggtcaaatggtagtgcagagagtagcccaagaagcagcagcggacctggtgatgactggagatctgc

SEQ ID NO: 24479 - DNA, 110 bp, Glycine max
  Clone ID: 700907790H1
gatagactcttaaaaccgggtggctactttgtttggacatcaccactcacaaatgctcgtaacaaagagaagcagaaaaggtgggcgtttatacaggattttacagtaac

SEQ ID NO: 24480 - DNA, 236 bp, Glycine max
  Clone ID: 700907792H1
ctacagttacacttgtgtgctctaaaacgaactctctgaacttcaccaacgtgattcgcatggcgatttccaattcaatggactttcttcaactcttcattgctgtcttcatcgcgttctcaatcgcattcagagctcaccgaaaaaaatccctcagcacttctggcgcaatcgctgggttcttcgttatggcccttcacatttttgtgggttacaggtttggggcgatgctgctt

SEQ ID NO: 24481 - DNA, 238 bp, Glycine max
  Clone ID: 700907795H1
ctcttggcatcttgtgttgtgtccctcttttaagctatttccttctcttaacacaattggttgtgtcaattgccatagtcaccaaccaattaacaaaggtatatatatcatcatatcatcaccaaatgaaaaatattgggttgttttttcttgtggtggtggctacttttgtggtggcagccacagctggtagcttttaccaagactttgaaataacgtggggttgtgagcgtgccaa

SEQ ID NO: 24482 - DNA, 267 bp, Glycine max
  Clone ID: 700907801H1
ctcgatcagtggctggcagctacgacaacgaagctgttgctatatttgctttgatattcactttctacctctatattaagacgctcaatacagggtccctcttttatgccactttgaattccatagcatacttttacatggtttgctcatggggagggtacacttttatcattaatcttattccaatgcatgttctcttgtgcatagtaactggtcgctattcttctcgactgtacattgcatatgcacctcttgttgtattgggaa

SEQ ID NO: 24483 - DNA, 254 bp, Glycine max
  Clone ID: 700907803H1
aaccaagcttctctgttaaaaaaaaattaggcgtctaaagggccaaagcttagaaagttgaagctttttttgttgaggtgaaagtgaaatggttggcaaggataatctgagggctgaggacttgaacttgtgctttaagaagcttatgatggtggccgggagtgggaacagtgagaaaggggtgaacttgaaggttggggtgatcaccgagtggaaggatattcctgtggagcttctgatgcaaattctgtccc

SEQ ID NO: 24484 - DNA, 247 bp, Glycine max
  Clone ID: 700907808H1
aaatggcaagaatatcaaattggtctcttgtcttcctcctcatctctacactactccacatagagcccagcctctcaagcccaagcccaagcccaagcccaagcccgttcataaaatcctcctgcagcagcacccagtacccagccctctgcgtctcatccctctccgtctacgccttcagcatccaacaggaccctcaccaactcgttcagacagcactctccctctccctgaaccgcacccaagc

SEQ ID NO: 24485 - DNA, 252 bp, Glycine max
  Clone ID: 700907810H1
caacaaactgcattgcagcagcctactcaacttactcaactccaggatcagcaaagacagcttttagataaaacacataacttgtctagagcactaacacctggtcaagtactggaaattcctcatattattcagaattcactgcccgaggctaattctatctcaaatcagatgacaaaggccaattgccagagcaatattcaattctctcagcagcccaagcttcagcagcagcaacaacctggcatggtt

SEQ ID NO: 24486 - DNA, 262 bp, Glycine max
  Clone ID: 700907815H1
ctgcccctctttttggacccaaggtcggcttcggccggtcgatccgggcggaagacattgtcaggtggggactttggctggggcggcacatctgttacaagataacgcaggtgtgctaagatgagctcaacgagaacagaaatctcgtgtggaataaaacggtaaaagctcgtttgattctgatttccagtacgaatacgaaccgtgatagcgtggcctatcgatcctttagtccttcggaatttgaagctagaggtgtcag

SEQ ID NO: 24487 - DNA, 94 bp, Glycine max
  Clone ID: 700907818H1
gttgctttctaaccttaccgggcagcataaacataaactccttatcctctctctctctctgtctctctgcgtctttctctcactcacaccacac

SEQ ID NO: 24488 - DNA, 252 bp, Glycine max
  Clone ID: 700907819H1
ggaaaccactgttcttgtgaggaacattcaattcccaaatggcatttccttgagcaaggatggttccttctttgtctattgtgaaggggttgttggcaggttacgtaaatactggctgaaaggagaaaaagctggaacttcagagattttagccatcctacctggatatcctgacaatctgagactctatgtatatagtgatatttcggcatctcttcattctagaaggtatatgtatgcatactacaatgg

SEQ ID NO: 24489 - DNA, 248 bp, Glycine max
  Clone ID: 700907825H1
cacgaaacctctgcaagaaacggcgacgtttcgtgcatctccgtcctcgatcaagattccgagtctccgcaggacgagattgccgtttatctcaaagacccactaaccagccggaacgagtgctaccagttggactctttctttgggcatgaagataacaatgtgggtcagatattccaccgagaagtaagcctcttgattccgggaatgttcagcggatgcaatgccacagtgtttgcttatggggc

SEQ ID NO: 24490 - DNA, 246 bp, Glycine max
  Clone ID: 700907828H1
gaaaaaaggaagaggcacagagagcagtgaaagagagaaaggaagaaaagagggagggagagaggttcgggggccatgtaattggaaaaatggaagcaacattgaagttggagtcccttgcgtgcatagactccaccactctctctcactcagagctcctcgctctttctctctcctctctatgctccacccatgatcgcctcactcccaatatcgaacccgctctctacaaccagagcaccggct

SEQ ID NO: 24491 - DNA, 84 bp, Glycine max
  Clone ID: 700907760H1
ggccgcccttttttttttttttttacaacttagcaactcacaatttcttttattccaaacaaaccaggaggatacaataacaat

SEQ ID NO: 24492 - DNA, 246 bp, Glycine max
  Clone ID: 700907712H1
caaaaacatctgaagcactagccttgctgcaggaggaggcatctgaattacggaaactagccaatactcagaaaattgaaaataatgaactaaagactaagtgggaagatgagaaggcacaactagaaaagtctaggaatgatgctgagaagaaatacaatgaaatcaatgaacagaataaaatactacatagccaacttgaggcttttcatattcaatgggccgagaaggagcgtaatgctgctg

SEQ ID NO: 24493 - DNA, 248 bp, Glycine max
  Clone ID: 700907713H1
caatatattccattctctctgtgtatttccctacctctcccttcaagatgcagatgctcgtcaagaccctcaccggcaagaccatcacccttgaggtggaaagctctgacaccatcgacaacgtcaaggccaagatccaggacaaggaaggaatccccccggaccagcaacgtctcattttcgccggaaagcaacttgaggacggccgtacccttgctgactacaacattcagaaggagagtactctt

SEQ ID NO: 24494 - DNA, 248 bp, Glycine max
  Clone ID: 700907714H1
ccagaacttaagtctgtagccatggcaatagtaatcaaagtggcggctctctctggttcccttagaaaagcttcataccactcaggccttatccgagctgcaattgaactgagcaaaggggaaattgaaggaattgaaattgagttcattgaaatttcggagcttcccatgttgaacactgatcttgagatcaatgggacctacccaccaatagttgaagcttttcgtcaaaagattcttcaagctga

SEQ ID NO: 24495 - DNA, 251 bp, Glycine max
  Clone ID: 700907715H1
acgaaacaaccctaaacccctccttctagaactttcatgtccatcttgccctcacaaacccaagcgccatcttcgtcttcttcctctgcgccatctcccaaccctaatccccaacatggaaccggaaaccctattcctcaacccttctcttctctttccccctcaccaatcaacctcgctttcggatctctccagatctccgataccccaggttcgtcgtcttcagccgctcaagattctggtggatcttc

SEQ ID NO: 24496 - DNA, 248 bp, Glycine max
  Clone ID: 700907717H1
ggagcatctcgccttacagagaaataaacacgggcatgcaggagacagagacacatacatacatactccattgtcgttgaagaagatgggacgagccaggcttctggtttcagacttcgttctgtctttcatgtgggtatggtccggtgttcttcttcggatcctcgtcttcaaacacctcggcttcgctcatggacccctcggtgaggttatcaaaaccaccttctccgtcgccaacatgttcttct

SEQ ID NO: 24497 - DNA, 248 bp, Glycine max
  Clone ID: 700907718H1
caaattgttattttgatagggtttacagcaaatgcagcatagcctgcctcgtcacaaaatactacacaacgcagctctgtggttgatcgacgcattcttcacttcaatcccacaatgtctataacgcacagcctcaccacttcactctcttcttcttcctctgctttcttagctccctcttccttcaattccagaggacaggtttcgttgcctgtgaagagcgtgagcatttgcaaatgcgttgccac

SEQ ID NO: 24498 - DNA, 236 bp, Glycine max
  Clone ID: 700907719H1
cacaacttcatcaagtctaacaatcaacaatcacgccacagatctacgcgcactacatcatgacacaatagatctgtgttagtcctttggttttatcaaaccacacttgcaccaatcaaaaccacaaaacacaactcgtcacatcacatcacatcacatctattttcattacttcatcatttccactgcaattttcacaccacacacacacggcaatcatggaagttgatagtagg

SEQ ID NO: 24499 - DNA, 117 bp, Glycine max
  Clone ID: 700907720H1
ctttcattggtgtggcctagctgttatctcaatgagaaagccgtcatctcggcaattgcggactttgcgcattggggttcccttgtagcttgtaataaccttctgttatgctacttc

SEQ ID NO: 24500 - DNA, 158 bp, Glycine max
  Clone ID: 700907721H1
ggctctctcacgcagtcgcagtgagtgataaggaaaaccctaattgcggtattctcagtgccttcgagagaaaatggcagataatcttgttctccgtggcaccatgcgcgcccacaccgacgttgtgacggcgattgccaggcccatcgacaactccg

SEQ ID NO: 24501 - DNA, 241 bp, Glycine max
  Clone ID: 700907723H1
cccaaagttcatattaagagagacagagagagagagatcgaagggaaaaaagcatcagagatcatgaaacccaacttttcctttgtatctaagcttttgatactgcaatatctatcagttttatgcatttctcaggagtttgatttcttctactttgttcagcagtggccaggagcatactgtgacacaaagcagagctgctgctatcctaagactgggaaacctgctgctgatttcagca

SEQ ID NO: 24502 - DNA, 246 bp, Glycine max
  Clone ID: 700907724H1
cttcctctaccgctttcttcctcctcattaaggcgctactctctctctctctttctttttctttgttaggtctggtgacacttagttagacagaacgtgcgcaccgggtggggagaagatttagtgttatggccatggcggcagtctgagaagagtactgtgcttcttacgggagccggtggtcgcacaggagaaatagtttacaaaacattagcagcgagggcaaaccaatatgtggctagaggt

SEQ ID NO: 24503 - DNA, 243 bp, Glycine max
  Clone ID: 700907725H1
ttgcaatggctaacaacgtcgttgttgttcttaaggtagctcctgtttctctgcctccatttcccatcacaaacaatattacacaatttcaagagctaaagacacacacttcatctgaattgctaccaaaccaaaaacagattaacctcattcccttcttcctcgtcaatcctcagatacaaagctatttgctctgtgttggcgtgtctccctcctgaatcctcaacctcatcttccactgct

SEQ ID NO: 24504 - DNA, 244 bp, Glycine max
  Clone ID: 700907726H1
ggatgagaaaaagatggaactggaacatgtgaccagcttgtcaagaagagatcatgaaagaccaaatcccttttttcgagtgagagcagttagcttgggtggttggttggttactgaaggttggatcaaaccttctctcttcgatggcattccaaacaaagacttattcgatggaactagtcttcggttcaagtctgtgtcaacagggaaatatctatgtgccaagtctggagggggaaatgtc

SEQ ID NO: 24505 - DNA, 245 bp, Glycine max
  Clone ID: 700907727H1
gtatgttatgagatgtatttttggtgatccacggaaagcaccacctcctcttgagaaactcagtcccgaagcaactgtttcctttctctggaaaggagagggttcatttgttgaggagcttcttcagtgcataactcctcatgttgaagaaggcatcttgaatgatctcaagtttaaaattcatgctcatgatccttcaaattctggagatattcaaaaagagcttcgaaagtctctgttatggt

SEQ ID NO: 24506 - DNA, 243 bp, Glycine max
  Clone ID: 700907728H1
atcccctatgatcagatatgaactcagtagagtgtcagcaatcttatttgttgcaatgggtacaagaaaactgcaatgccctttggaagctagatcagggcttctccaagcatggtttggacctatgctgttggactttggttggctgcagagatgcagaaaagggcttgatatgaggaccttggaagaggctatggggcagacacttcttactctacctttaaagcagcagtatgtgctgtt

SEQ ID NO: 24507 - DNA, 245 bp, Glycine max
  Clone ID: 700907729H1
gagaatcttgagaggttcaaagagtcagaactcattcactgcagatgggccatgcttgctgttccagggattttggttccagaggcattgggcttcggcaactgggtaaaggctcaggaatgggcagcagttcctgggggccaagcaacctacctaggcaatccagttccatggggcaccctacccaccattctggccattgaattccttgctatttcctttgtggagcaccaaaggagcatgga

SEQ ID NO: 24508 - DNA, 91 bp, Glycine max
  Clone ID: 700907730H1
aaaaaacttgtcttttaagttttaactctaagccatggctcttcccctgttcctcctctgcttcatgctctgcatttcacccacacaacat

SEQ ID NO: 24509 - DNA, 242 bp, Glycine max
  Clone ID: 700907731H1
cctgaacctgtctgcatccattcccatttcttcttccgtatgcatgttcccaccgtctaaaaaacctagcaaagcaacaaaacggcgtcatgcttgggaagtagcatgcaatggtaaccctagaaataggagggacattctgatcggccttggaggactctatggtgctacaacaagtctcacaagtaacaacactggttctgcctttggtgcttcattgtcgcctccagatccaactaact

SEQ ID NO: 24510 - DNA, 114 bp, Glycine max
  Clone ID: 700907732H1
ccctggcttttctgagctgacaagcacttccctaaaagagagatggtcatttgacagtgagtcgtttggttttaattgtgaaaggccggttagatccagtagtcggttttcaaa

SEQ ID NO: 24511 - DNA, 247 bp, Glycine max
  Clone ID: 700907733H1
caaaagttggtcgtatcataatccaaaagacaagcatgtttggactagctccttctaggcttcaagttctatacagcttgcgtgactatagaactgaaggggcatcagaaccagagtggaaagaagtaaccgtcagatcaagtactgagatagtctttcagcctgaaaatgcttcaaaagttcgaaagtttaagctctcttcagtgagctctatgcttcttagcgcttgaagttgcccaaactaagg

SEQ ID NO: 24512 - DNA, 245 bp, Glycine max
  Clone ID: 700907734H1
gaagttcaaaaacagtgtaacaaaaagaaaaagaaaaaaaatatgaagttcgctataatcacaatattgttctctttatttcttcttgattttggttttgcacaacagggggatcttgacatatcaagatttggagtaccaccaaatacaaatataggccaggctttcttaagtgcctggactcaagcatgtgcatcaccaactgctgtcaaaattgtgattccagctggcacataccaaatggg

SEQ ID NO: 24513 - DNA, 232 bp, Glycine max
  Clone ID: 700907735H1
ctcgagccggatttttgtttctctgtattccccgtttgatccctgctcaggttctggattctcagtgtttgcgaacgctgcatcatcctttggggaagaatggatcatcaagggcatagccagaacccatctatgggggtggttcgtagtggagctcaattagcatatggttctaacccatatctgccaggccaaataactgggccaccggggtctgttgtgacatcagttg

SEQ ID NO: 24514 - DNA, 160 bp, Glycine max
  Clone ID: 700907738H1
cgggagcatcatggtgaacacagtactgaatacacaggagagcatcatgttggtgagcacaagccggagcaccatggaggagaagagcacaaagaggcgttcctagacaagctcaaggacaagatccacggcgacgagggtggcgccaccgccgagggcg

SEQ ID NO: 24515 - DNA, 122 bp, Glycine max
  Clone ID: 700907743H1
actgaggttcattgaacctggacgtgtttttgggcgtggactggatgatggtaacgaacctttggcctcatcgcttccgtcagatctcattcttcatccattcacagccacatcccacacaa

SEQ ID NO: 24516 - DNA, 243 bp, Glycine max
  Clone ID: 700907751H1
cacacacaacttcataaagtgtaacaatcaaaatcacgccacagatctacacacaccacatcatgacacaatagatctgtgttagtcctttggttttatcaaaccacacttgcaccaatcaaaaccacaaaacacaactcgtcacatcacatcacatcacatctattttcattacttcatcattttcactgcaattttcacaccacacacacctcacaatcatggaagttgatagtaggtttc

SEQ ID NO: 24517 - DNA, 127 bp, Glycine max
  Clone ID: 700907752H1
cagatgacagctcggtcctatccaggtttaaagacatcccatcttataaaagggttatgttattgaaggataaaatgggcgacgtaccaagacaaacagtggaagaaataaagaagcatgcggatgc

SEQ ID NO: 24518 - DNA, 199 bp, Glycine max
  Clone ID: 700907753H1
atttaatcattttcgggatatatggggggtaggtgtggggagaacaagaacaatgacctgagttgttaaacttttttattttgagagaaaaaaacattggacatagtaaagccatggaagagatcaccaagaacctatcagggacttctcttttggtaccatcagttcaagaattggctaaagaaaagatatctaatgt

SEQ ID NO: 24519 - DNA, 233 bp, Glycine max
  Clone ID: 700907754H1
gaaaccttcgccaagaaccgtgaactcgaagtgatccactccaggtgggccatgctcggagccttgggctgcgtcttcccggagttgctgtcccgcaacggggtgaagttcggagaagccgtgtggttcaaggccgggtcccagatcttcagcgagggtgggctcgactacttgggcaacccaagcctgatccacgcccagagcatcctcgccatctgggccacacccattag

SEQ ID NO: 24520 - DNA, 151 bp, Glycine max
  Clone ID: 700907758H1
cgcccttcgctcgcaaagccaaagctctcgatgccgtgccaccatctgctccaaagttttcatattcgaagaggaataggagtattgaaggaaatctgaggtcaggccacattcctacagacattgggaagttgaccaatttagtaaaact

SEQ ID NO: 24521 - DNA, 245 bp, Glycine max
  Clone ID: 700907711H1
gaaggaaccacaagtggacagcccagtccccatctcctcgttctcggatgaggacgaggagatcgtacaagccgtagtgtcgtgctccatcccatcctactcactcgagtcgcggctcggcgacacacgccgggccacggccatcacgcatgaggtggtgcagaggctgacttcccgatccctgtcaggtttacccctggaaggtttcaactacgactcaatattggggcagtgctgtgagatgc

SEQ ID NO: 24522 - DNA, 247 bp, Glycine max
  Clone ID: 700907674H1
ctcgagccggttgcagtcaaggatctcaagcgtggttttgttgcatccaactccaaggatgcccctgccaaggaagctgccaacttcacatctcaagtcattatcatgaaccaccctggccagattggaaatggatacgcaccggtgcttgattgccacacttctcacattgctgtcaagttttctgaaatcttgaccaagattgacaggcgatctggtaaggagcttgagaaggagcccaaatttt

SEQ ID NO: 24523 - DNA, 247 bp, Glycine max
  Clone ID: 700907675H1
gcataagaaagtggtaatagccatcgtcgtagccaccactgcacttgctgcactcattttcactttcttatgcttctggatgtatcatcataccaagtatccaacaaaatccaaatccaaaaatgttcaaagtccagatgcagagaaggggatcaccttagcaccgtttttgaataaattcagttccatcaagattgttggcatgaacgggtctgttccaataattgactataagcaaatagaaaaa

SEQ ID NO: 24524 - DNA, 74 bp, Glycine max
  Clone ID: 700907676H1
ccgacgacgacaacgacttgctctccctctacctccaattcgatcagctcgattcctcttcacttcctcctcct

SEQ ID NO: 24525 - DNA, 75 bp, Glycine max
  Clone ID: 700907677H1
cagcggtgattgtgtttatcataggaggatctgatgtactcgctcgtggatctcaactatattcacgatcatgat

SEQ ID NO: 24526 - DNA, 245 bp, Glycine max
  Clone ID: 700907678H1
aattagtactctcgttaattttcttgctaattgctaattgggcacaatggaaacgcttcatgctgtgtgcatcccatacccagcacaaggccacataaacccaatgctcaagctagcaaaactccttcatgttagaggcttccacatcacctttgttaccacagaatacaaccacaaacgccttctcaaatcaagaggttctgattccctcagtagtgtcccatcatttcaatttgacaacatcc

SEQ ID NO: 24527 - DNA, 246 bp, Glycine max
  Clone ID: 700907680H1
aaaaatgccaccaatgttgaacaggctttcatggccatggctgctgaaattaaaatcagaatggcaagccagccagtgaacaatgcgaggcctccaacagttcaaattcgaggacagccagtgcatcagaaggctggttgctcgctcgacttagagagatacgcatatttggggtctcagacgttcatgcgtctcagtggcatctaaaactagcttttcacattgctggcatatcaagattgttcg

SEQ ID NO: 24528 - DNA, 261 bp, Glycine max
  Clone ID: 700907681H1
caagtccaattttccaaagaaccaaaaatgcacccatctcgtgccgaagcagcagcatcacaaccctgctttaatggctgtttcccatctccacttcttgcctctgagaagtcccatagaactacttcttccaagcccaaagtcgtcaataataataatgtaacttcatcacacgatgacttcgtcgcagccacatcttccacccttcacccacacccaaatttcaccaaccacgagtccctcccatctttgcaagactca

SEQ ID NO: 24529 - DNA, 257 bp, Glycine max
  Clone ID: 700907682H1
caagtacgacacttccatcttcatcgtaaacaaacctcaaagttgcattccaccatgtctaaacaacccattgatccctttcgccacatcaacatagttctcaaccctaacggaaccctaaatcgcttgcgccatattcccagcaccgcaccctcttccgaccccactctcccagttatccccaaagacatcaccatcaaccaacaaaacaacacatggctccgcttattcctcccccgaatagcactatccccaaa

SEQ ID NO: 24530 - DNA, 257 bp, Glycine max
  Clone ID: 700907683H1
gcttgccaaggtcttgttgattgagcgttaagtgctttaactaatcaatcccaagaccttggtttaccttgccacacaaaaaaatatataaaaaggcaaaataataataaaaaaaagagaaggcttggagccaagaaaataaacacaaagcataagtcatggaaataatggttggaagtgcaacaaaggttgctttcaacctcttggtcactttcgccattgtcattccatgccttgaggctggcattgctgagttt

SEQ ID NO: 24531 - DNA, 244 bp, Glycine max
  Clone ID: 700907684H1
aacagtatctccatgtgaatcacttcggtctttatctatcagtaattgccctggatttggcaatgcctccctctctgtattgggaaagctgtgccctcagcttcagcatgttgaattgagtggactcgagggagtgacagatgcagggcttgcttcactccttgagagttccgaggctaatgatggttaaagtgaaccttatcggttgcacaaacgttaccaataaagtagtctcgtccttggc

SEQ ID NO: 24532 - DNA, 249 bp, Glycine max
  Clone ID: 700907685H1
gaaccctctctcatggctgcttccaagcttttttctgcttctctcctggtctccatggtcaccctcttcgtcctttcgtcggacaagtgcctcgcgttgcaatgcggggtttcctatgagacaatcaccgtcgtcaatgagtttcctcacgatccacaagccttcactcagggccttctttatactggaaatgacaccttatttgagtcaactggactttatggggagtcatctgtccgtaaagttgct

SEQ ID NO: 24533 - DNA, 255 bp, Glycine max
  Clone ID: 700907686H1
tagaaatggatggtgggacaaatggagatcatgtgaaggtgaaagaacaaatctcaaatggtgtggcagataagaagtctactaatcatcttatgatgcctgatgatgcagaattggctatcgatgaacaaaagaaaatagaaggcagcgtagatgggtaccaatctggatgatgttactagtgaagttgacaattacatggatgctttaactaccatggaatcagaactggaaactgacaatgagtgtaaacct

SEQ ID NO: 24534 - DNA, 251 bp, Glycine max
  Clone ID: 700907687H1
caccgctgaatcctagctttatcttcccttcccttcaaaataatatctctgttccaaacaagtccaacaacacactgctacaatctcaaacgtaatcggttacccttctctttttctctccaccttttcatgtttttctttcggattcttttacattgcattacatcaattgggtgatcttgggcacatcgagaaatgagtttgagtaatgggaaaaccgaggcaccattgccaattagtaatggggatga

SEQ ID NO: 24535 - DNA, 245 bp, Glycine max
  Clone ID: 700907689H1
acacaacgtaccaaaggaggttgaggagtggtcgcagttgcatagcagagcctcagaattgtgctctttgcttacgcttcttttacttcctctcttctcttcactctgtacagagacagacactgcacacatttatggccagcgtcggtgatagaaaggaatcagaatggatggataggataatctcagaaggagccatcccacttcttgaaccagataattgttcaaatggttgggctacccct

SEQ ID NO: 24536 - DNA, 243 bp, Glycine max
  Clone ID: 700907691H1
ataaaacggagaaaagaaaaaagaaaaatgtaagtggaagaagagaaagtggcatcgcttaggtacagatacagacacaacctggtaaaaatcccgaccccagtgccgcacaattttccttcactcgcagcggagatttaggattgtggtcttcctgtcttggaagtgctgcttgaaagatgaccttggtcatatggttgcttgtcatcattatttgtgtggtatttatccatgcattatgtg

SEQ ID NO: 24537 - DNA, 241 bp, Glycine max
  Clone ID: 700907692H1
ctcgacggaagcaaggacttggtgacggtgaagggaacgatggacgtgaaggagatgttgccgtacctgaacgagaagctgaagcgaaacgtggaagtggtgcctcctccgaagaaagacgacgataagaaagagaaagaaggcggcggcggcggcggcggcggcgagaagaaagcaggcggtggtgagaagaaagagtaagaaggcgacggcgagatgaaagagaaagacggtgcggcgg

SEQ ID NO: 24538 - DNA, 245 bp, Glycine max
  Clone ID: 700907693H1
tttaagcgtttctttactaatggcattcggcaactacaaacaaaagcaacaacaagaagaagaagaacaagaacacagaatggaagaagacgaggacgaaagcgaagaagaagaggaacaattttgggacgattgggaaggagaagacgaagaaggagagcagcgagactctgaattcgtgtgtctcttctgtgaatcccggtacagctcgtgcggttccttgttcgaccactgcgcctcccttc

SEQ ID NO: 24539 - DNA, 242 bp, Glycine max
  Clone ID: 700907694H1
caactcttcaaaagggagaagaaaaggaaagaaaactctcaaaaaactattatagcaatggcagaacaaaaccaaaaccaaacaactgaagctggaaggcaccaagaggttggtcacaagagccttctccagagtgatgctctttaccagtatattctggcgacaagtgtctacccaagagaacctgaatccatgaaagacctgagagtgttgacagcaaaacacccatggaacatcatgac

SEQ ID NO: 24540 - DNA, 199 bp, Glycine max
  Clone ID: 700907695H1
cttcagcgaggcctttgatgcggcttgttttcctcttactcttttctcaagctcatttgatccaggttgggcatttggcttgtcagctaccgtgatccaagggttgctgggcatgctagtggaggggtcttcagacaatgtcaatcagtgtttcttggaggcttcacgttttggcagtacagaacttgtgcgcatacta

SEQ ID NO: 24541 - DNA, 245 bp, Glycine max
  Clone ID: 700907696H1
ccataccctaaactaaaccctcctttgatatttcattttattctattctatgcctttatgcctagaacgtttacttgaagctgcatcaattgaggagggattcttcatctttggattcgcttttggtgcctcggagtcagagctgcaaggaaagtggagatgctgggatgaaagctgaattttgtgggaaatggctactttagttgaaccccccaacagaattaagcctaaggggaagcattatt

SEQ ID NO: 24542 - DNA, 82 bp, Glycine max
  Clone ID: 700907701H1
gtcgtcgcttccatgactttcctcagacaggtttggcttcacggaaaccagttcagtgggacaattccacacaacatacgag

SEQ ID NO: 24543 - DNA, 248 bp, Glycine max
  Clone ID: 700907703H1
ctagcccaaatgctgccaactatgcaccacaagctcaaccaggttatggggtgcccccaacctcccagccggctacttatggcagtcaacctccagcacagtctggttatggatctggctatggaccccctcagacccaaaagcctagtggcacacctcctgtgtatggacaatcccaatcacctaacgcagcagggggatatggtcaatctggtcatttgcaatctggatatcctccttcccagcct

SEQ ID NO: 24544 - DNA, 242 bp, Glycine max
  Clone ID: 700907704H1
cacttttctactttgagtcttcttgatccttctttttctccttgaactcaaacatggtagatgaggtggttctgctagatttctggccaagtccatttgggatgagggtcaggattgcacttgctgaaaagggtatcaaatatgagtacaaagaagaggacttgaggaacaagagtcctcttctcctccaaatgaacccggttcacaagaagattccggttctcatccacaatggcaaaccc

SEQ ID NO: 24545 - DNA, 203 bp, Glycine max
  Clone ID: 700907705H1
ggaaagggtgttgtcagtagatgagatatcggagcaatactgggtggctgcatcatctgcttcatcatcatcatcatcatcgttcaagtcaaagatgaacctgagcgaatccgaatgggcctttccgcagttcctacagcaggaagctgtttcttcttcatctaattctgatcatgatgatgatcatcatcatgctaaactca

SEQ ID NO: 24546 - DNA, 156 bp, Glycine max
  Clone ID: 700907706H1
caagccacaaattagtactctcgttaatttttttgctaattgctaattgggcacaatggaaaagcttcatgctgtgtgcatcccatacccagcacaaggccacataaacccaatgctcaagctagcaaaactccttcatgttagaggcttccacat

SEQ ID NO: 24547 - DNA, 247 bp, Glycine max
  Clone ID: 700907673H1
aaactttctgtcgcacaaataactctaaactaagcacttccatacacaaattttctcacccagaagacatatctccatttcatttcgagtaaaagtaaaacacagttcctgatccatggcatctcgccgccgcatgttgttgaaggtcataatcctcggagacaacggggttggtacaacatcactgatgaatcagtatgtgaatcgtaaatttagtaatcagtataaggcaaccatcggcgcagat

SEQ ID NO: 24548 - DNA, 174 bp, Glycine max
  Clone ID: 700907707H1
gtggaactggaacattcttctacggttcggtaattcagccgttgattcgctaccactatctatcaccaccaatccctattcgtcccttatgctgcatatcccctctcatcacctccattcactccaactactccgtttctccgcaaaacggaacgcttcgcttccacacagcat

SEQ ID NO: 24549 - DNA, 245 bp, Glycine max
  Clone ID: 700907708H1
acagaactcccatttgaagtagatgctctactttgtacaataaggcgtgtgctttttgccacctcttgtctgaaggagttacaccccctagcaccttaaggctgcttttcacctttggctaccccgggaaaaagtatattctttcttgagctgtgcatcaaacactgaaataattttccatgaaatctatggagtctcttgaattatcttggagccttatatacagataatgtgtatataactta

SEQ ID NO: 24550 - DNA, 245 bp, Glycine max
  Clone ID: 700907710H1
cgcaaaaagaacgaggcatcatattcatattgatataagtgtagtaggatctgagaattggagtgagtttgatggcgagagcaagctctggtctgcaatacccagagcggttctacgccgcggcctcttacgttggattcgacggatccaccaaatctctcacttccaagttctccaactccaccgctcttcttctccacagcctctatcagcaggctagtataggaccttgtaatgtcccagaa

SEQ ID NO: 24551 - DNA, 258 bp, Glycine max
  Clone ID: 700907639H1
gttcgccactcagagactcaacaaattgcttcgcctttggctctaaagtgactagcaaatcacgtgtcctcattctcgtcgagagtatgttttctctctctgttcagacttcagagtacgcttcctctctcacggtgggtttcattatgccataccactgaagaacgaagtttatctctctcttgtgacttgtgagcaattcaaattgcggagaacagaacctacacactgcattggaagatacaagaatatcatcag

SEQ ID NO: 24552 - DNA, 258 bp, Glycine max
  Clone ID: 700907640H1
aatggcaccgaagcagaccaaggctgagaagaagatcgcttacgatgcgaagctgtgcgacctaatggaggagtacggccagatcctcgttgtgaactccgataacgtgggatcgaaccagctccagaacattcgcaagggtctccgtggcgactccgtcgtcctcatggggaagaacaccatgatgaagcgctcagtcaggatgcacgctgagaaaaccggaaacaacgcctatctcaaccttatcccgctccttgt

SEQ ID NO: 24553 - DNA, 251 bp, Glycine max
  Clone ID: 700907641H1
tttaagttgacaaaaggcttcgcagcaaaagagtcagtgaagggacatatggtgaatgtagtaaaaggattgaagttatatgaggacattttcactgattcagaactgtgcaagctaacagattttgtgaatgagatccatgctgctggccagaatggggaactgtcaggtgaaacttttatattattcaacaagcagatgaaagggaacaagagagagctgattcaactgggtgttccaatatttggaca

SEQ ID NO: 24554 - DNA, 250 bp, Glycine max
  Clone ID: 700907642H1
aacgaaactgagagcagcagtgcgcagaatacagagacttctgattctaactcagctgatagttcctcttcaagtgattcatctgccaacagttcagaaggcacaagcaaagagacggttactgagcaatctgaaggtcacgatgagctatgattaactgggcatgcatgtaaggccggttttaatcatctacctgcaacgtttttatagtcagagatgtagactggtaatggtagaattaataggtgaa

SEQ ID NO: 24555 - DNA, 248 bp, Glycine max
  Clone ID: 700907643H1
gggaattttgaacatgaaaagttctttgtaagagttttgtggaagatggggtttaggaataatgcaattcaggctgggagtttggatgtgggaaagtcaaagggaaggatgcaaaaggatggtgctgagaaggaaattgggtgctgtgttaaattctgtttcattgggggctgtataccttcaagatcaaaggtggataactccataagtggcactagtgctaacagtgtggaaaaaacatctgcatc

SEQ ID NO: 24556 - DNA, 250 bp, Glycine max
  Clone ID: 700907644H1
ctggcatcacacattttataatgaacttcgtgttgctcctgaagtgcacccagtgcttctcactgaggctcctctcaacccataggccaacagagaaaagatgacccaaatcatgtttgagaccttcaatgtgcctgccatgtatgtggccatccaggctgttctctccctgtatgccagtggtcgcacaactggtattgtgttggactctggtgatggtgtgagtcacactgtaccaatctatgagggg

SEQ ID NO: 24557 - DNA, 243 bp, Glycine max
  Clone ID: 700907645H1
gagaactgttgtccctggggcatgcctttcctcagaattcagattagattagtgtttgtgagaaatctcaactgagaagtaaaatcaattctttactgagggatgaggaggatgattgggataagctactgaaacttactcaagaggaagatttttctcgagaaaatctacaggaccagctgccgcaaaatcttctgacgattaagctacatgcatggctccttcatataataagaggagcgg

SEQ ID NO: 24558 - DNA, 249 bp, Glycine max
  Clone ID: 700907646H1
gccagagcttcttccaaccttcaccacgggagtagttatggcttatgccctagagtacaatgatgagaaaggtatatgctttctgacggatcttcttgttgttggtgagaaccaacaaacttttgaccttgaaggagacagtggaagtctcatcatgttaaaaggtgacaatggtgagaaaccgcgaccaattgggataatatggggaggaactgctaacagaggccgccttaagttaaaagttgggca

SEQ ID NO: 24559 - DNA, 247 bp, Glycine max
  Clone ID: 700907648H1
cggctcgagtgctgttccaagtcccatagcagcgatgggaatcgatcttaaggctgggggtaagagcaaaaagaccaaaagaacagcaccaaaatccaatgacatctacctcaaattacttgtcaagctttatgggttccttgttcgaaggactggcagcaatttcaatgctgttatactcaagcgcttgttcatgagcaaggttaacaagcctccaatttctttgtcaaggttaattaagtataca

SEQ ID NO: 24560 - DNA, 263 bp, Glycine max
  Clone ID: 700907649H1
aggacattgtctagtccaaatgttccacatggttctccataccttcatcataccaagtctccaaaacctattgggtaaggttaacttttcactgtctttaatttgattgtctattcgttcagttcccacaaattaggccaccagctctacatacagcaactgttgtgtgtctgggagagtttatctgaaacctgatggaattattaaagtcttagtttcactatataatctcaaataaggtaagtgcatgagacagtttaatg

SEQ ID NO: 24561 - DNA, 259 bp, Glycine max
  Clone ID: 700907651H1
attcatttcaatggcaactcacggtcaagtcattacctgcaaagctgcggtggcctgggaacccaacaagcccttaactgtccaagacgttcaggtggctccgcctcaggccggcgaggtccgtgtccaaatcctcttcaccgctctctgccacaccgatgcttacacttggggcggcaaggatcccgaaggtctcttcccctgtattcttggccatgaagctgcagggattgtggagagtgttggagaaggtgttact

SEQ ID NO: 24562 - DNA, 253 bp, Glycine max
  Clone ID: 700907652H1
gaacgaaaatcgagagtaaaaggcgaaggagcggtgggagcgatgcgcatggttgttaacgacgcattcctcccattaactaaattgctatgtctttacctcttcgttttcattcctcatctttctctctctcttctcttggggttgtgagaaaagtgctagggagtcttataacagcattgatgaactgcaatttattccatcttcatagatattgttcaaccaaggagtggacattcgcacttagcaaaaa

SEQ ID NO: 24563 - DNA, 107 bp, Glycine max
  Clone ID: 700907654H1
gccctttattttggggttttagttatagggaattgggctcctaaaggagaaggggaattcactttggcagttgtttggatatatgttaagggcttcttccttttttt

SEQ ID NO: 24564 - DNA, 253 bp, Glycine max
  Clone ID: 700907655H1
gcaaccggtaacactgctcacgccaccgccggaaaatcgcaaccaccgtctgccaccatcagttgattacaatttgatggataacaataattggagacctaatcaaggcactgaagccaatatggatactagtgattggagaggtggactgccgcacgagtcacgccatagaattgtcaacaaaataatggacacgttaaaaagacatcttcctgtttctgttcaagagggattgcatgaacttcagaagatt

SEQ ID NO: 24565 - DNA, 244 bp, Glycine max
  Clone ID: 700907657H1
attaaggagttctcggatgtacagtcacagatccaacaaatatgtggagagatagctggaaacttgaaccttaatgacgtgtcacctgcagttgatgagtctgacctgtccctgaagaagttggatgaatatcaatctgagctccaagaacttcagaaggacaagagtgagaggttgcacaaggttcttgaatttgtgagtactgtgcatgatctatgtgctgtccttggtatggacttcttca

SEQ ID NO: 24566 - DNA, 248 bp, Glycine max
  Clone ID: 700907658H1
gtaaagtccaccgtctgtatgttaaacaaggatgaggaagtagacgagcccctcagtccgggcaaacacatgaaaactgcacaaagtgttttatcacttttgatagcgactattgcgcttctttggattctcaccgacctatgcagcctgttatcaattatcaagcttcagccagaacatggccccctccccattcggttttctttgcttgaacctgttggtttcatggtgtttgtttgggctgttgc

SEQ ID NO: 24567 - DNA, 247 bp, Glycine max
  unsure (1)..(247): unsure at all n locations
  Clone ID: 700907659H1
ccggatattgaatttggatggatgataaatgcgntgtcgataattggattcctgggatgtgcatttggcaccgtgggtggttgtggtgggggtggcatctttgtcactatgctctcccttattattggatttgatgcaaaatcagctactgcaatctccaagtgtatgattacgggtggagcagcagcgacagttttctacaatttgaagcaaaaacatccaacacttgacatgctcgtgatcgact

SEQ ID NO: 24568 - DNA, 248 bp, Glycine max
  Clone ID: 700907660H1
aaaaaccttcgggtgggtggcacacttcttccctacaggcagcgtcagctaagaattaagccaaaataattaattaattcttggcaaaatcacatggccgccgccgcagatgggctcttccggccgatctacgagggctgcatctccgcctacgacaacgacgtcgagcgccgcccctaccacaagaactgcggctgcgctctgcacagcaagtcgaggaggaacagcagagcgtgcgcgcacaagtt

SEQ ID NO: 24569 - DNA, 238 bp, Glycine max
  Clone ID: 700907661H1
attgacgcttgctggagatgcaataaagcactgggccaatgaccggttcaggctagccaagtgcggcaaagggttctgaagacgggccaccggcgggctcggtggtcccatctatgtcgtcaccgataattccgatgacgacatggtgaaccctaagccgggaactatccgtcacgctgtcacccaaaaaggcgccttgtggatcatcttcggacacagcatgatcatcagtttgaag

SEQ ID NO: 24570 - DNA, 245 bp, Glycine max
  Clone ID: 700907662H1
ggaacctagattttacactaaggtatttaaagagtgccatataagtgatgacaccaggaattcctttgaactttcccttgttggctgtaaatgtattggagcttatgtccgaaataagaagaatcaaaaccagatttgctggttatggaaaaaagttagatcacaggatgatagggggttccagaggttcttagatagtgttgagtataatcataaggatatattactttatgagagtgtgtttg

SEQ ID NO: 24571 - DNA, 261 bp, Glycine max
  Clone ID: 700907666H1
cctcgagccgaatcggctcgaggtttaaggctaacagaaccaagacagatacaatgccagaacttaacttgatcaccacacgttaccttcctaatatttttatcaatgttttatttttatgacaaaacttaggtgcagttccttagatgttttaggtcgtgttctctaattagagtgttatcttgtaaactttgctagtaaggtccacatttaaagtcaactctagtttctgaggtgactttaattatgaatggaaaaaca

SEQ ID NO: 24572 - DNA, 259 bp, Glycine max
  Clone ID: 700907667H1
ctgaagcagggtgttactactgtcttgaagtctgttttttgtggagcaccaatggctttattcatggcagttcttggtgttgttgccttggtgctctgtttttgctctgctctcttgaagtggaatgaattgaggtataggaggaaaggtttgcctcaaggcacaatggggtggcctgtttttggggagacaactgagtttcttaagcaaggtccaagcttcatgaagaacaagagggcaaggtatggcagttttttca

SEQ ID NO: 24573 - DNA, 252 bp, Glycine max
  Clone ID: 700907668H1
ttgtaatcaattttctttccatttgtcaaaccataccaatcaaccaacctcgttgcttcttgtgatcacttcttgaaccaccctcatggatattgatgagtgggagtttctctctgatgatggctaccttgatttcaatgaagagggtgggaagcaaaagcaaaagcaaagttcctttggaaaattggactcaaagggtgtctttgacatggactacttttgctcatcaccaccaccaagggtgagaactca

SEQ ID NO: 24574 - DNA, 254 bp, Glycine max
  Clone ID: 700907670H1
gttgagattaaattacaagttgtgaacgtgtttattgaattcttgattctcttaggaagcaataaggacatggcaaagatatcattagctttggtatttgcattggtggtgactgtaccatttcattcagttatgggtcaggatgatgcatggaaaagtataatagaccaagcaaaagatgaagcaagcaaagcaggtctctctgaagatacaatattcggggctgagaaggctataacagatggttctgccga

SEQ ID NO: 24575 - DNA, 231 bp, Glycine max
  unsure (1)..(231): unsure at all n locations
  Clone ID: 700907671H1
aaaggcaccagccgcagacgctgcaatcttacaagcacttccctcattctcgcgcattcataaatcataacacaaaccctatttttttctccacaatggatctaatatancaatactcagacggtgacgatctcgactctccctctgaaaatcctagctcccctccgcgcctcctcccgggacgttccgccgcgtctaacgtacgacgacaccatggtggctctcattgtt

SEQ ID NO: 24576 - DNA, 259 bp, Glycine max
  Clone ID: 700907638H1
gaataatatgaagagccatgtctcagaaagggttcagccttttgccaagtgcctccagagttgagatcacctctgcaataaaacttggagaattattacaattttcaaggtgacaaaagtgcatgtcatagatttttttatccttataaaatcgaagacaagtatggtaatttacaacagtccacgcatcctgctcaatcaagacctcctggtaaaggagatgtcatagattaaagctacacacatgctcaacaaagtt

SEQ ID NO: 24577 - DNA, 264 bp, Glycine max
  Clone ID: 700907604H1
ctttttaaatctgaaggggataaaaaggttatccaccagttggtttccctatacaaccaagattctactgcttcggtaccagaaggcacaaatcctgttgatgtagcagctcttgtaaaatattatcttgctagccttcctgagccactaaccacattagagctttataatgagattagaagtgctcgatccagtatctgttccatgagaaacatactcaagaggctttccagtgtaacctacatgactctggagtttataaca

SEQ ID NO: 24578 - DNA, 109 bp, Glycine max
  Clone ID: 700907607H1
gcacatgttggtctcaaaatgagcatccggaaggtatatcgtttgtttatgtttcccggtagagtagttattagtttgcattagatgtcatcgttccacacaacatacg

SEQ ID NO: 24579 - DNA, 261 bp, Glycine max
  Clone ID: 700907608H1
cttctgccacaaatcagacagtggctgccttgaaacgtgcacaggagtcactgatatctgaaaacataaagatagcatctgcaagtgcctcaaatcctgggatacctccatcctctttaatgtcctttttggaaaagaatcctgcaatctctggtgttgtcctagaagattttgactctgtctttgtcaacaagttctaccatagtcatcttgatgatttatcaaatgtaaattcgtcagctgtagttgctgctgcttctc

SEQ ID NO: 24580 - DNA, 243 bp, Glycine max
  Clone ID: 700907609H1
ggcgtcttcagctcaagtgcctaacctcttcggcggcgccacctcagctccgccgccaactccggcggcgcaccatgacaacatcatgtcctcatccgacgccgccgatgcgctctcgcgcctcctccagcgcctctcgcccacgctctccctccccacgcgcctccctttgacttcctactcatatgttatgtctcatgcctgtgtctaggcttaacgacgtatctcctgcgattccaaact

SEQ ID NO: 24581 - DNA, 84 bp, Glycine max
  Clone ID: 700907610H1
gcacacagcagaatagaacaaacgcaggttcccaattgaaacggttctgaagaagtgaagagcaatctaggctttcctttctcc

SEQ ID NO: 24582 - DNA, 252 bp, Glycine max
  Clone ID: 700907611H1
cacgctgtggtgaaggagcttctaagaaagcaccctccaacacactttgtgctaacacatgctgtgactgagcccaccactttgggagggtatgacataccaattgatgcaaatgttgaggtgtacacaccagccattgctgaggaccccaaaaattggttaaaccctgagaagtttgaccctgagagattcatctctgggggtgaggaagcagacataactggggtcacaggggtgaagatgatgccattt

SEQ ID NO: 24583 - DNA, 255 bp, Glycine max
  Clone ID: 700907614H1
actcgagcgaattcggctcgagctccatatccccccctagctactgagcagccaaagggacaggaataataataagcctaacattctaaggccggaaaaataaaaaaggaataacaaaaatgtctggaaaggtaattatctcggctgtttctctcatcctggtggttggagtggccataggtatagtggtggccgtcaacaagaagggcgaggatcccacacttcaatctcaacaaaaatcagtaggggttatct

SEQ ID NO: 24584 - DNA, 215 bp, Glycine max
  Clone ID: 700907615H1
gatcacatggcaatgaagaagttcttgatgtgttgttctgtccctttcttaggtgcttagagtggacaatagcttggattttcacgacaaggatttggagtccgaggaaagcctgtgggacttgtacgagagatggatgagtcaccactcggattcgtgaagctcttgtgacaagtacaagcggtttaacgtgttcagagcgcgtgtgatgcatg

SEQ ID NO: 24585 - DNA, 207 bp, Glycine max
  Clone ID: 700907616H1
cggctcgagtgctgtaacttgttccatagcagcgatcggaatcgatcttatcgctgggggtaagaggcacagaggaatagaaccgtagcactatcgactgacatcgacctcaaagtacttgtgaagctctatgcggtcattgttcgcaggactggcagcaatttcaatgctgttataatcaagcgcttgttcatgagcaacgttaac

SEQ ID NO: 24586 - DNA, 251 bp, Glycine max
  Clone ID: 700907617H1
ctctcatcggagggaaacaatcaataaaagataaataaaaacccataaaaagattataacaaaaaaagtatgaaaggaaaagtactaggttccgcagtttctctcatcgagatggtgggcgtggtaattggcgtagatgctgaagttcaaagccaatggggggtgaaaagcatcatgaatggaggagaattgaaaacctgcaaaagggccgtgcacacgttgtgccaaggctcagacgaccagaaactgtg

SEQ ID NO: 24587 - DNA, 264 bp, Glycine max
  Clone ID: 700907618H1
tctctctctctctctctctctctctctgtgtgttgcgttttgtgaaatcttattcgacatggcgtcacgggacaacaagaaggcgtcgagcagccgagccggcagaattcgcaccctctccgatctgaaccgtccctccgccgattccgacagcgactccgatggccctcaggagtactacaccgcaggcgaaaagagtggaatgcttgtccaggatccttcaaagggaaatgatgtggatgaaattttcaatcaagctaggca

SEQ ID NO: 24588 - DNA, 262 bp, Glycine max
  Clone ID: 700907619H1
gtcggttcttccttctcaaatattcttgagatccccattttctccgaagcaaagccatggctaagggtcctggtctctactctgacatcggcaagaaagctagggatctgctgttcaaggactaccacagtgaccagaagttcaccatcaccacctactcaccgactggagtggctattacagcatcaggaaccaggaaaagtgaactgtttctggctgatgtcaacacccagttgaagaacaaaaacatcactactgatat

SEQ ID NO: 24589 - DNA, 257 bp, Glycine max
  Clone ID: 700907622H1
gaaccttaaattaattatagaaccatgtttgcaactaccaattcctccactttgtcacctttattctctttcagtagaacaacagcaacctctctgccttccaaacccacattctggaatttggttccaatgaaacaatcttcttctccggggcacttggccttagccttagacaatccacgtagaacacttcacgtgtcttgtggctccacatcaccacatgcttcccagagatcatcaattcaggggggtgaagc

SEQ ID NO: 24590 - DNA, 259 bp, Glycine max
  Clone ID: 700907623H1
tgtgaacagcggaagaatacaccgccacacgctgcaggccctttaccttgtgcttcctgcgttcctgtgagaacccacgttctctaacgcgcttctccttcaaagttcaaattcctatacatttgcgtaatcgcttctcaaatctcaacaaaagtattcccaaaaaaccctaattattattattaaacatgaggccgattctgatgaaaggccacgagaggccactgacgttcctcaagtacaacagggacggcgatct

SEQ ID NO: 24591 - DNA, 258 bp, Glycine max
  Clone ID: 700907624H1
tttgtggtgctagaagtttctatttctgggcattcagaagattgcaggaaaagttatcagcttttgttccatattgaacagggtgtctgatctagaatggagatcactagaataggccaatggttaagtcttctgatatgtgtactactattactgcagacagaaggggttcctgtgggaatcacttttgttgaaaatgcagtggcaaaaggggctgtttgtttggatgggagtcctccagcttaccacttccacaca

SEQ ID NO: 24592 - DNA, 253 bp, Glycine max
  Clone ID: 700907628H1
caacacttccgaaccttgcattgtatctacccacttctcaaccaacaatggcaatggcaacccaagcctctctcttcaccctactcctctccggtctcaaacccagcgaccgagccaccgcgccatggaaacaatcctccaccctctccttctccacctcgaagcccctcaagttctcgcgaacaatcagagcagcagccaccgaccagaccacagaggcaccggttgggttcaccccaccggaactggaccc

SEQ ID NO: 24593 - DNA, 249 bp, Glycine max
  Clone ID: 700907629H1
atcggataaaagggccatggagtcctgaagaggacgaagcgttacggaggttggttcagacttacggccctaggaactggtccgttataagcaaatccattccgggtcggtctgggaaatcgtgccgcttccggtggtgcaaccagctgtctccggaggtggagcgccggcctttcacggcggaggaagacgaggcgatcctgaaggctcacgccaggttcgggaacaagtgggccaccatcgcgcgct

SEQ ID NO: 24594 - DNA, 251 bp, Glycine max
  Clone ID: 700907630H1
tctcgagcgaatcggctcgagtacaaattctctgtgttgtgtagtgtacttgtgttaatacgtgttgttgttgtaggaaatttaagtgaagagagaatgatgatgaagtctgctatgtgtgcattggtgcttgtggcactggttgtggttgaagtggggcccatggctgaggctgcggtgacttgcaacccaacacagttgactccttgtcttccggcaattaattcaggttctgcaccttcgagtgcttg

SEQ ID NO: 24595 - DNA, 251 bp, Glycine max
  Clone ID: 700907631H1
atcatccgcagctgcttttattcgctccgcaaacagtgagccatggccgtcggaaagaacaagcgcatctccaaggggaagaagggtggcaagaagaaggcagctgatccctttgccaagaaggattggtatgacattaaggctccttctgtttttcaagtgaaaaatgttggcaaaaccctcgtctctcgtactcagggtaccaagattgcttctgaaggactcaagcatagagtgtttgaggtctcctt

SEQ ID NO: 24596 - DNA, 209 bp, Glycine max
  Clone ID: 700907632H1
gctcggtggcactgctacttcaactcactcccaagtttcctcctttctcacatataaacaattccaacgtctgcggatattcgcaccaaggctttcaatactgcttgtaggattgtgatccctgcttgccttacatgcttttccatgtcagtgttcgcataccatatattgcagactgtcttattgatacagtggactgactactgaga

SEQ ID NO: 24597 - DNA, 265 bp, Glycine max
  Clone ID: 700907633H1
aaagaaaaaaaaaaacccttagccaacacaaccatcatggccacctctgctattcagcaatcagcattcactggtcaaactgctctgaagcagctcaatgagttcgtccgcaagaccggtggcgccggcaaaggtcgcactaacatgcgccgcaccgtcaagagtgctcctcagagcatttggtatggccctgaccgtcccaagtacttgggtccattctcggagcagattccatcatacctgaccggagaattccctggtgact

SEQ ID NO: 24598 - DNA, 265 bp, Glycine max
  Clone ID: 700907634H1
aggaaacctgttaaatctggaagagtctaatagaagaaatgtctctctcgaaaggcgttggagtcttgaggtgtctattgagaaggtgattggatatgattcagcattaagatttgcagaatctgtaccagaaagtagagatggagaagttgatgcaatgatcccaattttggaacgagagtacatgcaaggtgtgttaataagtgaggttgtgttaaataatatgttttcatcaatgtctagaagggcacggcgacttcaaaaa

SEQ ID NO: 24599 - DNA, 263 bp, Glycine max
  Clone ID: 700907635H1
cctaatctcgctcagattttctccagaaaagggaaaataaataaaaaaagagaataataataatatcttttgtaattcgcaaaacgtgatcgacgctggcgcaaattgaaattaggaattagggttagggttttcattatcttcgcccggaaaagaaaggggggaagaagaaagaaccgttcctttatgatcgaaaaggtgcctttggtcatcatcgcggtgttaatcttggtggtgcaatcctctgcagcgttccacggtat

SEQ ID NO: 24600 - DNA, 259 bp, Glycine max
  Clone ID: 700907636H1
tgagccttctaatgaaaagtgtagatgagaatggtgatggtagcaagagagttatttctctgggtatgggtgacccaactctcaccacttattttcccatctcaaatgtagctgaaaaagctgttgctgaagcacttcagtcacacaggtttcgtggctatgctcccactgcaggtcttccacaggccaggattgacattgctgaatacctgtctcgtgaccttccttaccaattatcaagtgatgatgtttacatcac

SEQ ID NO: 24601 - DNA, 254 bp, Glycine max
  Clone ID: 700907637H1
ggtaaaaataatgcacatcaatcatggagtgaacccactgccagaagaatgccaatgccccatgacggtccagctaaatggaattcatcttgcctatcatcaaggaccctagaggatgatgcatcttcttttgccttaaaacacaaaactcaaacacaagaacagatgttaagcagtgaaagaacgtcatctggatctacaacaagcgatatgcaagtaaaaagggtattgtcatctatgagtgctgtgaatgg

SEQ ID NO: 24602 - DNA, 267 bp, Glycine max
  Clone ID: 700907603H1
tgctctgtgtctctcactctctctatatttgcatcattcatcggaaatggctctcgaggttgctgttaaggctgctgttggggctccaaatgttctcggagattgtccattttcccaaagggtcctcttaactttggaggagaagaaaatcccttacaaactccacctcatcgatctcagtaacaaacccgaatgttttttgggtgtgaatcctgaagggaaggtgccagtggttctttttgatggcaaatgggtggctgattctga

SEQ ID NO: 24603 - DNA, 244 bp, Glycine max
  Clone ID: 700907559H1
gacagtctcaccgatgaccagtagagggtgaaagttggtgcaaactgcaccatttcttaataaatgctgctcatatggtgctggctgcaacaagttaatgaatggaatagtgaaaactgcaccagtgtgagtgatcttgatacattaccatatcagctggttgtacatcatctagaattatggccatacttcttagggacaagttttggtaattttaaggagataccgtgttaatggtgactaa

SEQ ID NO: 24604 - DNA, 248 bp, Glycine max
  Clone ID: 700907560H1
catcagctcaatggaggaaccttaggcgagtttgtgcaacaaaaatattctctccacaattgcttgactccactcaaatccttcgccaacaaaaggttaaagatttattggattttgtgaaagaacgatgcaagaaaggtggggttgtggatattggagaggttgtctttacaacaatccttaattccatttcaaccactttcttctctatggatttgtctgattctacatctgaaaagtctcatgag

SEQ ID NO: 24605 - DNA, 248 bp, Glycine max
  Clone ID: 700907562H1
cttcttcccaaccactactaggctgtcattgcagatctcaattgcatcgctgtccatggctaccatcgttcgcatcaaggcccgccagatcttcgacagtcgtggcaatccaactgtcgaggtggatttgacttgctccgatggtacttttgccagagctgctgttccaagtggtgcatccactgggatttatgaggcccttgaattgagagatggaggatctgactaccttggaaagggtgtatcaa

SEQ ID NO: 24606 - DNA, 246 bp, Glycine max
  Clone ID: 700907563H1
ttcagtgccacagaggaggaattcttgcatttggtgaagctatccttgcccattagtccccagattgcttccgtcggatcctgttgcctttttggtgcaatttctaataatgtgttgtatgttgccaacctcggcgactcgagagctgttcttggcaggagggatacggtgagaaagaacagtccagtggtggcacagcgtttgtcaacagatcataatgtagctgatgaagaggtgagaaaagaa

SEQ ID NO: 24607 - DNA, 259 bp, Glycine max
  Clone ID: 700907564H1
ggctcgagattcataatactggtcggtacaataagtattatcctaatctccgctagttcaaatacaccccatgtcatgaaaattcccaccctcttcaataaggcatatacatcatgaagaggtgtgctattagcaatttgcagacatcttaatttgttgaagcttcccattcctagctagggtcagtctcaattgttgaatcgtcatggaacgcaaggggaaaaagcctgttaagatgtccgtgcctcaatttggaggg

SEQ ID NO: 24608 - DNA, 273 bp, Glycine max
  Clone ID: 700907565H1
tcggcattcggctcgagttcaaggctgattaccctccttatgggagggactttgctaaccaccaacctactgggaggttttgcaatggcaaattagctactgattttactgctgacacttacggttttaagacctatgctccagcatatcttagcccacaggcatcagggaaaaacctccttattggagcaaactttgcttctgctgcatctggttatgatgaaaatgctgctactttgaatcatgcgattccgttgtcccaacagttaagtt

SEQ ID NO: 24609 - DNA, 248 bp, Glycine max
  Clone ID: 700907567H1
cacaaaacttgctatagcagtaagctataactcatttgaggctctgtgagaattgagaaatggctaaagatgttgaggttcaagagcaaggaggagagtactctgccaaagactaccatgaccctcctccagcacctttgttcgacccagaggagctcacacagtggtccttctatagagccctcatcgctgagttcatagcaacccttctcttcctttatgtcactgtgctcaccattattggctac

SEQ ID NO: 24610 - DNA, 249 bp, Glycine max
  Clone ID: 700907569H1
ctcgagccgaatcggctcgaggttaaagaagagagaagaaaaatacgaaagttcgatccatggcccgttttcttcaagcgagagtggaaacgcaactggcccttcctcgttggattcgcagtcaccggagctctaatcaccaaactttcccttggccttaccgaggaagatgctaagaattccaaattcgttaaggcgcacaaaaggtgatttctgaatcgtgacatctgcctggctttgcactttatg

SEQ ID NO: 24611 - DNA, 246 bp, Glycine max
  Clone ID: 700907574H1
actcatcgtgcgcttgctcaaataacaattgaagtgtttattgtgtcaagttcagtttcaattttgagtccttagggtgggtttcgtaagatattatttaggtatatccaatgttttattggaggaagtgagctattttgatgaaagataacggatccttcttggatggattgttaatatgaccgtctaagcaaaacatgcctgaacctggcaatttcacgcattaagctgctgcaaaacaagaga

SEQ ID NO: 24612 - DNA, 247 bp, Glycine max
  Clone ID: 700907577H1
atcacatcacaatttgtgcattgcctcgtgtcgcttttcttctttgcttgccaaaaatcttacacacaccggtctcatggggcatgggttctcaccagcaagaaccatggctattggagaatgggcaaccgagggtgttgaccaaggagaataggcatggccgttctgcacaaagcatgtcctccacgtctttgcgcaagaagtctagccgaactcttgtctccaagcttccatgtgccacactcag

SEQ ID NO: 24613 - DNA, 247 bp, Glycine max
  Clone ID: 700907578H1
gctgaaaataaagtgaaagaaggccaaaatacaagcattagtgagaaaagtcctaaggaagagtcagacgttagccagctgaaggatactgatcctcctgatggatctagtaaactagagttgagtgacaagaatactccacaaccattgaaggccaaatctataattgttaagaaatctcaggctggtaaacttaaggctaagaagaacaatggttctcaacagattcgtgggaaaagaagaatta

SEQ ID NO: 24614 - DNA, 245 bp, Glycine max
  Clone ID: 700907579H1
ctccctcagaagcgaagaagaagccacagagaaccagtctcctactctctctcacccacaagaaaaatggcatctcacatcgttggatacccccgcatgggtcccaagagagagctcaagttcgctctcgagtctttctgggatggcaagagcagcgccgaggatttgcagaaggtggctgctgatctcaggtcatccatctggaagcagatggctggtgctgggatcaagtacatccccagcaa

SEQ ID NO: 24615 - DNA, 253 bp, Glycine max
  Clone ID: 700907581H1
aggtaaggtaggttaacactcttcttcatcgtcgtcgcaatgggacgtgtgatccgtgcgcacgtaagggagcaggctcggtcttcaagtcccacacgcaccaccgcaagggccctgcacgcttccggagcctggacttcggggagcgcaacggctacctcaagggcgtggtcaccgacgtcatccatgaccctggccgcggcgcgccgctcgccaaggtcgccttccgccaccctttcagatacaagaagca

SEQ ID NO: 24616 - DNA, 250 bp, Glycine max
  Clone ID: 700907582H1
ccgatggctaatctctcactcttgttcttcggtctcctcctattctccgctgccgtagccaccgtcgaacgaatcgacgatgaagacaaccttctgatccgtcaagtggtgccggacgcggaggaccaccacctgctcaacgcggagcaccacttctccgccttcaagacaaagttcgccaagagctacgccacgcaggaggagcacgaccaccgcttccgtatcttcaagaacaacttgctccgcgcca

SEQ ID NO: 24617 - DNA, 249 bp, Glycine max
  Clone ID: 700907583H1
cgttcgtatcgaagaagaagaagatggggaaacagattgtgccggtgaaatcagtgatctacgcgctctcccctttccagcagaagataatgccgggtctctggaaggacttgcccacaaagattcaccacaaggtctccgagaattggatcagcgccactctcttgcttggtcccctcgtcggaacctacacgtatgttcagaactacctggaaaaggagaagctgtctcacaggtactgaactcatg

SEQ ID NO: 24618 - DNA, 242 bp, Glycine max
  Clone ID: 700907586H1
ggatttttcaattattattatctcctagttgtgctgattgctgtctgaaccaaattctagctcctttcagctgcacaagagtctccaatcccaactctctctctctctccacttgccaaaggaaaaaggctaaagagaaacccacacacacacacacacacagaaatatgtcttccccaagcaagcgccgagagatggacttgatgaaactgatgatgagtgattacaaggtcgagatgatt

SEQ ID NO: 24619 - DNA, 248 bp, Glycine max
  Clone ID: 700907587H1
aaagccaagtccaggacacaaagtccattagcctcagaaaatgcaaaagcagagaaaggttcctttgggagtgcaaagaagcggctttctttcccagcttcacctgccaggccaaggcgccattcaggtccaccaaaggttgaaagcagcagctctaaatgcagagttagctgtggacaagggtgtggacagttgatcatacaagtaaaaggatggaaaagcattaaagtaggattgaaaatatatca

SEQ ID NO: 24620 - DNA, 246 bp, Glycine max
  Clone ID: 700907588H1
cactgtgagtaaaaattctaaatgagccgggcacaggatgcaaaccgatcattcttcccttttggaaatccttttaggatgatatcaccgaaaggcccaaaaatttcttcacagctgttgttattattacatgcttttgaagcaactttggaagagaggctgaaaaagcttattcccaagagcaaggatgagatcctcagcttgtcttggatgactttggccatgcaggcactttgtgagagtcat

SEQ ID NO: 24621 - DNA, 238 bp, Glycine max
  Clone ID: 700907590H1
aaaagcaataaaaaatggggataggggtactatttgttgggtttttcttgctatcttgtgttgtgtgtgtgcagggtgtggagccaaaagcctcacccacttgtacatttccggctgtttacaactttggggactcaaactcagacactggaggcatatcagcttcatttgtgccaattcctgcaccttatggcgacggcttctttcacaagccttctggaatggactgtgatggccg

SEQ ID NO: 24622 - DNA, 243 bp, Glycine max
  Clone ID: 700907592H1
ctgccaccttgagcaatctatgactttttctatttgtagtctgaaatacaacccagctagtggtgaagactcagaaatgcactttgtccgcttgctggatgaccagacttttgagctcatatcaatgagtatggttgcttcataattagctgctccttctcagatgacaataatgtgtattactgtgttggaactgcatatggactgccagaggaaaatgaaccaaccagagtaagttgagaa

SEQ ID NO: 24623 - DNA, 244 bp, Glycine max
  Clone ID: 700907594H1
gcaaagagagtgagaaaagaaggaagaagaagaagaagcgatggcaaatgaactacccgtcaaagcttttggttgggctgcttcagacacttctggcacccttgccccttttcatttctccagaagggaaaatggcgtcgatgacgtcactctcaagattctcttctgcggggtttgccactctgatctccacactctcaaaaacgactggggtttcaccacctaccctgtcgttcctgggcat

SEQ ID NO: 24624 - DNA, 240 bp, Glycine max
  Clone ID: 700907595H1
gctactctggctgttgctcagaatatgcgggatctttacaggctggttcttgttgacactcctctggctccatacttctctgagtgtactacatcagaggacttggatgatatgaacattgaaataatgaggaacactctttacaaggcataccttgaagacttctctagattttgtcagaaacttggtggtgccacagctgagataatgtctgaccttctagcttttgaggctgataga

SEQ ID NO: 24625 - DNA, 273 bp, Glycine max
  Clone ID: 700907601H1
catctgtacttatattctgtttatgtacgttcctgccaaaagcaaacacacctcctatagacactgaaaagccaaggacagagagtgcaatttcaactgtgggttctcttccccacccaactagtacacgttttattgcttatgaagagcttaaagaagcaacaaacaattttgaagcagcgagcatacttggagaaggagggtttggtagagtttttaaaggtgtcttaaatgacggtactcctgtagcaattaagaggcttaccagtggag

SEQ ID NO: 24626 - DNA, 280 bp, Glycine max
  Clone ID: 700907602H1
attcggctcgaggttgggcatcatggtgatactcaacacttctaatggcatggtgaccaacaacaatcctccattttgctgttgatcccctcagtgccaattctaggtccttgagtaagttagaaatgttgggcatcatggtgatactcaagaactcataaatcggcttctccctatccttcaggtaactaaaggttgaggatgaagaacgggagatgatcatggcctctctttcctagttcctctacctaactcttctgattttattttactttcaaat

SEQ ID NO: 24627 - DNA, 249 bp, Glycine max
  Clone ID: 700907557H1
caataacatagcatagagtgagaagtgagaagagaaaaatggcaatctccatacccagtagacaacttttcatagatggagagtggaaagtccctcttctcaacaatcggtttccgatcatcaaccccgctactgagacatcatagggcatattccagccgctactaaggaagatgttgaccttgcggtggatcgtgctaaaagagccttttcccataacaaaggcaaagattggtcttcagctcctgg

SEQ ID NO: 24628 - DNA, 255 bp, Glycine max
  Clone ID: 700907515H1
ctgagaaaaaaaaatggatgtagagaaagccttccacatgactggaggagctggcaaaactagctatgccaagaattcctcactacagaagaagcaatctgataaagtgaagcacataatcatacaaacagttgaggagctctaccttgcaaccactccaaagagcataggcattgctgatttgggctgctcctctggaccaaacaccctatcaatcatcaaagatatctttcaggccatccaaggcataagcca

SEQ ID NO: 24629 - DNA, 271 bp, Glycine max
  Clone ID: 700907517H1
ttcggctcgagctctcatcggagggaaacaatcaataaaagataaaaaaaaacccacaaaaagattataacaaaaaaagtatgaaaggaaaagtactaggttccgcagtttctctcatcataatggtgggtgtggtaattggcgtggttgctgtagttcaaagcccaaagggcgtgaacaacaacaacaatggaggagaattgaaaaccagcaacagggccgtgacagcgttgtgccaaggctcatacgaccagaaacggtgccacgaggt

SEQ ID NO: 24630 - DNA, 257 bp, Glycine max
  Clone ID: 700907518H1
aaatgcccactttttttcttccaacgctcctcctccttctcatagccttcgccacctctgtctccggccgccgtgacctcgtcggagactttctccggctgccctccgaaactgataacgacgacaacttcaagggcacccggtgggccgtcctcctcgccggttccaatggttactggaattacagacatcaggctgatatttgtcacgcctatcaaatattgaggcaaggtggtctgatagatgacaatattatt

SEQ ID NO: 24631 - DNA, 256 bp, Glycine max
  Clone ID: 700907520H1
cagatgaccaagtggaattcatcacaggaatacatgacggtgtttcaacagacgataaatctaaatgggaatgtgtgaggaaaggactttgctgtatatgctgcgaaagcaatattgattctttgttgtacagatgtgggcacatgtgcacatgttcaaaatgtgctaatgatttgctccaaagtagaagaaagtgtccaatgtgtcaagcaccagtggtggaagtgagttgagcttattctatacaatagttttg

SEQ ID NO: 24632 - DNA, 253 bp, Glycine max
  Clone ID: 700907521H1
gccaagcttctcttagcattggatctgaaaggacaattggaggccaagaacccatccaccaagtgcaagtaagcctccaagtcatgacaacacgccatgtcagcatcgggcttaagatatggcgacatcttggtgtgcacacgcagctctgttcccacgtgcgagtatgctaagggcgtgttctcctccaacacacccccaccaacgttccgtattttctgttcaagctcttcgctcacgaagatccctggaa

SEQ ID NO: 24633 - DNA, 252 bp, Glycine max
  Clone ID: 700907522H1
atttgttctccgtcatctcgcgtcgttagttcattgaactcactgcattgagtggatttggtccaagttgagtttagaaatggatggccatcatcagaagcaaaaaaacaagtacagtataattgttcctacatataatgagcgtctcaacattggtctcattgtttacctcatcttcaagcaccttggggatgctgattttgaaattattattgtggatgatggcagtcctgatggtactcaggatgttgt

SEQ ID NO: 24634 - DNA, 251 bp, Glycine max
  Clone ID: 700907523H1
cacaattcattttcgaacgaacgtgtcacagaattctcgccttttccgaatatggcatcgcgcgtcacattggcaatctcacttcctccgcgccgtatattaattcccctcattttcgctcacaacttaagctttccagcaactcctctttgcacaagccactcatgcgcgacaagactgtgctggtaaccggcggagccgttacatcggcacccacaccgttcttcagctcttgctcggaggttgcagaa

SEQ ID NO: 24635 - DNA, 254 bp, Glycine max
  Clone ID: 700907524H1
ctgagggccttccatggcttccgcttgtgcttcctctgcaattacagctgttgccatctctacgccgagttccgggcagaagaatggatcaggaggttgttttcttagtggaaggaaattgagggtgaaaaaggagagagcagcaattggaggacgatcgatgggcactacagtgtgcgcatttgctgagcctgacagacctctatggttcccaggcagcacccctcctccatggcttgatggcactctacctg

SEQ ID NO: 24636 - DNA, 251 bp, Glycine max
  Clone ID: 700907527H1
gaaatttgattcattaataagttcattcactcatttggatgaagagttctctcatatgattcagataaccaaaactcacaagtctcttgaaaatgtggaacttattgctctaagaaatgacattgatctgcaggcaaagcactcgtgggccactttacattcccttcttcattctgaaagaattgcttaccgtcagaatgggtatatctggttaggtgatctgcttatttctgaaatcagtggggaaagca

SEQ ID NO: 24637 - DNA, 254 bp, Glycine max
  Clone ID: 700907530H1
agtaggcaatagaatagatggcagaggaagagtcttatccattgtttgagacaaggagggccaatggaagggtcatttacacaatcttctctttatcactttttgtgggcattttgttcatctgggttttacagagtgagtcacatacccagagaaggtgaagatgggaaatgggcttggattggtttgctttgtgctgaactatggtttggtctttattggctcctcagacaccctttcagatggaaccctgt

SEQ ID NO: 24638 - DNA, 251 bp, Glycine max
  Clone ID: 700907531H1
gtctgaacctcaaggagaccgagctttgcctcggtttgcctggtgggggaggcggcggcggcggcggtggtgaggtggaaactccaagggccactgggaagagagggtatctctgagactgttgatctgaaacttaatcttcattccaaggaagatctgaatgagaatctgaagaatgtctcaaaggagaagaccctccttaaggatcctgccaagccaccggctaaggctcaagtggttgttggccacca

SEQ ID NO: 24639 - DNA, 254 bp, Glycine max
  Clone ID: 700907532H1
cacagtacaatgagcggaacacattctatggattcagggaaaccaaggcaggaatcttatcaaagtcatgcaataccatgagatcctctgaatccacagtacaatgagcggaacacattctatggaccctttgaagaggattttttagaagattttgtaagacaaaacctgattcctttggctgtgcctgtatcctatgaaacactcaagttgatgaaagcagatggaaggaaaatagttttgacaattgttga

SEQ ID NO: 24640 - DNA, 257 bp, Glycine max
  Clone ID: 700907533H1
ggttgttgagattgagaaaaatacagagagacactgtagatcagatgccagatcgaaccaccaagacctgcaatttttaattttaattcagattcccttttcacttttaatccaaaaccctaatttcctttttctaccctccagtgtcgccgtttctcaacaattcttaccctaatcatcagccatccaccaataacgattcaaaaacccaaactttgtgtgaagtagttcactccccatcactcgttgtttttttt

SEQ ID NO: 24641 - DNA, 253 bp, Glycine max
  Clone ID: 700907536H1
agcaccgaagcgttaactccaatggcgtctcttccacttccttcactcgtctatctcggactcttcttccttcttcttctttcaaattcaggcctcttccttcttcacctcctcgcgccgccgaaaacgccgttcccgaaagcgcacagcacccgtcgaaaacccgctcttcaaaactctcgaactcggcgccttgtttggcttatggtacctcttcaacatctacttctacatctacaacaaacaggtgttg

SEQ ID NO: 24642 - DNA, 252 bp, Glycine max
  Clone ID: 700907537H1
gttgggattgcagagagaagggtggttagtgttagaataggctgagtgtggatggggaaagaggaggaagagatgaggggtgagattgaggaacgactgattaatgaagagtacaagatatggaagaagaacagtcctttcttgtatgatctggtcattacgcatgccctcgagtggccttccctcactgtggagtggcttcctgaccgccatgaaccacctggcaaagactactccctccagaaggtcatc

SEQ ID NO: 24643 - DNA, 250 bp, Glycine max
  Clone ID: 700907538H1
ctcaaaacccccacttcgcgttacagggagggacaggctaaaacaatcatggcggcgcagtggtggcgctccgccgccggccaccttcgaacggtggcggcgggccgtggttccttgtcgggattccagcgcacacttctcacacgatccaagccatcccaagggagtgcagcggcagccgagtctcggcgagagaccgaacgcaaggtcgaataccttgcgtcgttttcctccagaaccttctggaaaa

SEQ ID NO: 24644 - DNA, 252 bp, Glycine max
  Clone ID: 700907540H1
atctttgccttctgcatgttggttctctgtaaacagatactgcaaaagaagaataatattgaatatttggttgggttgaatccctgggttgaagcgttgcagacatcacggctattctaagagtgtctcgctctctcattcatgtcccaactgtacgacggaggacaggttgcgtaactgccaccaacccttcgccgcacggtgggcgtggtgctttgccttctgaaggtggtagcccttcagacttgctct

SEQ ID NO: 24645 - DNA, 253 bp, Glycine max
  Clone ID: 700907541H1
ctcgagccgctttcctttcttctgctagtgtttcaaacgggaaaaatgagggtttggattctcggaatctcacatgaggatgagatggaggaagaagctcctgagacaagtaacaacacaactgaacttagtttgggaagctttggcgggtttgggattagctcaagccccaacccatcaatgcctaagacaaatccttttgggggttcatttaataatgtaggaacaagtttatcaagctctacagttacat

SEQ ID NO: 24646 - DNA, 249 bp, Glycine max
  Clone ID: 700907543H1
gagagagagagggagagggcatgggaatccgatcggtattcgatggcggcgagctgagaagggaagtggagaaaagtggaattgacccaaaattcattccaaagatatggaagcatatcctcatctctgccaaagatgaagattgggattgggagaaacaagttccctccttgccctcttcggcctactctctccttcgttccaacttcaaaacccctctctcttcctctattcactccgttttccact

SEQ ID NO: 24647 - DNA, 249 bp, Glycine max
  Clone ID: 700907544H1
tccgttctgattataaggatgcttttgttgaaaagcatggagtcaaattggggcttatgtctggctttgtcaaagctgctgtcaatgcactccaacatcagccgattgtcaatgcagtcattgatggtgatgatattatatacagagattatatagatatcagcatagctgttggtactccaaagggccttgttgtaccggttatccgcaatgctgataccatgaactttgctgatatagaaaagcaga

SEQ ID NO: 24648 - DNA, 250 bp, Glycine max
  Clone ID: 700907546H1
accctctatattccattacaaagaaccagtttggaatatatttttattccttctttgtttcttcactttcttccatacacataaccatgtcttctcagaccgttgtcctcaaagttggtatgtcatgtcaagggtgtgctggagctgtaaacagggttttggaaaaaatggaaggtgttgagtcatttgacattgatctgaaggagcagaaggtgacagtgaaaggaaatgtgcagccggacgaagttct

SEQ ID NO: 24649 - DNA, 246 bp, Glycine max
  Clone ID: 700907547H1
gaatgctgaaacaagctctctatcctttctggtagcaatgccctctgcaactgcaagcttcggattcttcttctgtcgacaacgcctttcttcttctttccccttccctccgcgtccaagactcctctccaccactcccaccccataccctctccaatacgaactcatcatcaaccgtccttcttaccccgactctccccgcccaccacctgctcgacctattgactcccctgaacccgaactcaa

SEQ ID NO: 24650 - DNA, 249 bp, Glycine max
  Clone ID: 700907548H1
agctgatctagtactactatcaatggccggacaaggagatggtcctgctatcggaatcgatctcggcaccacctactccttcgtcggagtgtggcagcacgaccgtgtcgaaatcatcgccaatgaccagggtaacagaaccacgccgtcttacgtcgctttcactgattccgagcgtttgatcggtgacgccgccaagaaccaggtcgccatgaaccccgtcaacaccgtcttcgatgttaagcgttt

SEQ ID NO: 24651 - DNA, 254 bp, Glycine max
  Clone ID: 700907550H1
ccctaaccctaaaaccgaatcttctcatgaaacctcccacgccacactcctccttatcagaatcaggttcgattccctaaccctccacaaatcgctttcttttctttgcagtttctccatggagggctctgcagaggatttcggagcccccgagtcatgggaggtcgctgatttggacgagtccatgaaccgcttgaacctcatgctctcttccaacaacgattctaagtaacctcaccaacgtgtcgccgatg

SEQ ID NO: 24652 - DNA, 69 bp, Glycine max
  Clone ID: 700907552H1
gagacacctgatagggttttgggtgctttggctgataagtatggactcatattcaccatcagcaatggt

SEQ ID NO: 24653 - DNA, 255 bp, Glycine max
  Clone ID: 700907514H1
ctggattcgagctaacctttgccttttcctttgggcccaatttaggagatctttttttcgggtattgaaaagtttattcatcatttagattcagactcaggttcaataaatatttgtaaattatttatgaataagatttacatattagtagtgaaaatcaaacaatgtttacgtggaatatgaattcattccttattggaccgacattttttttacacccaatttagagaataatatcctagcaaaatgggggat

SEQ ID NO: 24654 - DNA, 254 bp, Glycine max
  Clone ID: 700907474H1
cgagcctgcaaccgagaagagagaggattttgggaagttgcagtacggatgcgagcactataagagacgatgcaaaattcgagcaccatgctgcaatcagatttttccatgtcgtcactgccacaacgacgccgcgaactcatctagcaaccccgcagatcgtcatgaacttgttagacgcgatgttcagcaagttatatgctctgtctgtgatactgaacaggaggttgccaaggtgtgttctagctgtggcg

SEQ ID NO: 24655 - DNA, 253 bp, Glycine max
  Clone ID: 700907476H1
aagaaactgggatttgcatcttgtaagcggatctcaggtgccacagaaggagttaatgtgctgatggagaagaaaagtcttgatgggaactgggaatatggtgtgtcttgtattgaatacacagagtttgacaagtttggaattactaccggacctcttgctccaaaaggtttgcaggcagagttccctgccaatacgaacatcttatacattgatttgccttctgcggagtagttgggtcaagtaagagtga

SEQ ID NO: 24656 - DNA, 259 bp, Glycine max
  Clone ID: 700907477H1
cataagaatttgtcattacaattcttgaacaagaacaattccgtccacgggaatattcatgattcaagctatgaggcaggacttgacattggcggttcaatcttcaggtttgggtaagcaggaatcggcaatcgaacctgccaaggagtgccttaagatgacaaggaggatgggtccttcaccaatcaagaatgctgctagattatcaattacattatcgaagtttgtggcttataggaccgatatagaatggtacaaa

SEQ ID NO: 24657 - DNA, 256 bp, Glycine max
  Clone ID: 700907479H1
gatctttgatgggcacaatggtatatctgctgctatttttgcgaaggaaagcatactaagtaatgttttgagtgcaataccacaagatatcagtagggatgagtggcttcaagctctgcctcgtgctctagttgttggttttgtaaaaactgacatagagtttcagaaaaaaggggaaacttcaggaacaacagctacatttgttctggttgatggatggactgttactgttgcatctgttggggattcccgttgc

SEQ ID NO: 24658 - DNA, 261 bp, Glycine max
  Clone ID: 700907480H1
gaagaactaaaatcaaaagatataaagaagctcccgagcgtcgaattcttgagagaagtccttaactccgtcatgtttcttcttcaaaaatctatcctgaaactactcattatacactggccgttcccgataccaaaaataccaaaaaacttctggaaaccaaagtcccagaaaccaaagcaccctcccccaccgccagactaccgtgtacaactaaagtccgatcccccagcgccaaacgcaccaccgaagcaaatcaat

SEQ ID NO: 24659 - DNA, 254 bp, Glycine max
  Clone ID: 700907482H1
tattctttcgcaccttgcagaatcaattttctctctcaatcgtctttactggctcgtaccaagcaaaccgctcgcaaatccaccggtgggaaggctcctaggaagcaactcgccaccaaggctgcaagaaaatctgcacctaccaccggtggagtcaagaagcctcatcgctatcgtcctggaactgttgctcttcgtgagatccgaaaataccaaaagagcacagagcttctgatccgcaagctcccctttca

SEQ ID NO: 24660 - DNA, 256 bp, Glycine max
  Clone ID: 700907483H1
cccaactcaatttttctctcaaccggcccaatttagcataagcccagcatggccaccgcaacagcagcagccacctcgtccttcatggggacgcgcctcctggaggcccactccggggcggggcgggtgcaggcccggttcgggtttggcaagaagaaagccgccgccccgaagaaagtttccagggggtcgggctctagctccgataggcccctgtggtatccgggcgccaaggcgccgatgtacctggatggga

SEQ ID NO: 24661 - DNA, 257 bp, Glycine max
  Clone ID: 700907484H1
cgtcttcctcctcagcttcgcaatcgcagttcgcctattcaaacccctcctcctcctcctcctacttccccgttccctttcaccttcagcaacccgcaaccactcactacgctgcgccctacgtcgccgccccctccgtgcaaatccccgctcctccagtcgtcggccccgttgcgcccgcccctgtacccggcgtatactccgccgtgccgcaatatcaggcacagcagttatttgagagggatgcgcagataata

SEQ ID NO: 24662 - DNA, 255 bp, Glycine max
  Clone ID: 700907485H1
cataaatctagctccaattcctaatcacctggttaatttcttcacatagagctatcaagatccaacgttaacatgaagaatgttttagtaaggtcagctgcgcgagctctgcttgagcggcggtgggcggagctactaccgccagctctcaacggcggcgatcgtggaacagatacaccagcacggtggcggcgcgtttggaagcttccacttgcggaggatgtccactcttccagaggtaaaggatcagcactc

SEQ ID NO: 24663 - DNA, 242 bp, Glycine max
  Clone ID: 700907486H1
cgacttgactcctcttcctcggttagctccctcggtccttctctctcgcgaggctatgccaggaatgcccgcggaacagtggcagtgcacgacacgactggcggagctgtcatatcgctggtacaagccactgcatgtagcggtgctccacaagctccctcgagacccctatgatcttcgcgaggactccctcgtcgtatcctcagtgtgccgcgcttgcgtactgcagagtcctctcgctc

SEQ ID NO: 24664 - DNA, 254 bp, Glycine max
  Clone ID: 700907487H1
aactgtttgaaagagccatgcaagagacgtaatctgcaggaaggagcaatgaatgctagagcatgggcttccaagtcccttgccaccgtttcaattggagaggaaagcagcagccgtgggatgcatctgtgagttgactgtactgtgcaatttttcttgaaattggagattagaatataacctataaaaggcttggctgcaagttatgccatgtagttttgtttcaggatcatcttcacaccctctggcctcgt

SEQ ID NO: 24665 - DNA, 254 bp, Glycine max
  Clone ID: 700907489H1
gttgctttcatgggaaagcttcacctgacggaatctcctcctaaaaatatctcattggaagtggttgttgagcctcagcaacaaaatcctaagcggaaaaacgattctgaaaagctaaaccataaaacagaatgttcagctgagaatgcagttgcaaaaagaacatctttttcgtccccgaaaaatggtagccaccttgcaaatcacacccccttttcaggaactccacaccaagcaaatgtagcttctgataa

SEQ ID NO: 24666 - DNA, 154 bp, Glycine max
  Clone ID: 700907490H1
ttgtgttattgggtggagtgtgagaatccaaatatctgtatctatcgatctccctctgcagttatccatattgtggggcgcatttgagcaacaatggtgcacacaacagcagagcctaaggagggagagtcgatcgggaaactaacggcggaag

SEQ ID NO: 24667 - DNA, 248 bp, Glycine max
  Clone ID: 700907491H1
atcacaaccaaggagcttggaactgttatgcgttcattggggcaaaacccaactgaggcagagctccaggacatgatcaatgaagtggatgctgatgggaatggtaccatcgacttccctgagttcctaaatctcatggccaggaagatgaaggacactgattctgaggaggagctgaaagaggcattccgggttttcgacaaggaccagaatgggttcatctctgctgctgagctccgccatgtgat

SEQ ID NO: 24668 - DNA, 163 bp, Glycine max
  Clone ID: 700907493H1
gtacgcacgcacttcagttcgagcgaagatccatagaaggttgaatataatagtcagacatcatgttacacagtataatcttgtgagatatcatttcggggattaagtttgtgaaggagaaaaagctgataacagatgttctattcttgttctgatttgcttg

SEQ ID NO: 24669 - DNA, 124 bp, Glycine max
  Clone ID: 700907494H1
tgcatcagctgagggtaccaagtgatatgctgccagacgttaacccagggcctgctgaggaccagacgcaatcgacgtccgctgacactgttcacgcagacggtgctaataccgatccgtttgc

SEQ ID NO: 24670 - DNA, 261 bp, Glycine max
  Clone ID: 700907496H1
gtaacaattcctcaatacttatttcttcttggacttaaatatacgtctgccacattctcatgtgcgttcctcaacatggtgcctgtatttacgttcattatggcagtgccatttgggtaagttaaacaaaaggatattaaattgattgtggaatacaagaacaataatttttatcctttgggttgaaattttactaggatagagaaggtgaacgtgcaaagcaagagtggtaaagccaaagtcatgggaacttttgtgtgc

SEQ ID NO: 24671 - DNA, 258 bp, Glycine max
  Clone ID: 700907504H1
ttcaactttcaagtgttcaaatgggggcaatttcaacaccccttgtgttggttcttctattttgctgcctggtttctgtttcacaagcagaatacttgaagtacaaagacccaaaacggccactgaatgttagaatcaaggacttgttgaagcgaatgaccctggaggagaagataggccaaatggtgcagattgaacgaagtggtgccacccctcaagtgatgaagaagtacttcattgggagtgtgctgagtgggg

SEQ ID NO: 24672 - DNA, 258 bp, Glycine max
  Clone ID: 700907505H1
gtttttctctctttcacttatttattgactctccataagcccttcaaacctctctctattcctctctactagtcaccttctcccttccattcactccacttcttaacacccccaaacagaacaacggcagagcaagcagccagaaaaatggtgttgctgtccaaagcaacaacagaacaatactcctacatcaagaactacatgccaactgcattctcctcaacaattcccatagtggacctctccaaacccgatgca

SEQ ID NO: 24673 - DNA, 254 bp, Glycine max
  Clone ID: 700907506H1
cttctcttcactctttttaaaaaaaatggttctcaccatttccacattagacacacataaaaccattcccaatagccgcctctgataattgattactatcaacccaacttcaagttgtgttcttttgtggtgtgtaaccgtattctgtatttgttttcatcaattggaaactgggttttctcgctttttgcagataagcatcaataggatactagatcatggattggtactatgggaacggcattaatgattat

SEQ ID NO: 24674 - DNA, 253 bp, Glycine max
  Clone ID: 700907507H1
gttggaatgctggttgctttacttctaggtttaaatatgtcatggactgcaattactgctgcacttgctctcatagttcttgatttcaaagatgctacaccatgtttagagaaggtttcgtattcacttttgatattcttttgtggaatgtttattacagtggatggcctcaataaaactggaattccaagtgctctgtgggacataatggagccctattctcatgttgatcgtgctagtggaattgcaatac

SEQ ID NO: 24675 - DNA, 255 bp, Glycine max
  Clone ID: 700907509H1
ggaaaatatctggctagtggtggtgaggatggtatggtacgtgtgtggaaagtggttgaggatgagagatcaagtgaattggacattctggacgatgatgcgtcaattatatatttcaaaataaataatttttcatgcgttgctccccttgatgtagataaagagaagttagttaaaacagagaagttgaggagatcctctgaagcaacctgtgtgattgtcccaccaaagaccttccgcatatcatcaaaacct

SEQ ID NO: 24676 - DNA, 254 bp, Glycine max
  Clone ID: 700907510H1
gatggcaaagctatttttgaaacaggcaaagcaatacgcagatgcaagaccaagctatcctccacaactcttccaattcattgcttccaagactccctctcactacctcgcttgggacgtcggcactgggagcggccaagctgccaaatctttagctgcaatatacaagaatgtgatagccacagatgctagtgacaaacaacttgaatttgcagccaagctcccaaatgtgagataccaacacaccccttcaa

SEQ ID NO: 24677 - DNA, 252 bp, Glycine max
  Clone ID: 700907512H1
caaggtgttgaagatgcctttgagctccttcatgaaatgaatgaacgtgtcaggacagggatctgggttggggattgttttatctacagcaattcttcttggaggcttaactattgtgttggtggtgaggttactacaatgtttcatttggaccgtcctatgtacttgttgggatatcttgccagccaaagtaaggtctatttgatagacaaagaattcaatgttgtgggatacacactacttttaagtttg

SEQ ID NO: 24678 - DNA, 254 bp, Glycine max
  Clone ID: 700907513H1
caaagagccattgaactttgactataatattcagagttcagattactcactctaatcttctaagttttcattttggggtttaagtttctgaaggaaaaattaatgataaagtttgttctatttttgttctgctttgcctctgcactgaccctttcagtatcggagtccaaatcagcttcagtgcaacctcatgctgctgaatctttctctgttggatatattcagatgaagactgcagcgaactgttcttacct

SEQ ID NO: 24679 - DNA, 249 bp, Glycine max
  Clone ID: 700907472H1
cttctggtcacattcttcctcgccaccacggcttttgtaacatcgtgagtggtgcctcatttggcttctcctgctagagctaatttatcaaatagcatttttttttttctggagtgaggatacaatttttttagaaatatatcagtttattgttttcttctgcaattttagggttatttaaacccctaaaatcactatgctaaattcccgagtagtagctagagtcggagcttcgatcgttaaacacct

SEQ ID NO: 24680 - DNA, 267 bp, Glycine max
  Clone ID: 700907432H1
ctacattagttcttgttattcattattcattctcagcttcttttcttctggggggcaaaaggggtcacttttcagatccgagattgagctcctttacccatcatcatcatggagctcctcgggtacctgaatcagggtcacccttctagaggaacaacacttgttattactctttcattggtgctttcgacacttgtgtccttctccactttcacacatgccttctctcccttctgcgtttccggaactgaatcctataaaacctag

SEQ ID NO: 24681 - DNA, 257 bp, Glycine max
  Clone ID: 700907433H1
cccttttctgtttccaatcgtttctcctcacattctcgccgaagctcactccaaatgaacggagaaggcctcgccgccgacgactcctcgccggatcacgtcaccaaagactggtactccgtgccggagctccggttgcgcgatcatcgcttcaaggttcctctcgatcactctctgggaccccattcttctcccaagatcactgttttcgctcgtgaagtcgttgcaggtggacctgggtttgagtgcgggcggcc

SEQ ID NO: 24682 - DNA, 259 bp, Glycine max
  Clone ID: 700907434H1
ggtggcttgatggtgatgagttcattgtgtcttccatgcttgaaattgctaatatcgcccaagaaggaaagactgcattagaagaaaaggactactccaaatttgcagctctcatgaatcgaaattttgacctgcgaaggttaatgtttggagatgatgccctcggtgatttgaacctaaaaatggtagaggttgccagaaaggttggagctgcgtcaaaatttaccggtagcggaggagctgttgttgcattttgtcc

SEQ ID NO: 24683 - DNA, 257 bp, Glycine max
  Clone ID: 700907435H1
cttcttctgcgtcatcttagggttttggtttgtgctcctctcactgattttctggagatggcttctttcgggccaaatggaactgaaaatgaggattcgttgcctcccccacctcccgttgtaccatcagatgttgtacctgttaaagctgagccggagaagaaaaaggcttcaaggtttccaatagccaggcgtggccttgcttcaaaagggacgaagctgcaacttctcaccaatcagtacagagtgaacgttgc

SEQ ID NO: 24684 - DNA, 173 bp, Glycine max
  Clone ID: 700907438H1
cttgattcttctcatactgaagacttacttccagaagtgattatcaaatgtctcaatgaatgggatattgactgcaagctttttgccttgacacttgatgattgttccatcaatgatgacatcactgcttagaagtcaagtgagcgagttctctggacaaaagcgcctgtttt

SEQ ID NO: 24685 - DNA, 255 bp, Glycine max
  Clone ID: 700907439H1
agtgtactatgtgatgaaaattagtttatattttttcgctggatatcagtacagccttccatagtagaatcttattgtcaccaaagtgctattggtctggtgaaaatcagtaaattttcggtgcacagtacctattaaagtattaaggtatgattacgtggtggagcagcagcgacagttttctacaatttgaggctaaaacatccgacgcttgacgtgccagagatcgactacgacttggcacttcttttccaa

SEQ ID NO: 24686 - DNA, 159 bp, Glycine max
  Clone ID: 700907440H1
tgagcccgatgtcatccatttcatcgtccatgtccatggatatgaagctaaacctgtttttacttcttgtcctttttgcttctacaatttcctcttctcttgccaagggctccttgcaacaaacccttcttccttcagaattcaatgactgtagtaatg

SEQ ID NO: 24687 - DNA, 159 bp, Glycine max
  Clone ID: 700907441H1
ggaaatatcaatatgctgcttgacaatgtaacgagcactagcactagcactacccctagcaaatatcctctattgagaagaaggcgtaggttgattgttatagcatctgatttgtatgacaataatggagctccggagaagaaaatgattgagatggtg

SEQ ID NO: 24688 - DNA, 255 bp, Glycine max
  Clone ID: 700907442H1
cgcgtcgctgctccgtaccagtttcactgcataaatttgagagaaaactctgcaaacatgttggtttatcaggacctccttacaggtgatgagcttctctcggactccttccgttacaatgaaattgagaatggaatgctgtgggaagttgaggggaagtgggttgttaagggagcagttgatgttgacattggtgcaaacccttctgctgagggtggagaagatgagggagtcgatgacgcagctgttaaggtt

SEQ ID NO: 24689 - DNA, 158 bp, Glycine max
  Clone ID: 700907443H1
aaaggaggatgaagttctatatgaggccacatttgacttaccagaagctttcgggaatgtgggtgctgttttagtacagacatgaggaccacaatgaggtgtttctaaagagcatagtccttgatggcttcccaaatggtcctctgcactttacctgc

SEQ ID NO: 24690 - DNA, 262 bp, Glycine max
  Clone ID: 700907447H1
gtggagtagggtttttttgcgtttgagagaagcatgagcaggagtttgggaattccggtgaagctgctccacgaggcttcggggcacgtggtgacggtggagctcaagagcggagaactctacagaggcagcatgatcgagtgcgaggacaactggaactgccaactcgagagcatcacctacactgccaaggcatggcaaaacatcgcaacttgagcatgtgtctattcgaggaagcacagtcaggtttatggtcatccca

SEQ ID NO: 24691 - DNA, 257 bp, Glycine max
  Clone ID: 700907449H1
gcgttatagattatagattatttacattgacacgatttgtcagtatgagtaactttttatggattctttgccaatccatgtggattaaagatatataacattcttttcattgacctaaatgtagctaagtgtctcttcaaggattagcaacgcaaaaatcattctaattatagattgtgacatgtactcaaaccattcacaatcagtgagagatgcccttctgttttttcatggatgaagagaaaggccaagaaatt

SEQ ID NO: 24692 - DNA, 257 bp, Glycine max
  Clone ID: 700907450H1
caactaacgatttcttttgtgctgagtttgacggtgaatcagaggcaggcgtacgtatacgtgtagtagtcggattgagagcatggacgctcccctgctgctggtgaacggcgagggggcggcgctggtggcggagaatggtgactacgtggcggtgagggagctgaaggaggtgaagaaggtgttttggattgagaccaagagagtgtgggagattgcgatgcccatcgttttcaacatatggtgtcagttcggtg

SEQ ID NO: 24693 - DNA, 255 bp, Glycine max
  Clone ID: 700907451H1
ggcttgcagtgacattaggtgcaatgaaaatttcctatattgtgggaaccagcacatggaaggttatagtgcttggaataaaacaagtgaagatattcagtcaaggtgctctgcagatggtgatcctgcgcattttgattatggaatttttgggcaagtcttgtcttctggcatcatttcatctaagaagttcatctccaaatactgttactgtttatggtgggggctccagaatttgagtacacttggccaggg

SEQ ID NO: 24694 - DNA, 101 bp, Glycine max
  Clone ID: 700907452H1
cacaaggctggcatcaagctcgtcctagagttttgcaaatggaagcagcttcctctatggctctctcttccccgtcctcggctggctacggcgtgaagcta

SEQ ID NO: 24695 - DNA, 254 bp, Glycine max
  Clone ID: 700907454H1
ctctcacacacactttctctctctctctctctcacccagatcttgtagcaatggcgagcgctcccactccacgcgaagagttcgtgtacatggcgaactggcggagcaggccgagcgctacgaggagatggtggagttcatggagaaggtctccgcctccgccgagagcgaggagctgaccgtggaggagcgtaacctcctctccgtcgcctacaagaacgtgatcggcgctcgccgcgcctcctggcgcatca

SEQ ID NO: 24696 - DNA, 257 bp, Glycine max
  Clone ID: 700907458H1
cgcagagcgatggccctcacagctttgcggtcacgcgtgccgtgccggggtcatcctgtggagatgttcttcgagtgatgcagcaccagcccgagctcatgttcgagacactcaagctccgcgcgcaggagtatgtcagccacgacaacgcagcagcgcttctggctgctggccttgatcgcacctttgacagaatgccttatctgctgtctctgtcttcctttgtggctgacgatgttgctcctgctgttcctgct

SEQ ID NO: 24697 - DNA, 261 bp, Glycine max
  Clone ID: 700907461H1
attctctactctctcacttctttctatcacatttcacttgcaagatggcagcgtcatcagcatgccttgtagggaatggtttatctacacggggtaatagaataactctcaagaaggacttcaatggaagatatctctactcaccttggagactttcatcattgaacaataaggcatcagaagcattttccataaagtcttccttggagcaaaggcaacaacaagagaggagaagggggtttctaaaactgttgcttggaa

SEQ ID NO: 24698 - DNA, 258 bp, Glycine max
  Clone ID: 700907463H1
gcttgtcatgcaccaaatcaaattgtattaccaactgcggaggagtttcaaccattgaactattatgacccaagaaacgagctattggatgataaattattctcccctgtacttgcacatattcaaccagaatttcattatcaagcaaacatcgaatcagatgattggtatgggcttcaatatggtacaaatgagacaaacatgtcagactttttgaattcagttgtgaattgggatcaagtatcctttgaggatctc

SEQ ID NO: 24699 - DNA, 263 bp, Glycine max
  Clone ID: 700907464H1
gtttgagggatgaatttgatgttgaagtaccaatttattttcgtggtggggaagatggctctgttactgcgtatgcacgaatttctcgtcaggtttacaacaaggttgaggactattataagttcaggaatgcggttaatcaacttgtgcaagatgggtttacttgtgctcttctttcggcttgaaattggggtagcctatgctctgctcttagttttaattaactcctcaataacatattcgtccattttatatgtgggata

SEQ ID NO: 24700 - DNA, 254 bp, Glycine max
  Clone ID: 700907466H1
gggttttccaattcacagagcaacacaacgaaccaacaatggcgcagctcagccgcagtcgcagccgcagcacgggcaagcagcgctggagcaggtgcagtgcttcggtcgcaagaagaccgccgtggccgtgacctactgcaagcgcgggcgcggtctcatcaagatcaacggctgccccattgagctcgtggagccggagatcctccgcttcaaggccttcgagcctatcctcctgttgggtaagagccgct

SEQ ID NO: 24701 - DNA, 257 bp, Glycine max
  Clone ID: 700907467H1
tgggaatctaaataggaagtcatgtgcttcagctccaaggcattcactattcagaggtactaagcgcatcggtcggtccaaattatgaagttgttcccatatctaacttgaggagatactttatgataaacctgtttgaaatatcagcaatttccctagacaatacaggaagatatgatagattttggtgcaataattggctgttctgtctgcagtggacatgtaatggttgcaatggttcaacaattaattccttg

SEQ ID NO: 24702 - DNA, 256 bp, Glycine max
  Clone ID: 700907468H1
gtgattccggaacagctctgtttgctcttcacttttaccttcatgaacgcgtacagtcattgtcataggtctccttgtcgtacgacgatgctacaaaatcattttgttttccaatatctgtttttttcttgcattatttattttggatcttaggagtagtaagtaaacacagcacctcaggttttttattttggcagatatacatgttttttgttacacaaatattttgtatctttgcttgaaggataagcataat

SEQ ID NO: 24703 - DNA, 158 bp, Glycine max
  Clone ID: 700907469H1
gaaggattgagaaaaagaaagtggtgtccaagcaatggcaattatctctggtatcccttaatttatatgaatgttgtcacagaggcctttcttttccttatgatgttgctcttgttcctaccaaagcagcaacattaaaattaaaacatggcatcttc

SEQ ID NO: 24704 - DNA, 261 bp, Glycine max
  Clone ID: 700907431H1
gaagaaagttgcttgaggtcactatcggcctacttcgacaagaggtttctagtgtagcagccgggccattgtttcctaggttgagagatgattgtgacaactttcagaaagatttggtgctcttgaaggaaagaagagcaatcttttgtgaaatgaacaaccttggtagtggtcagattgacaatgaggaagtttctcaaggggcagttggtccaatgcaattagagctggatgacataagatagagttgttactggtgga

SEQ ID NO: 24705 - DNA, 251 bp, Glycine max
  Clone ID: 700907470H1
tatctaaccactactataatgctttgctttgttttgctacccctcttcctctcctgtcatagcctctccatcaaatgatcaatcacttaacagctgcctcccactgctcgtacatcttgtatctctcctttgtggggattcactgtgagtagatgctactaacacatctttacggagcatcattcatcattgttctgcattacctctcgtgttcaatatggatcagtgctttaactaaacatctgtgaagg

SEQ ID NO: 24706 - DNA, 117 bp, Glycine max
  unsure (1)..(117): unsure at all n locations
  Clone ID: 700907471H1
atcatcatagacacaatgggggatctggggacacaaaatggaaatgttgcaaaactccttagatatcatatcattctcacctacgggttttagctaaccctncagccatcccagcgt

SEQ ID NO: 24707 - DNA, 264 bp, Glycine max
  Clone ID: 700907388H1
cacagattaatgaaaaatcagagaacgattttattgggaatattcctggttcagaagcacaggctgctgcaacttcaacaaattcagagccgaataaaaggccaaccccaagtcccttggataattgtcaacgtgaaacacattcacatgagttggtggatgggcaatcaacgagtcaatcatattttacagaccaacaaaggccacttggaaaaactgaaagtgccattggaattcctcagcatgagcagaatcccgcgccag

SEQ ID NO: 24708 - DNA, 261 bp, Glycine max
  unsure (1)..(261): unsure at all n locations
  Clone ID: 700907390H1
agattccaaatctcttcctctttagtctttataccgaaatggaatgcgttgaatcacgattcattaccttctcgactgttgctaggttatgttaactgttaccttttattcatatattacttcacactgcgcgttacttgatcaccaatcgtgcctatattagaactccggggtcaattcggatatgtcttctgatagtgcaaaggaaaatgcatcagtagttgattcgtangtcactgaagggaggaatgacattggaaa

SEQ ID NO: 24709 - DNA, 267 bp, Glycine max
  Clone ID: 700907391H1
gttgaaaatactttcattgtaattatgctatcaaagagtaagagcccatccggtgaaggatctactacttcaactgctccatcaaccaaggccccacagacaagtacagttcctgcttcaacccctccagcgtcagtagttcctcaagcttctgctcctgctcctgctcctgctcctgctgcaactggggcactgcctgcatcagttactgcacctatatcttcaccttctcctgctccagccccaactcctgctcctatatcttca

SEQ ID NO: 24710 - DNA, 266 bp, Glycine max
  Clone ID: 700907392H1
gaagagcatttggctgtcaagcacttctcagttgagggacagttggactttaaggctatcctctttgttcctaagagggcaccttttgacctctttgacacaaggaagaagcctaacaatattaagctttatgtccgccgtgtctttatcatggacaactgtgaggagttgattcctgagtatttgggctttgtcaagggtattgtggattccgaagatctaccactcaacatttcaagcgaaatgttgcaacagaacaagatctt

SEQ ID NO: 24711 - DNA, 265 bp, Glycine max
  Clone ID: 700907393H1
aagaacaacaaagtaacgtgaaagagagagagatggaggcgattgttccagtggtggatttccagaggctttcagaggaagaggagcgcaagaagctgagaaaaacatgtgagaaaccagggtgtttcagaatcatcaaccactcaattccactaacactcatggctgacatgaagtcagtggttaaatacttgcatgaccttcccacggaaatcaaaatgcgcaacataacctccgtccctgagagtggctatagggcggcaat

SEQ ID NO: 24712 - DNA, 265 bp, Glycine max
  Clone ID: 700907394H1
gagaatccgaggcgaagagaagagaaaaattaagatggaggggaaggagcaggatgtgtcgctgggagcgaacaagttcccggagagacagccgattgggacggcggcgcagagccaagacgacggcaaggactaccaggagccggcgccggcgccactggttgacccgacggagtttacgtcatggtccttttacagagcagggatagcagagtttgtggccacttttctgtttctatacatcactgtcttaaccgtcatggga

SEQ ID NO: 24713 - DNA, 261 bp, Glycine max
  Clone ID: 700907402H1
caaaaacctctatggctattcttgcttctcctcactctcctctcaagctcccaagccaacaaattcaacgttggtggaagcaaagggtgggttccaaacccttccgagagttacaacaattgggctggaagaaaccgattccaaatcaatgacacaatagttttcaagtacaataagggttcggattcggtgttggaagtgaagaaggaagattacgacaagtgcaacaagaccaacccaatcaaaaagtttgaaaacggt

SEQ ID NO: 24714 - DNA, 257 bp, Glycine max
  Clone ID: 700907403H1
atcagaaacaaagaaccctagtaatgccgccgatggggaggaagcgaaaggtagcacccaaatcttctctatcgaccgagccacctctcaagcagcaacaaccaaaacccgaaaatccccctcaagaatacgaagaagaagacgaaaacgacgtcgtcaaacaacagcagcagcaacaggaagacgaagacgacatcccgatatcgaaacttctggaaccgttgggcaaggaccagcttctgaaccttctttgcgac

SEQ ID NO: 24715 - DNA, 252 bp, Glycine max
  Clone ID: 700907404H1
ttcttattcatttctcttataagtgcttctaaaaaatttacccaaacaagcccctagtatagttgagttctgtgcaaataattgagtgaatttgaatattaaacacaacaaagagagagaaataagataaattaatatattttagagtctgaattgagatatgcttattaagggttgcatcaaaattttctcttgtctaccatttctgtgtctttctagacgataacagacagcaaatctatttcactattt

SEQ ID NO: 24716 - DNA, 255 bp, Glycine max
  Clone ID: 700907406H1
gttcttgggaaacagaaccgggcaaccttatattttgcaaacaaatgtgttcaccggtggcaagggtgacagagaacaaagaatctacctctggtttgaccctacaagagaatatcacagatactcagtgctatggaacatgtaccagattgttttctatgtggatgactacccaataagggtgttcaagaacagcaatgacttgggagtgaagttcccatttaaccaaccaatgcagatatacaacagtttgtg

SEQ ID NO: 24717 - DNA, 260 bp, Glycine max
  Clone ID: 700907412H1
taaaggatctctttcagaaaataatgtaagaggtcgaataatgcttgaaaagaatggaaaaaccacaaattcctttcctggggatgtgaccacagaaaggattgctcgctcttcaggaagcatactggagtatggcgtcagcactttctgaagcagatggaatcgattacactgatcctgaagagcttgagttgttggtcagaactcttatagatctggatgccatggatggtaaacaaagtgtttctttattggcagag

SEQ ID NO: 24718 - DNA, 261 bp, Glycine max
  Clone ID: 700907413H1
agaagctgcccacacaaaagaggcatcgatgatgtttctctgagtcccaggattcacgcattaaccaactgttgctcttcctcaaaactcaatacgctacacactcttcaactcttattcccttcctcgattccacttctccggattagggttttctttctttcagtagaaaaagaaaagggtggtttgggagaaatggttgagcaatcggtgctggcactggaaaagcagcaagggtcaaatccagtgttatcagaagga

SEQ ID NO: 24719 - DNA, 259 bp, Glycine max
  Clone ID: 700907414H1
caaagagccattgaactttgactataatattcagagttcagattactcactctaatcttctaagttttcattttggggtttaagtttctgaaggaaaaaaaaatgataaagtttgttctatttttgttctgctttgcctctgcactgaccctttcagtatcggagtccaaatcagcttcagtgcaacctcatgctgctgaatctttctctgttggatatattcagatgaagactgcagcgaactgttcttacctggtag

SEQ ID NO: 24720 - DNA, 164 bp, Glycine max
  Clone ID: 700907415H1
agtggtcatctggacggtgcaccgacacatgctgcaggagctgtacatggtgcatgctgcgtacaatgctagaacgcacgttcgctgacgcacatctccttgaaggttcagattcctacacgtctgcgtaatagcatctcctatcgcatctagagtatgcccat

SEQ ID NO: 24721 - DNA, 261 bp, Glycine max
  unsure (1)..(261): unsure at all n locations
  Clone ID: 700907417H1
ttggatttgtttctaaatctggtgggatgtccaatgaactatacaacactattgcccgcgtaactgatgggatttatgaaggcattgctattggaggagatgttttccctggttccacactttatgcgaaccccttacggtttaacaacatgccacaggttaaaatgatggtagtacttggggaacttggtgggcgtgatgagtattccttagtggaggctgnanaacacggagaagtatccaaaccggttgttgcctggg

SEQ ID NO: 24722 - DNA, 261 bp, Glycine max
  Clone ID: 700907418H1
gttttcatttcgttcttttttttccttccaaactcactcatctcagacttcctcttcctctctcactcagattcagcaattttctattttcttctctcatggcttcagattccaaaaaggatttccctgctgatgacaaagctggaacagcagagaataaagcatccaaagatgaaacgtcatctaaagattctccagcagcacaaagagctactacagctacttctggacctgcaactggttttccaggcaacccttttg

SEQ ID NO: 24723 - DNA, 260 bp, Glycine max
  Clone ID: 700907419H1
gttgtgttgtgttgaagtagcaagctagcaaagatgtttggcatcttaggaggcaataaggggcacaagatcaagggtactgtggtgttgatgagcaagaatgtgttggacttcaacgaaatagtgtccactactcagggtggtttggttggtgctgccaccggcatcttcggtgctgccaccggtattgttggtggagttgtcgatggtgctactgccatcttcagtcgcaacattgccatccagttgatcagtgccac

SEQ ID NO: 24724 - DNA, 260 bp, Glycine max
  Clone ID: 700907420H1
gtcaaatgcttagattcttctttatctccaccagagaaagttcaacttgctctagattgcttgcctaaatcttcagaaaaaacactatctggaacaaattcttcattctgtcgctggacaataatggattatgccaaagcttaccgctctggggacataacaccaagcttggttgcagaacgatttattgctgctattgatgaatccacaaaacccccactccaaatggggttctttattcactatagtgctgatgatat

SEQ ID NO: 24725 - DNA, 251 bp, Glycine max
  Clone ID: 700907421H1
ctctatttgtaccagattctggctgagcagtcctaagtaagtcattgtagaagtcatggttctagagtccattttgtcgtcttcgaagtcaccatctttcaggaggcagtttgcaaagcatgaactgggcagttggtcgacactcttgaagaggcaccgcttcctcttatttgctcttgctctactaactgtcctctgtaccatttatctatattttgcagttacatttgcagccaatgactcctgctctg

SEQ ID NO: 24726 - DNA, 112 bp, Glycine max
  Clone ID: 700907422H1
tgtgtcgcggcgctatctctacatgattagtctatttagattatgggtgaaggttgcggagtagacagaggctgcaattcgcgattatggtatgagtggcagacatgcagaa

SEQ ID NO: 24727 - DNA, 257 bp, Glycine max
  Clone ID: 700907423H1
ttgcattcagttagactttgatagtttgattagctctaataaggttaaggaccagagagagtaagagaaataatgagaaaaacacaagatgggttattggaagtctaaggttcttcccaagatcaagaaggttttcgagaagaatagcaccaagaaagctgctgctgctgaggccaccaagtcctttgatgagtcaaaggaggaatacaacaaagccttagtagaaaagaagactgaacttcaaaccaaagttgttg

SEQ ID NO: 24728 - DNA, 257 bp, Glycine max
  Clone ID: 700907426H1
attgttttcttcatatcttccttgtcactgcccgtgtgtcgccgccatggccaccgtcaccacccaagcctccgccgcaattttccggccatgtacctcgaaatcgaggtttttgaccggctcttccggtaaacttaaccgggaagtgactatgcggccaatggggtgccctccttctgcctctttcaaggttgaagccaagaacggagagtggttacctggcttggcctccccaacttacctcaatggcactcttc

SEQ ID NO: 24729 - DNA, 257 bp, Glycine max
  Clone ID: 700907427H1
cgactttcctgcagcgttccttccaaattccaaacccaccataatatctagcttcttgtgaaggctgttagtttgattatacaagttggtatcgataatttgctgtgaagggttgccaaaggagtggttatggtaagcgtccccactctcaatctgaccatgataatgggccaaataaaaggaggaatcatggtgatgatagagagcagtttgtgattgattcggaggataccgtgtatcgttatgtgtgcccgggt

SEQ ID NO: 24730 - DNA, 262 bp, Glycine max
  Clone ID: 700907428H1
gtttttctttttttcatttgcattgcaaagcaaaaaccttgcaaattgcaatggcttccaacaaggttattgccaccatcttggttctttctctccttgcctactcaacatcattcaccaatgcatgtggcacatgccacccaaaacctactccttctccccctcctccatcagggaagtgccccaaggacacattgaagctaggggtgtgtgctgatgttctaggacttgttaatgttgttgttggttcccctgtctctag

SEQ ID NO: 24731 - DNA, 266 bp, Glycine max
  Clone ID: 700907387H1
aatatttttgttacaaatactgaaatactttgatattttgttcaagataaaatattttattattttttagattttcatatgctgtacctttttttatggatcataatatggtaatgtttactttaggtaaaataatggttggatcatctttattctgcattgttatgttgttttctatccatttgaccctattgattcattgcttactttaggaagatctgcccgtcctgctcctcgtgcagcacctcgtcctgctccaggtatgc

SEQ ID NO: 24732 - DNA, 267 bp, Glycine max
  Clone ID: 700907352H1
ttgaagatgatcaaaggttgctagtatatgaatttatgcctcggggaagcctggaaaatcacttgtttaggaggtccctacctcttccatggtccattaagatcaaaattgcactaggagctgcaaagggtcttgcttttcttcacgaggaagctgaacgaccagtaatatatagggatttcaaaacttccaatatactattggatgcagaatacaatgctaagctctcagactttggacttgcaaaagatggtccagagggtgata

SEQ ID NO: 24733 - DNA, 272 bp, Glycine max
  Clone ID: 700907353H1
tttgactctctctctctcttctttaaacacccctttcttgtccgctccatcgcctcttcaccacactttctctctcactcacagcacggtggtgacgaccatggttagagacgatctatgcatcaccgttcccagcttcttccgctgccctatctccctcgacgtcatgaaatcccctgtcagcctctgcaccggcgttacctacgaccgttccagcatccaacgctggctcgacaacggcaacaacacctgtcccgccaccatgcaggttc

SEQ ID NO: 24734 - DNA, 269 bp, Glycine max
  Clone ID: 700907355H1
caatactcctcgcacaacacaaccaaaatggccgcgaagaagaagtatggcggcggaaacggcaacaacaaggagaacgaagacagcaccatcaccgtcgtcttgacggtcgaaatgcactgcgacggttgcgcttccaaaatcatcaaacacctccgctgtctccaaggtgtggaaacggtgaaggctgatagcgacgccgggaaggtgaccgtgaccggaacagtggaccccacgaaagtgagggataacctggcggagaagataag

SEQ ID NO: 24735 - DNA, 268 bp, Glycine max
  Clone ID: 700907356H1
cggctcgaggtcaatctaaacagctgttattcaatgaagaatctgtataaattgactgcacggttgtgttgttctctcctctttattggaaaccaataggagatagagttagcattattaagctactgtgagacttatttccaaggttcattcgtgtggttctctacctaatttattctgatctaactttggcctaggaggcccaccattgggttttggtgggctttcactgaaccaataaaaaacccatctttaaaaggtgctttgt

SEQ ID NO: 24736 - DNA, 147 bp, Glycine max
  unsure (1)..(147): unsure at all n locations
  Clone ID: 700907358H1
gcggaatgtcagtgacgaaccttgctccatggttaacaacagtgggcgcaggcaccacttgatcgtgaattcccctcacaggntgattctagggcagacggtcggagactgctaccggcgatgtctgcactctacgncancggagca

SEQ ID NO: 24737 - DNA, 268 bp, Glycine max
  Clone ID: 700907359H1
ctttgctctctgtgaggcttcaatttccaattagggtttcgcttagagtaaccaattaccatgggagtcttcacctttgtcgttcgcaaatccggcgccgaatggagcgccaagcaacattccggcgacatcgaggcctccgccgactccacctacgatctccaaaggaagctcgtgcaagccgctctcgccgttgattcctccggtggagtccagtcctccttctctcccgtgtctcctacctccgctgtgttccaggtgatagtgg

SEQ ID NO: 24738 - DNA, 259 bp, Glycine max
  Clone ID: 700907361H1
ggaaagtttgatgaaagcaatgataacctctctccaactacgcttaatggctcccagaatacaatagatacctgatcagaccagggatattgtcaacaaaacggctgagacgcaacctgatttagtaagctagggaatacctcttccccttgctatgcatgcaaacatgtctgttcctgtcagaactgatggcgtacttgcacatcctcttcagggaatgtttctaatgcacaatcaactgaatgcccaacaactagtg

SEQ ID NO: 24739 - DNA, 166 bp, Glycine max
  Clone ID: 700907362H1
aagaaaaaaaaaaacccttagccaacacaaccatcatggtcacctctgctattcatcaatcagcattcactggtcaaactgctctgaagcagctcaatgagttcgtccgcaagaccggtggcgccggcaaaggtcgcactaacatgcgccgcaccgtcaagagtgc

SEQ ID NO: 24740 - DNA, 269 bp, Glycine max
  Clone ID: 700907364H1
gctgtgactcattgtaatgatccctatgttgatgactattatcacctagcttgtctttctaaaaaaactggtgctaagttgaaaaaatcattttgcccaacccaaataaaggaacttccttctcgagcccgctccaatacagactctcatggttttcttcaggtggatgctttagggagggtttcattcctggctattcgccggcctcatgctctgcttgaagttgatccgtcaaacagtggtatctctgagcgaaatatttctgagaa

SEQ ID NO: 24741 - DNA, 261 bp, Glycine max
  Clone ID: 700907367H1
tctcgagacgactcggctcgaggttcaagtgtaacagaatcaatctctctatcatgccagacacttcacttgatcaccacacattactttcctaatatattgatcaatgttctattcgaatgacaaaacttacgagcagttcctgagatgtgttaggtggtgttctctaattagagtgttatcttgtcaacttttctagtaaggtccacatttagagtcgacactagattctgaggtgactttaattatgaatagaaaaac

SEQ ID NO: 24742 - DNA, 268 bp, Glycine max
  Clone ID: 700907368H1
attcataatactggtcggaaaaaaaagtattatcctagtttcccctagttcaaatacaccccatgtcatgaaaattcccaccctcttcaataaggcatatacatcatgaagaggtgtgctattagcaatttgcaaacatcttaatttgttgaagcttcccattcctagctagggtcagtctcaattgttgaatcgtcatggaacgcaaggggaaaaagcctgttaagatgtccgtgcctcaatttggagggtgggaacacaagcccgc

SEQ ID NO: 24743 - DNA, 268 bp, Glycine max
  Clone ID: 700907371H1
cgccgagaaagagagagagacccaggtttacttggccaagcttgccgagcaggccgagagatacgaagaaatggttgagtgtatgaagaaagtagcaaaacttgatcttgatctaactgtggaagaaaggaacctcctctcagtgggatacaaaaatgtgattggtgcacgaagggcctcttggcgcatcatgtcctcaattgagcagaaggaagagtctaagggaaatgagcacaatgttaaactgatcaagagttactgccaaaaa

SEQ ID NO: 24744 - DNA, 268 bp, Glycine max
  Clone ID: 700907372H1
ctcttcctcttccctcaaatcataacacattttctctctttccattctctgttccgttccttctcgtgcgatttgcatattccgaaattgagaactccacccgcgcgaaaattgaaggcagagaagggcaaaagatttgatctttcaaacgaggagtttctggggtgtcacaggatgaggctaaacggtgaaatctcaagcggagaagaagaagaagaggcgaaacatacgggaacgacgacgttttcgtcgcagaaagtggtcattg

SEQ ID NO: 24745 - DNA, 267 bp, Glycine max
  Clone ID: 700907373H1
tgatgatcagtttttggatttaagagcttctgagggatccaataaagatggtatgcaccgcattgaccctgttgctgggtttgatcatgatctttcatcgcattttgttagtggctcaccatgtcctccatctgcatttcctccaatgggagaggttcagcctaatgaaatcaaccataaatcaactaatccatttgattatccttttgattcagatgtagaacataataatacgtgtcaattgcaattccttgacgtcagctctct

SEQ ID NO: 24746 - DNA, 268 bp, Glycine max
  Clone ID: 700907374H1
attatacttcgcatgctccccttatagtttttggaaattgatatataccaaagccctgagatttttcccatctttctcgtgatagttcttctggctcacaagccaataaaggcatccacaaccttcaacttcaacaccacttgaacaaattcactgtctagcgaatagtgatccaccttcatttcccgtttccaataatctaaacctcactctaatcagttctcaggattcccatttgcatcacactcacaagttagtttaattctgt

SEQ ID NO: 24747 - DNA, 267 bp, Glycine max
  Clone ID: 700907375H1
cttttgagccttgagttcgataattttgctgaagtgcgcaaactctatgaaggtggagttacattgcctacaaactttcttagcaagatcactcctataccaataattaaggaactttttcgaactgatggcgaacagttcctcaagtatccaccacctaaagtgatgcaggtcgacaagtctgcatggatgactgatgaagaatttgcaagagaaacaattgctggtttgaatccaaatgtcatcaagattattgaggagttccca

SEQ ID NO: 24748 - DNA, 267 bp, Glycine max
  Clone ID: 700907376H1
ctatcactaaatctcattcttcatctgcagctatttggattgctgattattgttaactgatattggtgcttttctttgagaaagtgtgtacactttttggataagagaaaacaagagaggtgacattggaagctaactcagagagaggcaaagatgttgggaattttcaagcagaagttggttaatgcacccaaggagctgaacagtccagcttctttgaattcatgcattaagcctaagctaagtcatgaaatcctgaaggatttc

SEQ ID NO: 24749 - DNA, 263 bp, Glycine max
  Clone ID: 700907377H1
tgttcgcccttttttttttttttttttttttttttttttttttaaaccgggaagggttcccccccctttttgaaataccccccaaaaaaaaattattcccctttttaaaattttaatttgggggggggaaaaaaacgggccccttttttttccccagggaaaattggggggtctaaaaaaaaaaaaaaaaaaaaaaaaagggggccccccccatttgggcccccctcccccggggttttttttccggggggtgtccggggggc

SEQ ID NO: 24750 - DNA, 265 bp, Glycine max
  unsure (1)..(265): unsure at all n locations
  Clone ID: 700907380H1
tctgaatagaaatggcttcggagactgagacgttcgcttttcaggccgagatcaagcagctcctcagtctaataatcaacacgttctacagaatataggagatgtntcttcgtgagctgatcagaaatgcatctgaagctttggataagattcgatttgagagtcttagagagaagatcaagattgatgctagcagggggttgttcattcacattattcctgacaagacgaacaagacattgtctatcattgacagtggtattgg

SEQ ID NO: 24751 - DNA, 263 bp, Glycine max
  unsure (1)..(263): unsure at all n locations
  Clone ID: 700907381H1
cagaagagagagaaacccatttctagagagagaaactcgcagtcgcagacatgtcttccttcgatgccttcgccgacgacttgaacgtcaactcttcttccagtgganagaagaaagaggannanganaanttntctggntanagnggntaatgctccttcacgggaggattctgcgccgacggagatgtcgccgtcgatcataaagcgnnngcgtcgccggagatctacggcttcactgattcgaatcccgcttactctcag

SEQ ID NO: 24752 - DNA, 266 bp, Glycine max
  Clone ID: 700907382H1
gagaattaggcaataagctaaagatgtctgacgattgcaaaggtaagagctcatggcctgagcttgttggagtgcaagggacagtggcagaggctacaattgagagagagaatcctttggtgaatgctatcattgtgcctgaaggaaacagggtcatcactgattaccgctgtgatagggtttgggtttggatcaacaaagatggaattgtcaaggaagttccacacattggatagaaacttttccctctagctagggttcaaata

SEQ ID NO: 24753 - DNA, 268 bp, Glycine max
  Clone ID: 700907384H1
cgtcatcgaactacccacgttctgctccttcgcagatcatttcgcgtttagcttccacgaaagatggcagacaatgaggatggaggggataagacatctcgtgggaatgaatgggaggttgtatctctcacagcatcaacatatgcagctgctcctggtcctgatgaagttgagatgaaggatgatgggaaagaagatgtatatgggcaggatgaaggagaaacgtcacatgctttattcatgtctagacactttgtctttccaccca

SEQ ID NO: 24754 - DNA, 266 bp, Glycine max
  Clone ID: 700907385H1
gcttcacttcatgtgattcaggactcagttaccatggttggtgaagcagccgtcccagttataacccttataatgggagcaaacctttttaaaggtttgaagggagcaaatacttcgttttggacaattcttggaattatagtagttcgatatattttcctgccaattttgggtattctagttattaaaggagcaacacagttgggtttggtgcaaccagatcccttatatcagtttgtgcttctccttcaatatgcacttccacc

SEQ ID NO: 24755 - DNA, 267 bp, Glycine max
  Clone ID: 700907386H1
accaaaagcaatggctaatacaccttcgaattcttcaattctcctctccctttttctattggccatcggcctctccctcgctgagtcccaatctttcatcggagtaaactacggccaggtcgccgacaaccttccggcgccggaggacacggccagcctcctcaaatccaccaccatcggaaaagtccgtctctacggcgccgatcccgccatcatcaaggccctcgccaactccggcatcggaatcgtcatcggcgcctccaacgg

SEQ ID NO: 24756 - DNA, 264 bp, Glycine max
  Clone ID: 700907351H1
gaagcttatgtggttggttaacgtggttctaaattgtagttggatggggtaatttgttgttaagtttttaatctgtttgttcccgttagcaacatacgacaatatatatatataacattgttggttctgtttttagctttattaaaatatcaatgaagattcaggaaatttgtattctcgggtcttcatactaatggtttagtgtgttctggggaatgtctgtaaattttattttgaatcataagtcatttatatttagacaaa

SEQ ID NO: 24757 - DNA, 273 bp, Glycine max
  Clone ID: 700907320H1
tgttttatgagtttgctcttgatcaatctgaaaggttcccaactctgaacagatcgatacagatgcaaactaacctccatcgagtgtcagaatttgctgtaactgctaatcaaacagtcgatgacggcaatgttgaagcaagaacttctgttaagagagttcgtgaacatgacactgagacagagtcagacgctgatgacattgttagtagcagtacaatccctgtagctctgacagacctaaatagccatgggattgataccacagatttct

SEQ ID NO: 24758 - DNA, 273 bp, Glycine max
  Clone ID: 700907321H1
tcgagaacacggagcgaaaaagcgtcacgagcgagatcggcatgaagagtcgagaggagagatagggagagcgagcgtgagaggaagatcttcgatttagagttttcaatttcgtattcagcaagtcggcgagtgtgagatttttagagagagagaggtgaggacgctgagtgctctgctgagagattccataaccccaagaggaagaggaggaggagaaggtggatagattttttttcctgtgtttttgtgctgtttatttatcctcagagc

SEQ ID NO: 24759 - DNA, 270 bp, Glycine max
  Clone ID: 700907322H1
cttcttatagcttcatcccaaaaagctcttttccttctaaattcgattccttagttcagcattctattattatgtatggcttcttcaccttcctcagaaaacaaaaacctagagggagtagctggtggtgccggagagaaacccattccacttggtgagaacgttctgcagaagcatgctgcattctttgacttgaataaagatggtgtcatctacccatgggagacttttaaagggttgcgtgaaatcgggactggggttttgctgtcc

SEQ ID NO: 24760 - DNA, 271 bp, Glycine max
  Clone ID: 700907323H1
agaacacaaaatgtgacttacaaggtcatgtttacgcttcacatcgacaagggtcttcttctatgtgcaattccaaggtcatgaatagtggctaacagatcatatatctctagtgtttcagtttcactttgctatatagatttctaatttgcaatatatgactctgccatgttgctaggtgaagaagacattattttcaagtgtgtttatgaatgtatatatttccaaaagccctttttttttgttaatgtttatggaatttcagactttt

SEQ ID NO: 24761 - DNA, 275 bp, Glycine max
  Clone ID: 700907324H1
gcataaccatgtggcggagactcttctcttcttcaaacctcaaagccctacacacaacactctctccttctcgtccccgactcgccgcccagactctcctcgcccgccacttcaccgcccaatcaggtgcttcttccctcaaaaagagggttgaagatgtcgtgccaattgctaccggccacgagcgtgaggagattcaggccgatctcgagggaagggatattcttgaaataaaccatcccgtaggtccttttggcacaaaggaagcacctgct

SEQ ID NO: 24762 - DNA, 271 bp, Glycine max
  Clone ID: 700907326H1
ctggcgactcagatcctctctcgcatcttccccaaaaccctatcccccttcctctcccgttctctctccaccgccccctctcctccctccctctccgcgctctccttcctccgccgcatctccgttgccgccaacccctccctccaccgcgccctcctccccaactctccctccctccgcgccctctccacacgcgccactacctcctccctcaacgaccccacccctaactggtccaaccgtcccccgaaagacaccatcttgctcgacg

SEQ ID NO: 24763 - DNA, 270 bp, Glycine max
  Clone ID: 700907327H1
caaaaatggcacctgcaacactgtctctgtctctcctcctcctgttctcactcagcatcgccgtaaccgttagatcgagcgactacgactacgattgtgtgtacactgcatacgttagaaccggttcggtgttgaagggcggaacggactctaagatcgggctgaagctgtacgacaagtacggctactacatctacattaaaaacctcgaagcatggggcggcttgatgggcaagggctacgactacttcgagcgcggcaacctcgaca

SEQ ID NO: 24764 - DNA, 270 bp, Glycine max
  Clone ID: 700907330H1
ctaaactcatattccaaaacgcagagccaaaccatgtcgttccccttcaaccactctcacgccacccacacccaccaccgcagggacgacgacgacgacgaacgacccaccgtttaccctccgccgggaaactccttcagcaacccgccacctccgttctacggcgtccctcaaccaccaccccctcagccggagacccacgtgttccattccgctcacgtgacaccaggacacgtgtcccatgacttcaacaactactccgctcccccg

SEQ ID NO: 24765 - DNA, 267 bp, Glycine max
  Clone ID: 700907331H1
ggggctattgctggtgcttattcaagggcatacaaggaaacttttacactgacatatgtgactggtagaactgttggaattggagcttatcttgctaggcttgggatgagatgcatacaaaggcttgatcagcccataattcttactggtttttcagcattaaacaaacttcttggtcgggaggtttacagctctcacatgcaacttggtggacctaaaatcatggcaactaatggagtcgttcatcttacagtttccgatgatctt

SEQ ID NO: 24766 - DNA, 270 bp, Glycine max
  Clone ID: 700907332H1
agctcatggaagctgtggatgactacattcccatccctcagcgccaaactgaacttccctttttgctggccattgaggatgttttcaccatcaccggtcgtggaactctcgccaccggaagggttgagagaggtactattagggttggagagactgttgatattgttggtgtgaaggagactaggaacaccactgtgactggggtggaaatgtttcagaagattctggatgaggctttggctggggacaatgtgggcttgttgcttaggg

SEQ ID NO: 24767 - DNA, 243 bp, Glycine max
  Clone ID: 700907334H1
gtcccttgctctgtgtcgtcgtaacacaaaaagcggaacagagagatagaagcacactacgcaatgacagcttttgatcttcacaagacatagcttcgtgtgtgcgtagattttcttccttccagcttggaaagactgaagtctctgtctcttccaggtcatagtggcttcctcgaagatgatggtagccaatagctttgatatatatcgcaaggacagattgtcctctgcggcggaagaggt

SEQ ID NO: 24768 - DNA, 273 bp, Glycine max
  Clone ID: 700907335H1
gattgatgtggtccaataattacaatcttgtaacagcagagtttgcgtggcattttttccatttattccgaccatccaatttgctactcctacttgtcaaaacaacaaatgcgaacacagaaaatactagtagtatcaaatttaagaacccgagaccaagagtactagaaaaataaaataaaacactacatataaaattagagagaaggagagcgtgagtgtgtctgtgtctgcgcttcagaaatgtggcggtgcgtggctcgtgctattcgc

SEQ ID NO: 24769 - DNA, 271 bp, Glycine max
  Clone ID: 700907336H1
gagctattgtatgactatgaggtcaaaatcaaccaagctgttttccctggactgcaagggggccctcacaaccacactattactggtttagctgttgcattgaagcaggccacaactccttaatatagagcatatcaggaacaagttctcagcaacagtttcaaatttgcacaggctctaagcgagaggggctatgagctggtttctgggggaactgagaatcacctggttttggtgaatctgaagaataagggtattgatggctccagag

SEQ ID NO: 24770 - DNA, 269 bp, Glycine max
  unsure (1)..(269): unsure at all n locations
  Clone ID: 700907338H1
agaacatgtgtacttaaattacttacaaaaattaatttcgacagctgtgtgtnatctatgtgaataatgtgatgttttcctcatatgtggttagaagttgctacttaatttctctgctaaatatagtaaaccttttttcagccttattcttgtgaaaatcacaggttaccagagttttgtgtgtgttgagttgataatgatgacattggtacataaaatcattcttgtgctactattatcttctctgtatgtcactgatagttcttgag

SEQ ID NO: 24771 - DNA, 269 bp, Glycine max
  Clone ID: 700907339H1
tgaaactgtgatttcaattcttctgcttgtaacataaccaaatgatgatgccattcttctattctatgccacaatcatgagtttggttcactttggatacatagtgtgcaataattctaatgggtggttttgttgaacacattaattcaggtgaccatcatgaaactcaaggttgatcttgagtgtgagaaatgctacaagaaggttaagaaacttctcggcaagtaccctcaaattcgggaccagaagttcgatgagaaggaaaacat

SEQ ID NO: 24772 - DNA, 272 bp, Glycine max
  Clone ID: 700907340H1
gagggagacaaaattgaaaatcaagattggttgcgcagagagagattttgaagttgtttcgtgtcgtgtggcgtttctgggaattaagtgcttttcttctgcaaccacagtctcattcatcaatcaatcggcatcctcatgtctgacgcttattggagatacgccgccgaatcccggcaggccccctcttccatcgccggcaagcgctctcgttccgactacgatgtttctggcgttcacgacttgcccggttactttccccatgacgatga

SEQ ID NO: 24773 - DNA, 272 bp, Glycine max
  Clone ID: 700907341H1
ctcgagccgaatcggctcgagttgattttggcacaaaacttacattacttcattgcttggcgccttaacttcgtgttcatctaatgcatttttaattgttctacacaaataaatgttttggagttcatttttggttgatttgattgctttgtgttagcaattcagggaggaactgttgatgtggattgaccctgcactgctctcaatttgctgccgaaggaaagggttgggattggttgtggcttgtccaagtacacagcgtgctgcacggg

SEQ ID NO: 24774 - DNA, 268 bp, Glycine max
  Clone ID: 700907342H1
tccaaatggccctttacattacactaataattggcctcctagtaaacaccctagtactctataaatagcatttgcatgcaccttagtcttcaccaaaatactcctcttggcatcttgtgttgtgtccctcttttaagctatttccttctcttaacacaattggttgtgccaattgccatagtcaccaaccaattaacaaaggtatatatatcatcatatcatcaccaaatgacaaatattgggttgttttttcttgtggtggtggcta

SEQ ID NO: 24775 - DNA, 168 bp, Glycine max
  Clone ID: 700907343H1
gtcctgaagcactggatcttattgatcgattattgacagaagatcctaatcaaagactaggatccaaaggggcatcagaggtaaagcaacatgttttcttcaaggatataaactgggagacacttgccaggcagaaagctgcatttgttcctgcttctgagagtgctc

SEQ ID NO: 24776 - DNA, 268 bp, Glycine max
  Clone ID: 700907344H1
gagaggcctgcccaacagtaaattattataatatgcatatggtgctgcagctgtgctgatttggcattttctggtcttgttgcttgcttccatttgatgtgtacatagaggagcaagcttagctactttcggcaaatgaactcagagacccaaagatagcgagtgttgtatgttttagaactgagactgatagtatatatctgtgtattggatttgtcatcttggcttgctgagcgatcttgtcaaatgatgtaggtgatttattttg

SEQ ID NO: 24777 - DNA, 269 bp, Glycine max
  Clone ID: 700907346H1
gtctacttcaccaagcacttttggttgcagctttggttaatttccaatatggtgtttcctctcctatctatctttgctttactcaatcttgcagtggtggcaacccatgcagaaaccttgccccctgaagtttactggaagtcgaagcttcccaccactccaatgccgaaagccattacagatatccttcacccagatttggcagaagacaaaagcacctctgtggccgtaggaaaggggggcgtaaacgttaacgcagggaaaacaaa

SEQ ID NO: 24778 - DNA, 269 bp, Glycine max
  Clone ID: 700907348H1
ctctaccactccgattgcatcacgccgtggatagaactcaactcgtcgtgtccgctatgcaggtttcggttggaggaagaagaggaggaaggtggtgacgccgatactgacgccgacgccgttatgacggagatcaggagggagatcattgcgaggctgacggagctgacggaggaggatttctacgggctcaggaccacgctcagccacattgcctcgcgccacgcgctcatcgaagagaaccagaatcatcgcgcgcagattggcga

SEQ ID NO: 24779 - DNA, 272 bp, Glycine max
  Clone ID: 700907350H1
ttcgtcctttcaggctttccctgatgctttgtttcaccaattgctcctggcgatggctcatcctgaccatgaaacacgagttggagcacacagcatcttttctttagtgcttatgccatctccattttctccccagttagaccaaaaaacaaaggggtatcagaaggtaccaagcgaaagcttctccattcagcatgaaagctttttaggagcagaacagatcaatgggaaacctatggaaggacaggcagtagttggtgttagtgggaaat

SEQ ID NO: 24780 - DNA, 268 bp, Glycine max
  Clone ID: 700907318H1
tctgtgacgttgccctattcaattactctatctctctctctatctctgtcgcgatcggctttgccctagaaaatactatactagagagacatcgattgcgtgaaacaagatccgtgaagattgcatcaaagagagagcatggagcgtgattgcagaggaatcgcgtcccatgcacactgacgtccggacgtcaaaggcctgtgagtatcgggattacctaccagcttatcatcctcgtaatgttgctgaagcagattcccccttggat

SEQ ID NO: 24781 - DNA, 250 bp, Glycine max
  Clone ID: 700907252H1
gaaagtgagaggagagagaaagtagcagatcctccatggcctccaccaaggaacgtgaacacttcgtctacgtcgccaagctcgccgaacaagccgaacgctatgaagaaatggtggaagcaatgaagaatgtggcgaactaaacgtggaattgacggtagaggagcggaaccttctgtcggttgggtacaagaacgtggtgggtgcccgtcaggcttcgtggaggattctttcctcgattgaacagaaa

SEQ ID NO: 24782 - DNA, 174 bp, Glycine max
  Clone ID: 700907253H1
cacttcacaaagtttttgttgctttcaactaatgtgttgggtgaatcgtattttcacgccaaattttctttcaataaattagtatagtatataaatctttttgtaactacatgtgtggttctatgccacttcttgtgacagccacgctttttaatataatgtcactttgctttg

SEQ ID NO: 24783 - DNA, 250 bp, Glycine max
  Clone ID: 700907255H1
ctcttgctgagaagatgatgatgtttatgcttgcttccttcttgcattcttttgagtggagattgcctagtggcacagagcttgaattttcaggcaaatttggtgttgttgtcaagaaaatgaaaccattagttgttattccgaagcctagactatctaaaccagaactctatcaatgatgttgtaatagtgaaatgcatgcttattacaacttatataataagatttgttacttgcttcggctgagtta

SEQ ID NO: 24784 - DNA, 252 bp, Glycine max
  Clone ID: 700907257H1
tacctcgagccgaatcggctcgagcggctcgaggttaaggatccatacgctccccatggagtacggcttttgattgaggactatccttatgcttctgatgggctagagatatgggatgccatcaagtcctgggtgcatgaatatgtctcattctactacaagtcagatgcagcaattcaacaagatcccgagctccaagcttggtggaaagaacttgtccaagtgggtcatggtgatttgaaagataagcca

SEQ ID NO: 24785 - DNA, 251 bp, Glycine max
  Clone ID: 700907258H1
cttagagatgaagaatgtgatagacaagccgtgaaaagggccttggcttttgttgtagcctggtccttagatcacttggtttttggtgagtaccctccttagatgcactctattctcgggagtcagttgccaagattctctcctgaggagaagagtctcataaaaggcagcatagacttcattggcatcaataactatggaactctctatgccaaggactgctccctcactgcttgtcctcttggaacaga

SEQ ID NO: 24786 - DNA, 252 bp, Glycine max
  Clone ID: 700907259H1
gagcgcagcgtacagaccgactacacgctgcgatgtgaccgcaattctcgttttatatggtcttccaaggttgcttactggatcaatcctagctcatgagatgatgcatgcatggctgcggcttaaaggttatcggactctaagtcaagatgttgaagaaggtatctgtcaggttttggctcatatgtggttggaatctgaactttcttctgcatcaggcagcaactttgtatcagcctcatcctcatctgc

SEQ ID NO: 24787 - DNA, 252 bp, Glycine max
  Clone ID: 700907261H1
aggaattcatggaagccttggctgctggtgctgatgttagtatgattggacagtttggtgtggggttctactctgcatatcttgttgctgagaaggtcattgttacaaccaaacacaatgatgatgaacagtatgtttgggagtctcaagctggaggttctttcactgtcaccagggataacactggtgaggttcttggcaggggtactaagatcactctctacctcaaggaagatcagcttgagtaccttg

SEQ ID NO: 24788 - DNA, 257 bp, Glycine max
  Clone ID: 700907263H1
tttcactttgcaggcttttctagaatggaagaatgcaagttgagaggaagtgtccgagtatcagaaacagattggggagcagtatcttgccaatgttgagaaggcattggagagatggcagaatgcaaggaacgcaaggtcagttaacaatgaccagaatttacaggagacaatggacaaagagttggatactcataggctggagcatggtcccaagaaaagaaagatccctgacgaaaacaataatgacgacgatg

SEQ ID NO: 24789 - DNA, 253 bp, Glycine max
  Clone ID: 700907266H1
gctagaagcaataagatgaaaatgaaagtgcttgttttgtgtgttgctacagttttggtagcatatgaatgcccatggtcagactaccaaaagttccctcttcaaatgtgaaactgggtttggtgggcaatacagcaatgaggtggcatgtgccagtttgaaggttggcctggaagcaaacaacgtagtcaagtggcaaactgttcctgcagcttgcggagagtacatagctgactacgttctaggagaccaa

SEQ ID NO: 24790 - DNA, 250 bp, Glycine max
  Clone ID: 700907267H1
caaaaaggaaaagaaaaccaatatgaagttcactataatcacaatatttttctctttatttctacttgactttggttttgcacaacagggggatcttgacatatcaagatttggaggaaaaccaaatacaaatataggccaggctttcttaagtgcctggactcaagcatgtgcatcaccaactgctgtcaaaattgtgattccagctggcacataccaaatgggtgcagctgatgtcaaaggtccttgc

SEQ ID NO: 24791 - DNA, 248 bp, Glycine max
  Clone ID: 700907270H1
ctcgagccgcaaaagtcaagcgaagagtgacttatttttcaatagttgtcttgttttctcagaatttgaagttacaacctccctattggtcaactgaactggtgattacttgtctgtgttttgtaaaaaacaatagtgtatggttcttcttcctagttaaaattccctaagactaaatttaattgttaaatgtatcaaaaaaaaaaaaaaaaaaaaagggggggccgccactagttgacccagacgcc

SEQ ID NO: 24792 - DNA, 250 bp, Glycine max
  Clone ID: 700907271H1
tggatcttcaagaaagagagacccttgggatttcgtcaccatgagtctcttcggtcttggaaacagaaaccaaaaaacatttcgtccaaaaaagagcgctccatctggaagtaagggtgctcaacttcaaaaacacatagatgccacgttgggtagtgggaacttgagggaggctgttaaactgccccctggtgaagatattaatgagtggctagctgtaaacactgtggacttctttaatcaagtgaat

SEQ ID NO: 24793 - DNA, 250 bp, Glycine max
  Clone ID: 700907273H1
caagttggtttatgttcttccaaaaggcatgaatctaagagtgctggaattgaaatggtgactgaaaaggagcagggagagttgacggcaagagataatcctttgtgttcttcttgtcagatgcttgttctttggatccagaatcaactaaaacaaaaggcaacgaaggacagagtattcaactatgtgaatcaactgtgtgagagcctaccaagtccatctggagagtcagtgataagctgtaatagtc

SEQ ID NO: 24794 - DNA, 251 bp, Glycine max
  Clone ID: 700907274H1
caggaagttgtctgagtcagacccccaattgcagttccaataccacagaggccctctcctcacaggcaaaatctccgtaaacctaatttggtacggtaagttcaaaccttctcagaaagccattgttgctgatttcatcacctctctctcctcttccaaacccctcaccgcccaaccatccgttgccacgtggtggaaagtcaccgacaaatactacaaaaactcgttccccaaacttgcactctccctag

SEQ ID NO: 24795 - DNA, 251 bp, Glycine max
  Clone ID: 700907276H1
tgattatcttgatgctgctgatacacctggatggtattgtggacctaatttcttttcaactgatgtgctccgtaattttgccaagacccagattgattacatccttggaaataacccaaggaatatgagctatgttgtaggttttggtaatcattacccaaaacatgttcaccatagaggagcatctataccgaagaacaagatcaagtatagctgtaagggtggatggaaatggagggacacttctaagc

SEQ ID NO: 24796 - DNA, 202 bp, Glycine max
  Clone ID: 700907277H1
gtgaggcccttatttatctctctccgccaaattctggttgggattggttcttcttccacttccaacgccatgcctctttctggaattttccagataccctcatttatggacataatcactgacctcgccatgttcattactccgctatggattgcggttatcgtcggcgtcgtcgtgggctgggcttggaagcccaattggg

SEQ ID NO: 24797 - DNA, 254 bp, Glycine max
  Clone ID: 700907278H1
ggttggattcagtgtggggaagaggacgaaagtttattacaaggaaagacagtgatgctggcgatgcaggtaaagcactggaagaactcagagcttctctctacaatgagatccgaacatcagaaggagccaagcgccaacagcaaagatattgtggaccagtggtggcactgtccttcaattttatggtttctgttgggattatcatggcaaacaaattggtgatgggtaaagttggcttcaactttccaatt

SEQ ID NO: 24798 - DNA, 251 bp, Glycine max
  Clone ID: 700907283H1
gttgaaaggtaaccaggtgctgctttattcttgactgctcgagaaggtttctcaggagttcatcttcaatattctccagtttactttaccaaatccagggaatgctgaaagatgtggttgaaagtaaagagttccctctctcaggttaatgaggttgtagctccatctgaggtagccttattaatccttgatgagattggatgtttagatcactgccaacatcaattatatgctcatttgcctgaggtggc

SEQ ID NO: 24799 - DNA, 78 bp, Glycine max
  Clone ID: 700907290H1
actgacccgagctcccatgcctttgttagaggtaacaaatgcgcaactatccttccggtattcactgacaatcccaat

SEQ ID NO: 24800 - DNA, 254 bp, Glycine max
  Clone ID: 700907294H1
gaagaaaccatatcatgggttcagaaaattgtatagataagacgcactttgtggcggtgcatggggcatgccatggagcatggtgacggtataagctcaagccacgcttggaatctgctggccacaaggtcacagtgcttgaccttgcagcttctggagccaacatgaagaaaattgaagatgttgacactttttcacagtatactgagcctttgttgtttctattggacacaattccctcaaatgaaaaggta

SEQ ID NO: 24801 - DNA, 108 bp, Glycine max
  Clone ID: 700907295H1
gcagtaacccacgttgtggctgagatgatgtcgaattgagacaagcattaatttcagcgctgaattgaatattgagctgagcagagtatcggcatagcgtagccatgg

SEQ ID NO: 24802 - DNA, 249 bp, Glycine max
  Clone ID: 700907309H1
gccaattgccatttcaatccccagtttcttcttcaacgtcctcttacgagcagatcgcaatgctccttcccagtgtcaaaccctaattccctcattcccatggcctcagaagagctcactgtcgcggcggaacccgctcccgaacctgccaccgccgagcctcccccggaagagaaggaggagcccaaacctgaagccaatgctaagaaaaccaaggagcccaaacctgaaaaggtttccagaccacgc

SEQ ID NO: 24803 - DNA, 273 bp, Glycine max
  Clone ID: 700907310H1
ccaagttcaaggggctgatgtgagcaaagtgagtaacaacagtgttagatctcagtcacaacaccggagccattctatttctagctctgatcatcatcacttagcaaaccctgcacttggatctgtccgttcgcttggagacaccattttattgattgttgccctttgtgcacattctgtgtttgagggcttagcaattggagttgctgagaccaaagcaaatgcatggaaagccttatggacaatctgtctgcacaagatatttgcagccat

SEQ ID NO: 24804 - DNA, 268 bp, Glycine max
  Clone ID: 700907312H1
gtaatagtcgatggttcttcagattttggtttgaagcccaaaattagttttagtgatatggggactgcatcatctatgttaactcaatacgacatcgaggaagttcaggaacactgcaataatgtattttcccagcaggaaattgtgtccttgtatcaaaggttttgtcaacttgaccgcaatgccaagggatttatttccgcagatgagttcttgtctgttcccgaatttgccatgaatccactttctcagaggctgctaaagatgg

SEQ ID NO: 24805 - DNA, 252 bp, Glycine max
  Clone ID: 700907251H1
ctcaagcgtcaattctccatcgccaatcctctctttctgctgatttcggactcgtcacttacttgtgaaatgatgctctcagcggcaataattacttttggacgctggacataaggcgtgatgggcggttgctgttgttgttgttgttctgctaaggagactgtgttgagcgctccacctgcgtactattatcagtatccaagagcatcagaagagcatgttcctctatcatctcaccagggtgctgcttct

SEQ ID NO: 24806 - DNA, 270 bp, Glycine max
  Clone ID: 700907313H1
atgcgttcttgctctcaacaacaatcacacaccgccatcgaagccttcgttcttttcttcttcgttctcctttttgctctcgttcgagggttctttcgtggggaacactgcagatttcaccacccgggtcttattcatccgtgcccatgtccgaagttctcggctttcccggagttgacgatttttgccctatgggatcaatatacgccaaccccaaggaagcaagtttcttcttgtcccttggccctcaagttgatgtatactttcctc

SEQ ID NO: 24807 - DNA, 268 bp, Glycine max
  Clone ID: 700907316H1
gctctgaattcggctctcgtcagaatacattcctggtaatggtgtggtcttcttattctacaaatggtaaatcattctaacatttcaaccaatctgtactcaagttcaagtgcttccatctgccgttagctgcatatctagttgatcagagcaatgatgaacatcgtgccttttgtccttagttttcaaacgagagaaggagactgacctcttgtgttctttcctgcactgggtacaatacaactgggactattgcattctcttcctc

SEQ ID NO: 24808 - DNA, 207 bp, Glycine max
  Clone ID: 700907202H1
ggagatcatggcaacgggaggaattgcaagttttaaaaactatgatattgggaaactaccctgaattgagaatttttgtctttagaaacccgcttgttatttgtttttatatatcagtctttgtgatgtcatcggctatttggataataatcatctttcctttgttgtgtcatccgtattatttggatagtactcattttacctttg

SEQ ID NO: 24809 - DNA, 254 bp, Glycine max
  Clone ID: 700907203H1
agcaatctcaatggtaggtgaaggcctaatttggtttcatgaatggaaggaatcatcacctggacagctacaaacaaatttgatcatgtctagggagatcttatagtaactttctcaacgcttggaccaaaatgtttcatgtgtaatgatgtgatgctgtatgctgactgctgtttctcttctaggtactcttgtctttctgtattgtgtgtgggggtactattttgcatgatagcaaaaaaaaaaaaggtgtc

SEQ ID NO: 24810 - DNA, 254 bp, Glycine max
  Clone ID: 700907204H1
caagattgatatatattttcccctgtaaaataaacagtataatatgcttcgtcttacaaagaaggttcaagtaatcgatattcaaatgtaaaagaatagttgatgaatatcttcaagtctttggtgctgtgttattaaatgatactcagtgataaccacaattagaaaattggaagtcagctgcagtaaggtgacctttctattcattttatagaaaagaaaagaacagagtggggagagaagtgatgatatat

SEQ ID NO: 24811 - DNA, 247 bp, Glycine max
  Clone ID: 700907206H1
caaaacagcgttgaggggacaatcaagcagacaatcgagaaggccttttgggatggtatcatggaaactgtggagggggaccagcccaactatgactggattgttcaacttatgggggaggttagggatgaaatttgtgagatggctccaaaaagctggaaggaggatatttttgctgccatcgatttagaaattctttcacaggtgctgaaatcagtttgcagaagctctcagctccagcgaatga

SEQ ID NO: 24812 - DNA, 251 bp, Glycine max
  Clone ID: 700907208H1
gccagcgagtgagtgagcgagccaggtagggttttcggtgttcccctctttgtgttcgttcgcgacgatggggtccatccccgatccaggcgagttgagcgagttgactcagccgagcttcgacgagttccagcgccaaacctctctcatgaccagctgcaccctcctctggaaggagctctccgaccacttctcctccctcgagcaagacctcaaccacaaatccgaagccctcaagcgcaagattcaca

SEQ ID NO: 24813 - DNA, 254 bp, Glycine max
  Clone ID: 700907209H1
attttgtgaatgtgtttttttccttcctttatattgcatcaaggtcccatttacgccttactgcttatatgtttcagttcttctgttattcatgatactgaactctcaccagatgtccccaaactttctgctctggctggtgcttggtgttttcttgatggcaacaatgttgaggatgtatgcaacatgtcaacagcttcaagcacaggcccaagctcatgcagctgcagccagtggcattcttggccacacag

SEQ ID NO: 24814 - DNA, 254 bp, Glycine max
  unsure (1)..(254): unsure at all n locations
  Clone ID: 700907210H1
tttcttattccttctggaatccttccctttagtttcatgcgcaaggggaagaagcaattcatttgactcttactttattatttgatttgccggcaccctcttcttcacgggttttcttctcactctacttcatgttcatgcctttctgttccatcaccatgtgcatgccctntgtttatccaagattgagtctttaccctatttgcttattttccaggagctgaaaaaaaatgggagaaagtgctttgttctct

SEQ ID NO: 24815 - DNA, 251 bp, Glycine max
  Clone ID: 700907211H1
gaaagattcccaaaacacgtttgctatgctgacaaccttcaatgaagttgatatgactaatttgatgaagctcctttctgattataaggatgcttttgtttcaaagcatggagtcaaattggggcttatgtctggctttgtgaaagctgctgttaatgcactccaacatcagccgattgtcaatgcagtcattgatggtgatgatattatatacagagattatatagatatcagcatagctgttggtactt

SEQ ID NO: 24816 - DNA, 256 bp, Glycine max
  Clone ID: 700907212H1
gaaccctaatttacattgcaattgggttggtagggagtgtagggcagattgcgtagaatcggaagatggaagaggaagagcacgaggtgtacggaggagagatccctgacgagggagagatggaaggagacattgacatgtccgccgccgacgatgacgccgccgtcaaggagctcgacgagatgaagcgccgattgaaggaaatggaagaggaagccgcagcgcttcgcgagatgcaagccaaggtcgataagga

SEQ ID NO: 24817 - DNA, 257 bp, Glycine max
  Clone ID: 700907213H1
ctcatttcttctcatcttctttttcttccctttaaaattattattccgtgcaaacacaacaacaacttcatcaccaacacgaagaacaagattagcgttatgggtctcttcctttctaggaatttggcttgcaaattcatatacccttttcttttttccaataaggtttcaaaggatttgttccccaagcagttggagaacatgatgtctctggtctctcctcgtactggcaggcatttgcagcgctatgacaaagg

SEQ ID NO: 24818 - DNA, 256 bp, Glycine max
  Clone ID: 700907217H1
aatcgattacactgatcctgaagagcttgagttgttggtcagaactcttatagatctggatgcaatggatggtcaacaaagtgtttctttgttggcagagtgttctagttcccctgatgtcagcactagacgggctttagcgaatgcattggcagcagcaccatccatgtggactcttggaaatgcagggatgggggcattacagagactggcagcagatagcaacccagccattgctgccgcagcatccaaagct

SEQ ID NO: 24819 - DNA, 255 bp, Glycine max
  Clone ID: 700907218H1
cttgatccttctttttctccttgaactcaaacatggcagatgaggtggttctgctagatttctggccaagtccatttgggatgagggtcaggattgcacttgctgaaaagggtaccaaatatgagtacaaagaagaggacttgaggaacaagagtcctcttctcctccaaatgaacccggttcacaagaagattccggttctcatccacaatggcaaacccatttgtgaatccctcattgctgttcagtacattg

SEQ ID NO: 24820 - DNA, 253 bp, Glycine max
  Clone ID: 700907220H1
attctctttcagtttttggcattgaagaatctgagatcggaaaattcacctctccaacccccaatcccatcgttgcaaatgatccgattcattctgttgcagaacaggcagggcaagacccgtcttgccaaatactacgttcctctcgaggattccgagaagcacaaggtggaatacgaggttcaccgcctcgtcgtaaacagagaccctaaatacacaaatttcgtcgagtttcgtacgcacaagataatat

SEQ ID NO: 24821 - DNA, 254 bp, Glycine max
  Clone ID: 700907221H1
atccaacaacattcgatctttatgatgattcatcaactacatcatgtccatattacttcaaatggatccatgaagatctaaaaccatggaagagtaaaggaatcacaagagacatggttgaaagaggcaaaaacgtttcccattttaggcttgtaattgtaaatggaaaagcttatgttgaaaagtatgacaaagtgtatcagacaagagatgtgttcacaatatggggaattttacaacttctaaggttatac

SEQ ID NO: 24822 - DNA, 109 bp, Glycine max
  Clone ID: 700907222H1
agatgatccttgctctcttaaagattcaatactgggtgtgcgtgaagataatccacttagaacacaatccatattcccaagtcaaacatcagctgcaccctgtaagggc

SEQ ID NO: 24823 - DNA, 255 bp, Glycine max
  Clone ID: 700907223H1
ctcgctctctgatctgttttgtttcaggagccacccgctcctgcagttttcttttgcggttgtgagtggaaggccattctcgcaacgtttgagttcagcagatccagaatttttcagaaaacaggtttaggagaatgaagaatacggaacgaattgccaatttggctttagcaggtttaaccttagcgcctcttgttgtgaaagtagatccgaatttaaatgttattttgactgcttccctcactgtgtttgtgg

SEQ ID NO: 24824 - DNA, 107 bp, Glycine max
  Clone ID: 700907224H1
acttctccttggttgcaccatgtcttgctatgtgtaggatcttgtgtaccttcttaagctttgagcaattcccttgtacttttatttcactccatgatcatcagcca

SEQ ID NO: 24825 - DNA, 253 bp, Glycine max
  Clone ID: 700907226H1
cttctgagctttgattagtgtggcctagttgttgttttctcgatgagaaaggcttcttccactatgcattccgatcttctgcgattttgggttcccttgttgctgcttgctagcttcagctatgctccttctgtttcggccacaactgaaatttcacggaatgaagtgaacacagatgggaaggtgataaatgaagagttagcacaaccaagtctaaaaggacatgatgaagaagcaaagttcaaaggatttt

SEQ ID NO: 24826 - DNA, 255 bp, Glycine max
  Clone ID: 700907228H1
ctcggctattgcaacaccatctgcccagattcgattccatgctgccgatcgactaaatacagcatgaacttagctctttattcagtgttattttgtgttcacgcagtctttgcagcaagttctaatgggcatggacacaaatcacaagactggttaaaccatggtggagatatgttcaacagaagatatgcttacaaagagcataagatcagcccaaaaacagcaccgaacctacgtttgaagtggaaattcaat

SEQ ID NO: 24827 - DNA, 257 bp, Glycine max
  Clone ID: 700907229H1
gaaagaaagaaactgcaacttcctctgttttgctcccctgtttaggccttttcataagcttagaatgacacacaagtcattttccattgctctagtgactctcattgctgttctctttgtcaacatgaacatccaaggtgccactgctgactatggtagttggcagagtgctcatgccactttttatggcgggggtgatgcttctggcacaatgggtggagcatgtgggtatggaaatttgtatagccagggctatg

SEQ ID NO: 24828 - DNA, 262 bp, Glycine max
  Clone ID: 700907231H1
caagcgacgccgtttgggtcctcttccacctcgccttcttctcccaatgccttccctccgcctgggcccactcggcgatcctcctcccgggtcaactcgcccgtgactcaccgcagagctgccccgcccctgaccccaacctctactacaagccagtcatcggaatcgtcagccatcccggcgacggcgcctccggccgcctcagcaacgccaccggcgcctcctacatcgccgcctcctatgtcaaattcgttgaggccgc

SEQ ID NO: 24829 - DNA, 105 bp, Glycine max
  Clone ID: 700907238H1
ctcgagccgcaaaagtcaagcgaagagtgacttatgtatcaatagtagtctagctttctcagaatttgaagttacaacctccctattggtcaactgaactggtga

SEQ ID NO: 24830 - DNA, 251 bp, Glycine max
  Clone ID: 700907239H1
caaagcttctgaagtggctgatagtaaaacttgccttaatggtgactccaactccatatgccccagtcataatgagcctaatacaccacatgcaattcctactgaaatcaatagtggattagacaatgagaatagggataatgaaaagcaggctgttgttgcacatgcagataatggacattcgatctcaaagaacttgtactttttggaccctgatgattcatataatggtaatgagtcaggaacagaag

SEQ ID NO: 24831 - DNA, 252 bp, Glycine max
  Clone ID: 700907242H1
gtagaagccaggctgagccatcttctgattcagccaaagtccaagaactgagtgtgtatgagatcaatgagagagatcgtggaagccctgcttatcttagattgcgccagaaaactgtcaattcccttggtgatctagtccccttcagcaacaagttgtattctggcatgtttgcaaaagagggtggggataacagctggaatctgtgtcttgatccaaaacaaagccgagaagaagggagataggtatgag

SEQ ID NO: 24832 - DNA, 54 bp, Glycine max
  Clone ID: 700907245H1
ggattcggctcgagtcgagcgattcggctcgagaactatcttcttccaaataaa

SEQ ID NO: 24833 - DNA, 231 bp, Glycine max
  Clone ID: 700907248H1
tagacattcaattttatggatgaataattaatatagaacaattaatgtaaaaataattacatctaagcacagagagagagtaagagatgagtaattggaattgcgagggcagatgattgaatgaatatttttggccattcctaaaactgtccgagcttaataccttggaatcttggattttgcattgcgcagatgtgaaactattccaaagtcagttttcagagaattgtt

SEQ ID NO: 24834 - DNA, 260 bp, Glycine max
  Clone ID: 700907201H1
ataaaaatagataatatcctctaatatatttgatttgatttagggttaccgaaatttaaatttgaaatgaaaaaaatcatttgatttggtaacaaataaaactaaaagtataaaacaaatatttctattattttgaattttatttcttatgattaggtaaaagaaatgcttaaaaaattatattttaagcatatctctgacctaatcataaggattacaattcgtaataatggttatattttcaatgatctgtcttatga

SEQ ID NO: 24835 - DNA, 108 bp, Glycine max
  Clone ID: 700907249H1
cttttgttctacatgaacgatcagttattgatcaccattttagtggttgattgttcttaaattgaaaagaattttaccagtaatgattttatttatgataaattattc

SEQ ID NO: 24836 - DNA, 247 bp, Glycine max
  Clone ID: 700907136H1
gcacgcttaagctcaccactccaagctttggggagctgaaccatctaatttcagccaccatgagtggtgtgacatgttgtcttcgtttccctgggcaactcaactcagatcttcgcaaacttgctgtgaatctcattcccttccctcgtctgcactttttcatggtgggttttgccccactcacatctcgtggttcccaacagtacagagctcttactgtacccgaattgacccaacaaatgtggga

SEQ ID NO: 24837 - DNA, 124 bp, Glycine max
  Clone ID: 700907137H1
ttcaaaaacaatggcaggcgccgtggtgaagaaggaagactctctcaacctgaaagtcactaacaagagtcatgttcaacctgaggagaaaattggaaggaaagagtaccagctggtcactttt

SEQ ID NO: 24838 - DNA, 243 bp, Glycine max
  Clone ID: 700907142H1
ccaagttcggcgtctatgtcaccgttcccatcattctcatgtacactttcgccaacaatcccagcaacctccgcaagttcatgggacataggtcatacattgaatatcccccagaggcagaaaagccaccatcaccggaggaacttagggaaatggcacgggagatggctcgtaaaaggaacagttcttgatgctccacgtgattgttttggctgcaccacagtggttgtgtaacagtatcac

SEQ ID NO: 24839 - DNA, 242 bp, Glycine max
  Clone ID: 700907143H1
ggtgtgatgagattagttttgagaagaaaccagcaatcggcgattaggagtgagagagatatggagggaattgaaggaaatagcagcagatacagtctgaaaccctcgcgaatttgcaacgaagatgttctgatctgcgtcgacgtcgatcctcagtgcctcgtcgaaatgaaaggtgccaccggtcccaatggcagacccctcacccgtttggactccatcaaacaagccatcgttctctt

SEQ ID NO: 24840 - DNA, 237 bp, Glycine max
  Clone ID: 700907146H1
ggaaggtgttgatatgacatatttgaaaaatgttatcttaaagctgcttgagactggtgaagttgaggtattgctaccagttattggaatgctgcttcagtttagtccagaagagatacagaagtgtcaacaggcgtatcacaactccacagatgttccaccaccaaatcctgcaagcgatacttcaggatctggcctatcgcttttctcaagattcacattttcttaatggcataa

SEQ ID NO: 24841 - DNA, 117 bp, Glycine max
  Clone ID: 700907147H1
cttaatagaagtactactaagtcttgcttccggattgcgttggctctgtcatgatctggaaatacctctacgagagcatgagtaatttttgcttaactaataagttgtataatattg

SEQ ID NO: 24842 - DNA, 248 bp, Glycine max
  Clone ID: 700907149H1
cgagttataaaaacggtgaaacgattcaagatatttcaacaggacaacctgggacgccgtttgattacggtgccggacacgtcgatcccgtggccgctcttgatcctggtctcgtctacgatgccaacgtggacgattacttagggtttttctgcgcactaaactactcgtcatttcaaatcaagcttgctgcgaggagggactatacgtgtgacccgaagaaggattacagagtggaggattttaat

SEQ ID NO: 24843 - DNA, 248 bp, Glycine max
  Clone ID: 700907150H1
gttaaacggcaccgcgttccgtccctcctctctctctgtgtggttaacagaaagaacaacgctgagatccaatcacaatcattcattttcattcataccgttcgcaacacgatcactatttctgcgacgatggtggcacattcgagttcttggggcagggcactcgtggccatctcgccctataccttctctgccatcggcatcgccgtcgctatcggcgtctccgttctcggcgccgcctgggggat

SEQ ID NO: 24844 - DNA, 240 bp, Glycine max
  Clone ID: 700907159H1
tgcgaagtatctatcagttttactgagtattatcacctctcagccatagaacctaccaagacatataatttaatataagcttccatctcctatttttattaccactaccataaagttcccatctacttaatttcatgaaggccgcacctaagtgctgatacaaaattcaatttggggttattgcttgtattgttgataatttatgtcatcatctattgctgttgttatggtatgtatacc

SEQ ID NO: 24845 - DNA, 241 bp, Glycine max
  Clone ID: 700907160H1
tgggattagcagaagttgtagcagggaaagtgttagcataatcccactagaccatttccttttcttatgaatatcattccaaccagtgccaacaattcggttcaagaccaccctcaagcaccatccaaacctgttatttgtgatctaccattggctaggaaagcttcacttcatcggttcttggagaaaagaaaggatagaattgctgccagagcaccatatcaaacaagcaatcacatgg

SEQ ID NO: 24846 - DNA, 75 bp, Glycine max
  Clone ID: 700907161H1
gcagagaaaaagcatatggtctcccgtcacagatccaagaagtggtttcaaccgggaatccagaactttccacag

SEQ ID NO: 24847 - DNA, 242 bp, Glycine max
  Clone ID: 700907168H1
gtatggattgcacacttatttttaaagtaagtagatttggtgctggctactttataggctgtgatcaacatcctaggtgcaagtacattgctaaaacattatacggtacagaggaggaagaggatgcatctcagccaaacagtagagtagaggaaccaaaactcctaggtgttactagtggttcatatgagaaggttcttttgaaaagtgggccttatggagtttatgttcagctcggagaa

SEQ ID NO: 24848 - DNA, 243 bp, Glycine max
  Clone ID: 700907169H1
tgaaaagcatgctgacacgagaaatttgttagacacacggttaaaatctatcctagagagtgttcggttgaattatcttctagaaagggagggaagcaactgggatgcgaatttaaaatgggaagacattctttctcttggagaacagcaaagattggtgatggtatgtaaatatattctcttgaaattttagacatttttttttaaatttcttaaatatttttgtttcatgcagcatgcccc

SEQ ID NO: 24849 - DNA, 245 bp, Glycine max
  Clone ID: 700907170H1
aatagccccattttctgaaatgctggaaggagcactgaaaacacatcaccagcttgtgatgctaatagaaaatgttgactttgctgatgcccagttcaagaaattcctctgtgatggattcgaaacaggaaactttggaaatttcactgaagagaactcaagccaagtaatattcatattgacaaatggtggaagtggatccactaacattgagcagcagaatgaggactcggttatgaggttgt

SEQ ID NO: 24850 - DNA, 74 bp, Glycine max
  Clone ID: 700907171H1
cttcggaattcccggtgcatattacattaagaacttcatgcaagttgagttctatctcaagtctctaactctcg

SEQ ID NO: 24851 - DNA, 240 bp, Glycine max
  Clone ID: 700907174H1
caggaagttgtctgagtcagacccccaattgcagttccaataccacagaggccttctcctcacaggcaaaatctccgtaaacctaatttggtacggtaagttcaaaccttctcagaaagccattgttgctgatttcatcacctctctctcctcttccaaacccctcaccgcccaaccatccgttgccacgtggtggaaagccaccgacaaatactacaaaaactcgttccccaaacttgc

SEQ ID NO: 24852 - DNA, 238 bp, Glycine max
  Clone ID: 700907175H1
aaagggtatgcattgacccctttgcacaaaggaaaagaggggtggtgttgtgttaaaaaaatattgaacttggttggttctaagtagaaacaaaaattgtcattttcccatttctgcatttttggtttgggagaggagaaaccaagaattaagaaatgggttgctccgtaagagtttgttgtgtcttatttttggtgttgttggtggcatgtgttagaggggaggacccttatagatt

SEQ ID NO: 24853 - DNA, 241 bp, Glycine max
  Clone ID: 700907176H1
cactttctctctctctctctctcacccagatcttgtagcaatggcgagcgctcccactccacgcgaagagttcgtgtacatggcgaagctggcggagccggccgagcgctacgaggagatggtgtcagttcatggagaaggtctccgcctccgccgagagcgaggagctgaccgtggaggagcgtaacctcctctccgtcgcctacaagaacgtgatcggcgctcgccgcgcctcctggcg

SEQ ID NO: 24854 - DNA, 233 bp, Glycine max
  Clone ID: 700907178H1
ggcatgtaggaatcgacagatgtcttagagttttctaccacaataattatgttatatgtgtcaatttcaatcctgtcaatgataattttttcatcagtggttcaattgatggaaaagtgcgtctatgggaagttgttcactgtagggttagtgattacattgatatcagagagatagtcacagctgtgtgcttccgacctgatggaaagggcacaattgtgggtaccatggca

SEQ ID NO: 24855 - DNA, 236 bp, Glycine max
  Clone ID: 700907179H1
ttgaaaaaactgttatgaagcttgttgttgatgctgagacagataaggttctcggagcctcaatgtgtggacctgatgcacctgaaattatgcagggtattgctgttgcgttgaagtgtggagctaccaaggcacagtttgatagcacggtgggaatacacccatcggctgcagaagaatttgtaaccatgcggtcagtgacaaggcgcgtagctggaactggaagtgtcaaaccc

SEQ ID NO: 24856 - DNA, 247 bp, Glycine max
  Clone ID: 700907183H1
ctcgtggatgtgtcatctcctttattcaacgtagaaatattgttattattccttcctggtattaaggaaatactcagctcttgaagctctgaatattaacagagcatcatcggcagatggggtctgaaggtcctccagcagctgtgacagttcatgtaacaggttttaagaaattccatggagtttctgagaatccaacggagacaattgtcaataatttgacggaatatttgaagaagaagggttt

SEQ ID NO: 24857 - DNA, 248 bp, Glycine max
  Clone ID: 700907184H1
gagagagtagagaaaaacaatgtcagggctgaaggaattgctgaagaaagggttaggtttaggcgacatggcgttcaacgccggcggcggagccgatatcctggttccccggccacatggccgccgctacacgtgccatccgccaccgcctcaaactcgctgacctcgtcatcgaagttcgcgacgctcgcattcccctctcctccgccaacgccgacctcccgccacacctctccgctaaacgacgc

SEQ ID NO: 24858 - DNA, 246 bp, Glycine max
  Clone ID: 700907185H1
ctcgacttcttcgttgcgacactgagagagttgagggagctggcggcgctttgacttcttcacagtgtcactctgtctctctttttcttctcacactcacgcctcacgcagttcctaagtccctagccagtacaacctcactcactttctctctttgtctctctttctctcagattcctacattgtctgcgcactggcaccaatcaaccataagatgtgcaccgtcgctgaaatcggcctcaacga

SEQ ID NO: 24859 - DNA, 106 bp, Glycine max
  Clone ID: 700907187H1
atctcaacgccccattctctttccctaacgtccccgacgacgccgtaacgtcctccccttcatggcctcttgcgacgacgacgacgacttctctctcctccgcgat

SEQ ID NO: 24860 - DNA, 248 bp, Glycine max
  Clone ID: 700907134H1
ctgtgatattcagctcggattgaaccctcttgacatgatctccggtggctcccccgtcggctccgtcgcctccaaggtcccaaggatcggaatcctccctcgtgatgctaaggatgagtcgatgatgaagtggtttgaggtgccggggttcaacatcattcacgcgataaacgcgtgggaggaggacgagggaagaacggtggtgctggtggcgccgaatattctttcgatggagcacgcgctggaga

SEQ ID NO: 24861 - DNA, 117 bp, Glycine max
  Clone ID: 700907191H1
ctacccctatcttgtattagtaaaagagaaaatttgtgatgtgtactcaccgtcggtggattacctcgtagtagtaaaaagagtacaacaatgtgacgtatttttatttataaaaga

SEQ ID NO: 24862 - DNA, 237 bp, Glycine max
  Clone ID: 700907193H1
tatcgatcctttagtccttcggaatttgaagctagaggtgtcagaaaagttaccacagggataactggcttgtggcagccaagcgttcatagcgacgttgctttttgatccttcgatgtcggctcttcctatcattgtgaagcagaattcaccaagtgttggattgttcacccaccaatagggaacgtgagctgggtttagaccgtcgtgagacaggttagttttaccctactgatg

SEQ ID NO: 24863 - DNA, 234 bp, Glycine max
  Clone ID: 700907194H1
ctagaactagaactagggtttcatctttgccatcagaaacaacaatgatttacgacgttaactctccccttttccgatccttcctcagccagaagggaggctcctccgataagaggaaaacggatgaacagaagccaaaagagcagaaacccaaagccagcgagaacaaacctataatgacagagtgacaacaaatttgctgcattcagttgtagaatgataataggtggtaga

SEQ ID NO: 24864 - DNA, 233 bp, Glycine max
  Clone ID: 700907196H1
gtgctttataggtagatctgagtcgtggggtttggtttttggatgaattatagatgttggcagtttgcagattggtgtaatgatgaagcattttgacctgggggtggtttcacttgtgcgcaaaaggttttcatcattacttccttttcgtttctctctttttctctgatcaagttatgatggtgtttttgttgtcagggtgtaactacctttttcttccttcatcattagcc

SEQ ID NO: 24865 - DNA, 161 bp, Glycine max
  Clone ID: 700907083H1
tgctacgacgccgttctgtgtattatccttccccttccccggtcagccgtgttgttttgttcggaatctgaaatcggaaattggaagcagaagaatagtcttcagagaagggtaaaatcgatgagtaggaacgattccaagtacttctccacacaacatac

SEQ ID NO: 24866 - DNA, 258 bp, Glycine max
  Clone ID: 700907084H1
aagaggggcagctagaatcagagaccttttcaatgcagcaaggaaatttgcaccatcaatcatattcattgacgaacttgatgcagttggaggcaagcgtggaagaagtttcaatgatgaacgtgaccagacgttaaatcagttgctgacagaaatggatggatttgaatccgagatgagagtggtgtcattgcagcaactaaccggccagaagccttggatccagctctatgtcgccctggtcgtttctcaagaaaa

SEQ ID NO: 24867 - DNA, 260 bp, Glycine max
  unsure (1)..(260): unsure at all n locations
  Clone ID: 700907085H1
catgatattcgtggcagggacacccttctataggcacaaagtgcctgcagggagtaccttcactagaatggctagggtcgttgtggctgctttgaggaaatcaaaagttcctgttcctagtgactctaaagaactatatgagtttgacaaggaagagtatgcaaagaaagggagctacagaattgacacactccaacattaataantcttgacaaggcatgtgtgaaaacagattcgaacactagtccatggacgctatg

SEQ ID NO: 24868 - DNA, 78 bp, Glycine max
  Clone ID: 700907086H1
catatatctgtctctctcattgttgctgagagagaagaacccgtttccctttcttccagatgatccacttctgagaaa

SEQ ID NO: 24869 - DNA, 189 bp, Glycine max
  Clone ID: 700907087H1
ctcgagccgagggtcgtgtttccctgcttcagtttcagcttcggcttcgagaagcgtcgattgggtccttaagctgttccttctctgtttctgctttggagcatcttggagcaaatgagcaatggagcttgtggagcacggctcacctcaaggattgctctcttgacaaactgtataactccaccaaca

SEQ ID NO: 24870 - DNA, 214 bp, Glycine max
  Clone ID: 700907088H1
aactcgcatacccactggccgtttctctacatggcctcaatattcctgattttatcagtcaagaacttgggtcagagtccacgttgccatagatacactcctgagctcaacggggaaagattgctcgtgggtgccaacttagtctctgctggcttggaatcctcatgacatggagtccatttgaaacacatagaatccaagacaactggatatt

SEQ ID NO: 24871 - DNA, 259 bp, Glycine max
  Clone ID: 700907089H1
gttcaagcttgtacaacccaacattattcataacataatgttgaggctggccacagcacagttaggggaaggttcgattgacctggagtctataggaaacatagaagttacttcagacggcgctgcattgtttggtgatggagaagataaccacaatgattctgaagccgccaattgaaaaattggctcaacaaaagtccattgtctaaaaattggtgttttggtggggggtttaagtggataactcctaatagtaaga

SEQ ID NO: 24872 - DNA, 257 bp, Glycine max
  Clone ID: 700907090H1
gggagattgagactcctgaaagcctttttatctttccttctttgacttcaggtcttaaacggccattaccatctggtcttttggaaaatgagtggggaactttgttaagaagaccctttataagagttccagaaaatggaaccattgagctctcaaactcaattccaaatctctactcagaacactgatgagaatgcttttgaaaccccagctgattaacaataatggagcttttttatctgccatgcaacaagaat

SEQ ID NO: 24873 - DNA, 196 bp, Glycine max
  unsure (1)..(196): unsure at all n locations
  Clone ID: 700907091H1
gtttcttcctttctctgctctttgccttctctgacacatttggtgccttgtagagcgtgttttggcagtgaaggtggtatggcgaaggacgttgaggttgctgagcgtggctccttctctgggaaggactaccaggaccctccacacgacatactatataatgctnatgagctcacaaagtggtcctttacagggc

SEQ ID NO: 24874 - DNA, 255 bp, Glycine max
  Clone ID: 700907092H1
ccatcttcatattcatcaaactcatcaaaatgaatctgtaccactcctccaccaccaccaccacctacaccatcttcaccgtcatattcctcctccttgcaatattattcactctcacaccccacaaggccaacggtgccacgtgtcaccctgaggaagaagcgggcctgttgggcttcaaatcggtatccgatccgacccgtccggcctgctcagtaactggatatcgggtacggactgctgcacatggaccgg

SEQ ID NO: 24875 - DNA, 258 bp, Glycine max
  Clone ID: 700907093H1
aaaaatgttcccttgaaaggtaattctcctggattattgacaagacataaatcagtgagtggcaaaccaactgagcggtttttagcatcatcacctgcctcttctcaatcagtgctgaagttgaaaaaagatgccatgacaaggcattctgaggccacggacttcagagattggtgtgagaatgagtgcgttaggcttattgggacaaaagatacaagtttccttgaattttgcttgaagcaatctagatcagaagct

SEQ ID NO: 24876 - DNA, 111 bp, Glycine max
  Clone ID: 700907094H1
tatcgagataactcgaaacagtgtgatgcgaatgaagtgtcttgttttcttcgttgctgacaattttgtggagcatcggcaatgtccatagcgtacgagtatgttcccctc

SEQ ID NO: 24877 - DNA, 259 bp, Glycine max
  unsure (1)..(259): unsure at all n locations
  Clone ID: 700907096H1
caatatcatctagctagctagctagctagcaaatagcaatgttaaaaaaccaaccacaaccagattggcctgagcccattgtccgggttcagtcctaatccgaaaactgcgaagattcaatccctgaatggcacatcaagccttctactgatagaccatccttaaaaagttgtaattttgatgatgctatattccaatcatcgaccttggtggactatttggtgctgaccancatgtctcagcctcaattcgttagcaa

SEQ ID NO: 24878 - DNA, 109 bp, Glycine max
  Clone ID: 700907102H1
gatcaatatggcgggaagggatcaagtctcctactgtgggaaaattatttcctacagttagatgtatcaatttttaaatcaatggctcatttttttctttcttttttct

SEQ ID NO: 24879 - DNA, 246 bp, Glycine max
  Clone ID: 700907105H1
ctgccagtagtcatatgcttgtgtcaaagattaagccatgcatgtgtaagtatgaactaattcagactgtgaaactgcgaatggctcattaaatcagttatagtttgtttgatggtatctactactcggataaccgtagtaattctagagctaatacgtgccacaaaccccgacttctggaagggatgcatttattagataaaaggtcaacacaggctctgcctgatgctttgatgattcatgata

SEQ ID NO: 24880 - DNA, 246 bp, Glycine max
  Clone ID: 700907109H1
aagaaccccatggctgattcagaaagatatatcagtaccagggatagttgttcgactcgagttgccatactcagagatagggaaaaggatcgtagtgatccagattatgaccgtagttatggaaggtatgctaggagtatcccaacctctgctgttaacttggtgccatttaacttgcaaaaagctcaaccttcatttgctcaatatgatgctacgtttaatcagttaggtcagatgtcacaaact

SEQ ID NO: 24881 - DNA, 242 bp, Glycine max
  Clone ID: 700907112H1
caatttctctctcctctctctctctctctgagttctcctttctctctcttgagttaccatttctcattcattcataatgcactaatcataacaacaccgttcagctcaacaacaaaacctaaaataaatcataacaccgttcgttcatcaatggcggttccgctgcattcctagattgctctctttttcaccaattttcattcgttgcgtgtgtttgttcgctgagtgcgttagttattaca

SEQ ID NO: 24882 - DNA, 249 bp, Glycine max
  Clone ID: 700907113H1
ccaaatccatgatgcctatgttaagctacagatcggtaaccagattttgaagacaagacctgttcaatcaaggaccatgattctgcgttgggatcaagagctgatgtttgttgctgctgaaccctttgaggaacctctgattgtttcagtggaaaatcgagttggtcccaacaaagacgagaccattggagctgttattattcctgtagaccaaactgacaagcgagatgatgatagacttatccacac

SEQ ID NO: 24883 - DNA, 238 bp, Glycine max
  Clone ID: 700907116H1
attaactttagtagagatcttttgtagacctgtagtttactagtgataaagtgaaagatgggttcgaagatagtcatagtttctatgctggccatgcaccttttgatctcctcggaggtgttagagttagctactgcgggtggtgggggcaaccttggtgttggtggtggattatcaggtgctggtcgtggtggctcccctcgtggtcgtggaggcttccctggtggtgcgtattttc

SEQ ID NO: 24884 - DNA, 247 bp, Glycine max
  Clone ID: 700907117H1
gctgtatcttggcgcagtgaagggataaactacaagaaaaatgaggttttcttggttgaggtggagagtgttaacatacttgtcaatagcaatggacaaataattaggtctgatgttgttggggcattgaagatgagaacatatctgagtggtatgcctgagtgtaaacttggattaaatgatagagtattattagaggcacaaggtagaacaaccaagggaaaatcaattgacttggaagacatca

SEQ ID NO: 24885 - DNA, 246 bp, Glycine max
  Clone ID: 700907119H1
gcctgcccctatacctcaccccacttactattattattgtacaacataaccaggtcccagaatgctttttagagagagaaagagtaataataataaagtggaagaaaaagaattaggagagtgaaacaagaagaagaagaagaagaagaagaagaagaagaattgagaagatggtgtttgaggaaactgagctgaggctgggactgggactatgtctccctggaaatggaaccacggcaacaactg

SEQ ID NO: 24886 - DNA, 249 bp, Glycine max
  Clone ID: 700907122H1
tggaaagttggagaaagcaaggtccgggttaaccaagggtccagagtaaatatatctgtaacagatagaagccaattggaagtgtacaaaattcgagtcattagcttattaagtgtgatgatgttgggttctatgtatcgtgactgtaagaatggttccatatttggctttgctacccacctggaagaggatttaccgaaacatcatacatgacctgtaacggagtagttgtagtttttttttttagtg

SEQ ID NO: 24887 - DNA, 243 bp, Glycine max
  Clone ID: 700907125H1
cggctcgaggttttttgttcttggtcgagccttgtactgattaacgagaatggacaaggaattggagcttggttcccttgaaggtgaaatggccacccagcacatttcataaccacagaagcgttccggtggtcttgttaccatgcctttcatcattgcaaatgaggcacttgcgagggtggcaagtttgggccttttgcccaacatgatactgtatttgatggggacctacaggcttcacct

SEQ ID NO: 24888 - DNA, 259 bp, Glycine max
  Clone ID: 700907082H1
gctagaagcaataagatgaaaatgaaagtgcttgttttgtttgttgctacagttttggtagcatatgaatgccatggctcagactaccagaagttccctctccaaatgaaaactgggtttggtgggcaatacagcaatgaggtggcatgtgccagttggaggcttggcgtggaagcaaacaacgtgtcaagtggcaaactgttcctgcagcttgcggagagtacatagctgactacgttctaggagaccaatatagatc

SEQ ID NO: 24889 - DNA, 241 bp, Glycine max
  Clone ID: 700907126H1
caaatacttgataggaactggggagctggttggcaccttttatctttattgcttgctactaaaccttctcaaaggataagttgtttggatgctcttcgacacccattcctttgtgggccaagatggcgagtagtcccatcaatggatattatccgatggggtctgggttctactgcaatgcgtattagggagaagtacatctatcgtcagcctcagcaaagcaggcttgcccacttcattg

SEQ ID NO: 24890 - DNA, 241 bp, Glycine max
  Clone ID: 700907129H1
atatatagtcattcacatagtactcatcattaatttcagaagcgccaatatatgatgaatggtagtggcggttttatgatgctgacgcctaagtccggcggttttcctgtggaagtcaacacccaaaagctgaaacgcactgacagcagacaaacgggcgtgttctctgtggaaaggttcatcacatactcggtggttggtatgcagcgactcctttcattgaagataactaaggtaatca

SEQ ID NO: 24891 - DNA, 241 bp, Glycine max
  unsure (1)..(241): unsure at all n locations
  Clone ID: 700907130H1
caaacaacaaaggaggacaccgaaagcaacaatcttcatcaatatactcatcttgttcatctcagctcactccttccttcatcttcctccacctcttctgccaaaggtcctttaagaaaagcatcattagaagtggtacacaaacatgggccatgctcccaactgaataatcatgatggcaaagcaaagtctaaaacaccacacagttcgatcacaanncaagacaaagaaagggttaagt

SEQ ID NO: 24892 - DNA, 239 bp, Glycine max
  Clone ID: 700907131H1
tctgaactcatctcactacattaatattcccttgggtttcattaattgtgacatttagctttttttattgaaccgtgtcaattgccgctactatgaaggctttagcttttgttgctttgcttgttaccattaatgcaatagtgtgtgaaagtagagtggcgagaaaggaccttggattggaccttggtggggtgggaattggggtgggtgctggggttggactaggccttggtggtggg

SEQ ID NO: 24893 - DNA, 109 bp, Glycine max
  Clone ID: 700907133H1
cttctttctttttttcaatttccaaatcacgaaactcgagaagatggagaaagcgatcaacagacagaagattttgcttcatcatctcaacccttcatcatccacacaa

SEQ ID NO: 24894 - DNA, 258 bp, Glycine max
  Clone ID: 700907045H1
cgaaaccctaagcttcccctttctttcactctcatcagatcctttcgtcgttgcgcgaaaccctatctctgaaccagcaaacatgtctgcagccatggatatgtcgctcgacgacataatcaagaacaacaaaaagtctggatccggaagttcacgtggccggacccgaccctccggatccggacctactgccggctccccaaccgtgccgccaaccgcgccgcaccttatgcccccgctaaggcgccggaggcaacg

SEQ ID NO: 24895 - DNA, 202 bp, Glycine max
  unsure (1)..(202): unsure at all n locations
  Clone ID: 700907046H1
tctctccctctttcctatcacactttctagatagctagccaatcagagtaagatctaaagatatttcttatatatcctatggtccgagagtgcccttgttctgcgccaaccctttcttccacataacatacgaatttaacntnctctcttgagtcnccttatcantcattactcttcttcttcaacctcaccaaattcaacc

SEQ ID NO: 24896 - DNA, 265 bp, Glycine max
  Clone ID: 700907047H1
gcagtaagcactgagcttgaagtaatagatggacagcagtcgcaatttcttgcttagttctcatgtggcgccatccccacccgtcaaagtcaaagcacaggaaattcgggtatgcaccaaccgcacctgccgcagacagggctcatttcaaaccctagaaactctatctggcctcgctcctccaaacgtcgcgtgaagtcctgcgggtgcttggggcggtgcggtggcggtcccaatctggtggtcctgcctgatggcctcatcg

SEQ ID NO: 24897 - DNA, 84 bp, Glycine max
  Clone ID: 700907049H1
ggcaaggactttgcaacggtgaaaatcctcaccccccacctggcacgacctccgtgtgcacatgatccgctagcactaattgga

SEQ ID NO: 24898 - DNA, 260 bp, Glycine max
  Clone ID: 700907050H1
tgatttctccctcttcgctctctctcagtgaccagagacagatgatgctggagatggcgaacgaaacgctgtcgttgcggcactcgcggcgttggttctactcgcggcgagtgtggcggtggatgctcaggagaactcggacgtgaagacgctggtgaagtacaagcacgggaagaagtactgcgacaaggatgggaatgtaagggctggtcaatttactgttgtaacctcaccattaccgattatttccagacctacca

SEQ ID NO: 24899 - DNA, 263 bp, Glycine max
  unsure (1)..(263): unsure at all n locations
  Clone ID: 700907051H1
cttttctctgtctctctttctctttctcttttctctctcaaaacaaaacaaaacttgaattcatacatacatacatctcccttactttgcttcttcatctctctctctctctttctcaatattcaccagcacagcgcatctcanacatcaatcaatcaatgaaatcgtgtttaatgcctttgcttctcctctttctgtgtgtatgtaaaatctttgtttttatcagaggtggtgcagaatgttgtgtctcagatccctatata

SEQ ID NO: 24900 - DNA, 79 bp, Glycine max
  Clone ID: 700907052H1
gcaacttgcaacaaaccatgctactcacgtgtgaccaccatcccttccctcattcactttcttcaacctcaaccgactc

SEQ ID NO: 24901 - DNA, 262 bp, Glycine max
  Clone ID: 700907053H1
gtgtcaatggccgctactatgaaggctttagcttttgttgctttgcttgttaccattaatgcaatagtgtgtgaaagtagagtggcgagaaaggaccttggcttggaccttggtggggtgggaattggggtgggtgctggggttggactaggccttggtggtgggggtggtgctggttctggtgcagggcaggctctggctctggctctggctcttcgtcatattcaagttctggctcctcttcttcttcatcagggtcagg

SEQ ID NO: 24902 - DNA, 264 bp, Glycine max
  Clone ID: 700907054H1
gacagataaagattcaaaaaagaattgatattattcaagttataatatatatgggatttccaaagtttttaatagagggtaagtctcaaaaaatcgaagaattacagacgaatacgcaaaaaaactgaattgtgtgaatcgaaaaccaaacattgctattgtaaaagttgcaaatgcttataagcacccaatattattggagaatttatagctggacaattaaagaatagagtttcgtttcgtaaagcaatgaaaaaagctatt

SEQ ID NO: 24903 - DNA, 264 bp, Glycine max
  Clone ID: 700907055H1
ctcgagcctaagacattgaaagtgcatattgggaacttgtagtgaaggatatccaagatgcctgcagactatttgaaccaatctatgatcaaacagatggtggtgatgggtatgtttctgttgaagtatctcctaggctcgctgatgacactgagggaaccattgaagctgcaaaatggcttcataaagggttgatcgccccaatgtgtatattaagattcctgctacagaggcatgtgtgccttcaattaaggaagttattgc

SEQ ID NO: 24904 - DNA, 257 bp, Glycine max
  Clone ID: 700907056H1
ctaaatctcattcttcacctgcaactatttggattgctgatttttgttaataccatatttactgatattggcgcatttctttgagaaagttactaattcctagatagaggcaaaaatgttgggaattttcaaggagaagttggttaaagcacccaaagagctgaacagtccagcttcgttgaattcatgactaagcctaagctaagtcacgaaatccttcaggatttcatgtcctgcaattcctccaatgctttctc

SEQ ID NO: 24905 - DNA, 262 bp, Glycine max
  Clone ID: 700907057H1
cgaggatccattggagggcaagtctggtgccagcagccgcggtaattccagctccaatagcgtatatttaagttgttgcagttaaaaagctcgtagttggaccttgggttgggtcgatcggtccgcctccggtgtgcaccggtcggctcgtcccttctgccggcgatgcgctcctgtccttaactggccggtcgtgcctccggtgctgttactttgaagaaattagagtgctcaaagcaagcctacgctctgtatacattag

SEQ ID NO: 24906 - DNA, 261 bp, Glycine max
  Clone ID: 700907058H1
gatccgaggagttaccctttcttttcttttttcttttttctctttcctcattctacttaaaactcccaccagtgatggcaggtttggctccagagggaacacaattcgatggtcgccaatatgatgctaagatgagtgaattgctttccactgatgggcaagaactcttcacctcttatgatgaagtgatgacagctttgatgcaatgggattgcaagagaatcttctgcgaggcatatatgcttatggttttgagaggcc

SEQ ID NO: 24907 - DNA, 79 bp, Glycine max
  Clone ID: 700907059H1
cacagcaaaaccctaatttccaactccgatttcgtttctcctccgaaaacaccctaatttccccttcgctcttccacac

SEQ ID NO: 24908 - DNA, 258 bp, Glycine max
  Clone ID: 700907060H1
gggattagattttatcaatatcctcatccctctctcgccctcaattatcattcatataatatcatcatcatatctgtctctagcaatatttcgttatctgcttgtctgcaactctccgtgttggatttcgttttataattgtgcactattatttcaataacccgcagatatttctgattctcaaaaaaaaaaaaaaaaaaaaaaaaaaaaaaaaaaaaaaaaaaaaaaaaaaaaaaaaaaaaaaaaaaagagggaaaa

SEQ ID NO: 24909 - DNA, 83 bp, Glycine max
  Clone ID: 700907061H1
gaaaaaggcgtgtagtaggatgaagttatagtttttcctcctccagagcaaagcatggccctcagcatcctttaccggagtct

SEQ ID NO: 24910 - DNA, 177 bp, Glycine max
  Clone ID: 700907063H1
gttggtcatctgtggatggcatattgcattccaaactcaccatcactccagggttggaagacaggtccatgttgtttattcggctggaacataggcaagaatagagttaatggcaaacctcagattaagtaccatgatattgatcttacattcccaacttctctggtcgacaaaaca

SEQ ID NO: 24911 - DNA, 240 bp, Glycine max
  Clone ID: 700907066H1
ggcttgacaatttcaattttgtttgttatttgcatcaagattcagtttagttaaatgatgtgttggttttcttagttgtagagaaccctgaatagtattattgaaatattacgaattcagtttgatcctggaagggaaatctcgcctaaaaaaaaaaaaaaaaaaaaaaaaaaagggggggcccccaaatgtgaccctttaccccggggtatatattccggaggggtactttggggggaa

SEQ ID NO: 24912 - DNA, 260 bp, Glycine max
  Clone ID: 700907067H1
caattgcacaagggtgatcctgtacctgtgattcttgagattattaatacaatagaaggtggcccaccagttgatgtttcagctgttcgttctatgtatgaacacctggctaaaagtgcacccacaatcttggatgattctctttctgctgattcatatctcaacatcttatacatgccatcaacattccccgttcagagaggtctagacgatcacaagtgtctgcaaataataattctgtgtatagtcgagattttgaa

SEQ ID NO: 24913 - DNA, 260 bp, Glycine max
  Clone ID: 700907068H1
gcatgatatcccgtagtatgttgtctcagcaaggaagctttggaactctgactggtggtggtcttaaggatcctattgtcactctctttggaagtttgcacgagaatactctccctgagagtggaggttcacgcagtatgctacttcataatgccaacagtatctttagccttggagagacgtcgagccctttggtaccagtgacaacctgcatgcgccactaatgtcatttcaagggggtgctggggagaaggataggg

SEQ ID NO: 24914 - DNA, 262 bp, Glycine max
  Clone ID: 700907069H1
tgcctttcctggacattcaactcccattgcacagctttattgttgcggagactccacctttcctggcattggagtcccagcagttgctgccagtggtgctcgttgtagcaaattcattagtctcggtatctcaacattccaagctgctcgatgcaattggcatataaaaccaaggtttcatcttcatgtcccacgttttcacactggaaaagattgaatcttttctacttctcgtgcaaaaactacatcttggtcaataact

SEQ ID NO: 24915 - DNA, 262 bp, Glycine max
  Clone ID: 700907070H1
tctctttgcaactgcatccgttgtttacaatgaaggctactctgaagggaaagtacgacgtcgacaaaaacggcgctgcctttgccaacatcgccgtcaacgccggcgacgtcaagttccgagcctccgtaacggaagccactttcattaacggccccagcctcaccggcttggccctcgctgtcgaaaacccggttccttcatcgtcgactacaacgttcccaaaaaggactttcggtttcactttatgaacacggttagg

SEQ ID NO: 24916 - DNA, 260 bp, Glycine max
  Clone ID: 700907071H1
gctgagcagagaaggagtttaggaagtgtttggttacttctgagattctgctgtctcttagagagcgagcgatgacggtagcagcaggaatgggttacgctctgctagcgttaggaccctctctctccatcttcgtttctgtcatttccaaaaaacccttcctcattctcaccgttctctccagcaactgctgtggcttataagtttgattgtgctgtctggaatatggaggggggttttgcctctcaacacaacagctt

SEQ ID NO: 24917 - DNA, 81 bp, Glycine max
  Clone ID: 700907072H1
gttttcgacttttacttcttttctgggcctagtcctctgaatgttgttgatcagtatacttccttaattggcagaccagct

SEQ ID NO: 24918 - DNA, 260 bp, Glycine max
  Clone ID: 700907074H1
cgtgactcacatgtgcggcgcgccggtggtgctcaacatgttaaccaacgcgaactccccgttggagaaaccggttcagatcctcaccgccggatcgccgcctcctgcggcggtgctcttcagaacagaggctttggggtttgtcgtgagtcacgggtatggtttgactgagaccggagaattggtgtgtcatgcgcgtggaagggggagtggaacaagttgccggcgacggagagcgctcggctgaaggcgaggcaagg

SEQ ID NO: 24919 - DNA, 249 bp, Glycine max
  Clone ID: 700907075H1
aaaaaaatatctgggtttttttgggaatttctcattagaaatgaagatggagaaaagttcgttcctttccatgaacaaaaggcggtccaagagaggtgaaagagaagtgggtgagggacgatgtccaagtcttgcaaagggttggccatggagctagtaaagtgtctcagtgaactgattgtgtaaaggttgagaagagatcatataaggaatgcgttggagagaagagtccatgcataccaagtgagt

SEQ ID NO: 24920 - DNA, 259 bp, Glycine max
  Clone ID: 700907077H1
cggttgtggagccttacaatgctactttgtccgttcaccaactagtggagaatgcagatgagtgcatggttcttgacaatgaagcactctatgacatttgcttcaggaccttaaaactcaccactcctagttttggtgatctgaaccacctgatatctgcaacaatgagtggagtgacctgttgctgaggttccctggacaactgaactccgacctgaggaagctagcagtgaacctgatcccattcccacgtctccac

SEQ ID NO: 24921 - DNA, 147 bp, Glycine max
  Clone ID: 700907081H1
aggcacttctcatgatcattttctgccttcatcaagtgctggaatgttttatgcagtgcctgaaaattatgtacaccagccttctaattctaattatgacagacaagcattttctgctgctgatgggggatttattgatcttacaat

SEQ ID NO: 24922 - DNA, 248 bp, Glycine max
  Clone ID: 700907044H1
ggagatcaagcaccaaacccaacacacacctctctctctctctctctctctcttgtgctgttgttctatttctcattctttcgcaagtgaatgttgaactgactctgcggttcggttcggtttttttttttttctgtttatggatccgggctctatgataaacgagggttccttcgcgaaaaatgcgagcgtaatacggcgccgtttagcttggcggagatctggcagcatttcccgccggcgattag

SEQ ID NO: 24923 - DNA, 266 bp, Glycine max
  Clone ID: 700907007H1
cttaagagtaccctttacaaattaacattaagaacatgatgtcaaagcattatcatataatatctgattggaacttttttttcttgatttatctgttctgaacttctagatgctaaaaagcgtaagaaatgttcacgacctctggtattacataagaaaaagaggagattgttaccatttgttcctacaaaagacttaaccggagattgaaacagatgggttctcttgcttctgctttaacagccttaaatatggaattcagtgat

SEQ ID NO: 24924 - DNA, 270 bp, Glycine max
  Clone ID: 700907008H1
gttagcttaatcggaatcgccgtcgggaaaaggactattccggcgccggagatgctacggcgggtgaacaatcgaggtgacggcggcgtggttgtggattccggcacgacgttcacgatgttgccggcggggttttataactcggtggtggacgagtttgaccgccgagtcgggcgagacaacaagcgcgcgcgtagattgaagagaaaacgggactcgcgccgtgctattatttgaactccgtggcggacgtaccagctctgacgctgc

SEQ ID NO: 24925 - DNA, 273 bp, Glycine max
  Clone ID: 700907009H1
agaagaaggctgagaacaacaacgaaaaagggtttttggttttggactctgaaagaaactcaaagtgatgcgtttcatcgttctttcgcccaaaccctaacctcgtcctcgtgcattcattccccgcgatcaggtgtgtttttatccattgcaaacagcatgaattttgcagcatcattgtgcagaagattgaatataaggaacttgtgacatatgttcctgtgtatagaagcaccagtggtgtttctggagaaggtttgaatttggcgttca

SEQ ID NO: 24926 - DNA, 96 bp, Glycine max
  Clone ID: 700907010H1
cattagtggtgtattttgattatagattattgtgtggtggagaattgtttattatattgtacccaaattcaactcttcttatctttacgtggaatg

SEQ ID NO: 24927 - DNA, 194 bp, Glycine max
  Clone ID: 700907011H1
tttcaaaactaggttcttgatcggcggtggtcaattttcattgctgtttgtttttgatgagtactgttttttgttttgatggtaagaagagtctgagatatttcgaatttcacaagcagctatagggttttagtccatttcctttgctgctgagggatgttttaagttgcatttaatttataacgaagttttat

SEQ ID NO: 24928 - DNA, 269 bp, Glycine max
  Clone ID: 700907013H1
atccaacaacattcgatcttgatgatgattcatcaactacatcatgtccaaattacttcaaatggatccatgaagatctaaaaccatggaagagtaaaggaatcacaagagacatggttgaaagaggcaaaaacgtttcccattttaggcttgtaattgtaaatggaaaagcttatgttgaaaagtatgacaaatgtatcagacaagagatgtgttcacaatatggggaattttacaacttctaaggttatacccgggaaagataccag

SEQ ID NO: 24929 - DNA, 269 bp, Glycine max
  Clone ID: 700907014H1
gaaagagggaacaagaagttgacggtagcagaatggtggtctccagtacaaatccccacaataaggagatagctatcaggaggaggattgctagcatatttaataaacgtgaagatgatttcccatctttgagagaatataatgattacttggaggaagtagaggacatgacatttaacttgattgaaggaataatgtttcagatattgaagcaaaaattgccaaataccaggaagaaaatgcagaacaaataatgattaatcgagctc

SEQ ID NO: 24930 - DNA, 90 bp, Glycine max
  Clone ID: 700907015H1
ccttcctgtgcttgcgtgcgtccttgccatcattttagcaatggaatgcttcggatgatggttctgtcagttctccttcccacacaacat

SEQ ID NO: 24931 - DNA, 268 bp, Glycine max
  Clone ID: 700907016H1
atcaaaacaaccttctttctttcaggttcttgatcagtgtcaaaaccaaaagggtggttgcaaattgcaatggctaagcatgatgttgagggtggttccttcgctgcaaaggactaccatgatcctcctccagcaccattgattgatgctgaggaactcacacagtggtccttctacagggctttgattgctgagttcattgccacaatgctcttcctttacatcacagtgctcactgtgattggttacaagagccagagtgatgtaa

SEQ ID NO: 24932 - DNA, 256 bp, Glycine max
  unsure (1)..(256): unsure at all n locations
  Clone ID: 700907018H1
gccgcaaaggcgccactgccggacgctttccttcagttcctggagaccaacgggctcgacccttccatttacactgctattgattccacaccacgttagatatcgttgaaacncggtttcgaatcatgtattgaagaggttgaagcagaggtgaaatgcaaactcgaaaaattagagtggttaccgggattttatctcttccacctcacgttcaaattaattgnnctagggcataccgagaagggaagatatatgg

SEQ ID NO: 24933 - DNA, 233 bp, Glycine max
  Clone ID: 700907019H1
cgcttgataactccaactctgtttgctatgtgcatcaagattcagtttagttaaatgatgtgttggttatcttagttgtagaaaaccctgaatagtattattgagatattacgaattcagtttgatcctggaagggacatctcgcctaagcctacatgatgatgccgccgcagccgcagcccccccagatgtgggccccatcggcccagcctctgtcccaatcggtagctcct

SEQ ID NO: 24934 - DNA, 87 bp, Glycine max
  Clone ID: 700907021H1
gaagaagtgagggcaagaactttgcagcataccagcatgagcatgaagctcttccagctcttctccctactcccattcttcctctac

SEQ ID NO: 24935 - DNA, 58 bp, Glycine max
  Clone ID: 700907023H1
attcattcccgtcgctgaatcatcttcaaaattcaaaagcaagatccacacaacatac

SEQ ID NO: 24936 - DNA, 265 bp, Glycine max
  Clone ID: 700907027H1
ctcaatttcttccttctctctctatctttatccgctggtattcttcttcagcagaagctataaggtttcaagaaagcttataaaaggagagaacatctgtttttatcaagctctgatggcagggttaaattttgaagccacatataatgacaactatgatattctgtagatatttgcagctgaaggtgttgattccttttatcttgtgaaggaaaggtacccgtatcagaatgcaatgggaaaattatatgcctatttttcactg

SEQ ID NO: 24937 - DNA, 265 bp, Glycine max
  Clone ID: 700907028H1
atatatgtaaaaataaattggggatcaaacagactctctaaactcttccaaaacactctagaattccccacttatttccacaactcactctatatatcagagacactctagaggcttactcacaggaaataaaagatctagccatagttattataggccttatgggaaaagctttgaagattcaagaaagggaaataagagaattatttgaagatggaatacaactaatgaggatgaactattaccctccatgccctgaaccaga

SEQ ID NO: 24938 - DNA, 87 bp, Glycine max
  Clone ID: 700907029H1
ttctgtccatccctgtcatcctcaagttggctgatgctcttgacattgctgtgaaatctgtgaggtacactcgtggaagtttcattt

SEQ ID NO: 24939 - DNA, 267 bp, Glycine max
  Clone ID: 700907030H1
gcaatggaggcgattaggaagagtaggattcttatattggaggaactggttacatagggaagtatatggtgaaggcaagcgtcacgttaggccatccaacttttgtctacactcgccctcttgatgcacaaactccttcctctaaggcacagctttgcaaggagttcaactctatgggggtcacacttgtcctggagaacttgagcatgaccagattctggcagtgattaaacaagtagacattgtgatatgttctcttccataccc

SEQ ID NO: 24940 - DNA, 270 bp, Glycine max
  Clone ID: 700907031H1
cagagaaatccataccagtaacgaagtcagatggcgaaaatcctacacctgcaaaagctgaagttcctgacaacgagtttgaggacagcgcataagaccagaggttatccctgcaaatgagataggggttacatttgcagatattggtgcgttggatgagattaaagaatcacttcaagagctggtaatgcttcccttagaaggccagacctcttcaaaggtgggcttctgaagccatgtagaggtatattgctttttgggcctcctggt

SEQ ID NO: 24941 - DNA, 270 bp, Glycine max
  Clone ID: 700907032H1
gtggagtatgaattgtggaccaacagcaatgacgagtgtggagttaaatgtgatatgttgatggaatttgtgaaagattttaagggtgcggcacagatattggagaaaggtggttatactcaatttacaccccattatataacttggtactgtcctcaggcatttacattgagcaaacagtgcaagtcccagtgcataaatcatggaagatattgtgctccggatcctgagcaagatttcagcactggttatgatgggaaagatgtggtt

SEQ ID NO: 24942 - DNA, 268 bp, Glycine max
  Clone ID: 700907034H1
agtccccccactccttcaaaaatcctctctttttatcctacactctaatcatagtcatcatccaccacctccatcttcccccagtaacaacataacataacattcagagaaaaacaaaactatcatacccacatggatttgcaatgaaagtgagagagtccaattatgcgaacgctttgtgatgcttgtgagatgcggcggctatagttttctgcgccgctgatgaggctgcactttgtcgtgcctgtgatgagaaggttcacatgtg

SEQ ID NO: 24943 - DNA, 263 bp, Glycine max
  Clone ID: 700907035H1
cagaaggaatctactttgcacttggtgttgcgacttcgtggtggcatgcaaatcttcgtgaagactttgacgggaaagaccataactttggaggttgaaagctctgacaccattgataatgtgaaggcaaagatacaggacaaggaaggtattccaccagaccagcagaggcttatttttgcagggaagcactggaagatgggcgtaccctggctgattataatatccagaaggaatccactctgcatttggtgttgaggctt

SEQ ID NO: 24944 - DNA, 264 bp, Glycine max
  Clone ID: 700907036H1
gaatggggaaaccttagcgccagaagaatcatcatgccctctctgtcatcgataacaaccttcattcttcaccctcgtcactcgtcatttctgcttaccacgcctccccttcaaaacttgacaaatttgatttgaagctggggaaggagcatcgggtttagattaacgcaatgctgcaacaagagccaaatccattcagcattccatacgtacagaagatcaggtgaggttgaggagtacgctggatggtacctggtcctggcc

SEQ ID NO: 24945 - DNA, 129 bp, Glycine max
  Clone ID: 700907038H1
aatactagtacagatacagaatgctcatcaagcaaagaagttgatcatccttgtaatctttgcaaggtctagtttcaaaaccaccaccttccctctcctccaacgtgtatggcgtgtaggtacccaaga

SEQ ID NO: 24946 - DNA, 262 bp, Glycine max
  Clone ID: 700907039H1
cgtttttctgacactgcattctcttcccctttcaaagatttaaccttatttgctcgcagatatgcgcggttactgattcgtcgatggtatctgtcgaaaaaattcacatcgaaagggaacgaacacggaaacgccctcgtctcgcgtgggacgtagctcctccctccgcgtctgaggcacaacgggctctgcggtgcccggtgatgaaggtttcgaaagaaagcatgtttcgcctccgaaaagggacgacgatcgagagggc

SEQ ID NO: 24947 - DNA, 266 bp, Glycine max
  Clone ID: 700907040H1
ttctaattctgcaacaagttccaaaccttcaaatctcactgccccaaaaatcctttcttttttaaatagccatttgacttcagcctctacagcagagtcccagatctctgcattccaattcccatggcccgtcgctatgacagtaaccccttcgatgaggaagaagttaaccccttctataatcctggaaggttcccgctgccactaattcaaggctttcacctctgaagccagaacctgttgattataattatggctttggtgcg

SEQ ID NO: 24948 - DNA, 271 bp, Glycine max
  Clone ID: 700907006H1
tggttcatgatttcagaggttttgccggctggtgatagtgccttgtctattggtgagtgtagattattcagttgctaatttaggatgataatagtcatttgtgggattcatcaaggcagctttcgatagaatcacaggatggatgactccttaggtgtgacctaatctctcgcggtttgtgcagaaaaaccccttgttcatattttgtattttttttcaccaattaattttaggggaattgatgtaccataattgcagtaatatatggttt

SEQ ID NO: 24949 - DNA, 268 bp, Glycine max
  Clone ID: 700907041H1
aaaatctctaattttttcatctgggaagatcggttgacgaatcgacgatccgatcgcttgcgaggaactagggtttcaatcgatcgcatcacacacaaacaatcatgtttagccggatgttcggtaaacctaaacaggaaaccaatgctgttgccactttggacaagctaaacgagacacttgaaatgctggagaaaaaggagaaagtgctccttaaaaaggtggcagcggaagttgaaaaggccaaagaattcacaagggggaagaa

SEQ ID NO: 24950 - DNA, 84 bp, Glycine max
  Clone ID: 700907042H1
cttgctatctgcttcctcgtagtacttcattgagagagacatggacactgtactaagtactacgctgctactcatgttggcatg

SEQ ID NO: 24951 - DNA, 245 bp, Glycine max
  Clone ID: 700907043H1
ccttaatgtaaatccatcttgaagttaattactccccaagccccaagcccaaatacaacacggtttttttctttccttaaaaaaaaaaaaaaaaaagaaaaaaaaaaaaaaagaaaaagaaaaaaaaaaaagataaaaagagggaggatagcggaggggaaccccattaagcaagaggggggggggcgccccgctgggggccccccccggcgggggttttttcgggggggggtcttttggggggg

SEQ ID NO: 24952 - DNA, 262 bp, Glycine max
  unsure (1)..(262): unsure at all n locations
  Clone ID: 700906963H1
tattggtatcttctacaatatcctaaagtgtttttctcgttcttcatcaccatgtctttgctttcagacctcatcaacctcaatctctcagaatccacagaaaagatcatagcaaaantacatatgggttggtggatctggtatggacctcagaagcaaagccagggctcttcctgggccagtgagtgaccctgcaaaacttctgaagtggaactatgatgggtctagcacagatcaagctccaggggatgacagtgaagtc

SEQ ID NO: 24953 - DNA, 262 bp, Glycine max
  unsure (1)..(262): unsure at all n locations
  Clone ID: 700906964H1
gccatagactgtgatctgtgatatggaaattgggaactcgtgttatgtaaagatgtgatgtggtttgngtagtgtgaaccgtttgcttgcttcgtgtatgtacattctctccggaggcaccgtcgtgagcttttctctctggtaggtccgtgttgctgaaacctttttgacctttccaataaagcatttgtttcaccctatcaatgagctgaaccattggaataaggattccaaaccccagtatttccaatgccgacagaaa

SEQ ID NO: 24954 - DNA, 171 bp, Glycine max
  unsure (1)..(171): unsure at all n locations
  Clone ID: 700906966H1
tcgatgatccgcatccgaagtcgatcctgtctccggagagctttttaccctaagctacgacgtcacgagcaagatcctcaaatacttccatttctcgcccgaggacgagaggaagtcgccggacatagaaattgccccttcgaacgcgcacgacgatgnanncgcacgact

SEQ ID NO: 24955 - DNA, 60 bp, Glycine max
  Clone ID: 700906967H1
gctcatcattcagctcgatgtgatttctgagttcttgactaatcactgtggtgcatccat

SEQ ID NO: 24956 - DNA, 121 bp, Glycine max
  Clone ID: 700906969H1
tacaacatcagaaatcattttgattgcagaacaatttactctgaccaaagaaggctacacttcgtatgcaagttacatgaaaatggttgtacatggagcttgggcgcatgcaattcaaaga

SEQ ID NO: 24957 - DNA, 254 bp, Glycine max
  Clone ID: 700906970H1
gctccttggttttttagttgttgtgttgttgtcttcaactccacacagttccctcacttctcttccctttgaccattcaaccttcctcgcctttgcctccgtttcgtgagtccactcttcttcgattctagcgtgactgagatggctggaggtgttattcagcagatattgaggaggaaactccaccctcggtttactaactctcccttgttgtcacccatcgtagcaaaaaaagatgatgctggctctactgg

SEQ ID NO: 24958 - DNA, 256 bp, Glycine max
  Clone ID: 700906971H1
gcagatttgataaggtaccacagttgatttgttcattataaaaacaaaactcttgcaaaatttattttccactaatactcaaatattgattttcttttcagaacatacttgcagcaggtacagataccactgcagccacatcagtttgggctatgacagccctagtaaaaaaccctagagtaatgaagaaagttcaagaagaagttagaaatgtggggggaacaaaagatttcttagatgaagatgatattcaaaa

SEQ ID NO: 24959 - DNA, 91 bp, Glycine max
  Clone ID: 700906972H1
ggtctagtgcctatccatatcctcgcagcgggaagaactggtagacaaacgcaacaacaaaaggactctacagagtgcagttcaccatacc

SEQ ID NO: 24960 - DNA, 257 bp, Glycine max
  Clone ID: 700906974H1
ctctttcttcttcttctcttaaaagagcctttgctttttctttaggcctttccgaattaagtacttgtttcattttctctcgaagcaagaaaaatgttcatcgagagtttcaaggttgagagtcctaacgtgaagtacacagagactgagattcagtccgtgtacaactatgaaaccactgaacttgttcacgagaacaagaatggcacttatcagtgggttgtcaagcccaaaactgtcaaatatgaatttaaaac

SEQ ID NO: 24961 - DNA, 86 bp, Glycine max
  Clone ID: 700906977H1
gaaagaacaatggagaagtatttcggaaacgcttatcgtggcgacccgggcgtgccccattcggacccggatcgcttcgtcaacat

SEQ ID NO: 24962 - DNA, 73 bp, Glycine max
  Clone ID: 700906978H1
ctctctctctctgttttgtttttgccctatctcatagggtttcctccttctctccctctcttccacgcaacgt

SEQ ID NO: 24963 - DNA, 232 bp, Glycine max
  Clone ID: 700906980H1
cagagacaaagcgctctctctccaaaaaaaaaaaaaactcgctaaattacaaaaatctcttcaaatcctctcaaccgaacccttattcataaaaccctagattttactttatttgtttccctcaatcgaatcgattttccccttccgaaaaccctaattccttcctcgctatcgaagatggacatcgagcagaagcaatcggagctcatagaccatttcgtaaagcgtgcct

SEQ ID NO: 24964 - DNA, 252 bp, Glycine max
  unsure (1)..(252): unsure at all n locations
  Clone ID: 700906982H1
cgttctgctcctttgcggatcgtgtccgggtgacggttttcttgtagattatttgtttattaaatcgactcccttgttcgcccatacaacagatggcagacaatgaggatggaanggataagactactcgtgggaatgaatgggaggttgtatctctgacagcatcgacatatgcagctgctcctggtgctgatgaagttgagatgaaggatgatgggaacgaagatgtatatggacaagatgaaggagaaa

SEQ ID NO: 24965 - DNA, 187 bp, Glycine max
  unsure (1)..(187): unsure at all n locations
  Clone ID: 700906983H1
tttgctactgncttgtttttggtcatctgagcggcgagccctgctcgcagcggtagagttgtggccttgagtgactatgtagagacatgggttcggaatccggacaacaacctcttttacatatcgtagggtaacgctgcgtccaacatccctccttcataccttcgctagcacaagctccgggcaa

SEQ ID NO: 24966 - DNA, 252 bp, Glycine max
  Clone ID: 700906984H1
cgttcgttgacttaagctctctcttctcctcgacccttggtcgctctcaaaacccttgctgtgcattttcagctaaacctgagcacgcccaactgagattgtagcttcagattccgaggtgagagcagaaagaagagaggttggagctacccagagttcgattttgggttgttcaacaaggtcaagatgtttctgagcttgatggatattatgtagatcaagaggggtgtgtggattggggaagcaattgtt

SEQ ID NO: 24967 - DNA, 254 bp, Glycine max
  Clone ID: 700906985H1
gtcaaaggaataacagaatatgtctcttatgctgcaattgagaatttggtgcttggtcaagcctccaggcatggctttattagattcaagtcaagtacgccaagcaacatattaaagggggcgccagatttctgtactgtgtatgtgatttctaagggcagaatctcttcagttcggagtgctgctcgaacagccccacatgcctccccattgctgaggcacatacagattctacatgacgagaatgcacgtga

SEQ ID NO: 24968 - DNA, 255 bp, Glycine max
  Clone ID: 700906987H1
taaaagttcaaactgtctgagttttgcagaatccacggagctaagaatctcattgtagaagaagaagcactttcacagaaaacatgaaagggttaggtcctcatgcccctttggtttcaaggggaaagcttcctccttcgttggcagtagtggatgccttgccaacatgctcttcttatttctctagaaccaccgtcctatacccattaagatgcagacaaaaatcaaggttgagcttggcccgtggcacaattc

SEQ ID NO: 24969 - DNA, 252 bp, Glycine max
  Clone ID: 700906988H1
tggggttgtttctaatggttgctaagctctactgtgtttgaaggaggcggtcctatccatttcagtggcatatattggttcttagaagtattttatcagaaacttggtaccgcctgattttatctttcttgcctcttctcttgcagtctgaagatagagattggttgcctagtgaagataaagatctgtatattgagattggctgggcggagttacttcatagaatgctagcaccaatcccttctcattggg

SEQ ID NO: 24970 - DNA, 244 bp, Glycine max
  unsure (1)..(244): unsure at all n locations
  Clone ID: 700906989H1
cacacttcctctctcttcctctccgtcttccatagtcaatttggccgtcaatngcggcctccgaagctctcaacggcacaatcaccacctccatcatgcacgcgttcggcaacgtcctcgcgttcttcatacttctcatgatcggcgttctcgccttctcgatccgtctcttctccgttataaagtatgagagtgttattcacgagtttgatccttatttcaactatagagtcactcagttttt

SEQ ID NO: 24971 - DNA, 224 bp, Glycine max
  Clone ID: 700906990H1
gctgaaaataaagtgaaagaaggccaaaatacaagcattagtgagaaaagtcctaaggaagagtcagacgttagccagctgaaggatactgatcctcctgatggatctagtaaactagagttgagtgacaagaatactccacaacattgaaatttaactatattgtaagaatctcagctggtaacttaaggctaagaagacaaggtctcacagttcgtgggaag

SEQ ID NO: 24972 - DNA, 252 bp, Glycine max
  Clone ID: 700906991H1
aggagaaagagaaggtggaggagaggtacactcattggaagtctctggttcccgttctctacgattggctcgccaaccacaacctcgtctggccttctctttcttgcagatggggtcctcagctagagcaagccacttacaagaaccgccaccgtctctatctttccgaacagactgatggcagtgttcccaatacccttgttattgccaactgcgaggttgttaaacccagggttgctgctgctgagcaca

SEQ ID NO: 24973 - DNA, 254 bp, Glycine max
  Clone ID: 700906992H1
gttctagatcgcgagctgccgcccttttttttttttttttttttttttttttttttcgggaaaagggaaaagttgggtttttttttgggggccaagggaattttcttttaaaattaaaaaaaaaaaacccccccaatttttgaaaaaaacaggggggaaattgggtaagggggcctttttttcaaaaaggttttttcaaaaaggggggggcccgatttgtccccaaaaaaggggggaaatgggaaacttgtttt

SEQ ID NO: 24974 - DNA, 256 bp, Glycine max
  unsure (1)..(256): unsure at all n locations
  Clone ID: 700906993H1
cttttcttctcgcagagcgaaatcccaatcccacacaactggcaagacaggnaanntntgnttntctcttctncggaaatcccagatgtgtctgttctcccaaatgctccctctccctccctaacaactctctccacctcaaccctctccgcacgcgcccttctctctccctcacgcgcccctcgcacactcgccgctccttcgtcgtcaaagcctcctccagcgagcttccgctagttggaaacaccgcaccgga

SEQ ID NO: 24975 - DNA, 255 bp, Glycine max
  Clone ID: 700906994H1
caacttaagagatcaatatggccaccaccactacccagcctccctctaatatctgttttttccttctgttgttgcttctagcacactttcatttgggcataagccaacttgagctgaattactactctaaaagctgcccaaaagctgaagagatcatcaaggaacaagtcacacaactatataacaagcatggaaacactgccgtttcgtgggtcagaaatctcttccacgattgcgtggttaagtcatgcgatg

SEQ ID NO: 24976 - DNA, 257 bp, Glycine max
  Clone ID: 700906996H1
ctggccccgagggtgtccgaggtcgtaattcagacaatacacttatacaagaaaaacttggttgggctccaactatgaggttgaaggatggactgaggatcacatacttctggattaaggagcagatcgagaaggagaaggctcaaggtattgatatatcagtgtatgggtcttccaaagtggtgcagactcaagccccagttcaactaggctcacttcgagcagcagatggcaaagaatgaggtggtcaacatatg

SEQ ID NO: 24977 - DNA, 261 bp, Glycine max
  Clone ID: 700906961H1
caatattcctattattccttatccttctcgaccaatccatttcggcgagtgcttttttaaatttaaatggattgctaaacattgaaaagtggccctctggcgagaaaagtttggaaatgggaaagatagggaaggagacgacagatcatatcaaagaccttttaaagaaactgattgagtcccctcccgaaccaccgaagcaaatcaatattgaagttgaaggcctgtctgtcgtcaaggattacttatctgactacggct

SEQ ID NO: 24978 - DNA, 275 bp, Glycine max
  Clone ID: 700907001H1
tgtgatatctttggggagagaggaattttacttggtgctgttcatggagttgtggaatccttgtttaggagatacactgataatggaatgaacgaagatctggcctataagaatactgttgagtctataacagggattatatctaaaaccatctcaactaagggcatgctagctgtatacaatgctttatctgaagatagaaaagggaatttgagaaggcttatagtgcttcttattatccttgcatggaaattctgtatgagtgctatgaggat

SEQ ID NO: 24979 - DNA, 90 bp, Glycine max
  Clone ID: 700907002H1
cttggcaggactgtgcgattttcatgttcaaaaaattattggcttagacaataattttttgaacatgaaaatggacagtgcttggcagga

SEQ ID NO: 24980 - DNA, 89 bp, Glycine max
  Clone ID: 700907003H1
gaaagggacgccaaagcgaaaccctaaccctaacggagagatggcggacacttggcatcgatattcgggacggagaaggacagggtgaa

SEQ ID NO: 24981 - DNA, 261 bp, Glycine max
  Clone ID: 700907004H1
ggatgcacttgttgagtccgaagatggatgcaaagttcaagaaactggctgtagcacatctagcactatttcaaatgaacatctcacaaagatagctgctgaagctatgagtgaaattgctgaatcagatactagtccaagccagttgctggataatgttgaaaacagagtgctagaaggagattcatctgtctcaccgaaaagcattcaatttccgtgctggttggtgcttctctatttcgttttattaaaggaaaaggg

SEQ ID NO: 24982 - DNA, 264 bp, Glycine max
  Clone ID: 700906923H1
ctcactctcattttccggtttcactcttctaaaatggcgaatctagcacgcttctccaagagagccctaagaagcgcacacgcgctagcaaggccctacgtgcagcctcagctgctgacagcagaacgcgctttttcgacggatgcgccgacatcgattaccccgtcggcggatcgcgtgaagtgggactaccgtgggcagaggaagataatcccgttggggcagtggctccccaaagttgccgtggatgcttacgtggcaccc

SEQ ID NO: 24983 - DNA, 264 bp, Glycine max
  Clone ID: 700906926H1
caccctctccctagacagagcctctggctctggctttcgttccaaaaaagaatacttgttcggaaaaattgacatgcagctcaagctcgtgcctggtaactctgctggaacagtcactgcctattatttatcttctctggggcctactcatgacgaaatagacttcgagtttttgggtaacttgagtggtgatccttatactctccacacgaacgtataaccacaagggaaagggaacagagaacaacagttccatctatggtt

SEQ ID NO: 24984 - DNA, 266 bp, Glycine max
  Clone ID: 700906928H1
aatcgtcgtcgttatcataatcgggatagtagaagaaaagaaaaggcaagaaagacaggaagaagattaataaaaagaaagtgtagtattctgggagaaagagagaggaaggagaaacagggacaataagcatagggaactgtgaagagctgaaggaacctttgtttttgttggttgttgttgttgttgcgtctggattgggttggctttagggattggaatgccatctggggttttgctctcaggcgatcaaggtccaaagctga

SEQ ID NO: 24985 - DNA, 267 bp, Glycine max
  Clone ID: 700906930H1
ggttgattggtcccattgattccgaagaaaaagaaaagatgtttgagccacaacagctatacactcgcgcgaagaccgaggaattcgacctcgaatcaggagaaaccctctacccagggctgagcgtcggcgagaaccagctccgatggggtttcatccgcaaggtctacggcatcctctccgcgcagatcgtcctcaccaccctcgtctccgtcaccaccgttttctatactccaatcaatgacctcctcaagggcaattccaccc

SEQ ID NO: 24986 - DNA, 236 bp, Glycine max
  Clone ID: 700906931H1
gttaggtttgtctcatcccaacagtttcgcgcgtcgtttttcagcttccgaggtccttgtgaagagcttggatttatatgggaagttggatggtcatgaagggtgtgtgaatgcagtggaatttaactccaccggtgacattcttgtttctggttctgatgaccgacaaattatgttttggaattgggaatccaaaactaaattgtttgcatacccttctggccacacagacaaca

SEQ ID NO: 24987 - DNA, 268 bp, Glycine max
  Clone ID: 700906932H1
accacttcttccttgacttcttgcatggttcgggaaatcgcaaaaccctcacagaatcaagttcatagcctttgtacaatcttaacacccacacaccttttctccatcaatgcttcaattcaagctgcaagccacttccgtgtttcgttcttttcccataattggacatctcagattcttctcactcatttccttcactttgtaactgttttctctgagggcatctattcaagtgagagacgccaacgtaattctgaaatttcgactg

SEQ ID NO: 24988 - DNA, 263 bp, Glycine max
  Clone ID: 700906933H1
ctcgatcttctcttccacggggctcaagatagaagacatgctcatcacttcagggaagttcagcagtgtactcttctgtctatcaaaacagttgggtgcagtgaagattgttcctattgtcctcaatcctctaagtatgatacaggagtcaaaggccaacgccttatgaacaaggaagctgttctccaggctgcaaagaaggcaaaagaggctgggagcactcgcttttgtatgggtgctgcgtggagggatacactaggaag

SEQ ID NO: 24989 - DNA, 262 bp, Glycine max
  Clone ID: 700906935H1
atggcttttacttcttcatgttctcttgcttctcagtttctccctcccatatatcattctgcaatcccttttcactcaacgaactgcacaaatttgtcattccccgctgttccgactccaagacaacaaccactgttgttttcttcaacctcaacttgcttagcagcagcggcggcgtcaaactcaaacagcacttcgaattccaataacaacaaccctgcttcagcttcagcttcgtcgaaagagaagaaagtagaagtgg

SEQ ID NO: 24990 - DNA, 256 bp, Glycine max
  Clone ID: 700906936H1
gattcttgtaactagtatccttgcgtcaggggcttatgctgatgactcggataattcagatgcgttgatatatacagggcacggtgggaatgtgatgaacactgataaagaacctgaagatcagaggcttgagcggggcaatcttgctctgaagaacagtattgaggaaaagaacagtgttaaggtgatacgtggctctgaatcaatggatggaaagtgcaggatatatgtttatgatggactgtatgaggttgag

SEQ ID NO: 24991 - DNA, 262 bp, Glycine max
  Clone ID: 700906937H1
aagaaaaaaaaaaacccttagccaacacaaccatcatggccacctctgctattcagcaatcagcattcactggtcaaactgctctgaagcagctcaatgagttcgtccgcaagaccggtggcgccggcaaaggtcgcactaacatgcgccgcaccgtcaagagtgctcctcagagcatttggtatggccctgaccgtcccaagtacttgggtccattctcggagcagattccatcatacctgaccggagaattccctggtga

SEQ ID NO: 24992 - DNA, 263 bp, Glycine max
  Clone ID: 700906938H1
ctcgagccgattcggctcgagggctaatctctcactcttgttcatcggtctcctcctatactccgctgccgtctgccaccgtcgaacgaatctacgatgaagacaaccttctgatccgtcaagtggtgccggacgcggaggaccaccacctgctcaacgcggagcaccacttctccgccttcaagacaaagttcgccaagacctacgccacgcaggaggagcactaccaccgcttccgtatcttcaagaacaacttgctccgc

SEQ ID NO: 24993 - DNA, 260 bp, Glycine max
  Clone ID: 700906940H1
gcagcgacggaagaagacttcgacatccgcggcggcgatgaaatggatctcggcgaagacgaggtcggcgaggagagggagatcggctctggcggcctcaagatcgagctcctcaaggaaggtcaaggctgggaaacccccgaagtcggtgacgaagtccaagttcattacacggggactttgctcgacgggactaagttcgattcgagccgcgacatggattctcccttcagcttcacgctcggacaagggaaagtaat

SEQ ID NO: 24994 - DNA, 82 bp, Glycine max
  unsure (1)..(82): unsure at all n locations
  Clone ID: 700906941H1
ataaaattgtagcaatcacaacacaaccaaggatagaaattctannaancncaatcttttnnccaaaaatcanacacacatt

SEQ ID NO: 24995 - DNA, 262 bp, Glycine max
  Clone ID: 700906942H1
cattcacctgaggcttccaaagcaatggcttcccttgcagcatccactgctgctgcttcccttggcatgtcagaaatgcttggaaaccccatcaacttcagtggtgccacaaggccagctccatctgcttctagtcctgcctccttcaagactgtggctcttttctccaaaaagaaggctacaccaacacctccaaaaaaagctgctgctgctgctcctgccaatgatgagcttgccaagtggtatggtcctgacagaagga

SEQ ID NO: 24996 - DNA, 261 bp, Glycine max
  Clone ID: 700906944H1
ctccgaaaacgcaagaccctatttggcgtcgtggccatggatttccaagtcgtcgttctcggcggtggcgtctccaagaagctcatccatctcgtttcgcaggagcttccgaacgcgttgcttccgttggcgaatcgccccgttctctcctacgtactcgagtacttggagcttagcaacctcaaagatctcattgtggtggtcgattgctaattttctgctcttcatgttggtgctttggattcgggggcttgtgctgat

SEQ ID NO: 24997 - DNA, 263 bp, Glycine max
  Clone ID: 700906945H1
cccaaaatgcatcatcatcccaaaacgacaacaacagcaacataactccgcctcttccgcgcccccaatgctctactccgacgcggtttcgttgttgtcgtttaagcgtctagcggaccaagacaacaagctcctctactccctcaacgagctgtacgactactgcgagtggcagggcgtgaagtgcgcgcagggcagagtggtcagcttcgtggcccagtccatgggcctgcgaggcccattcccgccgcacactctcacaa

SEQ ID NO: 24998 - DNA, 96 bp, Glycine max
  Clone ID: 700906946H1
gtgttgtctagcattattgatcgtttgtgtgggtgtgtctgtattcgttgtttcccactttccaaatcacatccaacgtgaatccgtcattcaact

SEQ ID NO: 24999 - DNA, 263 bp, Glycine max
  unsure (1)..(263): unsure at all n locations
  Clone ID: 700906947H1
ctcgagccgctctctacaatcagcggtgccgtatgtntataataggaggatctgatgtactcgctcgtggatctcagctatattcacgatcatgatggcccttgaaaattctgaaaatgtgcagataaactgtgaggcatctttaaaatgcctccagggcaagggatttccttgcaattttcaaagtaatgggaattctatagaaggctttacagagcttaaaacatgagcctggtactcaccctgctggggatgttgctgac

SEQ ID NO: 25000 - DNA, 264 bp, Glycine max
  Clone ID: 700906948H1
atttaaagaaaccttggactccccagccagaagaagaaccaacatggcacccacaatctataatttttcgtattctaaaaggttttcagagtcattcaattcttcaacatcaaaaaaggagtcatccagttccaacatccttgctttccactccatagctcaatggaatgctcattataaagccaccaaagaaactaacaagctgatggtacttgatttcacagccacatggtgtggaccttgcaaactcatggaccctgttat

SEQ ID NO: 25001 - DNA, 76 bp, Glycine max
  Clone ID: 700906949H1
cgacgacgacgacgacgacggcggtgatgatgacgctatggatgattggaggatgcgatgtattcagtgagtgtgt

SEQ ID NO: 25002 - DNA, 254 bp, Glycine max
  Clone ID: 700906951H1
cctacttgctgcgctgttaatttattctatattccttttttttttttgggttttttcccttcgtttcaagcttgatccctcacgtagacctatttgaaaagtgttccaattccccaagaattcgaacacgagattattgtctagctctctctgttcgagttctttggaccttggattcgttgcctctccgcaatgctgctatcgtgagttctgtgattctattggatggtgagatcgtggagttcttaacatgg

SEQ ID NO: 25003 - DNA, 263 bp, Glycine max
  unsure (1)..(263): unsure at all n locations
  Clone ID: 700906952H1
caagcgacgccgtttgggtcctcttccacctcgcctacgacaagacnangccttacctccgcctggcgccactcggcgatcctccaccagggtcaactcgcccgtgactcaccgcagagctgccccgcccctgaccccaacctctactacaaggcagtcatcggaatcgtcagccatcccggcgacggcgcctccggccgcctcagcaacgccaccggcgcctcctacatcgccgcctcctatgtcaaattcgttgaggccgc

SEQ ID NO: 25004 - DNA, 259 bp, Glycine max
  Clone ID: 700906953H1
aacgtgtctgacagcaactctgttaactgtgacaccccactcactcgaccattccatttgttaactcagtctcagacacaacacaatccaaaaaacacaacattctggatatgtgaatgacggtgatacctttcgtgcgttttcttttctgtcttcaccccaaaatcacactctctctctctagaaaatggcagcttgcatattcacggtggcacaggacgggaccgcagatttccaaacggtgcaggaggctatcgac

SEQ ID NO: 25005 - DNA, 89 bp, Glycine max
  Clone ID: 700906956H1
tgacttcggaattcccggtgcattttatatgaagaacttcatgcaaaacgagttcgacctcaagtctttaattctcgaagacattccaa

SEQ ID NO: 25006 - DNA, 258 bp, Glycine max
  Clone ID: 700906958H1
gaaaagacgaattggaggttttaagaggagatggaacagggaagagaaaggactttgacagaatctatgattatgatgtctataatgatttgggcaatccagatggtggtgatcctcgcccaatccttggtgggtctagcatctatccctaccctcgcagtgttagaacaggaagagaaaggaccatgacagatcccaacagtgagaaaccgggcgatgtttatgttccaagagatgaaaattttggtcacttgaagt

SEQ ID NO: 25007 - DNA, 260 bp, Glycine max
  Clone ID: 700906960H1
tgtggagtcaatttaccttgcaatcttcctactttatgccccaaggaagcctaggcttacaaccatcaagcttcttctcttactgaatgtgtttgggtttggagccatgcttctatcaactctctacctgtcaaagggagcaaagcgtcttgctatcataggatggatttgccttgttttcaacatcagtgtctttgctgcgcctctcttcattattaggcgtgtcataaagacgaggagcgtggaatacatgccattta

SEQ ID NO: 25008 - DNA, 262 bp, Glycine max
  Clone ID: 700906922H1
atcatcttcttaaaagttaaaaaggccaaggtcctgaatctcacagagacagagagaatgagtacggtgggagaagggaaggtgagtagtaatggtcatggatgttgcaaatcagggccaggctatgcttccccactggaagccatttctggtcccagagagtctctcatttatgtaacctctgtctacacagggaccggaatagagaagccagactatttggcgacagtggatgtggatccaaactctccaacttattcca

SEQ ID NO: 25009 - DNA, 246 bp, Glycine max
  Clone ID: 700906882H1
gtggagttagagctgtccatcatttgcagtgacattatgataattttagatgagcatcttattccatccactaatattgctgagtccacagtgttttattactagatgaaaggagactattacggtatttggcagaatttaaagctggcaatgaaaagaaagaggtggcagatcagtcacttaaagcatatcagacagcttctaccactgctgagagtgaactacaacctacacatcctattcgtt

SEQ ID NO: 25010 - DNA, 247 bp, Glycine max
  Clone ID: 700906883H1
cttggaagtgagtgaagcaaaatgggtagatgtaacaaaatcgtgacgcaagttagccctcttgacaatcttgatcatattgctctgcaaactctgctgcactaactgcttcaccgctttctttcctcactcatgatcccatcttcctccaccaagcaccctttcgacgaagaagaagaagatccacaaataggagcagatacacccaagttaaagtttccaccgtaacttccagagacctgtttcc

SEQ ID NO: 25011 - DNA, 245 bp, Glycine max
  Clone ID: 700906884H1
caaacagtcaaactttcatctttctcattcacttaacccaagtgtaaaaatggcagcattgaatatgtccactgtgagacttccaagagcttccttgtctggaacgacaccagctaggagatctgtgtactcatcaagaatccatcatctttgaggtctgtgaagaacgtgtctaaagtatttggattgaaatcatcttcctttagagtgtcagcgatggcggtatataaagtgaagctgattgg

SEQ ID NO: 25012 - DNA, 243 bp, Glycine max
  Clone ID: 700906885H1
gtttatgctgcaaaatggccactctcagggcagaccaaaattacattgacccctggtagtggaatacctgttggacctgtgatcaatgccggggaaatttatcaagttctacctcttggtggtgaactcatactagagatgtaattgcaatggaagatttggcaagaagcattcagaatcctcctgctgattggcatggtgatccttgcctaccttcgggaaattcttggactggagttacat

SEQ ID NO: 25013 - DNA, 246 bp, Glycine max
  Clone ID: 700906887H1
tggagctaaattaattgagttgaatatgtacgaagtaactggcctgctactgaattgaacgacaaaggggaatgaatcaagcacagttgctgttatggaatccaattcaaaatcattaagccaaatgatttggtttcaaaatcctctcctgaaatttgattttgtactgtttatactcttttctttgtttagaaccaatatattggcatgagttatactatttatgtaatatttctttacaacaaa

SEQ ID NO: 25014 - DNA, 241 bp, Glycine max
  Clone ID: 700906889H1
gggaagttcttggtggaaatccaagttcccgggcagaagtttgtgaacggagttccgttccccgctgtggtgtctcctccacctgcaactgcaactgcggttcctcttacggactccgtcaaacccagaaagctttccttgaatcattgctactccaatcgggtgctgtccttttcaggggattcccactctccaccgcttctcacttcaacgacgctaacgaagcattcggctacgacga

SEQ ID NO: 25015 - DNA, 244 bp, Glycine max
  Clone ID: 700906890H1
ggttcagcttcaacttcaaattctcagtgaaaccaattcagctgagtccaaatcccaaatccgaatcaaaatccgaagtgagatttgcgatggagaggcttcagcgaatgtttgcaggtgcagtggagcgctagggcaccctcccccagattccccaactctcgattcctccgagcaggtctacatctcctcactcgatctcctcaagatgcttaagcacggaagggctggggttcccatggag

SEQ ID NO: 25016 - DNA, 243 bp, Glycine max
  Clone ID: 700906892H1
gtagctccatcgatctatatcatgtgctctagtttaggaaaattgcatttgcatttgcattgcgtcaagttttaattagtttctgagtggtgtttaattctctcatcaacctagctagcatcaagtgatgaggacatggaatctatgcaatgaatagactctcaggtaccatatgtatgtatgtattaatagaattgcatagggtctttctatgctactttctctttcaccttacaaattctg

SEQ ID NO: 25017 - DNA, 70 bp, Glycine max
  Clone ID: 700906893H1
aatccctcgcctatatcttcagaaaattagatctgcttcagatctagggtttcccttttccacatcacga

SEQ ID NO: 25018 - DNA, 243 bp, Glycine max
  Clone ID: 700906894H1
cgaactcaaaccgtttaagcttctccgagttttgacctacaacactctcgaatcccctcttgtgtgttgtagccgccccgtgaccatcaatggcggaaactgctgtcgacaaatcccaatcctcgctgaggaatattatgtgaaggataagcaaacagctgtagttgaaaaacctgttgaggtcaaagaagttgaaaacccagaggaggctgcttctgaggaacccgttgctgagaaaactgt

SEQ ID NO: 25019 - DNA, 90 bp, Glycine max
  Clone ID: 700906895H1
ccaagatgtccattgccgagaggtattcccatgctaagtggaagatggaagaagcaaagaaaatttctgcaccttccacacaacatacga

SEQ ID NO: 25020 - DNA, 239 bp, Glycine max
  unsure (1)..(239): unsure at all n locations
  Clone ID: 700906896H1
ctctaaaccctaaacaactctttctcttcttccttcgctcgttgttctccctcgcgtagatcgacaatggcggagacagagacgtttgctttccaggctgagatcaaccagctcctcagtctatcatcaacaccttctactccaacaaggactagttcantcgtgaactcatcagcaacgctccgatgctttggacaaaatcgatttgagatttgacagataagagcagctcgtgctca

SEQ ID NO: 25021 - DNA, 262 bp, Glycine max
  Clone ID: 700906901H1
aatcatgccgccattagcgtctctgcaacttcggaggctcttactccgttctcgttccttaccattcacatctccctctccgattcatcactctcctctgtttccccgacattcctcttcccatttctattctcgaactctcttcaccccttcgttcttcataacaagacatttctcatcggaaacccaaacggatgagattgctagctccctctcctcagagcttctcaaagagcaagactccgacgctctctccgtctcg

SEQ ID NO: 25022 - DNA, 264 bp, Glycine max
  Clone ID: 700906904H1
cagcttgatcacaccgcgtttcggagagagacgtcgcaatggggaggaggcctgcaaggtgttatcggcagataaaaaacaagccataccccaaatcacgcttttgccgtggtgttcctgatcctaagatcagaatttatgatgttggtatgaagaagaaaggtgttgatgagtttcccttctgtgttcatctggttagctgggaaaaagaaaatgtttcaagtgaagcattggaagctgctagaattgcatgcaacaaatata

SEQ ID NO: 25023 - DNA, 92 bp, Glycine max
  Clone ID: 700906905H1
gcgatgctttgttcctcttttgttcttccccttcccaatcttcaagtttagggttcctttaatctcgttattcctcttcactcccaagctcc

SEQ ID NO: 25024 - DNA, 267 bp, Glycine max
  Clone ID: 700906908H1
ccaccattgagattgattccttgtatgagggtattgacttctacacaaccatcacccgtgcccgtttcgaagagcttaacatggacctattcaggaagtgcatggagcccgtggagaagtgtttgcgggatgctaagatggacaagagcaccgtccatgatgttgttcttgtcggtggttctactaggattcccaaggttcaacagttgttgcaggacttcttcaacggaaaggagctttgcaagagcattaacccagatgaagctg

SEQ ID NO: 25025 - DNA, 268 bp, Glycine max
  Clone ID: 700906910H1
gccgggccttcaggttggaaacgcctgctgggagctttactgcctcgaacacggcattcagcctgatgggcagatgccaagtgacaagaccgttggtggaggtgatgatgctttcaacaccttcttcagtgaaactggggcaggaaagcacgtgccccgtgcgatttttgtagatcttgagcccactgtgattgatgaggttaggactgggacataccgccaactattccatcctgagcagctccttagtggaaaggaggatgcagca

SEQ ID NO: 25026 - DNA, 266 bp, Glycine max
  Clone ID: 700906911H1
ccaaggttcaatcttgccatcatcaatggcctcagcaagaccttcctccaatggtcttgctgaggccattgatgatagtaagattggaccaagggatgacccagatggttcgttccaagatcttgtctgaagagttcggttgggacaaagatcttgccaagaaaatctggtgctttggccctgagacccttggacccaacatggtggttgatatgtgcaagggagtccagtatttgaatgaaatcaaggattctgtggttgctgga

SEQ ID NO: 25027 - DNA, 268 bp, Glycine max
  Clone ID: 700906913H1
tacatagctatctatttatctatagcaagtgcgtcaagagacacgtggtaccctagctagagtgccattctgtggtttctttctttctttctttctgcatcacatcacaacttgcattgcctcgtgtcctttttcttctttgctctccaaaaatctcacacacacaggtatctggcaaatgggttctcaccaacaagaaccatggctattggagaatgggaaaccaagggttttgaccaaggagaccaggcatggccgttctgcacac

SEQ ID NO: 25028 - DNA, 267 bp, Glycine max
  Clone ID: 700906914H1
aattccatgtgcatgacagcttccctagaggcagtaatgcttctttcatagctctaattatcaaaactaaacatcctgagtcatttgatgactacagaccaatctccttgattggatgtatgtacaaggtgatagctaagttattagcaaatagattgagacaagtgatatctggtcttattgatgagaggcagacaactttcataaaaaacagacacatcctgcatgacatactacgtcttaatgaggtgattgaggaagcttgta

SEQ ID NO: 25029 - DNA, 266 bp, Glycine max
  Clone ID: 700906915H1
tggcgtccatggccactttcttcacccaaacctccttctcctcccactctctctccaaaaccttcgatacccatttcgccccatccccgaaagtcaacgtatttgcgaacttcccggcgaggaggcacgtgggggttcgagtttcgaacgcgctgatcgaaccagacggagggaagctggtggagcttgtggtgagggataattcagaaagagacttgaagaagggtgaggctctttcgttgccgaggatcaagctttcaaggatt

SEQ ID NO: 25030 - DNA, 276 bp, Glycine max
  unsure (1)..(276): unsure at all n locations
  Clone ID: 700906917H1
cctccgaattcagctcgaactgggtccacanagtagcagaaaatggctgtgatcccgtgtcactgttacctaaanctcagatcagacaaaccctacctctccggtcagagtctccgccgtcaagctactttccccaccgtctctgtccaatttcgacgccgaatatcatgtcacgcctcttctgccatcgctcacaaagttgggctgtaaaatttaattcacttagatgcattttgatcaagacactattctgaaaatctagaacgggcacttgag

SEQ ID NO: 25031 - DNA, 96 bp, Glycine max
  Clone ID: 700906918H1
aattagtggtgtattttgattatagattattgtgtggtggagaattgtttattatattgtacccaaattcaactcttcttatctttacgtggaatg

SEQ ID NO: 25032 - DNA, 265 bp, Glycine max
  Clone ID: 700906919H1
tgcgatcttcgaagaagcgtgagagctcaaacacacaacaacaccacatgcctctggctgagacaaccttaactccggtcgctctccggttctttccaagttccatccacgggttttgtgttttccgcacgagatgacggactacaaagagaaagctcaaattgcacgtgcctatctctcttctcaagtaaactttctccatttcttcttcgatcttgtgcaaattttggagttttgtttccccttgttggttctctggaaatta

SEQ ID NO: 25033 - DNA, 261 bp, Glycine max
  Clone ID: 700906920H1
gtgacaaatggagggtccttagttctgtttctctttcttctctctgtgctttcaaccaagttctcaaatcactcttcttcttcacccttctgatctgctaattctcaaggtattcaaaattgggtggttttcgattgaactgtgatgtccaagccactgctaggcatagcggaagaggaaggtcaaagcaatgtcactttgttggtttcttcctcagccaccatggaaagtgtgtgcctgaatagctcaaaactgaaagag

SEQ ID NO: 25034 - DNA, 264 bp, Glycine max
  Clone ID: 700906921H1
ctctcgatctgcactgcaacttccttgtctgacagatcccgtgttccggagaaaggaaaaggcaagaaagatgtcggggcaaacgcagcgtctgaacgtggtccccaccgtgacgatgctgggagtggtcaaggcgcgtctagtcggcgccacgcgcggtcacgcgctcctgaagaagaagagcgacgcgctcacggtgcagttccgccagatcctgaagaagatcgtgtccacgaaagaatctatgggcgacatcatgaaaac

SEQ ID NO: 25035 - DNA, 244 bp, Glycine max
  Clone ID: 700906881H1
aaaacggcctgctaatgctgccaatgggtccaacaatattgtctcaaagaaaggtcgaggtgctggtggtttgcaaaatcaacttgtcaatagagcgctggaaggattgtctggtggtgggaagggggtatgaggggcagaggccggggctggggtggtcgtggaagaggaagaggagggtatcatcggtaactttgttgcagatgtgatgtagaaaacgtcagacttcaccaggctgtactag

SEQ ID NO: 25036 - DNA, 253 bp, Glycine max
  Clone ID: 700906830H1
cttttgtcattctcttctacttactctgcctaacggaaagctgtataacgcctctgcctcgccggaaaacttaaaattcgacgcctcgacggaaaagcggctgctaaactgcgcgaccacccaattttcttgcaaatcagatccagaaacagctatgtctggcaattcgaattgcagtgtttacataggcaatctggagagacgggtgacggacagggtcttgtatgatatattaattcaagcaggaagagtg

SEQ ID NO: 25037 - DNA, 254 bp, Glycine max
  Clone ID: 700906831H1
caaatccgccgtgcaaattgaccagctcactatgtactccggtgtcttgggtgatcccagggataatggggatttatatcccggcttcaacggcggtgggaccgtgaccggagccaccagcaaaggcaacatgacgggtccagcagtgacgatgggggggacttcttcgggatgatattcagaggtggcagcagcagcagcagcagcagccaagcagcgccaccatcgtccgttctatttgtttcaatcttttt

SEQ ID NO: 25038 - DNA, 252 bp, Glycine max
  Clone ID: 700906833H1
ggagtctcggagctgccatcatctacaacagagaccatgcatgggatgaccaatggattttctgggttggacctttcattggagctgcccttgctgctgtgtatcaccagatagtcatccgagccatcctttcaagacaagggcttaggctccttgtttttgtatgtgcttgcttgtattagttgtaatttatgtatctggagtcttcttcatttggaaattcatgtgaatctttttgttttaatccattgt

SEQ ID NO: 25039 - DNA, 253 bp, Glycine max
  unsure (1)..(253): unsure at all n locations
  Clone ID: 700906835H1
atacattcgtgtacgatatccatatgttaaagccgtaacctatggactatcacacaacagttctgatactgattacctttgtgagtgcaaccattagtctcatattcattcggagattattcaaccaaactcagaatcagaatatgcaaagcttccaccagggcctcgtccatttcctatcataggaaacatcttggaacttggcacaaatccacacatagcataatttagantctcaaagatttatggacct

SEQ ID NO: 25040 - DNA, 255 bp, Glycine max
  unsure (1)..(255): unsure at all n locations
  Clone ID: 700906836H1
tacttttcttcccttctttccagaacaacaccacaccacatacaacacaaaaaaaagntnnannaatggcgggttacagagaggaggaggatttcgattaactcttcaaggtggtcctgatcggcgattcggcgtgggcaagtcccaacctcctctctcgcttcaccaagaacgagttcaacttggagtccaagtccaccattggcgtcgagttcgccacccgcaccttgaacgtcgattccaaagtcatcaagg

SEQ ID NO: 25041 - DNA, 255 bp, Glycine max
  Clone ID: 700906837H1
atagagagaaaagaggctaatttattgtgttcatagatacaagacaatgaagaacctttcatagagttgaacaaggtggatcgaaggcatgggaagaggcctctcccttctgatcatgcatcaagggagagagggaaggtttcaacttttctgttaaccaatctccacctaagagccaagggggagaagcttctcaattctcctttatgcatccaatcaatactggtgatgatagcactctttcttcaccaattc

SEQ ID NO: 25042 - DNA, 254 bp, Glycine max
  Clone ID: 700906838H1
gggagggagccgtagcagcggaagctctagcttgggtagcgaatcacaatggcgagaggattaaagaagcatctgaagaggcttaatgccccaaagcattggatgcttgacaaactgggtggtgcatttgtcctaagccctcatctggaccacacaaatcgagggcatgcctgccactcatactcattttgcgaaaccggctgaagtatgctctaacataccgtgaagtcattgctattctgatgcagcgacat

SEQ ID NO: 25043 - DNA, 101 bp, Glycine max
  Clone ID: 700906840H1
ctttcaaccccatccaatcctcacatgcatgctgtgtctgccagagtgccaagtcacataacatttccattgttaccattctttctttccacacaacatac

SEQ ID NO: 25044 - DNA, 249 bp, Glycine max
  Clone ID: 700906841H1
gcttatgaagtttgaatatcagagaaaagttgcaattctacacaacaagaaaaataaaggtgccagtgctgaatccttagaaaagactaaagcagctgttagtcatttgcatacaagatatatccttgcatgcagtcaatggattcaacagtttcagaagtgaaccatattcgagacgtccagttgtatccgaaacttgttgctcttattattgagatggcaaatatgtgggaaaatatgtgcatacat

SEQ ID NO: 25045 - DNA, 246 bp, Glycine max
  Clone ID: 700906846H1
gtcagaacctccagtggcgtggctccgatctgatcgtgcgcgtcgggaagcccgagacgattctcatggagatcgcgatggctgtcggtcatggctgtaccagtgagtaacagatctcgtgagtgtacttttgagagggacggtgaaggtgattgttattgattttctggatctttcatttttgtgatttataaatttgatatgttgcactgccacaagtaacaggggagactatgtttttgaggt

SEQ ID NO: 25046 - DNA, 247 bp, Glycine max
  Clone ID: 700906847H1
gaggaggcacaccttcaggagcagtcatggttctcaaaaccgagctgtgccgattcagcggtgccaagatctacccagggaaaggcatcagatttgttcgtggtgattctcaggttttcctgtttgctactcaaaatgtaagaggtatttccacaacaggttgaagccgtcaaagctcacgtggactgcaatgtaccgaaagcagcataagaaggatattgctcaagaagctgtgaagaagagaaga

SEQ ID NO: 25047 - DNA, 249 bp, Glycine max
  Clone ID: 700906850H1
gtttatcatgctgatggtgatgagagagaaagggtcagcaacaagaacagaagaaaagagattcatcacactaatatagattgtacttgattggagcaggattgtccataaaaatacaagccttcattgtggctactacaaggtggttcccttcggattccggtgcctttgcggactggtcggcccctccgtctgctgtctccggccgcggcgacgatctctccctcggcttcaatgcttcatccgcca

SEQ ID NO: 25048 - DNA, 248 bp, Glycine max
  Clone ID: 700906851H1
aaaataaattatggtgtgttgtgtatgttgtgcaagacctggaacttcacctttctacgtacgtgtgctgttaggatgcagtgtgctttgatgatgctttgatgaatatgcagtgtgcttttttaatctattattttcttttattctcttttcataaggactttagttcttccaccgtgcttgattgttgtctcgattataactaaatttccgttatttaagaacaatagttgacattgtggaaaaac

SEQ ID NO: 25049 - DNA, 127 bp, Glycine max
  Clone ID: 700906852H1
ttgaagttttgaagaagaagcatgcttctggaacttataaaagcctagtattttatctagaggcatgtgaatctgggagtatctttgaaggtcttcttccagaaggtctgaatatgcacacaacata

SEQ ID NO: 25050 - DNA, 153 bp, Glycine max
  Clone ID: 700906853H1
ccccgtcaaggccatgaaccctggcttggtttatgatatctcctctaatgattatgtgaatttcttgtgtacttcaaattacaccaccaacactatccgcttcatcactagaaggacttatgattgcgtggggctaaaagggcaggacattct

SEQ ID NO: 25051 - DNA, 249 bp, Glycine max
  Clone ID: 700906857H1
ctcccattttttcaaaacattcaacaatgtcgtatttttcaaggggacgtcgcgacgacgacgacacggtggacgactacgacgagtacgaccccaccccatacggcctctgctacgacattcacccacctacggccgccccgtctctccttcagaagaaacctgctacccactcggagcctcttccgatgaaaacttcgattacgatcgcccccagtacacctcttacgctgaactctctgcttatgg

SEQ ID NO: 25052 - DNA, 247 bp, Glycine max
  Clone ID: 700906860H1
tggaaaagctccatgcttctgtgctcgcccttgtattccttcttgtcatactatttcaggaaggattggtaacatgtatgaagaatgaagacggatcagaagaatggggatatgtgcaagttagccaaaagcccacttgttctggtggctttacagaagtccatacagagtggagaatccctccaagccttggccaatcattctctggcttcagggaggaccaggctcttcaggagttgggtttgga

SEQ ID NO: 25053 - DNA, 140 bp, Glycine max
  Clone ID: 700906861H1
aaatcaaagccatggccacctccaacttctctattgttctctccgtctccctagccttctttttggtgctacttactaaggcacactcgaccgaaaccgtttctttcaccttcaacaagttcaaccagtccacacaacat

SEQ ID NO: 25054 - DNA, 247 bp, Glycine max
  Clone ID: 700906862H1
atcatccgcagctgctgttattcgcaccgcaaacaaacagtgagccatggacgtcggaaagaacaagcgcatctccaaagggaaaaagggtggcaagaagaaggcagctgatccctttgccaagaggattggtatgacattaaggccccttctctttttcaagtgaaaaatgttggcaaaaccctcgtctctcgtacgcagggtaccaagattgcttctgaaggacttaaacatagagtgtttgagg

SEQ ID NO: 25055 - DNA, 247 bp, Glycine max
  Clone ID: 700906865H1
gtttgttaaagaagaataggaatggggagtgaaaagggaacagacagagttgaaatgttaggacgtggtgggaaggcctatgtagcataatatataatacaagtaataaagtatgcaatatatagatgagtgagagtgtgatagtaaggagaaaaagaaagtggtatatattgatatatgtgtgtatttcctttgggcttgaaactcaaaactataataatgggttcttcttctcctccggacacta

SEQ ID NO: 25056 - DNA, 246 bp, Glycine max
  Clone ID: 700906873H1
cgcttttgttattcttcgagtctctgagagagatgtgtggaggcgctatcatctctgacttcattctcctttttgagacttctaatatcctcagggttttttgggagaattggctaaaaaatggtatatgatccgtgtttgtgctatgatgttatttttattttttctttgtttaatggttctgaatgtctctgttcttactgcgatttttacacttttccaattatattaaagggtctaccacag

SEQ ID NO: 25057 - DNA, 245 bp, Glycine max
  Clone ID: 700906874H1
gaacgatactctctcagaacgtgagttacttgaagattacccacttttacggcctttgtaagttgtgaaggtatgcttgtcattctgcttctagccttctagagctatgaactgaaattgggtgtgattgcacaattaaggatcatctccagtagtactgaaataatatcgttaaaactgatgagattgtcctgctactcaatctgcaaggcaattttcagctgcggctaatgacgttgtatcac

SEQ ID NO: 25058 - DNA, 243 bp, Glycine max
  Clone ID: 700906875H1
caagattaccaccacaaagcaatgggcggtatactttctgcgcttcttggcggcgacgcggcggcggcggcgtcttcgccggagagttctacttctagagtctcctccttccactcgtcgccggctggcagctctacttcaacgagatcaaagataccgataagctcgttgtgatagatttctcggcgtcgtggtgcggtccttgcaaattcatagagccagcgattcacgccatggccgaca

SEQ ID NO: 25059 - DNA, 243 bp, Glycine max
  Clone ID: 700906876H1
gcacccagccgcagcagcaagtgatcgaagcgaaaagagagtaatcagcagagaaattcatcgtcgtagttatgggtaaagttcacggatcacttgcacgtgccggtaaggttagaggccaaacccaaaagtggccaagcaggataagaagaagaagccacgtggccgcgctcacaagaggatgcagtataatcgccgattcgtcaccgccgtggtgggattcggcaagaagaggggacctaa

SEQ ID NO: 25060 - DNA, 246 bp, Glycine max
  Clone ID: 700906877H1
gtggggggtgtgagcttaggacaagtgattgtgcctgaactcagccaaagggagaaagtgtgcccttttatcttctttctctctctctttacactttaacacaccaaataaatgaaaggcgtaccttgcctagcccaaccccataagcctctttctttttctctctctcacttgcatacgttcctttcactgtactttttgacacacacgtaacacattcatcagaggaagagagaatgagttcat

SEQ ID NO: 25061 - DNA, 245 bp, Glycine max
  Clone ID: 700906878H1
cagagttgaggcttggtcttcccggattccaatcgcctgaaagggaaccggatcttttctctttaagctcaccaaagcttgatgagaagccactcttccctttgcttcctactaaagacgggattgctcgtcggggcagaaagctgttgtttctggcaacaaaagaggttttgctgataccatggatgggttttctcaggggaagtttgctggtaatacagggatgaacgcggtgctatcaccta

SEQ ID NO: 25062 - DNA, 254 bp, Glycine max
  Clone ID: 700906829H1
agactgtttcatgacagtgcccttgctgatgaagatacttatgagcctttcctaagattgctctggaaaggaaattggttcatacaagagaaaagttgtaagatcctcgctttaattgttagtgtcaggccaaaaatcagaatggcattgtgtcaaatggagaagcatcaaatggaaagaagccatttaccactattgatgatgttttgataggattggtaaaatggctttgtgatcagttgaagaaaccttct

SEQ ID NO: 25063 - DNA, 258 bp, Glycine max
  Clone ID: 700906775H1
caaggatgagtaaacaagacatgatgaaaagtcagaattgccttctcaaggtcaatatccactgcgatggctgtgaacagaaagtaaagaaaatcctgcagaaaattgatggggtgtattctgtgaacatagatgcggagcgagggaaggtgatggtgtcagggcatgtagatccagctaaactgataaaaaagctgaagaggtcagggaagcatgccgaactttggggtggccagagaggcatgatgtacaaccaaa

SEQ ID NO: 25064 - DNA, 255 bp, Glycine max
  Clone ID: 700906776H1
ctgaattgtaggggttgaatgatgattgcgaacattttgagtcttttccacctggtcacttgtattctagcaaagagagagcgttccgcagatggtacaatcctccatggttctcttctgctattccatctgccccttatgatcctcttgctttgaggcatgcctttgagaaggctgtggtaaaaaggttgatgactgatgtgcactttggtgttttgctctctggaggtttggactcttcattggttgcagccg

SEQ ID NO: 25065 - DNA, 256 bp, Glycine max
  Clone ID: 700906777H1
caaggatgtgtaaacaagacatgatgaaaagtcagatttgccttctcaaggtcaatatccactgcgatggctgtgaacagaaagtaaagaaaatcctgcagaaaatttctggggtgtattctgtgaacatagatgcggagcgagggaaggtgatggtgtcagggcatgtagatccagctaaactgataaaaaagctgaagaggtcagggacgcatttcgaactttggggtggccagagaggcatgatgtacaacca

SEQ ID NO: 25066 - DNA, 257 bp, Glycine max
  Clone ID: 700906778H1
cccgtacagacccacctccaaagagatcatttttattaccaattttccgatttcacagagaaaattctttctgggcatctcttcaaaaatgtcaagcttccccaacacggtggcggtaggccgcaggtccggcaaggcaccggaaaaatccaccttttctcagacttgcagcctcttgagccagttcttgaaggagaaacgtgcttctgctgattccacccttggaattggtcgaaaaatggaacctaaagcgaata

SEQ ID NO: 25067 - DNA, 265 bp, Glycine max
  unsure (1)..(265): unsure at all n locations
  Clone ID: 700906781H1
ctgactcatacccaaattatttattgtttgtctacgaaagcagtgaaaaaaaatgacagtggagcttaatggggttccccaaaatggaggaacagaaggcaattcaagaagctgcctccgaaggcctcaaggccatggaacacctcctccgtctcctatcctatcaaccctctcacctccacgctcaatacacttttgtcantttttccaacttcaaaaaactcatctccttactcagccgccgcaccggccacgctcgtttccg

SEQ ID NO: 25068 - DNA, 250 bp, Glycine max
  unsure (1)..(250): unsure at all n locations
  Clone ID: 700906783H1
caaaaaattcaacaccaccaagaggtttcaacaataatgtctctccagcagcaatagaattttgggagcgacttntntatcacggttataaagcagatgtttgcattaatactgataacggtggcgttgtttatgctcattctaacattcttgccatgtctactcctgttttcaggggcatgttgaagcaagcaaattgtcatcgtcgatggcgaacaatctcaattactggggttccacatgatgcagt

SEQ ID NO: 25069 - DNA, 77 bp, Glycine max
  Clone ID: 700906784H1
gtatggtctatgaaagccaatttgtctggtgtcagctgttgtgaaattggggtgcttaatattctacaaggaaattt

SEQ ID NO: 25070 - DNA, 253 bp, Glycine max
  Clone ID: 700906788H1
gcatatcatatttgcatacattccttattgtttatactgtaatatggttttgaagattgtgatactgatcctaggcctaaccctcatgctcctatttggtctcctctgaggtggcatccacgaatacaaacgagtaggacaatggagtggatgatgctaaatatcccggtgtaagctaatgagggggttacccaggtcatggcggtggcggttatcctgaccatggcggtgacggttatcctggccatggcgg

SEQ ID NO: 25071 - DNA, 150 bp, Glycine max
  Clone ID: 700906789H1
ttccttctcaaaattgagatggacctacttgattcttgaatttatcaatagacaggtatctcttctgaatgataagaaacagcagcctacaaatcggcactagatcaattcaagaatcaagtttttccttctcaaaattgagaggggctt

SEQ ID NO: 25072 - DNA, 252 bp, Glycine max
  Clone ID: 700906794H1
caacgccgtactatcgtttccgagaaccatctctttttttctcgccgctcttccccgcaatcgcatcgcgcgttttgcttctccttttatcgcagattctctgcgtcgtcaccagactcacttccgtgattcgaacgcggcgtggggaagagaaaaccctaatccgacatggggaagaagaagccgacggcgagggacgaagagaacgcgtcgcagcaaggcggcggcgggaaatcgaagaagaaggcggtt

SEQ ID NO: 25073 - DNA, 202 bp, Glycine max
  Clone ID: 700906796H1
atttcaaagtccagtaataaagctcttagatcattgatttttttttttttagtttttgttgctatttgggacagtttggacaagagcaaatatttcatttagttgccaatcgatctagttaggtgatgtattttgattttgcattttgcattttgtgaaacacaattaaagagaaaatgaagaaagttagcaagttggtatg

SEQ ID NO: 25074 - DNA, 257 bp, Glycine max
  Clone ID: 700906803H1
cgagataactagaaacagtgtgatgaaaatgaaggtccttgttttcttcgttgctacaattttggtagcatggcaatgccatgcgtacgatatcgttccctctccgaatgaacactggctatggtgcccgtactcggaggtgaaatgcgcaagttggaggcttgctgtggaagcacacaacatctttggctttgagaccattcctgaagagtgcgttgaagcaacaaaggaatgaatccatggcgaacaatatagat

SEQ ID NO: 25075 - DNA, 259 bp, Glycine max
  Clone ID: 700906808H1
cgcgaagagtcgagggttgccgttgatttggaatctgtggcgacgcacgagataggtcacgtgcttgggttgggtcactcttcggtgaaggaagcggtcatgtacccgagctacagccccaggagaaagaaggttgcttgagaattgatgacgtggcaggagtccaagctctttacggctctaacccaaactttacttttagttctttgttgcagtctcagaattcattaaacgctgccgttgggttggaaacggtttc

SEQ ID NO: 25076 - DNA, 262 bp, Glycine max
  Clone ID: 700906809H1
gaacagaacaaaggcaaaaccttcacttgatattattttcctctacttccaggtttcttcttccctccattcaatcatcaaaacattctcctttagcaacaatggcaggtgcaatccaaaaactaccccttgaacaatccaagaggacccaaataagttctattaccatttcctctacaaagccacactagtcctcatcttcttcgttatcatcccattgtttccctcacaggctcctgaattcatcaaccaatcgctcctc

SEQ ID NO: 25077 - DNA, 256 bp, Glycine max
  Clone ID: 700906810H1
gtcaatgacagtctgggaataattgccaatgcacacactgtctttgcagataaagaacatttgaaagcaatgtctgatcaatgtgttaagcttgcaaggttgttttcaacagcagttgactttcctaaaactggtgtccagctgttatacctcctgaacttcatgtcaaagaatatcctgacttcatggagaagcctgacaaacccacatacaaatcgcataacgtgataggagagctctttagggaagtgaaaga

SEQ ID NO: 25078 - DNA, 258 bp, Glycine max
  Clone ID: 700906811H1
atctcttctctcttccttttcagatcacacgcacacagttaagctcttcaaatctatatcttctcagcgattcttgcttcaagttccagaaatgggtgtggcacaaaacattcctgatgcggaggagggaaccttgagattggaatggaatacagaactgtttctggagttgctgggccattggtcattcttgataaagttaagggacccaagtttcaagagattgttaacattcgcttaggagatggtactactcgg

SEQ ID NO: 25079 - DNA, 257 bp, Glycine max
  Clone ID: 700906814H1
atttttgatcagaatgagcgtccagacgtatagattcatttaaaagagtatgcttatttatttattactacaaactagataactaataaagtatagtttgtagtaataaataaataagcatactcttttaaatgatctatactttattagttatctagtttttattgaacgagatgtgtcacttgcactcatggctttgtggtttgagatctcaaaccatataagtatgggttcgattgttgcatcaacaaaaaaca

SEQ ID NO: 25080 - DNA, 258 bp, Glycine max
  Clone ID: 700906817H1
cttattatactctagccttgcaccctgaaagaaaacaggaaagaggaaactagtgcaaagattaacatcattaacaccatatcaaagtgaaaaatataggctaagaaaacattatattgagacattcagaatttagattatttttcatatacattttctctcatgctttatattttgttgatgctcttgtgtccagtttcacacctaatctgactatttactttgtttattggtactgttatttcagatatattgtca

SEQ ID NO: 25081 - DNA, 257 bp, Glycine max
  Clone ID: 700906818H1
tcttttaatgggtattttggttccaagactaagctcgaaaacaattcgtcaggctgtgggtgttgtgggttgtgtcattatgcctcacaatgtattcctgcattctgctttggtgcaatcaaggaaggttgatctaaaaagataggtcgggtgcaggaggctctcaactactattcaattgaatcggcggcggcacttgcagtctccttcatgatcaatctatttgtcacaacagtttttgctaagggtttttatgg

SEQ ID NO: 25082 - DNA, 124 bp, Glycine max
  Clone ID: 700906821H1
ttctcgatcctcatcggctcgagctaatggtctacgttctgcggagcaccgacgtcgagatactaggcacagcgtcatcggttttctacccccattactcttgtttgctcgttctctgccggtg

SEQ ID NO: 25083 - DNA, 255 bp, Glycine max
  Clone ID: 700906822H1
agaaaatcctcaattttctgagcagccaaacactctctctctgtctctcgaaaattctcagtttgcagagaaaatctgaatcatgtcgtggcaagcgtatgtcgacgatcaccttctgtgtgacatcgaaggaaccacctcactcacgctgctatcatcggccaagacggcagcgtttgggctcagagtaccgacttccctcagttcaaacctgaggagataactgccatcatgaatgactttaatgagcctgga

SEQ ID NO: 25084 - DNA, 254 bp, Glycine max
  Clone ID: 700906823H1
ggatttgggtattggagatcgtgttcgccatatttctctgtgggaccctctcatgcaccgcccaacctcatcataatagggtttctctctcaaccaccacaagtatctgtcccgccggctcccttctcgattcgtcttagggtttccagattccacttgtccccttctcaattctcttggatccattgccgtcatcgagggagatgaagtttctttgcagaaggctctgaatatggttcacaagaataatcatg

SEQ ID NO: 25085 - DNA, 252 bp, Glycine max
  Clone ID: 700906824H1
gaaatacatgccaaacctaaccagttgaaatgacactccctttatactatatacttatctcccttcaattaatctccatcttaggtttgtgtctatcttacaataatgatgttgatttgttgagacaacttcgtcggtatttccagtgatcagcaatattttccattggcactttaatttcctaccctagctagttgatgttgtgttttcataaatgacaatctggaccaagccacaaaaaaatattctgcc

SEQ ID NO: 25086 - DNA, 96 bp, Glycine max
  Clone ID: 700906825H1
tctcacggcaattttataggtcctccaagaaagagagatagtgagaggaaaacgagaccaagggagaaaaacaaccaccgtccaaaccaccacaca

SEQ ID NO: 25087 - DNA, 253 bp, Glycine max
  Clone ID: 700906826H1
gaaattagggttgaaggtgatctacccaggccttgaagatcacccacagcacaaattgctgaaatcaatagccaacagggaatatggctacggtgggcttctttgcattgacatgggaacggtggagagggaaacctgttaatggctcacttgcaaaatgatgctcaatttggattcatggctgttagcttggggtattatgagaccctcatgtcctgctctggtagcagcactagcagtgagatgactgagg

SEQ ID NO: 25088 - DNA, 253 bp, Glycine max
  Clone ID: 700906827H1
agcaacgtgaacctaacctaaccaccatgtctttcttctctttcttgaagtataaacaccttgtctttggtcatcttatatatgttaattttgttgcctaggttcaagaagacctcagcttcatccaacagtggagtccttcttcatagaccacctcaaccctttgctaccgaagcctgccttgtcggagcactcaacctcaaaccccgcctcctcctctgaacacatccccgccgtcatgtataccgtcgtg

SEQ ID NO: 25089 - DNA, 260 bp, Glycine max
  unsure (1)..(260): unsure at all n locations
  Clone ID: 700906774H1
ggctttggccaagttgccaccaaacgcttcatccgttccagcagttttagctgttcgagattccatcgtggacccacgcaacatccacctcctaanaacattgatccagtgcaacttcccaccttatggaaaggatcttcagggaggctacccaacgggtcgattttgcaatggaaaaattcctactgacttaatagttgaacaattgggtattaaggagtatttgcctgcatatttggatccgaatctcaaatctagtg

SEQ ID NO: 25090 - DNA, 97 bp, Glycine max
  Clone ID: 700906735H1
ccttactctccagcgcctactcatatcacagatcatggataattcatagtactactatttcgtacaagtattcacgaaccattccattccaatttcc

SEQ ID NO: 25091 - DNA, 264 bp, Glycine max
  Clone ID: 700906736H1
tttggtttgagcaatgcaggatttcaggtgagcaagtatatgccatttggaccagtggagactgttatgccatatctcctaagaagggctgaagagaatagaggaatgttggctgcttcgggctttgacaggcaactgatgaggaaggagttgggaaggagactaaaagctgctgtcttttaattttttatacttttatgggacgagttaatgagatgtaataatgtcttttaggcaacacaggattaggatactctttgtaca

SEQ ID NO: 25092 - DNA, 268 bp, Glycine max
  Clone ID: 700906737H1
gtcatttttttctcatgcatgacagccttcatgaaggagaccttacaaaaaggcgctccaacgctgtgaataattccaatctgtttaagttggctatcaagcgcaatttgcaggtctatatatgcgatcagacatttgatcccactcagttttatgcattaggccgtccttgcccaagactttgtagcaatgaaaccaaagaaagcatacacttctgtttaaattctgttaaggaacaaggaaaagtaactgaaacccaatgtaacaa

SEQ ID NO: 25093 - DNA, 266 bp, Glycine max
  Clone ID: 700906741H1
gttaagactagagcatcactgaactaacaaagcaaccctatgtcgaaggtggtttgtgtcaccggagccagcggcgccatcggatcatgggtggtcctactcctcctccagcgtggttacaccgtccatgccaccgtccaattcttctaggatgaaaatgagacgaaacatttggaggaaatggaaggagcaaagagtcatctccattttttagaaatggatcttcttgacatcgactccattgccgctgccataaagggttgttc

SEQ ID NO: 25094 - DNA, 266 bp, Glycine max
  Clone ID: 700906742H1
atcctcttcaccctccctccctccctcgatcttcgtgtcaacacttcaaaaagtcttcccttatagaacaaagtgtttttccaaatcccttcccttcttccaaatccctttactgtcacgtgaaatctaacaccgagcgtgtagatagtctatgaaatccaattaaatgttcttctgagaacaaagaacataagataacaaacagaaagcgcttataaatggctttccacgaccatctaccgtccgaaatcacgttccagccgttt

SEQ ID NO: 25095 - DNA, 257 bp, Glycine max
  Clone ID: 700906743H1
taattccagttaaatcccttatcacattcacaaatatacataaaggggggattcacgaagatttaattactaaatgaataacttacccatgaatcatttccccggggtatgtttcaagttcccttatataattaatgcaaattggattttgattataggatatgtttccaaaaagattcaacgtactttttatgggtatacgataaggaaaaaaaaaaaaaaggggtgtccgcggactagagaccccttcacccggg

SEQ ID NO: 25096 - DNA, 260 bp, Glycine max
  Clone ID: 700906745H1
gttggtactaaagagtaaatcccacaggatgcatatcgtctcattccgtgacagattctgtgtacgatactgtcgtagtgctaaaaagcataatatatgaatttttttttctccttttctggagaatatatataggagcacaatacaatctgagtcagaatcagataagtgttggtttgtgtttttgttgagaagagagaatggctgtggcgtcgtcattatcccttatcacgttgaaggtgaaaaccttgcattatcgg

SEQ ID NO: 25097 - DNA, 86 bp, Glycine max
  Clone ID: 700906746H1
cttttgcctgtgaggaaggagaaactctaggggaatgaaaggtcttcaaaagaggactttaacactctacttgccacactacatac

SEQ ID NO: 25098 - DNA, 252 bp, Glycine max
  Clone ID: 700906747H1
ggaaaaggtggcaaggaatttgcaacgttgtaaatcctcacccccctcctttcgactttttggtgtcgacatgatccgctagcactaattggaatattaggagttaacccttcgaggggggaaaaccaaaccaattcaaccaaatgcataccatgcctcctaaaggcaccctaactttaatattccttcaccatgatgtcctttctttcaacaacagagaacactcgttaatcacaccctctccacacaaca

SEQ ID NO: 25099 - DNA, 269 bp, Glycine max
  Clone ID: 700906749H1
gatggcaaagctatttttgaaacaggcaaagcaatacgcagatgcaagaccaagctatcctccacaactcttccatcttcattgcttccaagactccctctcactacctcgcttgggacgtcggctctgggagcggccaagctgccaaatctttagctgcaatatacaagaatgtgatagccacagatgctagtgacaatcaacttgattttgcagccaagctcccaaatgtgagataccaacacaccccttcaaccatgtcgacggcc

SEQ ID NO: 25100 - DNA, 261 bp, Glycine max
  Clone ID: 700906750H1
caatttttcatttgaaaataataaaaccctaaaagaggggttgcaagcaaaatgtgaagctcgaagatgtggatggttttcatgtgtctgacggtgagcttcttcgctcgcattgaatcgctatccgtgacggtgaacgacgtcgagtgcgtctacgagtacgtactttacgagggcgacaccgtttcggggaactttgttgtcgtcgaccatgacattttctggagctctgatcaccccggcattgatttcacggtgaca

SEQ ID NO: 25101 - DNA, 265 bp, Glycine max
  Clone ID: 700906752H1
caaattgcaggtacatatgcacaacttgggggataggaatggatattaaagatgatgtaaaaagggaggaggtgacaacacttgtgaaagaaatgataatcggagaaagggggaaggaaatgagacaaaagtgtctggagtggaaaaagaaagcaatagaagccactgatatgggaggatcatcatataatgatttccatcgattagtgaaggaggttcttcacaatgatgttgtttgagtctttcaatatattgggggtccgaa

SEQ ID NO: 25102 - DNA, 135 bp, Glycine max
  Clone ID: 700906753H1
gcgttcttcaatttattttctttctgcatctcatggatgtctccacacactctacatagaggactgtcggagtaacaccttctgatcctcgaaaatcacttccacaatggggtcgtcagatccacaccacacaac

SEQ ID NO: 25103 - DNA, 263 bp, Glycine max
  Clone ID: 700906756H1
ctcgagccgctcaaatttgctatgtaggattatgggaagtgtccaattactggagaaccacttactatggatgacattgtaccaatcaagacaggcaagatagtgaaacccagacctgttcaggcagctagcatccctggcatgcttggaatgttccaaaatgaatgggatggattgatgctatctaattttgcattggagcaacaattgcacacagcaagacaggcgctgagtcatgctctgtatcagcatgatgccgcttg

SEQ ID NO: 25104 - DNA, 260 bp, Glycine max
  Clone ID: 700906757H1
ctttaatcacgcactatcagtacaacaactcactcactaagctaaccaatttcatcaagcctgccatggcttcctcgtgtgcttcctctgacattgcagctgttgccatctccacaccaagttcccatctgaatggatcactcttgggaagcacaaaagcttcttttcttagtgggaggaaactgaaggtgaacagttttacagcaccagttggagcacgagccagcactacagtgcccccagttgctgagcctgatagg

SEQ ID NO: 25105 - DNA, 93 bp, Glycine max
  Clone ID: 700906759H1
cagacacgtacgtacataattaagcagtagtggactaggtagtacgtactctagtctccttatttgtccttaattattggcacacaattccac

SEQ ID NO: 25106 - DNA, 75 bp, Glycine max
  Clone ID: 700906760H1
cttcctctgaaacaagaaccggaatggagaattcgaccgaagaatcccatctccgatcggaaaactccgtcactt

SEQ ID NO: 25107 - DNA, 208 bp, Glycine max
  unsure (1)..(208): unsure at all n locations
  Clone ID: 700906761H1
gttgacgcgactttaatccgtgaggtcgnaangnaaaanaaaggggaaggggggnaatcaaacgaatcaaccatagtccattaccttcttcccgcgctgaaaaaccagtgacagtgagtgaggatctaagctccaatggaagacgaaatggcgatgggcacttctcccagttacttcgaccctcacaacctctcatattcacaacata

SEQ ID NO: 25108 - DNA, 258 bp, Glycine max
  Clone ID: 700906762H1
atggcttgtagactcaaagggtttgattgttggttcaagaaaggcttcacttcaacacttcaagcagccttgggctcatgagcatgagcctgtaggcagtctcttagaagctgttaaggtaatcaagcctacagttttgattgggtcatcaggagtgggaaaaacatttacaaaggaagtaattgaggctgtgacttctataaatgaaaaacctcttgtcctggctctctccaatccaacttcacagtgtgagtgtac

SEQ ID NO: 25109 - DNA, 257 bp, Glycine max
  Clone ID: 700906763H1
cgttcaccgtcgccattggcagtggcgtggctataatcccctgcggcaataccaccaccgcaattcctttcacccgtggtggtggtcaccgaacgagaagaaagctccatctccatgtggcgcgcgcgaagaagcccctgaacggcgacgacgtttccatttacactgagctcctcaaaaccgaagtttccgttttcgaaaataagcccctcggcgacaacgatgccgctttgaagttcgtagagaagatagaccgt

SEQ ID NO: 25110 - DNA, 259 bp, Glycine max
  Clone ID: 700906764H1
ctttttccttccacttttctctttggacttggttcttctgcttaccaggcagaaggagcagcaagtgtagatgggagaggaccaagcatatgggacacctacactagacagcatactgaaaagatttgggatcatagcaccggtgacctgggagctgatttttatcatcgatacaagggtgacataaaaatagcgaaagaaattgggctggactctttcagattctctatctcatggtcaagaatattcccaaagggca

SEQ ID NO: 25111 - DNA, 262 bp, Glycine max
  unsure (1)..(262): unsure at all n locations
  Clone ID: 700906765H1
cagccttttgcttgcatgtatgagtggctgcaacttttatttgctctgcctgcttttccgtgaaattagaccgaaattatgttgtgtaaatagtcagaaactatatctcagttattgactatttacacaacataatttctgaanaaaaaaaaaaaaaaaaaaaaaaaaaaaagggggggccccccaaaataggcctgtcccccccgggattattttcggggggggttcctgggggggaaacgttttccccaaaaggggggtt

SEQ ID NO: 25112 - DNA, 254 bp, Glycine max
  Clone ID: 700906767H1
ctctacttttcaaagacgcacgcagcgttgtataaccctaatcgggtatgtgcaaagagagctttgtagcacgtgcttaaggtatgttttaaacattgcttgtttcttttgttccttttgatgtcatggtggcattgtgatgcaaaatgtgtgtgagctcatactgagaaggagctcatctgctaagtccatttgaagaggatgtatggaagggcatcatcaggtcttgataggtttaagaaggctcagagctt

SEQ ID NO: 25113 - DNA, 264 bp, Glycine max
  Clone ID: 700906768H1
aaaacgactaaaattatagaagcacagcgaagccatagaaattatcttgtaaaacaagtcaacaaggcttctacagtgattgtggacaaaccacttctaacaatcatatagaagaatcaaaaaaacctgcaacatttcattggtggtgataactttgttaagaaagacatctatatcacaattaattaaagcaagaatcttagctttcaatattatttagcaagaggagaatgatttaagtgaacaagaagtgccactgacgaa

SEQ ID NO: 25114 - DNA, 261 bp, Glycine max
  Clone ID: 700906770H1
ctcatccaaaagttgacccatttactggggagatgtttacatttggctatgcgcatacaccaccatatatcacatacagtctaatttcaaaggatggttatatgcatgatcctgtacccataacagtatcagatcccatcatgatgcacgactttgccatcacagagaattatgcaatatttttggatcttcctttgatttttaggctttaggaaatggtgaagaataagacactgatattctcatttgattcaaccaaga

SEQ ID NO: 25115 - DNA, 260 bp, Glycine max
  Clone ID: 700906773H1
agcaaatgatgatgcccaaactgaactttaaacctaacttaaagtaaagagggtctagttctgttgattaaacagaatgtataaatattgtaaaaccttttgataccatgtttaattcttatacataagaattaaacatggtatcaaaaggttttacaatatttaattcttatgtataagaaaaattatgatgttaaaaatctagaaagtgacttgaatcaatataaataaatttgtgaattcaatcacagtttgaatat

SEQ ID NO: 25116 - DNA, 268 bp, Glycine max
  Clone ID: 700906734H1
cgggaaaagaaaggccaagagagtcgagaaacggcactctcatcgtcgcgcgcaccctctactctgatccagcgactcctaattaagttgggaacataaaagacttcaaatttccaagatggctgcaatctttgcttccagatgctctcgtgtgagttctatggtaatggagccctgaatcttatttttgcggggaggggggtggagctggattgttgaatatgatgcagccactaatttggtcgcactggtacaattggcagtaaaa

SEQ ID NO: 25117 - DNA, 272 bp, Glycine max
  unsure (1)..(272): unsure at all n locations
  Clone ID: 700906703H1
cgcgccttcagattggtcagttggaagcaaagcacaaagccttagacagactctacgatgttatgaaagaggatgagaagaatgttttggctgtttttggtaggagcaatatttctgctttagtccaattgctcacagcaacatatcccangataagggagaagacagttaccgttatatgctctctcgtggagtcagtgagttgtgcaaagtggctaatttcggaaggagttctgccacctctcataaggcttgtcgaatctggtagtgct

SEQ ID NO: 25118 - DNA, 273 bp, Glycine max
  Clone ID: 700906704H1
gaggattggtcaagtatcccttcattgccgttgaaagtagtcaggagaagatttagtgtcaaatgtagaaataaaatacacagaagaaaaaaagaattgaaaaagataaactttgcagattggtctagtctccctcgaggtatacttgagatggttgctgaaagactgacctttatcgattgcttatcaatcagcaaagtttgtacaagttggaatagagttcttggtgaagaacttcctaggtggcaaaggcatggatttccttggctcttg

SEQ ID NO: 25119 - DNA, 272 bp, Glycine max
  Clone ID: 700906705H1
aggggataacacgaattgaccacagcagtcttagtggtgttgggaactctactagaaatctgcctgctactgagatgccaaaacaagggaaacaggctcaggttattcatggtttgccagattttgctgatgtttacagcttcattggaagtgtttttgatccagacacagaaggccatgtccagaagctgaaggaaatggatcctataaattttgaaactgttttgttgttaatgaaaaacctcactgtcaatttgtctagtcctgacttt

SEQ ID NO: 25120 - DNA, 269 bp, Glycine max
  Clone ID: 700906706H1
caaagtttcaatctttgtattcaattcaccctttctctctctccctgggccacttgtgttgatgcctcaacccctctttctcggaaaccagccgggtcccaatccgatgatcattcctttaattacatgaaattctgccgaccctctttctctgatcgcgttccctgcatgcccatttgcaagaatcgcgacaccgccttcacacgtgtggaggtttttgacacacgtgtggagaatcatgttgaggttgacgttgtagagggtgttga

SEQ ID NO: 25121 - DNA, 264 bp, Glycine max
  Clone ID: 700906708H1
cgcgaagagtcgagggttgccgttgatttggaatctgtggcgacgcacgagataggtcacgtgcttgggttgggtcactcttcggtgaaggaagcggtcatgtacccgagcctcagccccaggagaaagaaggttgacttgagaattgatgacgtggcaggagtccaagctctttacggctctaacccaaactttacttttagttctttgttgcagtctcagaattcattaaacgctgccgttgggttggaaacggtttctata

SEQ ID NO: 25122 - DNA, 259 bp, Glycine max
  Clone ID: 700906709H1
aggctcataaatcttttttatgggtttcagggtcactactactctgtctctgctctccctgttttggctcttgtccctgcaccaagcaagagctgcaaagttccacaatgtgagtggcttgagagggaaaaagccagttgtagcaaatgggtgcaatttgttcctgggaagttgggtggttgacacgtcttatcctctctatgactcttcaacatgccccttcattgatcccgagtttgattgccaaaagtatggaaga

SEQ ID NO: 25123 - DNA, 270 bp, Glycine max
  Clone ID: 700906710H1
cttttagcaagttaacaacacttttgtcttcgttccattatctagttctcaattctcttcaccctttgcctttgaaagaaatgggtagtcttgaagcggaaagaacaacagtaggattggcagcaagagacccttcagggattctctccccatacacctacaatcttagaaacacaggccctgatgatgtttacattaaagttcactactgtggaatttgccattctgatctccaccagattacccatgatcttggcatgtccaactatc

SEQ ID NO: 25124 - DNA, 268 bp, Glycine max
  unsure (1)..(268): unsure at all n locations
  Clone ID: 700906711H1
gtcagaagggtgcatcaggtcncgagacaggatgagaactccatggctatcactcctgttgttccaagtgacgaagagattgttgatgttaagcctcttcaagtttctagagatattgtgcatattcctggtccaaagaggtctaatttaagtttggataagcttataatggaagcaatcactagcttgaaggagaatggtggttctaataagacagctattgcagcttttatagaggaccaatattgggcactgccaggcttaaaaa

SEQ ID NO: 25125 - DNA, 264 bp, Glycine max
  unsure (1)..(264): unsure at all n locations
  Clone ID: 700906712H1
attccgaagtccaaataagtttctatgtctcagttccagacagtgtaagatctccgngtgnnatcttagctattctagcttctgttgtgggaagctaagcaatcatcagtggaacattttctatcataaaccagagctaatctctgggttgcttcccaagagttaaggttgttcatacatctgacaagatacatggtcaggtctacatccctgaaattaattggttactcatgatcctctgcattgctgtgaccattggattta

SEQ ID NO: 25126 - DNA, 265 bp, Glycine max
  Clone ID: 700906714H1
ggcttatggtggatacctaggcacccagagattaggaagggcgtagtaagcgacgaaatgcttcggggagttgaaaataagcgtagatccggggattcccgatataggtcaacctttcgaactgctgctgaatccacgggcaggcaagagacaacctggtgaactgaaacatcttagtagccagaggaaaagaaagcaaaagcgattcccgtagtagcggcgagcgaaatgggagcagcctaaaccgtgaaaacggggttgtggg

SEQ ID NO: 25127 - DNA, 272 bp, Glycine max
  Clone ID: 700906717H1
acgcctcttttgctggtcattggccccaactatcattcaagcatatttatggccagagagcactggttcctggttctattatcatcgatggtggttctggctattgcaaatttggttggagcaaatacgcatatccatcagggcgttcagcaacatttttggaatttggtaatattgagtcaccaatgtatactaggcttcgacatttttttgcaactatttataacaggatgcaggtgaaaccaaataaacaaccagttattgtttctgtg

SEQ ID NO: 25128 - DNA, 270 bp, Glycine max
  Clone ID: 700906718H1
tcgggtataaagcagcaggtgatgccttggagttagttaagctttgtgaagagtacgggatggaagcttacataataaaatctgttatggacaagaatcgtttttctgctgatatgaattctgttaccaactccaaagagaggggacaggtctcatctacacgtgttcgtgaagcccttgccgtaggggacctgaagtatgtctcagagcttttggggaggcctcatcgtctcatattaatggccactgatcaagaaagattcagtactg

SEQ ID NO: 25129 - DNA, 106 bp, Glycine max
  Clone ID: 700906719H1
tttacattcggacacgataacaacagcgacatggattaaggtggcacagtggcagctattattgaattgttgaagagaaacctgaaactacaatttcacccaccct

SEQ ID NO: 25130 - DNA, 271 bp, Glycine max
  Clone ID: 700906720H1
cgacaaacagatagtgtgggagagagaagagcggaagagaaaatgacgaccaggttcaagaagaacaggaagaagagaggtcacgtcagcgccggacacggccgtatcggaaagcaccgcaagcatcccggaggtcgcggtaacgccggtggcatgcatcaccaccgtatcctcttcgacaagtaccatcctggtttcttcgggaaggtaggcatgcgctacttccacaaacttcgcaacacattctacaatccgatcatcaacatcgaca

SEQ ID NO: 25131 - DNA, 268 bp, Glycine max
  Clone ID: 700906721H1
cgcgattatagtcttcgctaggcgtggttgttgcatgagccatgttgtgaagcgattgctgctgggtcttggggtgaaccctgcggtgcacgaggtggaggagagtgatgaagtgggtgttgttagagaattggaagcaattgtgggtgccaataatggagggaataagatgcaatttccagcagtttttattggtggcaaattgtttgggggattggataaggtaatggctactcatatttcaggggaattggttccaattctcaaa

SEQ ID NO: 25132 - DNA, 268 bp, Glycine max
  Clone ID: 700906722H1
cgtcaagtgtttctgtttctgttttaatggagataaccaaacttggcaagagatttcaaggtaaggtagctattgtgacagcttccacccttggaattggctttagcatagcagagaggcttggcttggagggtgcatctgttgtcatctcttctcgcaaacagcaaaatgttgatgaggctgctggtaaactgagagctaaaggaatcgaagtattggcggttgtttgccacgtttcaaatgcccaacaaaggaaaaatttgataga

SEQ ID NO: 25133 - DNA, 267 bp, Glycine max
  Clone ID: 700906724H1
tgaagaacttattcaagctacaaatgtgaaccatgatcttgaactacttacaccaccaggctctgatggagaatatacaaaatcatggttcacatatgaagaacttattcaagctacaaatgggttttcagcacaaaatttgttgtgagaaggtggatttggctgtgtttataaaggtttgctgatagatggaagagaagtagctgtgaaacagctcaaaattggtggtgggcaaggggaacgcgaattcagggcagaagttgagat

SEQ ID NO: 25134 - DNA, 266 bp, Glycine max
  Clone ID: 700906725H1
gtttacatcaaaatgaagaaacccaatgctgcgatccgtgatgctaatgctgctttggagattaatcctgattctgctaaaggatacaagtcacgtggcgtagacgagcaatgcttggtcaatgggaagaagctgcaaaggatcttcatgtggcttcaaagttagactatgatgaggaaataaatgctgtacttaaaaaggtggaaccaaatgctcacaagattgaggaacaccgtcggaagtatgaaaggctgcacaaagaaaga

SEQ ID NO: 25135 - DNA, 266 bp, Glycine max
  Clone ID: 700906727H1
ctcacggaggcagcagtaccaccgtgcaccacgtggctcacgagtctcaccaccacaccccccattccgctttctcctcccacaacaacgcaccctccaccactgttcattccctgagccaccaggttaacaccggtggtctctcgaccaaacccactgtcagggttttcaccaaagctaatcccaatttctctctcaccattcgtcgcggccaagtcattctcgctccctccgatcccaccaatgagtaccagcattggtataag

SEQ ID NO: 25136 - DNA, 264 bp, Glycine max
  Clone ID: 700906728H1
gcttggacgagtgaattagattcatcatcaagatgtcgtctctgatagcagaagatgtgaagagcagatcacaggtgtaccacggggtcgaaatgtgccaagtgaagtccaaggagcttctcatggaaatcgccctccccaacggccttcttcccctcaaggacatggacgagtgcggctacgacagacaaaccggcttcgtctggctcaaacaaaagaagagttacacccacaagttcgacaagatcggaaagcttgtctcct

SEQ ID NO: 25137 - DNA, 260 bp, Glycine max
  Clone ID: 700906730H1
gaacattgcacctgcaacttcaacttcacttctccgttctaacactcgccttgttccttatcaagacatggagacagacggctttcggtgtttttgggtacctgaatttcaccaaagctggcttccttgatcattctaagaaattcaacccagaggacatggtattacgaataccagggaagaattgcattgttactggagctaactctggaattggctatgcaacggctgagggtcttgcaaagcgtggcgcaactgtc

SEQ ID NO: 25138 - DNA, 262 bp, Glycine max
  Clone ID: 700906731H1
caaaccgttcatgcttaatcaagttgggaacaacaaaaaaaatcaaaacaatgtttctgggtttcggtttcatttcatcaagatgatctgtttatctttttttttttaattttaatttaaagtctttgtattttgtatgtaaagatgtaaaattatgattattaggtggtgcatgtgttgcgtcatgggccaatgttatcctctgcttttaagttggaagaggcccagctcacgtgtgatgtacggctgtgattgtgtaatt

SEQ ID NO: 25139 - DNA, 261 bp, Glycine max
  Clone ID: 700906732H1
cttcattgtagatctattgggcaaatggaaggagtctgaatatggaggtggtcagtctgttcctgttggtggtattgcatactacatcactgcaccttccagcttagctgatatggcagccaatcctttccatgcattattctaccttgtgtttatgttgtcagcctgtgccttgttctctaaaacttggattgaagtctctggttcatctgctagagatgttgcaaagcagctgaaggaacaacaaatggtaatgcctgg

SEQ ID NO: 25140 - DNA, 275 bp, Glycine max
  Clone ID: 700906702H1
tggaagacaaaacacaagacagagtcattcagcaaggcttgaaacgagaagcgaggatgcccatcagatgtattctgcattggcaaccgaaccaaggtagcgttgtgaacagccaagtcctgaatgagatctcgcagtgcgtcgaaagccttaacggcgtcaaagaaggaagatgcaaagcctccctcactttctacagacccaatgtacgagatcaatcggtgaccatcgattttcctcgcgattttctggggatatcgatgctggagcagccg

SEQ ID NO: 25141 - DNA, 247 bp, Glycine max
  Clone ID: 700906636H1
gcgaacaccatggatgtggggaggtctgtgttggttcagaccgagccccgaacgaggttgcctcccggcacctgggggaccatgggggttggtcttggttattgtattgctgccgcggttgcttcgcccgagcggcttgtggttgcggttgaaggggattctggatttgggtttagtgctatggaagttgagacgttggttcggtaccagctgcctgtggtcgtgattgttttcaacaatggtggtg

SEQ ID NO: 25142 - DNA, 172 bp, Glycine max
  Clone ID: 700906638H1
aagcaagcaatggctattactacaccttccaattcttcaattctcatctccctttctcccatgctcatctccatatccctcgctgagtcgcaatctttcatcggagtaaactacggccaggtcgccgacaaccttccggcgccggaggacacggccaacctcctcaaatcca

SEQ ID NO: 25143 - DNA, 251 bp, Glycine max
  Clone ID: 700906642H1
ccaggacttcgacatgatcaccgaccagcggagaaacgagcagaggctcaagatgaagaagaagatcctcatcagcgtactctccgccgtcctcgtcgcgtgcgtcgtaggcgccgcggcattcgtcgttgtccaaagaacaggcacccatgcacagcacgctaccccaatgccacagaacaccccccacctccccgtggatcagaactccaggatggtgaaaatgatctgtggatccgcagaacacaaag

SEQ ID NO: 25144 - DNA, 85 bp, Glycine max
  Clone ID: 700906647H1
cagaaagagacaagaagaagaagatggaggtgagtttatcctcaacatcatgtatacccttaagctcgaagttgaagcataagca

SEQ ID NO: 25145 - DNA, 255 bp, Glycine max
  Clone ID: 700906648H1
gttccgttcagcatcgctccactctctcagacgaggttgttcatatgtgatgaactgttgaaagatgtttgaatgtggtcccaagtcagaatacatgggtggccagcgggaaaattttttgaggttggaggccttggattctacactatgttcatccactgatgccggagttataaaatctggatttaatattgataaattaagccatggtcatggaagcagcacaacttctaggtctttcaaaaggggaatgag

SEQ ID NO: 25146 - DNA, 248 bp, Glycine max
  Clone ID: 700906650H1
cgcaagcatctccctatctcctaagcaagcaattgcccttaaccctcaaaatcttcctctttctctcacagccattgattctccatggacgaatcggagcaatacccgaaggagtattaccctaacgatcaaacaatcaccagaagagtctcctcgtcctcttcgacgaccagcgtccacgtgacagccctagacggcctggtgaacgtcaactccctcttcacaatcgcagtgttcgtgggcctctc

SEQ ID NO: 25147 - DNA, 87 bp, Glycine max
  Clone ID: 700906655H1
attgtggctacccatagtgtcatatagtgtcatacagcaacaaaacaccagcaacacacaacaatgggttatcttatggcaggatgg

SEQ ID NO: 25148 - DNA, 78 bp, Glycine max
  Clone ID: 700906658H1
atggtcgaaagcttgagccagagagagtacgtttgtgtgttgaggttaattattattattattgagtattgagcatgg

SEQ ID NO: 25149 - DNA, 237 bp, Glycine max
  Clone ID: 700906659H1
tgacagtgttagtttgcgctttgtgttcaggttggttgtgctgtacattttgtttgtgggttgcgttgtggtgtcgacgtccgccctcccctccgtcatcgtcaaactaatgggtgtgattgtttcgtttttgggcgtcttgtgtttgattttgggagtcatagctgagaacaaaaagcgtggtggtggaatgcccgtgcccgtgaaggatggtgtgacatgcaagttgtcagccga

SEQ ID NO: 25150 - DNA, 250 bp, Glycine max
  Clone ID: 700906662H1
gtctgctacggcggcatgatcttgtcctacctcgtcgctctcgcccacgagcgccgccacctcctacacgcctaggaccaccattcgcagcatcactgattccatccaccttcagcacgatcctggttgaattggaggtggttagcttgcttgatctttgttttaaaatctgaaaaatcaaggcagaaagatactgtcagcttctgtgtatttcatcatttggatgataaaataagtcatatttgataca

SEQ ID NO: 25151 - DNA, 259 bp, Glycine max
  Clone ID: 700906664H1
attatttcttctttatgtctccgttttagttgctatggaaaatactaagaagcgagaggtgagggagggtgaagatgacgacgacaaccctgaagatggagaagttttacgcgctgttaaggagcttccgagacgcgcgtgatcggcggcgaagggagttggaaaaagaaaaacacgagagccgccacagctggaagaagatgaagaccaccgccgcaacaaccaaggacaataaatcacaagtttcttttgaatttca

SEQ ID NO: 25152 - DNA, 243 bp, Glycine max
  Clone ID: 700906667H1
tatagtttgaatttaattgccgagacatttaattggagtgatgatgcctaggcttgtgagctttccttgcttgcaaattgtgtagatttgttgttggttcattatttgtggatttcagattcatttttagtaggtttttggattgaagggcacattcctgctgtccccttaacgttgttcaaaaagctttgcctaaagattttgtttccccctcaaaaacaaatgcaaaagccattgtatgaa

SEQ ID NO: 25153 - DNA, 239 bp, Glycine max
  Clone ID: 700906669H1
gtgccagctgaaggaaggtgatgttgtggccaagatgccaaaggaagcttgcatcaccacaaagaccagtggggcacgtaagatcattgaagaggctggtttggatggtcatttggggcttgcatttgctatcatgtatgagagaagcttggatggggactctccttttgctggctaccttcaactcttgcctcaccaagagtgtgtgccaattgtttggaccctcgatgaagtaaacg

SEQ ID NO: 25154 - DNA, 160 bp, Glycine max
  Clone ID: 700906670H1
catcgaacagttgggtgatcaccgtccaccgactttgcgttgctcgctccctactctgttatgctgctccttactttctgatttcaagggcttaaaccctaaaaaggacccacggcgagaagcttccaactcctctctcacgagcggatctccacctccg

SEQ ID NO: 25155 - DNA, 170 bp, Glycine max
  Clone ID: 700906672H1
aacctcttcgttccttcgattcattccatttcttccacaatggcaacagacacagttcgcgttctcgtcactggagccgcagggcaaattggatatgctccacgtccctatgattgctaggggagtgatgctgggtcctgaccagcccgtgatcctccacatgcttgaca

SEQ ID NO: 25156 - DNA, 246 bp, Glycine max
  Clone ID: 700906674H1
agaaaagaaagagaaataagagagagaaagttcagaagaggcatcaattgctagctccaatatattacaccactgcaaaatccactgcagcagagatcattgttcattatcacagaaatgggtgaagagaacaaggaagaagaaaggaaagaagagaccacagaggaaaagaaggaagaagagcaaaaggatgaagagcccccagagatagtactcaaggttgatatgcactgtgaagcttgtgca

SEQ ID NO: 25157 - DNA, 249 bp, Glycine max
  Clone ID: 700906676H1
atctgctacggcggcatgatcttctcctacctcgtcactctcccccacgagcgccgccacctcctccacgcccaggagcacgatcagcagcatcactgattccatccaccttcagcaggatcctggttgaattggacgaggcccatttgcttgatctttgttttaaaatctgaaaaatcaaggcagaaagatactgtcagcttctgtgtatttcatcatttggatgataaaataagttctatttgatac

SEQ ID NO: 25158 - DNA, 135 bp, Glycine max
  Clone ID: 700906677H1
cggctcgagctcgagcgaattcggatcgagcaagccacaaattagtactctcgtaagtccccttgctcactgctaattgggcacaatggaaaagcttcatgctgtgtgcatcccatacccagcacaaggccacat

SEQ ID NO: 25159 - DNA, 249 bp, Glycine max
  Clone ID: 700906678H1
ggacggctgctacaatgcttgtaaagaggaggacttattgccttgagatgaactcattctgaagcgtttgtgagggaatgcagaatcatttgaaaagggagaaaatgttaagttcttcatagaagggaatcacaaaactcaaattttcttgggcggacatgaagtggaagcagcttggtcgctggaatcttgctctttccagcttctgaaactatggcccacatttgagtagttactaaaggagctgca

SEQ ID NO: 25160 - DNA, 253 bp, Glycine max
  unsure (1)..(253): unsure at all n locations
  Clone ID: 700906680H1
ggcggcatggcattctcagcagtctggcgactagcgaatcttgggcgacacttggatttgagtgaatcagtgaacaaggctccaccagttgggtcaatcaagttgaaggtagcttcagaggtttctgaagcattatcactgggtcgtgctgttgttgctcttgaatctaccactatttcgcatgggatgccatatccccaaaatttggaaactgcaaagacngtggaacgtattgcaagagagaacggtgcag

SEQ ID NO: 25161 - DNA, 248 bp, Glycine max
  Clone ID: 700906681H1
acagtattcttttttattgtgtttttcttctgcagagaagagtccccccctaccccccgctggcgaaggcttgattccctgcttcaatcgcattatcgttgagaaaatcgtccctcactccaagacaagcgccggcattctcctccctgagaagtcctcccagcttaattccggtaaggtgatagcggttgggcctggatcacgtgaccaggcagggaacttgattccggtgtccgtgaaggaaggtg

SEQ ID NO: 25162 - DNA, 233 bp, Glycine max
  Clone ID: 700906683H1
ctgaaatgggttctttacaagaaagaatcagttctaccacacaacggccacccccttctattcacacagtttatgtacccgcacacgatttaaccgatcctgcgcctgctacgacatttgcatctttagatgctactactgcactatcaagaggattagcggccaaaggcatctatccagcagtagatcatttagattcaacctcaactatgctccaacctcgaatcgttggc

SEQ ID NO: 25163 - DNA, 243 bp, Glycine max
  Clone ID: 700906685H1
aaacgactccaagtaccgccctcgctgctccaccatcctttcaatttgttctgcataggttatgcgctatgcaacacagtgccatggaagcctccaaattcagtaacagtgatcaaaacgttcgatgccataactgcgcaggacccctttccaaagacatggaaaccagtcactggaccgcttcgcctctcattagggatagcttctccatgattggttctgccgttggcggcgtggcaagtg

SEQ ID NO: 25164 - DNA, 245 bp, Glycine max
  Clone ID: 700906690H1
gtcacttaatgttgagatacccacatatccaccctccacccccccacaccgtacaacatgggaacgttacacagtagaagatgcatatgaaattgtcaacttcgacaaaatgagacgcataaatgtccacgcaccagtggatgtccctggtcatgcagaatcatggggtgctggatatcctgatgtttggccatcaccttactgtagggagccacttgatgtttcaaagaactttacttttgatg

SEQ ID NO: 25165 - DNA, 247 bp, Glycine max
  Clone ID: 700906693H1
ctgcaaagggcttctccagcctagtttgttctcagatcttcttcttccatggaccagtacgccaccgcggcgcagataggcgagggaacatacggcgtcgtttacaaggctcgcgaccgcgccaccaatgagacaatcgctctgaagaagattcgcctcgagcaggaggacgaaggcgttcccagcaccgccattagcgagatttctcttctcaaagagatgcagcataggaacattgttaggttgc

SEQ ID NO: 25166 - DNA, 248 bp, Glycine max
  Clone ID: 700906635H1
acaaggcattctgaggccatggacttcagagattggtgcgagaatgagtgtgttaggcttattgggacaaaagatacgagtttccttgagttttgcttgaagcaatccagatcagaagctgagatgcttcttatagaaaaccttggatcatatgatcctgaccacgaattcattgataaattcctcaattacaaggagttgttaccatcagatgttttggacatagcttttcagagtagtaggaatga

SEQ ID NO: 25167 - DNA, 251 bp, Glycine max
  Clone ID: 700906695H1
cataaacgccgcccaaaaccatttatagggttttattttctttgccaagaaaatgagagagtgcatttcaatccacattggtcaggcccacatccaggtcggaaacgcctgctgggaactctattgccttgaacacggcattcagcccgatgggcagatgccgagtgacaagaccgttggaggaggagacgacgccttcaacacattctccagctacaccggcgccggaaagcacgtgcctcgcgccgtct

SEQ ID NO: 25168 - DNA, 253 bp, Glycine max
  Clone ID: 700906696H1
acttttgttcggtaggcctttgttgtcaccaatgccaccattgtactcgtgtccctttagcaagtctaacctagtggtcagttgctattgcctttgccagagccgtcacaccgatcgctagagttgccgtcgaaattgtcattgtttgactgttattttgttgttttcacctaaagattccacttctactttttcctttcttggtgttagtttgggggtttttcaatcctccatttacgcaaatatagacggt

SEQ ID NO: 25169 - DNA, 235 bp, Glycine max
  Clone ID: 700906701H1
gccccatcaaccaggttatttctgctcggaagggagagtttgaaactggatacgagagaggtggacaaactcgtgaacatgtccagcttgcaaaaacgctgggtgtgtctaagcttcttgttgtcgtcaataaaatggatgagcctacagtgcaatggtcgaaagaaaggttctctgactttctcactccacacaacatacgagtttgcgaaatggggatatgctgagatacctg

SEQ ID NO: 25170 - DNA, 244 bp, Glycine max
  Clone ID: 700906575H1
gcaaaattatcttccgtttcaggattaggctttcaccgttacagtgaaacatgggagaaccaaaacgaatctatctgcgtatctttgcgctgctcctcttcatttccgcctcttcgtttcaccttctccgcgctttcgatgacgtgatcttttacgcgtcgttcgacgaggatttcgaagaccgttggattgtgtctcagcaagatgagtacaatggtgtctggcaacatgccaagagtgaggg

SEQ ID NO: 25171 - DNA, 95 bp, Glycine max
  Clone ID: 700906576H1
aacactctcatctggtctctatgtctcgaatcttctccgcatggaacaagaagaagctgcaccttcatctcaacttaatccccactattttttct

SEQ ID NO: 25172 - DNA, 208 bp, Glycine max
  Clone ID: 700906577H1
gtgtggttaaaagttaagaagtagcaaagatgtttccattcgggcacaagggtcaaaagataaaggggactatggaggttatgcagaagaatgtgttggatatcaacagcatcaccagtgttgacgggatcgtcggcaccggcttagacttcttaggcagtgcactcgatacagttacttttttagcctcctccatctccacacaaca

SEQ ID NO: 25173 - DNA, 75 bp, Glycine max
  Clone ID: 700906578H1
gcttggagcaattaatcgttttaatgaacgatgtggtcaactgcacaatttcttgcaagatattagaatatttta

SEQ ID NO: 25174 - DNA, 242 bp, Glycine max
  Clone ID: 700906579H1
agttttggggttagattaggtctacctacccaaaacaaaacttcaatttctgtttcagttcgcggagatcaatattttatctaggtccatcgtcgatagtcgatacgagtcaccaaaggcaatgtttttgtgggattggttttatgggattctagcgtcgctcgggctgtggcagaaggaggccaagatcttattcttgggcctcgataacgctggcaaaactaccttgcttcacatgctca

SEQ ID NO: 25175 - DNA, 243 bp, Glycine max
  Clone ID: 700906580H1
tgggagttgtcaaaggcatctgtgaagatcatcataggagaaagcgtgtggtgggaagcattgaaatggaatgcagcagagtggggagatgctggtcgacccaatgtttttgaacgaattttttcaccaatcagtgaggaggctgacatcatgactcaactggctgcacatcaagagactcaattaagtacagatcacgatgagtttctgggaaccaaacaaaggcatgatgatagtaagtta

SEQ ID NO: 25176 - DNA, 131 bp, Glycine max
  Clone ID: 700906584H1
agatagtttcggtggagcatagcaatttgttggtctgctaccattgtttgatcctcgcaggcatgatagtgctgaaaccattcgaagagctcttaaccttgcgtgtcaatgttgaagatgattcactgggt

SEQ ID NO: 25177 - DNA, 247 bp, Glycine max
  Clone ID: 700906585H1
cttgattcttctcatactgaagacttaattccagaagtgattatcaaatgtctcaatgaatgggatattgactgcaagctttttgccttgacacttgatgattgttccatcaatgatgacatcactcttagaatcaaggagcgagtttctgacaaaaggccttttttaagtactcggcaattacttgatatacgctctgaagcacatctcataaaatccaatgctcaagatgcaatggacgcattac

SEQ ID NO: 25178 - DNA, 245 bp, Glycine max
  Clone ID: 700906587H1
cttttataattattttaaaagtttaatttcaatatattattggtgactcgtaatttgtgaagttgtttatacggtcaactaattaaaaatcacccttaattttgaattattatattttatatcaaactcattgttttaaaatattttcatattgcataatttcctttatttttataaatagcatggtattttgtaatatacaaaatcttaggtcataaaacaatatttattgtctaaattcgtga

SEQ ID NO: 25179 - DNA, 251 bp, Glycine max
  unsure (1)..(251): unsure at all n locations
  Clone ID: 700906589H1
aagtggaggaaattgtacttggagaggcaagtggaattgggacttagagcaaggtctgtcgtgaagtttctggaagcttgttctcgttccgagtcacttgaggttggtgactatctgaaagctgttgacaccttgattggtaccatgtttgggtttgaagacgtgcagaggttcttgttgcaaccctcaaatgaatgtcgctgattgaacttnnggttggggctacactatttgcctacacacacatatcg

SEQ ID NO: 25180 - DNA, 241 bp, Glycine max
  Clone ID: 700906591H1
ttgggatcataaaatttgaacattggattctcttcagtaagagccaagttagcatcataaaatgattttattgttccaatgtcttcccaatagtcattgaaaaaatacgcttggacattgttttccctcactgctgcaggaatgatttcagatccaaagtcattggatgtaggatatctccatttcagaagcttgagtaaaacatctgtcttgaatacataaacccccatagatgcaatat

SEQ ID NO: 25181 - DNA, 244 bp, Glycine max
  Clone ID: 700906592H1
gctcgagactagttctaggaaagaagaaataaagtggttgagaaaattcatcaatcagcaattaaaataaccaaaacacgaggtgtcaagctctctgatttccgtgtcatcaatcaggatccaccagccatttctgatgaagcagtcatcaaggcagtagagactgcaacaaaagaactaaacttgacaagcaagttgatgattagtagagcctatcatgattcattgtttatggccaggttgt

SEQ ID NO: 25182 - DNA, 241 bp, Glycine max
  Clone ID: 700906596H1
cgtcttcctcctcagcttcgcaatcgcagttcgcctattaaaacccctcctcctcctcctcctacttccccgttccctttcaccttcagcaacccgcaaccactcactacgctgcgccctacgtcgccgccccctccgtgcaaatccccgctcctccagtcgtcggccccgttgcgcccgcccctgtacccggcgtatactccgccgtgccgcaatatcaggcacagcagttatttgagag

SEQ ID NO: 25183 - DNA, 251 bp, Glycine max
  Clone ID: 700906603H1
attcaatttggagtggacgaaagctatacatgctggttccaaaagccaaggaatcttcccaagtcacgattaaagcaaatacagtttatggtgcattgcgcggattagagacattcagccagttgtgttctttcgattatacaactaaaacagtaaaaatatacaaggcaccttggtccatccaagataaacctagatttgcatatcgtgggcttatgctggatacatcaaggcactatttacctattgat

SEQ ID NO: 25184 - DNA, 252 bp, Glycine max
  Clone ID: 700906605H1
tgttgatcgagataactagaaacagtgtgatgaaaatgaaggtccttgttttcttcgttgctacaatttcagtagcatgacaatgccatgcgtacgatatgttccctctccgaatgaacactggctatggtgcccgtactccggaggtgaaatgcgcaagttggaggcttgctgtggaagcacacaacatctttggctttgagaccattcctgaagagtgcgctgaagcaacaaaggaatacatccatggcg

SEQ ID NO: 25185 - DNA, 255 bp, Glycine max
  Clone ID: 700906610H1
cagagaaatccataccagtaacgaacaaagatggcgaaaatcctacacctgcaaaagctgaagttcctgacaacgagtttcacaagcgcataagaccagaggttatccctgcaaatgagataggggttacatttgcagatattggtgcgttggatgagattaaagaatcacttcaagagctggtaatgcttccccttagaaggccagacctcttcaaaggtgggcttctgaagccatgtagaggtatattgcttt

SEQ ID NO: 25186 - DNA, 106 bp, Glycine max
  Clone ID: 700906611H1
gaagacattctcagttgtgttgtctgacaaaacgaacagcaattgggagcagatgcaagatccatcttcaaaccctaattccaatccaaatcccaatacccacaac

SEQ ID NO: 25187 - DNA, 256 bp, Glycine max
  Clone ID: 700906612H1
attccacaatggattgggcatggtgaagacattggagatgtgctatctatcaatgtcttggctccaattctgctagttcttctgacttttattctctgtcggggtgttcaagaatcgtctgttgtgaattctcttatgacagtgaccaagataatcatagttatcattgtcatttttgctggagcatttgaggttgacgtttccaactggtctccctttgctccaaatggtttaaaagccatatttacgggagcta

SEQ ID NO: 25188 - DNA, 258 bp, Glycine max
  Clone ID: 700906613H1
acacaattccaattcctctggatctcgtctcgatacgatcgatctcgaacatgagcactggggagctcctcaacatcgaacctctcgaactcaagttcccctttgagctgaagaagcagatctcatgttctcttcaattgtccaataagaccgatagctatgtggccttcaaggtgaaaacaaccaatccgaagaagtactgtgttcgtccgaacactggtattgtcacgccacgatctacgtgtgatgttatcgtta

SEQ ID NO: 25189 - DNA, 253 bp, Glycine max
  Clone ID: 700906615H1
tagcctccttacattctgacccagcttggctttcatacttgttttgtgtggcagagcaagagagagcgcaatggaaggtatctcagtgggtttgaagaagtattggagaagaagcattaggggatacccaagattacacgtctcggatcggcgaaagaaggaaacggttcagcttggaggcagctagagaaggaggagatggcgcataaagttagctcgtaagatcagaattcccaaaatctcttctccaaag

SEQ ID NO: 25190 - DNA, 258 bp, Glycine max
  Clone ID: 700906616H1
gcacaagattgcaaaatgaagttcaacattgcaaatcccaccactgggcgccagaagaagctggaaatcgatgacgacctgaagcttcgagcattttgggacaagaggatctcccaggaggttcttggtgatgctctgggtgaggagtttaaaggatatgttttcaaaatcaccggtgggtgtgacaaacaaggattccctatgaagcagggagtgctgacccctggtcgtgttcgacttttgctccatagaggaact

SEQ ID NO: 25191 - DNA, 252 bp, Glycine max
  Clone ID: 700906621H1
gtgcaagtttgtttattctgagaaggaagagagaatagaacgccatggatgaaatattgaacaaggtggggtcttactggttctccaagaaggccagcaaggaatttaactctgtcggcgatgatatcaactcactgtcaaccagtattgaagggggaaccaaatggttggtcaacaagttaaaaggaaagatgcaaaaggcattaacagagttgctaaaggagtatgatctacccataggaatctttcctc

SEQ ID NO: 25192 - DNA, 58 bp, Glycine max
  Clone ID: 700906624H1
ggacgagaccaccatgcccttaacgttcaccgaccacgtcagctggttcgacgcctcc

SEQ ID NO: 25193 - DNA, 82 bp, Glycine max
  Clone ID: 700906625H1
ccggcgtcacaactcactcacgagcggggccaacctcgcacactattcagtggctagaggcccttgcttggtaagcacccgt

SEQ ID NO: 25194 - DNA, 246 bp, Glycine max
  Clone ID: 700906573H1
gccaacaaacgacgtcgtgtggtttccaataccttctacgttttgaatttttacgagaattgagatggcgaacgagaacgaacccgcgaagtgtttgttaccataccttcaacgcgccgatgagtcacaaaagcacgaaccactcgtcgcttattactgtcgattatatgctatggaacgggggctgaagattccgcaaagtgagcgcacagagaccactaatgctcttctggtttcgctcatgaa

SEQ ID NO: 25195 - DNA, 253 bp, Glycine max
  Clone ID: 700906626H1
gggattgtggcaaatttctatagcctacattcatggatgagtttggcttttgtatccctcttcggatcccaggtatttgcttcttcatgatccttgataatttcttagtaaaatattacctcttgtgtttttatagaaactaaagcatacaattcacaccaccaaagctcatatgaagttcctgcaaatgaaatttcatgaggagttctccaatctaggtaatattttgcttatgattaatttatttaagttc

SEQ ID NO: 25196 - DNA, 255 bp, Glycine max
  Clone ID: 700906627H1
ggcctctgttctgtgttcagtcttcaaccacctcaacacatagaagacccacacacttgtttttgctccaaaccgccctctgattcccgaacccaatgacttctccgctggtggcggagggcgccgccgtcacggcgttccgatcggtgatgctccgggtgcagcaggcggcggagagatccgggtccaaacccgaccgggtccgggtcgtggcggtttccaagacgaaacccgtcactctgattcaacaactct

SEQ ID NO: 25197 - DNA, 258 bp, Glycine max
  Clone ID: 700906628H1
aaattgctagctccaatatattaccaccaccactgcaaaatattctgaagcagagatcattgtccattatcacagaaatgggtgaagaagaagaaaagaaagaagagaccacagaggaaaagaaggaaaaagagcctccagagatagtgctcaaggttgatatgcactgtgaagcttgtgcaaggaaagttgcaaaagcactgaaaggatttgaaggagtggaggaggtgactgcagatagcaaggcaagcaaagtgg

SEQ ID NO: 25198 - DNA, 84 bp, Glycine max
  Clone ID: 700906631H1
gtgacctacggcaccattgccccattgggtgtcccccaacagggtatccacatcaatggtcagtttcccggccccgaaatcaac

SEQ ID NO: 25199 - DNA, 262 bp, Glycine max
  Clone ID: 700906632H1
attcttcatcgttgccaaaagcgacaaaccaaaattatatacaaaaaaaatacttaaactccatttttgtcttccacacacactctcctatactgtttcaatttcaacactctcattatcataagattcccaccgaaaaacctctcacaccatggtttctcgccatttggcttcttcgtcttcctctgtttcctctgtttcgagatctctgtttcgtcccttcgattgcacggtttggaccaagacgccaaggccacgcatg

SEQ ID NO: 25200 - DNA, 250 bp, Glycine max
  Clone ID: 700906515H1
agaagagtagcctgagccagtaccagaaccaccaaaattggttcgtatggcaaatttgtgtgttgtgggtggtcatgcagtgaatggggttgcagagatacatagtgaaatagtaaaagatgatgttttcaatgcattttataagtagtggcccgagaagttccaaaacaaaacaaatggtatgacaccaaggagatggatcaggttctgcaatccagatctgagtaaaataataaccgagtggataggt

SEQ ID NO: 25201 - DNA, 254 bp, Glycine max
  Clone ID: 700906516H1
cttcaattcattctagttctggattccgactagccgcgttgactcggttccgttattcattctcgcggatctaatattaaggaatagcttaagggcacattacaatgaaggcattgattctggttgggggatttggaacaaggctgaggccactgacactcagtttccctaagcctcttgttgattttgctaacaagcctatgattttgcatcagatagaagcccttaaggccattggagtgactgaggtagtg

SEQ ID NO: 25202 - DNA, 258 bp, Glycine max
  Clone ID: 700906520H1
aagaaattgcgaagtctaaagccaaagaagagaagaagaaagtagaggctgagattgagctgctcttggtagtagagaagcttcaagagttacgctccataagaatacaaaagttgaaaaaacaaggccattttctcccagaggaggatgacaagtttcttgagaaagttcaagctgctgtggaagaagaggagcgtgaagctttggctgcagttgaaacagatgctgctaaagatgcaattgcaactgctgaggaat

SEQ ID NO: 25203 - DNA, 256 bp, Glycine max
  Clone ID: 700906521H1
ctcttctggatgaattgcttgttgtcatttcttttgatggatcttatgtcaattacagacatttggctattatttgtgataccatgacttatcgagggcatttgatggcaattacacgtctaggtatcaaacgtaatgatactgggccaatgatgagatgctcatttgaagaaacagttgatattctgcttgatgccgcagtatatgctgagcatgattacttgaggggagtcactgaaaacataatgttaggtca

SEQ ID NO: 25204 - DNA, 256 bp, Glycine max
  Clone ID: 700906525H1
gtttctcctcgttgttcttcgctttcctgttttcaatttcgattctttcgttaatttaataagatgtttgggagggcaccgcagaagagcgataatatgaggtactacgaaatcctcggcgtctccaagaacgcttcgcaggatgatctgaagaaggcttacaagaaagccgccattaagaatcaccccgacaagggcggtgatcccgagaagtttaataagctggcgcaacttatgaggttctgagtgaccctga

SEQ ID NO: 25205 - DNA, 257 bp, Glycine max
  Clone ID: 700906526H1
ctcacctctctctctctctctccctccctcctagggtttcacgtttccatgtgaaaacggtttgagaatctctctctcattctctctctattttatattttctttcacgtcaattagggtctattttgctggcgtgattctgaaggcttggatctggatatcttctttgcttctttgctatggaagactcggattcagttgctacactgatagattctactacttctaagatacaacagctgcagaaggcatttgct

SEQ ID NO: 25206 - DNA, 249 bp, Glycine max
  Clone ID: 700906528H1
gtttcgggtacggaaaaggtttggaaaatgtttcaagctatcggtgacattgcctttgcttatgctttttctaatgtcctaattgagatccaggacacactgaaatcaagcccacctgagaacaaagtcatgaagagagcaagtttgattggcattatgactacaacattgttttatgtactatgtgggtgcttaggctatgctgcatttggaaatgatgcaccatctaatttcctcacaggattcggc

SEQ ID NO: 25207 - DNA, 251 bp, Glycine max
  Clone ID: 700906529H1
ggccttctaattggaggaaaaagaggattcattttcatgactttatgttgaatgtacatagcatgctacaaaagcataaggggttgtcagatccacttgatgtggttgcaggagagatttctgatgatgcaattttattatgtcttgacgaatttatggtaacagatgtagcagatgcattggtactaaatcgcttgtttagacatttgttcaacaaaggcatacatctagtggccacatcaaatcgtgct

SEQ ID NO: 25208 - DNA, 258 bp, Glycine max
  unsure (1)..(258): unsure at all n locations
  Clone ID: 700906530H1
accgaggccaatcaagcaaaggttaaggagattttgtctcactatccacacaacatacgattctcngntacaattcctcntttagatcttgtccagnagnagnatgaattttggctacctgtttctgcaatggatgcggtagctaagattgtagaggttcctcccatacgggtgtatgaggttgccacattttactccatgttcaatcgagctacggttgggaagtaccatctgttggtttgtggaacaacaccttgt

SEQ ID NO: 25209 - DNA, 249 bp, Glycine max
  Clone ID: 700906532H1
cgagtacagcggcaagtaccaggctgcgggtgaattgggtcacgttaaggatctcataaaatgggggaccgattaccttctcaagaacttcaacagcaccgccgacaccatcacccagctgggcatgcaggttggatccggggacacctcccaagggagcgccactcccaacgaccactactgctggatgcgtcccgaggacatcgactacgaccgccccacccagacctgcaccacatgctccgattt

SEQ ID NO: 25210 - DNA, 253 bp, Glycine max
  Clone ID: 700906533H1
ctctaataagggttcctctttccttctctagcacaatttacaatctcaatggctggaatttgctgtggtgttgttggagaaggtgacactccggctccactcaagcccactcctcgcccctccaggcgccggagtttggacatcttacctttaaaatatatcgccgacatgcccatgccgccgccggaggctttacggaagcgtcccaagctcaacctcagggactgcgataacgcaattgaaaattgcgacg

SEQ ID NO: 25211 - DNA, 251 bp, Glycine max
  Clone ID: 700906534H1
agaaagtgacgaggtaggtcatgacatccttcagccagcttcagtcacagatgcaatctcagggacttgtagtgcctcctgagcctctggtaggtcctggtccctccggtcctcgggtgagcacaaatgggagttgtgttgatccctcaggaagcgatcctaagacgggtgactctgacaggtgcggcttgtacatagaagtagatcctgcccgcctggttgccgtggggagagtttatgagggatccact

SEQ ID NO: 25212 - DNA, 256 bp, Glycine max
  Clone ID: 700906536H1
gttccagatgatgaagacagagaattgttgcaggaaatcataaacaattctaagttaagtgaaggatatctcacccttgctcgtgatattgaagtcatggagcccaagtcccctgaggatatatacaaggcacatttgcttgatggccgggctagtgctggtgcaagtgttgattcagctagacagaaccttgctgcaacttttgttaatgcatttgtaaatgctggctttggtcaggataaattaatgactgttc

SEQ ID NO: 25213 - DNA, 254 bp, Glycine max
  Clone ID: 700906537H1
ccagggaagtatctagggctgagaactattcgtgctcaacggcgttctccaagtgactctcctcgtcgctcccctagctattctccttatagaagaagctatagccggtctccctattcttcagaccgaagtaggagtcgttcttactctcctgactataggaggaggaagtcaaactatccatatcactctaggcgaaggtcatactctccatactacagccggtacaggtcttattctcgatatgatcgaca

SEQ ID NO: 25214 - DNA, 100 bp, Glycine max
  Clone ID: 700906540H1
cttctctcgctccttcatttgcatgtacttctctggaggtatataactattattctattgtgtttgaaacataaaaatggtttaaatcttttgccatggg

SEQ ID NO: 25215 - DNA, 160 bp, Glycine max
  Clone ID: 700906543H1
caaaaaatggctctatcgcgcgtggctcaatcgtcgccatcacagtcgaatcttttgaaacccctctcgtcgtacttatccctacgacgccgttcgatgtcgacctcgtcggagcccctcaccgtggagacctcggtgcccttcacctccacacaacata

SEQ ID NO: 25216 - DNA, 79 bp, Glycine max
  Clone ID: 700906545H1
ctttctccgatggctaatccctcactcttgttctacagtctcctcctattatccgccaacgaagccgcaggagaaagga

SEQ ID NO: 25217 - DNA, 235 bp, Glycine max
  Clone ID: 700906549H1
ccctaacggagcatgtggtcgcatagctaaatcttacttgaagtacactacttaaagctagagtatgtgttgtagttatatgtgtcttaaaattgttatgcctaccctatcacaataaattattattataataagagagtatgttgcttgatcatatggctacaatttgtaagtgatgattaattaccaataatcgaatctttggtaatatatatttaaaaatcaatattatatt

SEQ ID NO: 25218 - DNA, 255 bp, Glycine max
  Clone ID: 700906552H1
cctcaagccactctaaagaaaatggcggtgcctctactctcgaagaagatcgtgaagaagagggtgaagaagttcaagaggcctcagagtgacaggaaaatttctgtcaagacaaactggcgcagaccaaagggtatcgattcccgtgttaggagaaagttcaagggatgcactttgatgccaaacattggttatggttcagacaagaagacccgccactatctccctaatggttttaagaaatttgttgttcac

SEQ ID NO: 25219 - DNA, 216 bp, Glycine max
  Clone ID: 700906554H1
gtcccgtctgaggttgtggttggaattgcctcaaagcttgttgccttccagatgcaaagctgcctttgtcatgcttcaagagggctactggccaggatttggccctgcatgcatgcgccggggtgcctcctctcacattgctcgactcccttctacctccagagtgggtcgatcgcctgcagagtggcctttttcgcgatgatgttaccgcctgtg

SEQ ID NO: 25220 - DNA, 83 bp, Glycine max
  Clone ID: 700906555H1
aaagaaggcgtcttcataaacgcctttcttctccgtttccgtttcctcgttcgaattcgctttttgatctgcgaaaatgagag

SEQ ID NO: 25221 - DNA, 251 bp, Glycine max
  Clone ID: 700906556H1
gtaaaactcttcaccaaaaagggcttcaacatcgaagaaatggtgatcctactcggtgcacattctatcggcatggctcattgtgacttgttcatccaaagggcatacaacttccaaaacacagggaaacacgaccctacccttaccgtcgaagcggttgaggaattcaaaaaggcatgccccaatgttaatacacctaagtacaggaacccccctgtcaactttgatgcaacaccaactgtgcttgataa

SEQ ID NO: 25222 - DNA, 144 bp, Glycine max
  Clone ID: 700906558H1
ttaagcatttactcctattgggatggtcaagtactgttgcgttatgtgcttgtgtttgatcttacttcacattttcctgcgctttgtgccaatacagtcagcacctgaaagtgccattgtgacacagattcctggcttcagtgg

SEQ ID NO: 25223 - DNA, 246 bp, Glycine max
  unsure (1)..(246): unsure at all n locations
  Clone ID: 700906559H1
attttctacagctatgacatactcgccctttcgagaggcctcgtttctcgtctgcaacgtgtcgccgtcgattcgcagttgtcgctccgatttctgagctccgatgcggcagcgattcggtctcggataattgaaccgaagcccagtgcgatgacccctaattccaagcgaactgggctcatancggtgaagtgtggaatgagcgctctatgggataaatggggagctagcattccaattactgtg

SEQ ID NO: 25224 - DNA, 246 bp, Glycine max
  Clone ID: 700906561H1
aggacatactaatgcgtgttttggctcaaaatctttctcctgagttgactctcgtggaaaaggtaatgactccaaacccagattgtgcatcagtagatacaacgatactggattctctgcatatgatgcatgatgggaaattcttacatcttcctgtggtagacaaagatgggtatgtagtggcttgcatggatgttttgcagataactcatgctgcaatctccatggttgagagtagctctggag

SEQ ID NO: 25225 - DNA, 254 bp, Glycine max
  Clone ID: 700906514H1
tactactcacactcactgcagatctcaatccatggctaccattgttagcatcaaggccagccagatctttgacagtcgtggcaatccaaccgtcgaggtggatttgacatgctccgatggtacttttgctagagctgctgttccaagtggtgcatccactgggatttatgaggcccttgaattgagagatggaggatctgactaccttggaaagggtgtatcaaaggctgttgacaatgtgaacaccattattg

SEQ ID NO: 25226 - DNA, 121 bp, Glycine max
  Clone ID: 700906566H1
gtggaaaccaaagacgggaaatcggtaacgttttctataatgagacagggtattaacggctagaaacgaaggaaggagtaacatacaatggaggttcaatttgccctcccattccactaac

SEQ ID NO: 25227 - DNA, 102 bp, Glycine max
  Clone ID: 700906569H1
attccccaagagcttgaagacagatacgggagttggctaagtccccagttacagtaagcaaccagttttctagtttacatgaagaggtttcaataccacaca

SEQ ID NO: 25228 - DNA, 71 bp, Glycine max
  Clone ID: 700906571H1
ctgagaataaatttagtgttagtagctccattgactttgtgggacaagttgaatatgacacagagtttact

SEQ ID NO: 25229 - DNA, 248 bp, Glycine max
  Clone ID: 700906572H1
tgttgatatagcagccaaagaactaatagcaattgcttcccctggacaagttacacaggtacagcttgaccgagccaaaaaatccacaaagtctgcagttctaatgaatctggaatctagaatgattgcatcagaagatatagggaggcagattttgacttatggagaaaggaagcctgtggaacagttcttgaaggctgtagatgaaatcacgttgaatgatatcactaaaattgctcaaaagatta

SEQ ID NO: 25230 - DNA, 260 bp, Glycine max
  Clone ID: 700906474H1
cgacgtcatccagggctccactgccatcaccatctcagattgccacatgaccaaacataacgatgtcatgctgtttggtgctagtgactcatacagcggagacaagataatgcagataacagtggcattcaaccacttcgggcaaggactggttcagaggatgccaaggtgcagatggggtagcgtgcatgtcctcaacaatgactacacccactggatgatgtacgcaattggtggaagctcagggccaacaattctga

SEQ ID NO: 25231 - DNA, 79 bp, Glycine max
  Clone ID: 700906475H1
ccaggagactactttattggtaatgtgtatgtcggattaagtggattcgagtgaaatgttgatcaggggagtcatttcg

SEQ ID NO: 25232 - DNA, 261 bp, Glycine max
  Clone ID: 700906476H1
caccacaattcacaaccgaaacagtttccatctctctcacaaaatgacaacaatatcaaattgctcccttctcttcctcttcctcttcctctccaccctccacatagcttccaccctctcaacccccaccaacttcatcaagtcctcctgcagcaccacccagtacccagccctctgcatccagtccctctccgtctacgcctccaccatccagcaagacccccacgagctcgtccagacagccctctccctctccctcaa

SEQ ID NO: 25233 - DNA, 260 bp, Glycine max
  Clone ID: 700906477H1
caacaacaaattacaacttcaaataaaacagagcatctctctgctcttctctgttctgttctgttctgttctgtttctctctcctccccatatattcctcttcttcttcagaactcagaactcagaagggccacttcacttttagaaacccagttttgcatctgggtttttgcctgttgaagtgccaattttgaagataataataaaaacaattatgacttggaaaagcagaggagaattgccttctagaagcgtcatct

SEQ ID NO: 25234 - DNA, 262 bp, Glycine max
  Clone ID: 700906478H1
cttaacaacagcacaaagcgggttactgtctgttcaagctaccatctctctctctctttcttagtgcctccttgccagaagttaaaatggcccaagaaactttcctattcacatctgaatcagtgaacgaggggcaccctgacaagctctgcgaccagatctccgatgctgtgctcgatgcatgcttggagcaggaccctgacagcaaggttgcctgtgaaacctgcaccaagaccaacatggtgatggttttcggagagat

SEQ ID NO: 25235 - DNA, 265 bp, Glycine max
  Clone ID: 700906479H1
gtacgccgtttcaactctggagttcaactctccgttgcctcgaaacgtcgttactgcgccgttaaggggaatcccgagctcgacacgttttattatctcggattgaaaggaatcagcgttggcggagaagctcttccgattccggaatcgatttttgaggttgacgccatcggcggcggagggattattatcgattccggcacggcggtgacgcggcttaggagtgaggtttacgacgcgctccgcgacgcgtttgtgaaggggg

SEQ ID NO: 25236 - DNA, 267 bp, Glycine max
  Clone ID: 700906480H1
gaagaagatgccgatcagaaacatcgacgtcggaaggcctgaagaggcgactcaccccgacacgttgaaggcggctttggctgatctcatctcaaccttcatcttcgtgttcgccggctcaggctccggcatcgcctacaacaagctcaccgacaacggtgctgccacccctgccggcctcatctccgcctccatcgcccatgcattcgccctcttcgtcgccgtctccgtcggcgccaacatctccggcggccacgtcaaccccgc

SEQ ID NO: 25237 - DNA, 275 bp, Glycine max
  Clone ID: 700906481H1
agctcgaccgaatcggctcgaggcataatcaaatcaaccatggcacacccttattgctcccaccaccttttcacctggtttacgatgctgaagctcttagaaaagctttccaaggatgggggaccgatgagaaaaccgttattgcaatactgggtcatagaaatgttcatcagatgcaacttatcagaaaggtttatgaggaaatttaccaagaggacctcattaaacgcctggagtctgagctctctggtgactttgagagagctgtgtaccgt

SEQ ID NO: 25238 - DNA, 268 bp, Glycine max
  Clone ID: 700906483H1
gtgtacagttacggtattgttttacttgagttgctaactggaaggaaagctgttgacaatgaatccaacctccaccatctgattttgtccaaggcagcaaccaatgcagtgatggaaacagttgatccagacattactgccacatgcaaggacctaggagctgtaaaaaaggtttatcagcttgctctattatgcacaaagaggcagccagctgataggccgacaatgcacgaagtgacacgtgtactcggaagccttgtgctgtcaa

SEQ ID NO: 25239 - DNA, 264 bp, Glycine max
  Clone ID: 700906484H1
tccatacatagccacttctaactcactcactcttgttgccttcatggccaagccagtgtccattgaggtatggaacccaagtggccaatacagagttgtcagcaccaaaccaatgcctggaactcgttggatcaatcttctcattcaaaatgatgttcgccttgaaatatgtaccgagaagaaaacgattttgtcagttgaagacatcattgctttgattggtgataagtgcgatggagttattggacagttgactgaagactg

SEQ ID NO: 25240 - DNA, 256 bp, Glycine max
  Clone ID: 700906485H1
aattcttcattgctctcaattatcaatggctccccaaaccatttccattctcaacctcttaccagaacctgatgtcttcattcacacttcccatggaacacgcattccagcccacgcacccattctggcttctatgtccccggttctggagaacttgatagatcgcccacgtaagcatcggagctccgagagaataatccaaatccacggcgtcccctgcgacgctgtcaccgccttcgtccgattcctctactcc

SEQ ID NO: 25241 - DNA, 255 bp, Glycine max
  Clone ID: 700906486H1
cccaatcttctctccacgcccttcttgggtaaccgtctgaagtgcagcaatggcagatggattgcattcgcagcatccatcggtagttcagaagttatctggacagtcttatcttgtgtccaggcttgctcctaatcactccagaaactgttctaccactggtagtatattcaatggaggtttgcagtcttcaggtttggttccagtcacggcacacgcgccggctgagaaaggggtgtctggatttttgttgga

SEQ ID NO: 25242 - DNA, 256 bp, Glycine max
  Clone ID: 700906487H1
ctggcagccaacatctatagtcagttacaaccatctgggaaacaatgatggtatgaatctttcggctccacaaactttccgttccaaggtaatctccaagagcaacgttgttgatgatatggtcaacagcaatgccatcctctatgagcctggtgaacatccagaccatgttgttgttattaaggtaaattttgtttcacccatttttctgtttctttctcttgtcagggctttgattattctatctgctttgttg

SEQ ID NO: 25243 - DNA, 257 bp, Glycine max
  Clone ID: 700906490H1
gtggagagagggggaaatgggtgggtctccaaagagagtttgagcaaagccattaagttagtgatggatggagacagtgaggttggtgctagagtgaagaagaatcacatggagtggaagaaaactgggagcagtcctaatttaatgaatggttacatggataggtttgtccaaaatcttcaagattttcctctccatgggtgattgaaggatttttttcagagggatggaattcatcgtttgcccaccaaatgaaa

SEQ ID NO: 25244 - DNA, 255 bp, Glycine max
  Clone ID: 700906491H1
gtggatcaggtgggcttaaggttgaattagggcagccatctgggaaattgagtgaaattgaggagcagggtgggaatgatggtactgatgtgcaggggattgggcagcaaccacatggtggagttgttgggagtgtcgggaatgagggtttggtgagacaaggtcaaggtggtggaggaggagcagggaatgttaatagggttggtggaaatggtgttgggaatagtgtgagtactgttaatagtgttaatactg

SEQ ID NO: 25245 - DNA, 244 bp, Glycine max
  Clone ID: 700906492H1
caaatcactattgatatggttagtaatttcgagattaaaggtacagttaagatataatcagaattttttagttatgaatttatgatcaagaagctattaagaaataaatccagaccagaccaaaccagaccaagaagttgctgttgtagagaagatgcaagtgcagccaagagttattgcagataatacaactgcacaaatcaagatacgaaaaataaggttgcatttagcaaaagtggcacag

SEQ ID NO: 25246 - DNA, 127 bp, Glycine max
  Clone ID: 700906493H1
cggctcgtagccaaagcaaactcaagactctagcccctttattaaggaccgtctcgtcttctcgatagtccgttaatattccgctgcggtttttgaatctttcaagattgttccacacaacatccga

SEQ ID NO: 25247 - DNA, 261 bp, Glycine max
  Clone ID: 700906494H1
cggaagttcattggtggaaatccaagttcccgggcagaagtttgtgaacggagttccgttccccgctgtggtgtctcctccacctgcaactgcaagtgcggttcctcttacggactccgtcaaaacccagtcagctttccttgaatcattgctactccaatcgggtgctgtccttttcaggggattcccactctccaccgcttctcacttcaacgacgtcgtcgcagcattcggctacgacgagcttccctacgtgggcgg

SEQ ID NO: 25248 - DNA, 265 bp, Glycine max
  Clone ID: 700906496H1
cgacatagggaccttaagaagatgcaagatctactcctaaatcaaaaggaagccatgtatggttctaaacctagtccaagaaaaaataacagctttagaaagactaatagttaccgcgcaaatggcaatggatctatgcctcctacaccccgtcgtaactccctaagtggtggaacaacatctgaactactgacaccgcggtcctactctggccgtcagaatggatattttaaggaaatgagaagattgtctactgcactactga

SEQ ID NO: 25249 - DNA, 259 bp, Glycine max
  Clone ID: 700906501H1
cctgtattaatttttctctccctgagattaccaagctctgcaactttgcttctcaacatggagtatcgtctcctacccatttttactttactcaatcttgcactggtggcaatccatgctgctttacctcctgaagtttactggaagtcggtgcttcctactacgccaatgccaaaagccatcactgatatcctttaccccgattgggtggaagagaaaagtacctcagtgaatgttggaggcaagggcgtaaacgtgc

SEQ ID NO: 25250 - DNA, 144 bp, Glycine max
  Clone ID: 700906504H1
gaccagtttcagattagggctggtattggccgagattgcaccctcgattacgaggttgaggaggatcaatatgacaagcaggctataggcaaagtgaattcgggtgatcgtgtgtatatgaaggatctaaacgacgatggagtt

SEQ ID NO: 25251 - DNA, 260 bp, Glycine max
  Clone ID: 700906508H1
aaaatatggacaaaaaatggctaaggggaatccatgccctcgagcataatacagatgcactatggcagttggttgcccagttcgcaaacaagttcaacgttgtgctgatgatagaacaattttggtgacaacatatgaaggcacacataaccatccactgccaccagctgcagtggttgatgccatggccatagcagcaggtggcagtggatggttatggcatcaaccactgcagctgctgctaccatgttgctgtctgg

SEQ ID NO: 25252 - DNA, 253 bp, Glycine max
  Clone ID: 700906511H1
tttcgttattctcttattcatccttctcttctgaataatctcgatctctttctgcccttttctccgtcacgcttttcgtgaccggatctgtatggatttgatccagatctacacgccgatggtgcctttggccgggtctttcataaatctggtgcgtagaggctcagatacacggtaccgaggtacaacagagaatcgatgacaagaacgcagatccgacggtagatccagccgattccgcttgttcgatcgc

SEQ ID NO: 25253 - DNA, 255 bp, Glycine max
  Clone ID: 700906512H1
gcgagcccccgtcctacctcactggcgagttcccaggtgactacggctgggacactgctgggctttcggccgacccagaaaccttcgccagaaaccgtgagctcgaagtgatccactccaggtgggccatgctcagggccttgggctgcgtcttccccgaactgttgtcccgcaacggggtcaagtttggagaagctgtgtggttcaaggccgggtcccagatcttcagcgagggtgggctggactacttgggca

SEQ ID NO: 25254 - DNA, 252 bp, Glycine max
  Clone ID: 700906513H1
gaaagacttactagagtttttacacaaaaaattcatgatttgattggaactcacacagatgtgccagcacctgatatgggaacaggaccacaggatcttggtggatctctcggtagagacgcggctacaggacgaggagtcctctttgcaacagaggctttgcttaatgagtatgggaagagtgtatctggacaacggtttgtcatacagggttttggaaatgtagggtcatgggctgcccaattaattagt

SEQ ID NO: 25255 - DNA, 260 bp, Glycine max
  Clone ID: 700906473H1
cgcttctccagccgctgcagactctgctccacttgctacttcctctagaagaagcctttttcaaatctctctgccaccggacccgttttcttctgttcatttgggtttctctcttccaatttatggcttctttgagacctaccctctctcaactttccctttcccaatccaattttctcagaaaatctacatggaacaatcatctaccttgctatttacacaaaaggatcgcaaagttgcaaacttttaccacttctaag

SEQ ID NO: 25256 - DNA, 262 bp, Glycine max
  Clone ID: 700906438H1
cttttcagctttcattggtgtggcctagctgttttctcaatgactaagccttcatctctgcaaagcgcacttttgcgtcttggggttcccttgttgcttgttatcaccttctgttatgctacttctactgctgctgcaacaactcaagtttcagggaatgaagagctgccaaagacaaacctaaatgggcagtctgaagaagcaaaattcggattttttcatcatagaccaatattcaagagacatattccaattccagtat

SEQ ID NO: 25257 - DNA, 262 bp, Glycine max
  Clone ID: 700906439H1
ctttatttacaacaacaatggcttctgtgcctcaaccaaaaatctcccttctaaccttattcttcttctcgtccttcaccatcattgcgcatgcaattgttcctcaaaacgaaaccttcaaatttgagaactcaggtgaacttggaccctacatcgttgagtacggtgcagatacaagaatgataagcatcttcaactctccattccaagttggtttctacaacaccaccccaaatgccttcactctagctttgcgtgtagg

SEQ ID NO: 25258 - DNA, 258 bp, Glycine max
  Clone ID: 700906440H1
attttcccaaaaatgagaaatatttgcctttgtttaccgccggtgatgattcggagatagttgacaggagaaatgggctgcgcaaacagattgaagataggttgattgcagctgctgcaagtggcaaggatttagaagagactggcagtgaggatgatggtcttttggatctgagtgatgatgattttttccttgctgggagttctagtgacgaagcagatgcggatgatgaatggacagacaaaagtgcaagagagc

SEQ ID NO: 25259 - DNA, 264 bp, Glycine max
  Clone ID: 700906441H1
cagataatgagtataattccaaagacagctctgtgtagttggtttatgaaccccagccacgtcctcgagcaattgctgctcttgctggggaagcaattgtcaaagtggcatgtggaacaaatcatacagtggcggtggataagaatggcttcgtctacacgtggggttttggtggttatggaaggctaggacatcgggagcagaaggatgagtgggtcgcacgacgtgttgaaagttttccaaaatagaaatgttttgccaccc

SEQ ID NO: 25260 - DNA, 263 bp, Glycine max
  Clone ID: 700906443H1
caccaccgcaatgtttgcattatacctgtctcagcacacggaacaaatcctgctagtgcagctatgtgtggaatgaaaattgtctctgttggaactgatgccaagggaaacattaatatagaagagctgaggaaggctgctgaaacacacaaggataacttatctgcacttatggtaacatatccttcaacccacggtgtttatgaggaaggtattgacgaaatttgcaatattattcatgataatggaggccaagtatatat

SEQ ID NO: 25261 - DNA, 261 bp, Glycine max
  Clone ID: 700906444H1
cgcggcttcaaccttgtagttattctctttcttcttttttagctatccctctcttgaaaaatctagatctcgttcttcctgatctacgttacgcttttagtgaccggatctgtatggatctgaaccagatctacacgccgatggtggttttggcctggtctttcatagatctgatgcatggaggctcagatctactgtacagaggtgtgcgattcatgttcgtctctcttttggaatctgtttcgtagaaagtcgtttggt

SEQ ID NO: 25262 - DNA, 264 bp, Glycine max
  Clone ID: 700906445H1
taggcgcttcacaagatcctagagtctgagatcaaaggagactttgagaaagccgtgtaccgatggatactggaacctgcagatcgtgatgctgttttggccaatgttgccatcaagagtggcaaaaactacaatgtcatagtcgcaatttccacaatgacattgtagaaattgccactatcctctccccggaagagcttttggcggttagacgcgcctatctcaaccgctacaagcactccttggaagaagatgttgcagctc

SEQ ID NO: 25263 - DNA, 265 bp, Glycine max
  Clone ID: 700906446H1
gttaccctttcttttcttttttcttttttctctttcctcattctacttaaaactcccaccagtgatggcaggtttggctccagagggaacacaattcgatggtcgccaatatgatgctaagatgagtgaattgctttccactgatgggcaagatttcttcacctcttatgatgaagtgtatgacagctttgatgcaatgggattgcaagagaatcttctgcgaggcatatatgcttatggttttgagaggccttctgctatacag

SEQ ID NO: 25264 - DNA, 267 bp, Glycine max
  Clone ID: 700906447H1
catacctctataataacaaaacaacacttggagactaacttgggtgggctcaccgttgagcaggctatccagagcaagaagttgttcatcttagatcaccatgactatctcattccatatttgaggaaaataaatgcaactaccacaaagacttacgctcaaagaaccatatttttcttgaaaagtgatggaaccttgacgccattggccattgagttaagtaagccgcatcctcagggtgaaggatatggtcctgttagcgaatct

SEQ ID NO: 25265 - DNA, 275 bp, Glycine max
  Clone ID: 700906450H1
ctcttcctcaccgattgctagaatggaatttcgatgctcagtcatctcttttaccattctcttctctcttgctcttgcaggagagagccatgtccatgcatcgctacctgaggaagattattgggaagctgtttggccaaacactcccattcccactgcactgcgagagcttctaaagcctctccctgcaggtgttgctatcgatgaactccctaagcaaattgatgatacacagtacccaaaaacattcttctataaagaagaccttcatccag

SEQ ID NO: 25266 - DNA, 275 bp, Glycine max
  Clone ID: 700906451H1
ctgaaacaaagaagtgaaaataacagcaaaaagtagcagctgctgcagctcccccgaagcttatctcagcagcagatactcaaccctgtttgagtagacgagaataacaccaatgggagaggaggaaaagaaaccagaggaacaacccaaggcagaggagaaaaaaccagaggaagagaagaagaaagaagaagcagcagcagcggaaaaaccaagcgaagagaaaaaaccggaacaagagtcgaaagaggaagttgctgctccgccaccgccac

SEQ ID NO: 25267 - DNA, 97 bp, Glycine max
  Clone ID: 700906452H1
atcaaaactggtcccaaggagccagaaacaccaaagccaaaaacacttcctttgttacacatgatgaaaacagtttctcttgtccacagaacatacg

SEQ ID NO: 25268 - DNA, 260 bp, Glycine max
  Clone ID: 700906454H1
cgatatcactatcaggcattttggaagttaagccagtggacattactcacacagaccaaataaaggaataccaacatggcacattggtctcagcaaacagcattggtgtttaccatgaccatttctacatattccatcttgattttgacattgatggtgtggaaaattcctttgtgaagaccagtctcaagactctacaagtcacagacaacagttccaagagaaagagctattggacaactagtaatgaagttgttaag

SEQ ID NO: 25269 - DNA, 92 bp, Glycine max
  Clone ID: 700906455H1
ctaaactgtaaaacacacgctctctctttcgcctgaaattttcgtcttccttttcgttttctcagtctattgctcttccacacaacatacga

SEQ ID NO: 25270 - DNA, 223 bp, Glycine max
  Clone ID: 700906457H1
acttatccctttccatccaccaaaccaatatatctaaaatctcacaaacaccacctccattggcgctatcacgctacgccgtcgtttagcacctccttctccacccttcgtctctcaatccacacatcctcttatccataatgtccttctctccctctcgtttttcgccaaatttgtcttctttttgcaccttctccctgatttttcctcgcctcaaataata

SEQ ID NO: 25271 - DNA, 265 bp, Glycine max
  unsure (1)..(265): unsure at all n locations
  Clone ID: 700906458H1
ctgtgaaacctcccataaacctaaaaccctaattctcaacaaccatgagctacgagaaccctagcttccacttcaagacacacagacaagagactcaatgcaatcctacgatctccttccaccaccttcccttctgtcaacgtgcctctccctccctcttccaccacgcgccgttctacaancaccaccctccgttccccccaacccaccaacgccctcatcgaccctaatccctctctccgcataacgacgccgacgacgacga

SEQ ID NO: 25272 - DNA, 262 bp, Glycine max
  Clone ID: 700906459H1
atgatcatatattcattcagttctatacaaaatcctcaaaaactcttcctctctgccatgaccatggaatacagaaccttagaactcaacatcatatccgcaaaggacatcaagaatgttaatctcttctccaagatggacgtatacgccgccgtttcgctctccggtgaccctctccaccctcagggcgccaccacccacgtccacaaagacgccggcagcaaccccacgtggaactaccccgtgaaattctctgtcaacg

SEQ ID NO: 25273 - DNA, 261 bp, Glycine max
  Clone ID: 700906460H1
tgaaagtgagtatgctgcctggaccctagtcaacgggtatgcactaaaccatgttattatatccactcatcggctgaaaactcatttgaaggagataaaaaaactaaatcagtttattaaggatagtggattcagattgaattctgaaggaggagtgctgaaagtgagccctgatggtcttctccagcaaagctcaactgtagcagattcaatttctttcaaattttctgatggtataactgaatcagttccatgctcata

SEQ ID NO: 25274 - DNA, 263 bp, Glycine max
  Clone ID: 700906461H1
atttcaaagagagagagagagatttcacagaccaaattgcagaggacgacaaagttcacaacttcaaggaaaatcgaaatggcccaagtgagcagagtgcacaatcttgctcaaagcactcaaattttcggtcattcttccaatcccaacaaacccaaatcggcgaattcggtttcattgaggccacgcctttggggtccctcaaaatctcgcatcttggtgaacaaaactggaagccttatgggaaattttaatgcggggaa

SEQ ID NO: 25275 - DNA, 263 bp, Glycine max
  Clone ID: 700906462H1
tctgagttctctcatttctcgtcttcactgagaaaaatccttctttgtgcatgctcctcgtttccatctaaaggggagagggggtgagtgagaaaaagtgagtgaggtttctagcttctactgttgagtaaacatgactatggaagagggcagggtagagaacgaggactacacacaagatggaactgtgaacattaaagggaaacctattcttagatccaaaagtggtggttggaaagcttgctcctttgttgttgtatatg

SEQ ID NO: 25276 - DNA, 251 bp, Glycine max
  Clone ID: 700906464H1
agagaagaagcaagatggcgtcatctcgtccccctccttcgaaatccgtggatctggacctaacaatcgtgtcggcgaacacctgaagaacgtgaactggaagaacggcgatctgaaaccctatgtggttttctgggtggaccccgagcggcgcctggtcacgaaatccgacgactccggcaacacctcccccgtctggaacgagcgtttcgccctccctctccctttccccctccacgactccttcctca

SEQ ID NO: 25277 - DNA, 100 bp, Glycine max
  Clone ID: 700906465H1
gtcacaaggacgcaacggtaaatgccgcctcacatcaaaaccagcacctctaaccgtagcataaaaccaccaccggagacaataccaggtcccccttcct

SEQ ID NO: 25278 - DNA, 272 bp, Glycine max
  Clone ID: 700906466H1
acttttcagctttcattggtgtggcctagctgttttctcaatgactaagccttcatctctgcaaagcgcacttttgcgctttggggttcccttgttgcttgttatcaccttctgttatgctacttctactgctgcagcaacaactcaagtttcagggaatgaagagctgccaaagacaaatataaatgggcatgatgaagaagcaaaattcggattttttcatcataaaccaatattcaagaaacatattccaattccagtatataaacctg

SEQ ID NO: 25279 - DNA, 104 bp, Glycine max
  Clone ID: 700906467H1
ggagcgatctgaggtgaggacattaaaagagcaatgctagcacagggattcgaggacgcagagaaatggctcgccgaggggatcgccggcattcagcacaacgc

SEQ ID NO: 25280 - DNA, 259 bp, Glycine max
  Clone ID: 700906471H1
atcttaaggtatctcaagggtaccttgtctcatggtttacttcttcagcctgcttctactgtgaaacccttggctttttatgcattctgtgatgctaattgggcatctgatgtggatgataggtgttccacctcaggggctgccttctttcttggcccaaacttgatatgcatggtggtctcgcaaggagaaggtgacagccaggtccaatactgaagctgaatatctcagcttggctcaaacttctactaaattgaca

SEQ ID NO: 25281 - DNA, 233 bp, Glycine max
  Clone ID: 700906472H1
attaatttaactcatcattaatcaacttcgcattgattaattaaatagcggaggcaatgacaagggtgatgcagggtcttgttctctgcacacttttgttgtcggcggttttggtccaagaagttgaggcaagagtaatcagcaaagaagcaatgcagcgtaacaccattcctggatgcagcaaagtacaccccaatgtcgccgcttgtcatctgccattagttaacatcaac

SEQ ID NO: 25282 - DNA, 264 bp, Glycine max
  Clone ID: 700906437H1
cagctattgaggaaatggcagggatggatgtcctatgcagtgacaaaactgggactctcaccttaaataagttgagtgttgacaggaacttgattgaggtgtttgctaagggtgttgagaaagagtatgttatccttcttgcagcaagagcttctaggactgaaaatcaagatgccatagatgctgcaattgttggcatgcttgctgacccaaaggaggcacgtagtggtgttagggaggtacatttccttccattcaatcctg

SEQ ID NO: 25283 - DNA, 261 bp, Glycine max
  Clone ID: 700906403H1
ctttgctattatctcttcccttgtccttcttcctactatactaagttttctctctctaatcaatcatagttctgatcttcatacacttaccccggaaacctccatttctcagatcaagcttgcacgaagacattaaaaaatagaaatacatacatagctatggacaataatacttgtgcctcctcccaacttgagtcagaagaagcatcttttgagcacaaatcagagactccaacatcaaagtaaaggaaaatggttgag

SEQ ID NO: 25284 - DNA, 264 bp, Glycine max
  Clone ID: 700906404H1
gcgttgtgaaaatattgatggattccttgctggtgtcatgagtaaaaagtcgctgtctactgatgctcatttatcaagatcatcaaaattggaggacaaggacaaagagcacaagcgcgatatggatggagctaaagagaaggaaagatacagggagaaatacatgggaaaatcaattcaagaacttgaccttagtgactgtaaacgttgcactcccagctaccgacttctgcctgcagattatccaattcctacagctagtca

SEQ ID NO: 25285 - DNA, 257 bp, Glycine max
  Clone ID: 700906405H1
cgccaacggcgacattccgagtctcgccgccgatcccaacgcggccactcagtgggtgaacgcgaacgtcttgccctactacccggcgagcaacatcactctcatcaccgtcggaaacgagattttgaccttagccgaccagggtctactgtctcaactcgttccggcgatgcgagatgtccataatgccctcggcgcggcctcgctcggtggctagatcagggtctcgacggtgcactcgatagccgtgttgactc

SEQ ID NO: 25286 - DNA, 270 bp, Glycine max
  Clone ID: 700906406H1
catcctacgccaatagcccaaaaccttgttctctttttgtggttcatttctctcttccagatgccacttgccggtcttcaccctcacgattttctcaggaaaaacccatctaaccagtaccagaccataatccctcactctcccaacatgaatcctaataagtctcatcggacttcccgaaaccgtaagatgcggcccgatccaagcccacaaggcgttgtcagcccagcccggctcacattatccccgaaaccccaagttataaacaag

SEQ ID NO: 25287 - DNA, 173 bp, Glycine max
  Clone ID: 700906407H1
taaaaaaatagaagcagaaagaagtgcctctgtctctttctctctctacaagccttcttcttcttcttcactttgattttccgtcttcaatgcaaacccaaccatgatcctctacacgtaatcccaccttacctaagctaaaacccttttgatctcactgttccacacaacat

SEQ ID NO: 25288 - DNA, 265 bp, Glycine max
  Clone ID: 700906409H1
attggatcgagggtaccagatgagactgcttaacgcaacctcgtgtttcgttcttctctggtgactggtgagtgcggcgacgctggcctgcagtggtgcgacttttcaccgacgacgctcgtcgtgcaagcagctaagtaccacgacgctcttgtgcgagcagcttctagtcgctggacggatggtggttctacgattaagtactagggttcagacttcatgcctcttaaacaccgtgtataactgattttggtggtgattccaa

SEQ ID NO: 25289 - DNA, 270 bp, Glycine max
  Clone ID: 700906410H1
atgctcaagcaagggataacttggagcgtgttcttgagtgcctagaccaggagaagtgtgaaacttttgaagattgtatcacttgggctcggctaaagtttgaggattattttgttaaccgggtgaagcagttgatctatacttttcctgaagatgctgcaactagtactggagctcctttctggtctgcaccaaaaagattccctcgtccactacaattctcagcctctgatttgggtcatctaaattttgtgtcgtcagcttctattt

SEQ ID NO: 25290 - DNA, 269 bp, Glycine max
  Clone ID: 700906412H1
gaaaccctagctagccacaatgcagatattcgtgaaaaccctaacggggaagacgataaccctagaggtagagtcttcggacacgatcgacaatgtgaaggcgaagatccaggacaaggagggcatcccgccggatcagcagcgcctgatcttcgccggaaagcagctggaggacgggcgcacccttgccgactacaacatccagaaggagtccaccctccacctcgtcctccgcctccgcggcggcgccaagaagcgcaagaagaaga

SEQ ID NO: 25291 - DNA, 267 bp, Glycine max
  Clone ID: 700906413H1
agctcatggagattactgctttcttcaaataactagaagtggtattggtgcttatgatgatgatggacatgtcactaggactgggtatttgcagaatgctgtagctcatatcattactgctgttattggttctggtgttctttctcttgcatggagcacttcccaattaggatggattggagggccattttccttgccttgttgtgcaattgtcacctatatgtcttcattcctcctgactgactgctacagaactcctgatcctgt

SEQ ID NO: 25292 - DNA, 266 bp, Glycine max
  Clone ID: 700906414H1
gaatatcaattgggcaaagcggactaaatgcaatatctgcaacacaaataagcctgggcataatgagggtggtgtaagaggaggacgaggtggaggttacaaagagcttgatgaagaggaaatagaagaaactagacgtcgtaggagggaagctgaagatgatggggagttgtatgatgaatttggaaatctaaagaaaaaattccgtgccaaaacacagcaagctgaagctgcacgtgggcttcctggttcagggcgtgctggtt

SEQ ID NO: 25293 - DNA, 276 bp, Glycine max
  Clone ID: 700906415H1
tcactcgagcgctagaagctagttaaactgagagtccaatactcaaatcatgccaaagtaattgatcttatttgtttccatttcccttgagattgatttgaatgtttgatgcataaagcaatgggactttcatatatcaaaatgttttgacttctatccattttaactcatgtgaattgaagtaacattttcctgttgtagcttaagatgaatatatctcatgcagatagtatctattacactacctggttctaacactcatctaataaaaatctg

SEQ ID NO: 25294 - DNA, 275 bp, Glycine max
  Clone ID: 700906416H1
ctctaattctcttagccattattgttatgatttcaataccatcaagccactgcagtatattgcttccagaaaatgaaaagcttatagagaacacttgcaggaagacccccaactacaacgtttgcctttagtctctgaaggcaagccctgggagctccagtgctgacgtcacagggctagctcaaatcatggtgaaagagatgaaggcaaaagcaaactatgcattgaagagaatccaggagctgcagagggtgggagcagggcctaataagcaa

SEQ ID NO: 25295 - DNA, 271 bp, Glycine max
  Clone ID: 700906417H1
acacattctcctaaatccatggcaacccttcttgtccagcaccagtttcaagccaccgaagaaggacaagatgagtgatcatggtcgtgcaaaggcagcatctggttcaaggaatcgtttggaatccaagaatattgtcaatagaacttcctcctttaattacagaagcagctctgctgttccccttcatgagttgccatgggcttcctttgatcaatatatagaggacaagggaagagtaatccgatctatatttccagaaaaatcaaca

SEQ ID NO: 25296 - DNA, 254 bp, Glycine max
  Clone ID: 700906420H1
cctcaatacccacgcaacacaaagttccctctactctctttcccataatttttcactatcattccttcccactcgctctttcttcgacgctcttcctcctcattgctcatgtcctccacgacgtcgttttctctctctcacgctgttgttcccttctcctgcaacacaaagcatggtcatttatctcacaaccgccactatctctccctcccaaaacccatttccctgaagcccctccgatcgccttccttcaa

SEQ ID NO: 25297 - DNA, 267 bp, Glycine max
  Clone ID: 700906421H1
cggcttggtccctctcgtgggtgagaactacgccctcaagctgaaaaattccatgcaagaccttttggccgagattcctaaagaatccccaaatttttctcctttcgtcgatgcgttttacgaattgatgcaagcgaaggttgattcatcctttgaggtgatatgggtctacgctgcaattaactttcgtggtcgtaactcggagaaaggtgatgccttggatcgaatattggccgcaaaagacttgtttaagttgctatctgcgtg

SEQ ID NO: 25298 - DNA, 265 bp, Glycine max
  Clone ID: 700906422H1
agagaaaccaaaaatctcaacaaagcagtttctaagatccgatccattcagaccattccacattatgggggagctagagagagactctcttacaccctagggtttctctcgcgaaatgtgcccgatcgagacctaaggcttgttaggtgtcccaatttccgtgctgcattagtcccaagcgtgagggcgaatcctggtgcaacggtacagttgtgccttggtgacttgttggtcatgggttcgaatccggatacagctccttgca

SEQ ID NO: 25299 - DNA, 266 bp, Glycine max
  Clone ID: 700906427H1
attatcatttgaaaatttacaaagcatgaataatttttagctttttccttttaacaatgtatatggtcgatcaactgatactttgttaaaaggactaagctcaaaattattcagaatcaagctagagcagagacatttttcaggatcagacaagggattaggcttttttcatattcaaactaagtagagcaggattcgatcatagtgtacatgatgtgggtattgcattagtcattagtgcatgctgtgaaatatattctttgagg

SEQ ID NO: 25300 - DNA, 265 bp, Glycine max
  Clone ID: 700906428H1
ctttgaaacccaacccaatttcaccgttgctagctcttgtttattttttgtcggagaaaataataataacaatatataatgtcggttgaggagatgcagtcacagaagaggaatgtgtttgacgcagaaacggcgtcgtccttggtgaaggagctgagggacaacttcggttcgggaaggactcggagttatgaatggagagtgtcacaagtgaaggctctgttgaaggcggtggttgataacgaggaacagatcgtcgacgctc

SEQ ID NO: 25301 - DNA, 267 bp, Glycine max
  Clone ID: 700906429H1
attttcctttgtttgacttgattccttttctgggttgttgtcaaaatttgagcttgttcgtggacgatctggttttcgatcgatatcctgttttgtttactttttccttgtggggttgcttcacaatgaaaaaaacttaatcatagtttagggttttcttttttagaaaaaaaaatattgttggctaggaattggagatttaatgttttactcctcattaaaagtgagtataagttacatataaaacttcaattctaattaaatggt

SEQ ID NO: 25302 - DNA, 271 bp, Glycine max
  Clone ID: 700906430H1
aattagttcattctctttgcgcagttccctacctctcctttcaagatgcagatcttcgtcaagaccctcaccggaaagaccatcacccttgaggtggaaagctctgacaccatcgacaacgtcaaggccaagatccaggacaaggaaggaattcccccggatcagcaacgtctcatcttcgccggaaagcagctcgaggacggccgtaccctcgccgactacaacatccagaaggagtcaacccttcaccttgtccttcgtctccgtggtg

SEQ ID NO: 25303 - DNA, 271 bp, Glycine max
  Clone ID: 700906431H1
cgggcttcacaacaatgaaaggcttccaatccgatttatcctccgccgttcgcctcaacattggaggcaagaaattttgcaccaccaccgatactctcactcagcgcgaacccgattcaatgcttgccgctatgttcagtggccgccacacgctgtgccaagatcctgacaaggggtatgtgtttgttgatagggatggtaaacactttcggcacattctcaattggttaagggatggtgtggtgcctactctcgaggagtctcagtactc

SEQ ID NO: 25304 - DNA, 282 bp, Glycine max
  Clone ID: 700906433H1
attatgaagaaagtgcaagaagaaattagaggcttaagtggtaagaaagatttcttggatgaagatgatattcaaaagttttcctacttaagggcagtgataaaagagacacttagattgcacttaccagcaccactacttataccaagagaaacaaataaaaaatgcatgttagatggctacgaaattccagccaagacattattatatgtgaatgcttgggcaattcatagagatcctaaggcttggaaagatccagaagagtttatacctgagaggttt

SEQ ID NO: 25305 - DNA, 282 bp, Glycine max
  Clone ID: 700906435H1
ctcgagctctacgaaccccgcggactacaagcttctagaagaagttggttatggagccaccggcaccgtctacagagcgatctatctccccttcaaccaactggtggccatcaagtcctttaatctcgatcgctgcaacgtcaatctcgacgacctgcgcagggaggcccaaaccatgagcctcatcgaccaccccaacgtggtgagggcgctctgcttcttcgccgtggaccggagcctctgggtggtcatgcccttcatggaccagggctcctgcctcca

SEQ ID NO: 25306 - DNA, 263 bp, Glycine max
  Clone ID: 700906402H1
cggcgggagtaactatgactctcttaaggtagccaaatgcctcgtcatctaattagtgacgcgcatgaatggattaacgagattcccactgtccctgtctactatccagcgaaaccacagccaagggaacgggcttggcggaatcagcggggaaagaagaccctgttgagcacaactctagtccgactttgtgaaataacttgagaggtgtaggataagtgggagctggaaacagcgaaagtgaaataccactacttttaacg

SEQ ID NO: 25307 - DNA, 262 bp, Glycine max
  Clone ID: 700906362H1
attaattgcaagaatggcacttcgttgcttggtgatgtccctttctgttctcttcactcttggtcttgcgagagaaagccatgccagagacgaagatttttggcatgctgtttggccaaacactcccattccaagttcattgcgagatcttctaaagcctggccctgcaagtgttgaaatcgatgatcaccctatgcaaattgaagaaacacagtacccgaaaaccttcttctataaagaagaccttcatccaggcaaaaca

SEQ ID NO: 25308 - DNA, 272 bp, Glycine max
  Clone ID: 700906367H1
cacagttagtacaaaaaagggttacttcatgctccacatatcttgaagaattgatcaatgggcaagtctgtagttgagaagctactttggatggcaattgtgtgcttggtgctgggtgtaatttccattactcccaaggcccaagcagcagtgacatgcaaccaggtggtgagcaacctcaccccatgcatttcttatgtgctcaatggtggcaaaaccgtgcctggcccttgctgcaatgggatcaagaccctctttaacctcgctcactc

SEQ ID NO: 25309 - DNA, 272 bp, Glycine max
  Clone ID: 700906368H1
cttctttcctcttagcttcgcttgcacttttgttttgcatctcctccttggagaagagctttgcctttcaagcaacaaaggaaagcaacaatcttcgtcaatatcattttgttcacctcaactctctatttccatcatcttcttgcagctcttctgccaaaggtcctaaaaggaaagcatcattagaagtggtgcacaaacatggcccatgctcccaactaaatcatagtggcaaagcagaggctacaatatcacacaatgatattatgaac

SEQ ID NO: 25310 - DNA, 268 bp, Glycine max
  Clone ID: 700906369H1
acaaaattgagatattgcaagtgaaatgaaggccaggcacatctcattcttctcttgatatttctgatggcactcgctgcaaacaaagtttctagcagtcctattgtgactaaaagaacagctctttgcagatcacatgaaaaacactatttttcctcgtcaacaaggatcaatagaatacagttgtcaagacatagactggaacatggacatctgaactatagatgtctccacacacagagatcaaccttattcaatgactggtttt

SEQ ID NO: 25311 - DNA, 263 bp, Glycine max
  Clone ID: 700906370H1
ctctttctctctctctctactccaactccttgatgccaattttagcatcagcgttgttgcctccattcttcttcttctcttaatgggttgcatttactcgcgagtctgcataggcgacaattgcagaggctcaagcatcaacggagaccccattatcgcccgaaacgacgtcgccgaagtcgcgaatttctccccttcctcttcggatgttgaagaaggcgaaatcagagaccaattgaaccaattgagcatcactcgagact

SEQ ID NO: 25312 - DNA, 265 bp, Glycine max
  Clone ID: 700906371H1
gtttcaatcgaaaccaaaacaaaaacatgggcagaaaattcttcgtcggtggcaactggaaatgcaatgggaccactgaggaggtaaagaagattgttactactttgaatgaggctaaagtccctggagaagatgtcgtagaagttgttgtgagccctccttttgtgttccttcctgttgtaaaaagtttgctgcgccctgatttccatgtttcggcacaaaactgttgggttcgcaaaggtggtgcttataccggtgaggttag

SEQ ID NO: 25313 - DNA, 86 bp, Glycine max
  Clone ID: 700906372H1
aatcatcaatgagaatgcttgtctctttgttcaaaagaaacaaaaaaaaacaaccaaaagaaaaaaaggggggggccccccgtttt

SEQ ID NO: 25314 - DNA, 262 bp, Glycine max
  Clone ID: 700906373H1
gagataagtttggggaaacttgcatttgacattgattttcatccctcagataatcttgttgccgccggtctaattaccggccaccttcacctatacctttatagccctcatactgtccctgtgaggctgttggaagttcatgctcacactgagtcttgcagggctgctcgattcatcaacggtggacgtgcactcttaacgggttctccggattgctcaatactggctatagatgtggaaactggttctacaattgcccggg

SEQ ID NO: 25315 - DNA, 259 bp, Glycine max
  Clone ID: 700906374H1
gcgaaatcaggaagcggcggtggtggaatagaggtagccgcaactggcaaagaaagttgcgctctcactgtagtgcaatctctgaacgaggactccatggggctaccattgaagctttcaagcccatccatcactacgtctcacttcaccgaatacgcttcgttgagcatcgagttcacttcggcgccggcgccgtgttcgtccgcttcggagtggaccgttgtcaagggattacccgaaggacgcgccgttaaactta

SEQ ID NO: 25316 - DNA, 261 bp, Glycine max
  Clone ID: 700906375H1
tgtttttctacttgtttttggacttgatatatttaattttttagaatgccttcattttggcttatgttcttttggatatctttgatgaacttctcatacaaatgctgctccattaattaagtattgtttaactcccattggtttcaaacatctacttgatgaattaccctctcctcattgataagaactttgggagaagctcaccacaaaagctagacatagctatagaattgactgtggccttataaaccccttactaga

SEQ ID NO: 25317 - DNA, 264 bp, Glycine max
  Clone ID: 700906376H1
ggagctctgccacagactctagaaagcagagaaaacgatgatgggcttacatggttgtactctcaaactcgcttcagttcccaatttctcttctccaactttccttttcaaaactccaaccctccgttttcagaaatctccattgtcacgccccatcagagctctatcttcctccgccctcgtccaaacatctactaccaaggccactgaagaccaaggtgtgaagcctcaatggaaggccacgatagacttcaagtggataaa

SEQ ID NO: 25318 - DNA, 261 bp, Glycine max
  Clone ID: 700906377H1
aaagcaaggaagagaaagaaatttgtttctctctaaagagtctccgctgaactttttggtttcttgaagatgtcgttactctccgatcttatcaaccttaacctctccgacatcaccgataaggtgatcgccgagtacatatgggttggtggatctggcatggatatgaggagcaaagcaaggactctctcgggactggttaatgacccttccaagcttcccaagtggaactatgatggttccagcactggtcaagctcct

SEQ ID NO: 25319 - DNA, 259 bp, Glycine max
  Clone ID: 700906378H1
gtttgctgaagagcttgaacttgaaactcttccaccctcttaccctccccctcaccctgttcactcccccgcaccagcacctcttcacgcaccagcaaatgctcctgccccacaccaacagcagcaccagcaccaccctccagcaccagcaccagcacgagcacctgttccttcaccttctgaccacaattaccctcctacccctgctgctgctaagcctcctagtcaccaccatcagcatcaccctcctgctcctgtt

SEQ ID NO: 25320 - DNA, 261 bp, Glycine max
  Clone ID: 700906379H1
ctcactcgcaagcaaaaagaaagaatcccaggcgaggagaaagatggaggggaaggagcaggatgtgtcgttgggagcgaacaagttccccgagagacagccgattgggacggcggcgcagagccaagacgacggcaaggactaccaggagccggcgccggcgccgctggttgacccgacggagtttacgtcatggtcgttttacagagcagggatagcagagtttgtggccacttttctgtttctctacatcaccgtctt

SEQ ID NO: 25321 - DNA, 263 bp, Glycine max
  Clone ID: 700906381H1
tagtctaagagaaaggctgttgccaagtcacctgtcaatgctagcggcaacgtatagcgattccctcatatatctaagttcacgtctacgatatatctctccctctaattaaacctctctatccatatctaaaatttcacaatgatctcaattaattagatttccctctctctttctctctctaactatattgcaaacctttctctctgctttcataatcagcaatttcatgggtcttagagacattggtgcttcactgcccc

SEQ ID NO: 25322 - DNA, 265 bp, Glycine max
  Clone ID: 700906382H1
gccctgacaccgccttgctaatcccatcctccctctttctctctcgacattgtaataggaatcaatttccaaccatgacggactactgtcaagcacaggatatggagattgaagcattagaagctatactcatggatgagttcaaagaaatacactctggtgaaagtggcctaagtacttccaatcggtgcttccaaataaaggtcgttgcgcaggatgacgatgaagatgggccaatacataatccagcacaactggctttgat

SEQ ID NO: 25323 - DNA, 197 bp, Glycine max
  unsure (1)..(197): unsure at all n locations
  Clone ID: 700906383H1
ataaataatatgatcattgatcatcacatcgtaccacaagatattataatgtcttctcttccttantgtttcttttttttgnnttactancacaattacgatgacaattaggaaaccgtcgacgatgatgaggacgatgacgacgatgacaaggaagatgacgcccaaggtggtgctgagggtgggacgcagagcag

SEQ ID NO: 25324 - DNA, 261 bp, Glycine max
  unsure (1)..(261): unsure at all n locations
  Clone ID: 700906384H1
cttcccctatggcttctcactccttgctcttagccctcctcctcatccgcggcgtggcaccgcgcgatggggtggcgcgtccgacgccgacgacatcctgatccgtcaggtggtgccagatgttggcgaaccgnaacaggaggacaacctgctgaacgccgagcaccacttcgcgagcttcaaggacaagttcgccaagacctacgccaccaaggaggagcacgatcatcgcttcggcgtcttcaagtccaacctccgcag

SEQ ID NO: 25325 - DNA, 214 bp, Glycine max
  Clone ID: 700906385H1
cagcaatcaaatctgtaacctttcagaactccggaccccctttgaaatttcaacatgaccggctatcccagccagcctccgagctacagctacagcgcgccatggctgaagcaagtctaaagtgtccctacggcatcgcaatcatatggggactatccgccatcgtaataatacgtggctcatccgacaccacgacgctacggagcggtgacta

SEQ ID NO: 25326 - DNA, 259 bp, Glycine max
  Clone ID: 700906386H1
aagaatacttgttcggaaaaattgacatgcagctcaagctcgtgcctggtaactctgctggaacagtcactgcctattatttatcttctctggggcctactcatgacgaaatagacttcgagtttttgggtaacttgagtggtgatccttatactctccacacgaacgtattcagccaagggaaagggaacagagaacaacagttccatctatggttcgaccccaccaaggacttccacacatactccgtcccatggaa

SEQ ID NO: 25327 - DNA, 263 bp, Glycine max
  Clone ID: 700906387H1
accgatcttaacctctgagaagacgtgtcggtagctgaagcattttataagcctccactttcctgaactagttttaacatacaatctttcaagtacacctccccagcttccatttaagaatggagatcactagaataggccaatggttaagtcttctgatatgtgtactactattactgcagacagaaggggttcctgtgggaatcacttttgttgaaaatgcagtggcaaaaggggctgtttgtttggatgggagtcctcca

SEQ ID NO: 25328 - DNA, 260 bp, Glycine max
  Clone ID: 700906392H1
cctctctctttctctgtgtctagggttttaggagttcgaagcatcatcatgtcttcggtggaccccgagatcgcgaagacgcaggaagagcggaagcggatggagcagcaactggcgtcgctcacctccgtcacgtttgataccgatctctacggcggaagcgacaagggctcctacctcacttccatccctgccaacgaagacgacgagaatctcgacgccatggacaacgaggtcgcgcgcaagctggcttcttacac

SEQ ID NO: 25329 - DNA, 258 bp, Glycine max
  Clone ID: 700906394H1
gataataatgccaaagaaagaagtcagaaaatgtcctttttcaactggtggaacagtggtttgtgtagtggaatcattctaggagtgactgtgattgtgtatgttcaagaccatgtcaattggggggttgctgatatcgtcctcacaggggtcatggctgtctcattgctcatattcttgattggaaggtcttcttatcgttacaggacaccaattgggagccccttgactcctatgttgcaagttattgttgctgct

SEQ ID NO: 25330 - DNA, 267 bp, Glycine max
  Clone ID: 700906359H1
aaacaaagaaaaaaaaaaacccttagccaacacaaccatcatggccacctctgctattcagcaatcagcattcactggtcaaactgctctgaagcagctcaatgagttcgtccgcaagaccggtggcgccggcaaaggtcgcactaacatgcgctgcaccgtcaagagtgctcctcagagcatttggtatggccctgaccgtcccaagtacttgggtccattctcggagcagattccatcatacctgaccggagaattccctggtga

SEQ ID NO: 25331 - DNA, 276 bp, Glycine max
  Clone ID: 700906401H1
attatgaagaaagtgcaagaagaaattagaggcttaagtggtacgaaagatttcttggatgaagatgatattcaaaagttttcctacttaagggcagtgataaaagagacacttagattgcacttaccagcaccactacttataccaagagaaacaaataaaaaatgcatgttagatggctcacgaaattccagccaagacattattatatgtgaatgcttgggcaattcatagagatcctaaggcttggaaagatccagaagagtttatacctga

SEQ ID NO: 25332 - DNA, 267 bp, Glycine max
  Clone ID: 700906329H1
gggagtgagtcactcttcctgcagaacccagatctgtagacaatatgggaggcactggtttgctacatttgatatgccttgtcattgctttagtaagtgtgtcgcttgtgcaagcagaagatgcgtataagtatttcacatggacggtgacttatgggactctttatcccttggctagtccccagcaggttattcttatcaatggtcagtttcctgggcctagacttgacttggtaactaatgaaaatgtaattctcaaccttatca

SEQ ID NO: 25333 - DNA, 267 bp, Glycine max
  Clone ID: 700906330H1
ctcttatctctctcttacacaccgaagcactgctactactactactttctctctagatatgggttctggtgctgtgcaactgtttctgatcttggggctcttggctagctcatgcttagcccaagcaccaggtgctgcaccgtcacaaccacccactacaaccccatcaccaccaccacccagatcagcacctgcaccagcacccaccacaccagcaaccccaccaccagcaaccccaccaccagcagcaactccaccaccagcagc

SEQ ID NO: 25334 - DNA, 266 bp, Glycine max
  Clone ID: 700906331H1
cagagtgattggtgtgagtgcggcaattactggaacagcggttgagtgtgctctcgagaaagcagagaaatggggttggaatcggtgggagatttagcgattcacgtgattctcagtaagttaggagcccaagacactgccagagtcgcgtgtctgagcaaaaggttctgttcttccgcttccgacgacactctctggatcaatcactgcttccacgaactcgctctgtcacaacccctcgatcatctcggaaaccctctctcttc

SEQ ID NO: 25335 - DNA, 279 bp, Glycine max
  Clone ID: 700906334H1
aagaagtgttttctggatcaaccgttaagaagggtgagatagaagcagtggtgattgccactggagtgcacaccttttttggcaaagctgctcatctggttgatagcaccaaccaagttggtcacttccagaaagtgcttacagtaattggtaacttctgcatttgctccatcgcggttggaataatcattgagctcatagtcatgtacccaatacagcaccgcaagtacagagatgggattgacaatctgttggttctcttgattggaggaattccaa

SEQ ID NO: 25336 - DNA, 276 bp, Glycine max
  Clone ID: 700906335H1
acttactgctgaaattgataagctgagagctgaagttgagaaggctgaaaagagtcttgatcatgcgattcctggtgatgtgagaagagggttgaattcagttaggaagatctgcagggagtataacatttctggagttcatggtccaattattgagttgctgaattgtgatgaaaagtttttcactgctgttgaagttactgcaggaaacagcttatttcatgtggttgttgaaaatgatgacaagtcaacccagataattagacatcttaattc

SEQ ID NO: 25337 - DNA, 276 bp, Glycine max
  Clone ID: 700906336H1
gtaggcacaaggcgtacctgaagcccgatccaaggaacgagataatcgtttcggccggtgcacttggaagcccacaacttctaatgttgagtggaattgggccggaagagcaccttaaagcccacaacatcagaataacattggatcagccattagtaggacaaggaatgtcagataaccccatgaacgccatctttgtcccatctcctgtccccgtagagatctctctgattgaggtggtgggcatcaccacttttggcacctacattgaagctg

SEQ ID NO: 25338 - DNA, 274 bp, Glycine max
  Clone ID: 700906337H1
caaaggttgctgtaggtagatgtgtattgcagtagtgctaagtgctaatacgtgcagtgaacaatggattctgcatcagcatctctgctcaagtcttcacttgttcttgacaagtctgagtgggtgaagggacaaacccttcgtcaaccttctgcatcagttgtgagatgcaagctcaccaccccatcaggcctcagcatcagagctggttcctatgctgatgagctcggaaagatcgcgacaacagtggcttcaccatggaagggtatgttgg

SEQ ID NO: 25339 - DNA, 269 bp, Glycine max
  Clone ID: 700906339H1
atcggcgcggcacccacacacacagttcgtcggaatgggaagggtgattcgcgctcagcgtaagggtgctgggtcggtgttcaagtctcacactcaccaccgcaagggtccggcgaggttccgcagcctcgacttcggcgagcgcaacggctacctcaagggcgtcgtcaccgacatcatccacgaccccggtcgcggcgcccctctcgccaaggtggcattccgccaccccttccgctacaagaagcaaacggagctcttcgtcgccg

SEQ ID NO: 25340 - DNA, 247 bp, Glycine max
  Clone ID: 700906340H1
ttcggctcgagtcgaatgacatcaattcgtaggtgtatgaatatgtctcatgctactacaagtcagatgtagcaattcaacaagatgccgagcttcaagcttggtggaaagaacttgtccaagtgggtcatggtgatttgaaagataagccatggtggcaaaagatgcaaactcgtgaagagttgattgaagcctcggctaccctcgtatggatcgcttcagcccttcatgcggctgttaactttgg

SEQ ID NO: 25341 - DNA, 251 bp, Glycine max
  Clone ID: 700906342H1
ggggtacaagttttgtataaatgtagtcgtaatatatttgtgtggtccctacatgaaaaattgcttacaagttagaccttactgtataagtctaaatggtgttagtttatagtagtattcatataaaactaaaattgatctgtcgggtgtagggaagtgtataattttcgctttatatctaaaatgaaaaacgatgttattttgtaaaatagagaggggccgaatctaataccgttgtaatgtttccacac

SEQ ID NO: 25342 - DNA, 268 bp, Glycine max
  Clone ID: 700906343H1
cataattcttttttttatttcttggtggaaaacagattgtgcatctaattccaaattcacccataaaaatacttccttttgctcaccagccatatattatgatggagggagatgagaatattcaagcatcatcaaagggaaaatatgttgaaagcttcaactgctcggaggcaccaaggaagaaaagcaagaagatagaaaacaagaggaggtttagtgatgaacagataagatcactagaatgcatatttgagtcagagtcaaagct

SEQ ID NO: 25343 - DNA, 267 bp, Glycine max
  Clone ID: 700906344H1
atttttgttggttcgagtgagcgagggaagatgtactctagagattcatggggtggtccgttggagataaacgcgacggactcggcaacggaggacgagcggagccggaacctgcaggacgtggacagggcggcgctgtcgcgtcccttggacgagacgcagcagagctggctcctaggccccggcgagcagaagaagaagaagtacgtcgatctcggctgcatcatcgtcagccgcaagatcttcaagtggaccctcggcaccctc

SEQ ID NO: 25344 - DNA, 267 bp, Glycine max
  Clone ID: 700906346H1
catttccgttaccgttatcctcacttctctctctctcaacctcttatttatttattaaccctttattccacccctttcctctcccttcatcaagcacccaactttctgccacccccacaaaagggtgcttgcgtttctttctgtgatctcaaccatgaagcgtccactcacaccttcagccagcggcatgaagactaacaagaaagccaaggcgatggaaaatgacgaagacgtggaggggctggggcgtttcgacgacaaccttct

SEQ ID NO: 25345 - DNA, 265 bp, Glycine max
  Clone ID: 700906347H1
aaagaagaaaaaaaaaactcaaacaccttcaagaacttgtatctttctttgttagtatttgttactacaattttacattcttttcatctctacatatttcattagtcatggcacctcaagcagtttccttcaagtccttcgccgttgctcttattgtggcgcttttcttctccgcctccgctctggacttagtttcggggcagtcgccggtgccggcgccggcgccggcaccagattgccggagcagctggatccgtgtcgagct

SEQ ID NO: 25346 - DNA, 278 bp, Glycine max
  Clone ID: 700906349H1
tgatgtgaaggaggagggagaggaggaggaggatgaagaagaggaggaggggttgaaggaagaggtggatgcaaatggggacgtgaagatgggtgagattgatgaggggcaggttcaggagttggaggagcaccgcattgagttgagtctcgggcaagataataatgttgagagggttgaagttgagaaggagcagggtggagaggagcagatgatggatgtgggttttgagcagtctaaggaggaggatatgcctggaatgtggcttttggatcaga

SEQ ID NO: 25347 - DNA, 274 bp, Glycine max
  Clone ID: 700906350H1
ctcttgtgctggtgaaaatcatgtacatacatttcaggactatttagtaatagatgatggatttttgctctggtatgttgttttccttcctgtaccatctatttccatttacaatggtttgttcctatccttttagctgccccattaaattgggggctatcaagacttgttcttttttctcctacatttaatctttacaacaggaaatgctcctgaaaattttggcttcattgatgcacaagcattggtagctgttggatgtgtagaaaaataa

SEQ ID NO: 25348 - DNA, 275 bp, Glycine max
  Clone ID: 700906351H1
aaccttcgatcttaatcccacggggcaacgttccatctgttgaacttcttcttttatatgtactctgtgatttcgctacaccctcactccgcttcgccaccctatgggggacaacaacagcaacaacgatgccttcatgcgcaaccaaaacgccgccgttcaggcccgcaccaaagcgcagaaccgttccaacgtccttcagctcaaactcgatggacagagtcacccaaccggtctaacagcgaacctgttgaagctcttcgagcctaggcctc

SEQ ID NO: 25349 - DNA, 270 bp, Glycine max
  Clone ID: 700906353H1
atcaccctcgcctccggtgcccgccacgctattctccggttaccctccgaagcttccaggttcttcaaagcacctgctaatgccgatcaaaacgatgagggcaccaggtgggccgttttagttgccggttccaatggctactggaattacaggcaccagtctgatgtttgccatgcatatcaactactgaggaaaggtggtgtgaaagaggaaaatattgttgtatttatgtatgatgacattgctttcaatgaagagaacccacggcct

SEQ ID NO: 25350 - DNA, 261 bp, Glycine max
  Clone ID: 700906354H1
ctccaaccccaacaagtattagtaaaggcaaagaacaaaacaaaacatggacgaatggcgcgccaccatcaaaatggatcacagaacccaacgaacttagaaaacctaaccgagtcctccatcagtcatattcccaacgaccgttcagaatgattgatggtagcgatcatgcaacagcagcagcagcatcaacagcaacagcagaacccctctgcactggtgccacctcagctcaagaatccccaatcctccacacatcat

SEQ ID NO: 25351 - DNA, 267 bp, Glycine max
  Clone ID: 700906355H1
ggaactgttcctttaactgaagattttgcatatgggcatgtcttctacaagttaagacagacaagtgatttgttttgtatttgagaacgcaaagtaactgtttcgatgatgggaaaagcatatctgcctgtctgcccttagagaacaagtcttgaatagatttcggtaaattaaaaatgctcttgctgatcctcttttggaatgattaataaaacattacattattgtatcttctacttcgaccgccgttgtggacaaaatttgtaa

SEQ ID NO: 25352 - DNA, 268 bp, Glycine max
  Clone ID: 700906356H1
gttcgaagtccaaaacgtgtgcagataaagtttgaggaaggcataattggcactccacagcttacggactcattagagataccggaaaatgtggaatttctgggtcaaaagattgaccttacacttttcaaaggcatccttacctctgtccaagacacagccacatcggtagtgaaaacaatgtcaagtaggcctcccttgaagatcccaatttccaacagcaatgctcagtcctggttactcttcacatacctcgacgaagaattgc

SEQ ID NO: 25353 - DNA, 263 bp, Glycine max
  Clone ID: 700906357H1
attgaaagatagaaattgatatctgtgaaaaatgacactagaataacaaccttagtaattaaatatgtaaggctgttttatggagaggaagatttccttgtttttgtgtatagagattagagggagttcaagttgtggttaatattcttgtatatttgtagatgcatgatacttttaatttcgagatgtttaatttctatcagctaatctcatctctttatcatctgtaacatgttattattccttcctcctttaacttgtgg

SEQ ID NO: 25354 - DNA, 265 bp, Glycine max
  Clone ID: 700906358H1
cttcccttcgcctcttcttgttcttcttcttcttcaatatttcggagcaactctacatatctttagcctcctcttatatatttcggaagttggtttctgctggaaattttgcaaacaaattcatatactgaaaggactttatgactagggagttctatacaatcagattcgcaatggatctgagcactattgaattggcgaagggctaatgaagcttaatggtttattcacagggagcacgagaagctccagagaactctttaca

SEQ ID NO: 25355 - DNA, 268 bp, Glycine max
  Clone ID: 700906326H1
gtatgcacaaggcgtacctgaagcccgatccaaggaacgagatactcgtgtcggccggtgcacttggaagcccacaacttctaatgttgagtggaattgggccggaagagcaccttaaagcccacaacatcagaataacattggatcagccattagtaggacaaggcatgtcagataaccccatgaacgccatcttcgtcccatctcctgtccccgtagagatcgctctgattgaggtggtgggcatcaccacttctggcacctacat

SEQ ID NO: 25356 - DNA, 260 bp, Glycine max
  Clone ID: 700906282H1
gacaagggtccttctgtgtagacataccagagccagaccctgatgatgccaaaatagccaagaccatagaaaatgagttccacaaattggagaatcagaagaatggttttaccaactcactaactggtcttacagttaatggccattgaaagctatgctgctaaagctagtaactgtttttggcctctcctgagccacttttatttgttgattactttatggtcccttttggaaaaggagggttatacttgtaggtcata

SEQ ID NO: 25357 - DNA, 258 bp, Glycine max
  Clone ID: 700906283H1
cggagagtgttctcttccagctccatatgaatcatcaggcaaaattttatcagattctatctctaatggacaaggtgctgtaccactggaggctggattgactctgtcaaagtccatggtgcctgggatttcaagcgaaaaccaggatcagcccagtccaatttcagttttagagcctccatttgaagatgataatgctgttgtcgagtccttgggctgtgtgaggggtggtcagctgggatcacgggtgtctctgaa

SEQ ID NO: 25358 - DNA, 256 bp, Glycine max
  Clone ID: 700906284H1
gggccatgctcggagccttgggctgcgtcttcccggagttgctgtcccgcaacggggtgaagttcggagaagccgtgtggttcaaggccgggtcccagatcttcagcgagggtgggctcgactacttgggcaacccaagcctgatccacgcccagagcatcctcgccatctgggccacacaagttatcctaatgggtgccgttgaaggttaccgtattgctggtggccccctcggtgaggtcactgacccaatcta

SEQ ID NO: 25359 - DNA, 258 bp, Glycine max
  Clone ID: 700906285H1
agggactacatgctttggtttatgatatgaattcagcaaatgaaacatgggagtgggttaatcttaaagaggtaaaattttacaatattaatattcttccgtctatcattcacatacaatctagttttagcttggttctttcttttcttttctttttaagcaatattttcctcctgacaagcatagccagaaccttttgttttcacatatcttacatttcccatggtgaccttgtgtctcttactttgaatcccatac

SEQ ID NO: 25360 - DNA, 255 bp, Glycine max
  Clone ID: 700906286H1
ctcgagccgtggtcactgacctatcttggaagagttttgaagtttaaaccttcaaacccttatgcctttagattctgattctgagtctctgctgctatatatggcgccacgcgtatttcttgtgttggggatgttgctgatggtgtgccttgttaaggtttcgtctgatccaaagagagaagaagaaatactggaagaagaactacattttcccgataacgagccacttattgtgagagacgggaacagaaggct

SEQ ID NO: 25361 - DNA, 255 bp, Glycine max
  Clone ID: 700906287H1
caaagtcaacgactgcatgaaatggtcttgaaacatcctatagagattgatgaccttttgcaccttattgcgcaatcaaagctatctcttgttgcaactgcgaaggcaactcctgttcttagtgcattggcatcgttggaaaaggaaactagtggcttaatcataattggaccagaaggagatttcactgagaaagaagtgagtatgatgatggaagcaggtgctacagctgttagtcttggacctcatcgtctt

SEQ ID NO: 25362 - DNA, 256 bp, Glycine max
  Clone ID: 700906289H1
caggacccctgcctcctcccgccgccgtcaaagccggcgcgttggctctcttctctctcctcggaatcccactcgcgattacttacagcataccctttgctctagcatcaatattctccagcacctcaggggcaggccaaggtttgtctctgggagtgctcaatcttgcaattgtcataccacagatggtggtgtctgtgataagtggaccatgggatgctctatttggaggtggtaacttgccagcgttcgtggt

SEQ ID NO: 25363 - DNA, 258 bp, Glycine max
  Clone ID: 700906296H1
ctttgttctttctggagggaaggacaagtgtgtggttttatggaatgttcatgatcatatttcaactttagcagtagaaacagcatccaatgttaaacagggctctaaaactgggggcaataatacaaaagctacagaaagcccttgtattgaaccaaggggcatttaccagggtcatgaggacactgttgaagacgtgcaattttgcccatcaagtgcgctggagttctgtagtgtaggtgatgattctcgccttat

SEQ ID NO: 25364 - DNA, 286 bp, Glycine max
  Clone ID: 700906302H1
cctacgaaacaggctgttgccaagcccaaggccaaagctgcggccacgactgccaagcccaagtctaagcccgctaacgtcgcggccaagaaggtcgctgctaagccagctaagaagaagacacccgtaaaggccgtgaagaagcccaagagtgtcgtgaagaaacctaagagcgtgaaatcaccagcgaagaagactaaggctaaggctaagaagtgatgatttggattggggtttggttttggtttggcgttatagttttatgcattccgggttcattcgtagt

SEQ ID NO: 25365 - DNA, 279 bp, Glycine max
  Clone ID: 700906303H1
ctcccctactatctattgggcttgtcattgtgggtgcaatcctcctgattggttattgttacagcaattcaggtggagctagcggtggtattaaggatgtaaaacttgaaggtggcgcatcgtgctcattggaagtcctacaagcattgcccattttgaagaaagcatatggagacagcatgcataaggttttgcatgttggccctgactcttgttctgtggtatctagtttgttagaagaaggggatactgaggcttggggaatagaaccatacgagt

SEQ ID NO: 25366 - DNA, 194 bp, Glycine max
  Clone ID: 700906304H1
tttgattgcagatgtagtgtagtcctaacgcaaccttattttctcattcgtcgtcgacaacgtaaatctccattatagtctgttcgtgcttcctctggtattcttctttttgtagtgctgttctgttctcgttctctctctactaagatcaccgccatgatcttcgaatcacgatccctcctcttcacgctcct

SEQ ID NO: 25367 - DNA, 279 bp, Glycine max
  unsure (1)..(279): unsure at all n locations
  Clone ID: 700906305H1
cccctatgttccagacaccgatgaacatatncaatttccgcgaacgataaatcataatggcacctttcttacgttctgttactattagcctcttcattgactcaagggtatgctcaatttcaaccaaaaaacgaagcttttatatccttgttgattacccaaaatggccttgactttgtgaaggagttgctggtgaacaaggcaatttcctcactggtctcacttcgattgccgaatattgaaaagactgcgaaaatcccagttgtgggtaatgtctac

SEQ ID NO: 25368 - DNA, 266 bp, Glycine max
  Clone ID: 700906309H1
agcagctcgaattgtgagtgacggctgttttgattgttgattgctttgaatcactgagataacagggagtaggagtgcttgttcttgttgtattgtgtgtacaaaacctgaggttattctattcaagttgtctttggatgtcagtcatgtgcagcaagaaaatatagccaaaaaattcattggtgttggagattctgtagaatttgacaaaggtgtagcctgtccaaggttacctatttaattttgggttggaatttgaagataca

SEQ ID NO: 25369 - DNA, 265 bp, Glycine max
  unsure (1)..(265): unsure at all n locations
  Clone ID: 700906310H1
gttgtgtttcttgaaccacagtctaagaggctttttgtcttctattggtgngtaagcgattcagtctcgctaagccacccatcttctattggttgaataagcctgggataagcgagtcagtctcgcgaagcccaaagcatttttaatttctgagtttttgttcatgcgctaagcgcaatttcttctctgttttgttttattttggaattgagcttagtgatcctgctcgctaagccaattaagttccagtagttattttgggcta

SEQ ID NO: 25370 - DNA, 267 bp, Glycine max
  Clone ID: 700906313H1
caacgaggagttgaaaacaattgggtccaacctttggaaggaagagccaaagtgtctagaatggcttaactcaaaagaaccaaattcagtggtttatgtgaactttgggagcattatggtcatgactagtgaccaattgacagagttagcttggggacttgcaaatagtaacaaaaactttttgtgggtcattaggcccgatcttgtggcagggggaattaattgtgcgttacccaatgaatttgtgaaagagaccaaagatagagg

SEQ ID NO: 25371 - DNA, 270 bp, Glycine max
  Clone ID: 700906315H1
acagactacagaggcttccttggcagatcagagggagagagagagtgtgaaagttggaatggcgaaaaaggcagtgttgatcggaataaactacccaggaacaaaggcggagctgagaggatgcataaacgacgtgtggagaatgcatcgctgcctgatcgagcgatacggtttctccgaagacgacatcaccgttttgatcgacacggacgagtcctacacggagcccaccgggaagaacatccggtcagcgctgaccaggctggtccg

SEQ ID NO: 25372 - DNA, 282 bp, Glycine max
  Clone ID: 700906317H1
gtcatagtggtttatatatgcggtgtgactgagctgaaggaggaatttaaggggaccgtctaatggaagtcgggggaaggttgtcttactatttgatgataatcccttgtctaaaattggtgtgagatttgataaacccatacctgatggagttgatcttggtggtgcctgtgagggaggtcaaggatttttctgcaatgtcaccgatcttcgtttggaaagcagtgctgtagaagaactggacaaattacttattcattcattgtttgaggttgtttttag

SEQ ID NO: 25373 - DNA, 280 bp, Glycine max
  Clone ID: 700906318H1
aatttcacatgcatttccctctctaaccatatttacaacatccaaacagggacttaattaaatgactagaacctcagttatgaagctatcccacgatgtccgccaagaaccgttcccagtgatgcgtcgctacatcgttagcgaccccattcgctaagaggctatcgagactgccgcacgtgttcgcgaaaatactagagcttccttttccttcagaagacgacgtttccgtggaggaaacgccgcagttttttcggttcgtggcgtcgtgcaatgccga

SEQ ID NO: 25374 - DNA, 280 bp, Glycine max
  Clone ID: 700906319H1
ctcgctcttaaatttcatcttccgacactcatcaaacataatctatacctttgactcaaccacatgaacgaggattgcaattccagaacagcgtcgctgttgttgtcctcatcctcctccccttcgaattccaagatcgtgggagataagcgtggaagctctcacgcgggtcacggcgctcggaaacgggttaagatgaaagatcttgacgccgttgttcactctgtggaaacgaatagccgttattcgggattcaaaaacgacaaagaaaacactgtgc

SEQ ID NO: 25375 - DNA, 277 bp, Glycine max
  Clone ID: 700906320H1
gaaaggtcggaacataaggcggggaagagttagtttcttctctcttcgatggaaggcggggaagaggttctcccttcggccactgccacctccgccgccaccggcaatcccaccgcttcgcctcctccgctcgctgatcttgtcggtgctcccgatctcgctcctgcctcggacgacgtcgttacccaacctgaaattcacgcgctgatttcagacgaagagcacgatcacgagcatgaacatgacgatgacctcgagcacgagcacgatcagcatg

SEQ ID NO: 25376 - DNA, 274 bp, Glycine max
  unsure (1)..(274): unsure at all n locations
  Clone ID: 700906321H1
gctcccaccacattctccaccacgacttcgactctanctatggccacccccctgttctcgccacctacacccctccctcccattgccacttcaacaccttctccaaaatcgtgctccagtggaacgccacgtgcaaaggaagacaatttgaccgcatttttggtgtgtggcttggtggggttgagcttctcagaagctgcactgcagagccaagagccactggcattgtatggagtgttgaaaaggacatcacaaggtaccgttctttgttgtt

SEQ ID NO: 25377 - DNA, 267 bp, Glycine max
  Clone ID: 700906322H1
ctcaccctcctcttcacacattttctgtgcgctctaacaaacattctcgttcacactttcagattgtgtgaagatgggggcgggtggccgaactgatgttcctcctgccaacaggaagtcagaggttgaccctttgaagcgggtgccatttgaaaaacctccatttagtctcagccaaatcaagaaggtcattccacctcactgtttccagcgttctgttttccgctcattctcctatgttgtttacgacctcaccatagccttctg

SEQ ID NO: 25378 - DNA, 270 bp, Glycine max
  Clone ID: 700906325H1
aatcaatccctcatctcattgctgagatctgcaagctggctatggactacgaaccctacgacagtagcggaactgatgatgaccttccaccaacccatcaaaagagaatttccaggggaggaggaggacgtctcgctgggaatgggagatctgctgttggttcaattccttacccaaggatgtatggtgaaattgtgaattggagacccaaattcatcagcttgagcaagaagcatacagttcagttctaagagcctttaaagctcaagc

SEQ ID NO: 25379 - DNA, 265 bp, Glycine max
  Clone ID: 700906281H1
gtctcaagcaaccatggcaatggcaacccaagcctctctcttaaccccacccctctccggtctcaaagccagcgaccgcgcctccctgccatggaagcaaaactccagcctctccttctccagcccgaagcccctcaagttctccagaacaatcagagcagcagccgccgacgagaccacagaggcaccagcaaaagtagaggctgcaccggtcgggttcaccccaccagaacttgacccaaacaccccttccccgatcttcggg

SEQ ID NO: 25380 - DNA, 258 bp, Glycine max
  Clone ID: 700906230H1
ctgccttccgacactctaagaaaatgccgcacccttctttccacaagcttcttcaactatccactgtccaacccaaccaacaactgaggcttccggataattttatgaggaaatatgggggtgaactctctccaattgttaccctctctgttcctgatggtagtgtctggcatgtaggattgaaaaaagcagacaacaagtattgtttccttgatggttggaaagagtttgttcaacgctattccattggtgttggat

SEQ ID NO: 25381 - DNA, 217 bp, Glycine max
  Clone ID: 700906231H1
gaagcatatgcctcaaatgatctatacaatacattgtatgataggacagtaaaagttcctgaagatgtcattctcccatccacatctaaatgcgccttcccatcaacaatgtattgtctgaagcatatgcctcaaatgatctatacaattactgcccttcatgggctctttcttggccatatcgcaggcaaaatttgttacgggaaattattggtta

SEQ ID NO: 25382 - DNA, 73 bp, Glycine max
  Clone ID: 700906232H1
tttctcaatcagttagttcctcttttgctgtggctgattcagttggccatgcggcaggagagcgcatgcaaag

SEQ ID NO: 25383 - DNA, 268 bp, Glycine max
  Clone ID: 700906234H1
aacaaaagcaaagaaccctagacagtcacagaaccattccatagaaatgtcaggtgttggccctctttctcaagattgggaacccgtcgtcctccgcaagaaggctcccactgccgccgccaagaaggatgagaaagccgtcaacgccgcccgccgctccggcgccgaaatcgaaaccctaaaaaaatataatgctgggacaaataaagcagcatctagcagcacttcattgaacactaagaggctggatgatgatactgagagtcta

SEQ ID NO: 25384 - DNA, 263 bp, Glycine max
  Clone ID: 700906236H1
cagcattggtgactgctgaagaaggcgctaaggttgtaaaggtgatgcaagatggcagtggggaattcaagaccatcactgatgccattaaaagtatacctagtgggaacactaagcgtgtaattatttacattggagctggaaattataatgagaaaatcaaaattgagaagacaaagccttttgtcaccttgtatgggggtacagagaaaatgccaaacttgacttttgggggcactgcacaacaatatggcactgttgat

SEQ ID NO: 25385 - DNA, 255 bp, Glycine max
  Clone ID: 700906237H1
gcagaaagcaagctcatcctagagttttaaaaatggcagcagcctcctccatggctctctcttccccatccttggctggcaaggccgtgaagctgggcccatcagcccccgaagtcgggagggtcagcatgaggaagaccgtcaccaagcaggcctcctccggaagcccatggtacggcccagaccgcgtcaagtacttgggcccattctctggcgagcccccgtcctacctcactggcgagttcccagtgacta

SEQ ID NO: 25386 - DNA, 266 bp, Glycine max
  Clone ID: 700906238H1
ataaaatctcgtcttctcctctgtattgagacatggccgaagaagaggaagaatcagagctcagcgataagcagaaagtggagatcgcgaaatggttcctcctcaactctcctctcggagaaatccaatacgttgccaaagatgtgaaatcgattctcaacaacgacgatttgtacaaggaagccgcttccgaggcttttccctattacaacaaatcgcacttgatttccattccaatgtccaaccgaagcggagacgtactggtt

SEQ ID NO: 25387 - DNA, 79 bp, Glycine max
  Clone ID: 700906239H1
gaatttgcttgcaactcatgggtttacaacttcaggagttacaaaaagaatcgcattttctttgtcaatgatacatatc

SEQ ID NO: 25388 - DNA, 98 bp, Glycine max
  Clone ID: 700906241H1
gcttcatcccaaaaagctcttttccttctaaatttgattccttagttcagcattctattattatatatggcttcttcttcttcctcagaaaacaaaaa

SEQ ID NO: 25389 - DNA, 262 bp, Glycine max
  Clone ID: 700906242H1
gttttgtcgagctcaccggtgttcctgttgctagcactttgatgggtcttggtgcttatcccattgctgatgataattctcttcagatgcttgggatgcatgggactgtttatgctaattatgctgtggatagggctgatcttttgcttgcgtttggggtgaggtttgatgaccgtgtcaccgggaagcttgaggcttttgcgagccgggctaagattgttcacattgatattgattcagctgagattgggaagaacaagca

SEQ ID NO: 25390 - DNA, 205 bp, Glycine max
  Clone ID: 700906245H1
tctggagggcgagaaaaagacaacagattgccttctcttcctgttcctctccctcaccctctctctctctctctccgccgcattacaactccaaacccaaaccttgcccctccactccctcgcccacccacccgctatctcaaggcccgtatccgaatccgaacccgacccagaagaagaagctctctcacttcatctccacaac

SEQ ID NO: 25391 - DNA, 162 bp, Glycine max
  Clone ID: 700906247H1
ctttcttctctccaccatcgttgtgtagtgcgtgtctatccgtaaattgccttcgactgtgacaacacaccgatcgccatgaacatcttcaccaagaaacccacggccaaagaggctctccgtgatagtaaacgacaaatgacaaacgccactagaggaata

SEQ ID NO: 25392 - DNA, 267 bp, Glycine max
  Clone ID: 700906248H1
cttcttcaaaaacacacaagcacactacactttgtctctgttctgtgtgtgcgagaaatggcgatggcaatggcgcttcgcaggctttcatcttcaattgacaagcctctgcgccctctcttcaatgccggttccctctactacaagtcgtacttgcctgatgaagctgtttacgacaaggagcgacccggagttacatggccgaagcagttgaatgctccacttgaggtcgtggatcctgagattgctgatattattgagcttgag

SEQ ID NO: 25393 - DNA, 267 bp, Glycine max
  Clone ID: 700906249H1
aagtcaggtcccaaaccaataattgtgcctattgttttgaagatggctgaatttgaccataaggcattactttcgtagtggatctctgctcggacatttaatgacaaatgtccagacctggataatgagaagcttatagccaacttgaaaaccatacaggattatctgtgctcattcacatcgcaggggttgactgtggtcaatgtatcggcaacaacatttcctcaaacattggattggctgcatggttaccttcttcagtgcatc

SEQ ID NO: 25394 - DNA, 147 bp, Glycine max
  unsure (1)..(147): unsure at all n locations
  Clone ID: 700906252H1
agacaacacatttctgcacaatataatagaaagatntctccatcacgtaaaaaatgggcactagtttcatgctaatttctccaccgtctctgctcaagcctcaccaagtacccctcacgactccattccctcttcctcaaacccatc

SEQ ID NO: 25395 - DNA, 264 bp, Glycine max
  Clone ID: 700906254H1
ccttctccccagttctcaaagcttacctagtattttcgtttctgaacccaattaattaagcacacaaggatcataacatacctatacctcgatatcacaagtcttatggaggcagagcgagacaagtacaagatgatcaactttgaagaaaccgagttacgactcggcctcccactcagtggaaacgaaacgctcacaaccacttggagcactgggaagagggttttttcggctactgccgtggatttgaagcttaagctttcc

SEQ ID NO: 25396 - DNA, 250 bp, Glycine max
  Clone ID: 700906255H1
cttcaatccaattccaaagtaccgtaacgtaacaaacttgacttacgtgtgcctcatttgctattgttcatcgcaagctacctaacaagttcgaggctgaacctgagacaatggcgaatcacaatagcagattcctcttacgctccttcatccccttcttccatcgccgaatgaactcacctcttcttccttcagcaacgtcatgtcctcggttaacttcggggacagcttttgatgaaaaattcacgca

SEQ ID NO: 25397 - DNA, 69 bp, Glycine max
  Clone ID: 700906258H1
aacaacacaacacgatacaagtttcgtattcgtaacgtagacttgtttcacgcttcttgctctcctctg

SEQ ID NO: 25398 - DNA, 89 bp, Glycine max
  Clone ID: 700906265H1
cttttgctagctggctgtcggggagaggttcccagatccctctcgcaatgcacgtgactcacaccctctctctttccctgcaaacaaaa

SEQ ID NO: 25399 - DNA, 263 bp, Glycine max
  Clone ID: 700906266H1
caaaatctgcttctcatgatgcctttgctgtattaattcatctcaaagctccacattcagggagaaaacaaaataatgatgcaaacagtactgaatcatcacctctggttgagaactctcgtgcctcagttgaccttgttacagttcttgatgtgagtggtagcatggctggtactaagctagcgttgctaaaacgagctatgggttttgtcattcagaatcttggtccatcagaccggctgtctgtcattgccttctcctcc

SEQ ID NO: 25400 - DNA, 257 bp, Glycine max
  Clone ID: 700906267H1
taataataaccccctttttccctctccatacccttttgctttctttatccaataataagaacttcccacgagtggctttaactggtctggtctggtctggtcggacacacaaaaatattagtatggagaaggtgagttttgtgaagaatggagagcttagattgcctccggggtttcgtttccacccgactgatgaggagctggttttgcagtactagaagcgcaaggtcttctcctgccctctgccagcctctatc

SEQ ID NO: 25401 - DNA, 254 bp, Glycine max
  Clone ID: 700906268H1
aattactgagggggagaaatgggagaaccctaaggatcctgatgaagtattggttaagtatgaagttcatctagaaaatggaaagcttttagcaaagtctgatggggaggagttcacagtcagagagggtcattattgtcctgcattgtcaaaggctgttaaaaccatgaagaagggagagaaagtgcttttgacagttaagccacaatatggatttggtgagaaggggaagccagaacaaggggatgaaagtg

SEQ ID NO: 25402 - DNA, 182 bp, Glycine max
  Clone ID: 700906270H1
aatttcttccatcagatatattttcttcaaaaacaatggcaggcgaggtggtgaagaaggaagactctctcaacctgaaagtcactaacaagagtcatgttcaacctgaggagaaaattggaaggacagagtaccagctggtcacttttgatcttccctacttggccttccacacaacatag

SEQ ID NO: 25403 - DNA, 95 bp, Glycine max
  Clone ID: 700906272H1
ctcagatatttgttgtttctttctctgttggtaattttctgtttttcatgtttttttaaggtgtatcatttgtatagacaacttttatcaggaaa

SEQ ID NO: 25404 - DNA, 261 bp, Glycine max
  Clone ID: 700906229H1
tggattttcaacttcaaagtttgctatcccaaagctactggattggtatttgctgaactttgcaaaagacttggagtcattgctggattggatccgtctccagttaccaagtgaattggggaaagaagcccttaaattccttgaggaaagaaaaaccgagcccttatcacaatttgtacaaattatgccatatgagttcagctttagatacttgatatgcacatagattgcctcccttttggccattgcaattttgtatac

SEQ ID NO: 25405 - DNA, 263 bp, Glycine max
  Clone ID: 700906276H1
ctagaagaggagaccgtgtttggcaactcgcatttggctctggcttcaagtgcaacagtgtggtttggcgcgccatgcgccgagtcaccaagccttctaggaacccttggcttgattgcatcaacagatatcctgcacctctcaacaactgaagcagaatttgacggcactagtgttatgaatcttattatcagtgagggtatggttaggatcaataagggtagtactaatttggtcttcaaaaatgttacatctgttttctg

SEQ ID NO: 25406 - DNA, 262 bp, Glycine max
  Clone ID: 700906277H1
atcgctcaatgcttcaccttttccgcatatgctgcaaggtttgaaatcacaaaccgatgcacatacactgtctgggctgcgtctgtgcctgttggcggtggcgtgcaattaaacccgggccagtcatggtccgtggacgtgcctgcaggaacgaaaggggcccgcgtttggtcccgaaccggctgcaacttcgacggttcgggcctctatggatgccagaccggtgactgctggggtgtcctcgactgcaaagcttacggtg

SEQ ID NO: 25407 - DNA, 263 bp, Glycine max
  Clone ID: 700906278H1
cacaaagcacaaagcaaagctcatccttgagttaaaaaatggcagcagcttcttcctcggctctctcatccccatccttggctggcaaggccgtgaagctgggcccatcagccccagaagtgggaagggtgagcatgaggaagaccggcaccaagcaggtctcctcaggaagcccatggtacggcccagaccgagtcaagtacttgggcccattctctggcgagcccccgtcctacctaaccggtgagttcccaggcgactac

SEQ ID NO: 25408 - DNA, 262 bp, Glycine max
  Clone ID: 700906280H1
ccacccagaattgttgggttccattctcaaaacagagaacaagaagaagaagaaagagagagagtgaaaacgggaaaagcaaaaagttgtttctgtgattgattctctgcaaccgaatcatcatcagccacttcttcccgtttcatctctcccatttcttcttttcttccgctctggttcagtaaggcgaagagggttaacgttattcataatggttgcaacagccgctacggcgtcgtttcttcccgtgcctttgccagac

SEQ ID NO: 25409 - DNA, 239 bp, Glycine max
  Clone ID: 700906183H1
tattgaagctgtcttgttgatgattgaaaaccctgccagggccaatggccacatatttaatgtgggcaaccctaacaatgaggtcactgttaggcagcttgctgaaataatgattcaggtttactcaaaggtaagtggagaacaaactgctgaaacacctaccattgatgtgagctcaaaagaattttatggtgagggatatgatgacagtgacaagagaatccctgacatgaccataa

SEQ ID NO: 25410 - DNA, 235 bp, Glycine max
  Clone ID: 700906184H1
tatacgcatctctccctctctctccttaccacccaaaatgcgtcttcctcgccagctcaatttacgtgattcagattcgcttcttcctctcccttttctacaattctcagatttgtaagtgggtcggtttttctgcttaaaaagtctctttcggtctgaaatttctttgttttttggcgtgtcagtgccctatgagatagaatctgcgcgagaaagcgacagcaatcattgcagt

SEQ ID NO: 25411 - DNA, 236 bp, Glycine max
  Clone ID: 700906190H1
aaaggatcagggagaaaagggccccaacgagtctaaagattccgagtacgcggcgccccaagttcatacctaatccgtcatcccccacttcaaattccacttataccctcatcgtttcctttccctttaaacccatcatcattccctttcaacatcacattattcccaacgagttgacaccgattccactcacccaaccatagaacgattcaggcgatttgagctcatcgaacagc

SEQ ID NO: 25412 - DNA, 235 bp, Glycine max
  unsure (1)..(235): unsure at all n locations
  Clone ID: 700906191H1
tctctctctctctctctctctctgttttctctctctcgtctcacttgaaactccacaacccaattttcttttcctatgacccaattccaaatccaaatcaccaattctaattccattcttcaggagttgaattgaattcgtgatgaagagggaccacaaagatagctgcggcggcggcggcgcgcggnagggactgtgaagggtgagtgttcctcaatgcagtcaaacgggaagg

SEQ ID NO: 25413 - DNA, 237 bp, Glycine max
  Clone ID: 700906192H1
ttcatctgcatgcacacagttgcatagttttggaaaccaagaattcctgaagaagggtagcatcaacaagcagttctgaaaatggagatcaccaatgtcagtgagtatgaggctattgcaaagcagaagttgccaaagatggcgtttgactactacgcatctggtgcagaggaccagtggactctgcaagagaacagaaatgccttttccagaattttgtttcggccacgtattctt

SEQ ID NO: 25414 - DNA, 236 bp, Glycine max
  Clone ID: 700906193H1
gttgatgataaataccagtactcctgtgagaacaaggtcaacactgttcatggatggatcagtgttgatgctgctgatgcaccacccgtgggtttctggatgataacgcccagcagcgagtttcgtaatgctgggcccatcaagcaggaccttacttcccatgatggccccatcaccctctcgatgtttgtgagtactcactatgctggcaaggaggtaaccatggcatttcaaga

SEQ ID NO: 25415 - DNA, 242 bp, Glycine max
  Clone ID: 700906195H1
caggttcagcagtgaccagaaagttttctttgacgcctttgaggcttcaatgattaagatgggtaacattggtgtgctcactgggaagaaaggagaaatcagaaaacattgtaactttgttaacaagaaatctgttgacgttgatattgctagtgtggcctcagaagaatcatcaacagagggtatggttacctcaatctaaatggattaggatgaatagttttcacttaaaatggtgtgat

SEQ ID NO: 25416 - DNA, 272 bp, Glycine max
  Clone ID: 700906201H1
ctcgcttcttccgatccagttcgactagcttttggaaacaattataatgacaacttcagagcagcaagtccctcccaaaactcctgcagctgatattgttggcaatgcttttgttgatcaatactaccatatgttgcatgaaagccctgagctggtgcataggttttaccaagatgtcagcaaacttggccgtcctgagcagaatggcataatgggtattacaaccacaatgcttgatattaacaagaaaatactatcattgggttatgggg

SEQ ID NO: 25417 - DNA, 273 bp, Glycine max
  Clone ID: 700906202H1
atccaatttccctatctctctctgtctctatatctgtatggctgaattttgggaatagaaaaaccctaagcaaagcaaagcggtaaggatggggaacacggagaagctgatgaaccagatcatggaattgaaattcacttcgaaatcgctgcagcgtcaatcgcgtaagtgcgagaaggaggagaaatcggagaagctgaaggtgaagaaggcgatcgagaaaggcaacatggacggcgctcgaatctacgcggagaacgcgatccgtaagcg

SEQ ID NO: 25418 - DNA, 265 bp, Glycine max
  Clone ID: 700906203H1
agccttcagatgctattgtctctaatcagttcaatggcctcatgaagtggatgataattttccatattttattcctacgtctgtaatagaaggagaccttatcgccgtggtagaaatcactctccgcaaagaattgataccatggttgtacaacatatctgtgcccaattccaatgtgaaggaccacaacattccactgcaatggaagtccaaatcttctacgtgcatacacagggtcgtttccttagtcagttagcaagtgtga

SEQ ID NO: 25419 - DNA, 216 bp, Glycine max
  Clone ID: 700906207H1
aaagaaagctctctcagagtagagtttgagatcatgaatcagcaaatggatgagctaaaagaaaagttagagaaggtggaagctgataaagctgaactagagatagctttgatgaaaagtgaagggtgtatggaggagtcacagcttcagttgagggaggcacaagagaaattggaggagttgcaaagagaggtagaaaatgcctacaaatcaaag

SEQ ID NO: 25420 - DNA, 269 bp, Glycine max
  Clone ID: 700906209H1
cgatcttatgagaactagtataatatcatcatcaagatttgtgcttagaaaagaagaagaatgcaaagtaataaaacatgttaacagtataggccaactgcgggaggcaggtcttaaattcaaggaatatagtggcatttgaggaatgtcacctttcagatgatacaaacatcattactcaataccgtaagattctagatttgcttatcaacactgaaaaagatgtgaatgtactagttgataaggaaattattgtcaattggatgggt

SEQ ID NO: 25421 - DNA, 183 bp, Glycine max
  Clone ID: 700906210H1
atttccttttcgtacaattcgtgtttgaggaattttgtattttttttttcctgttggtaatctaaaacttttcgcatggtaacagccaaatgaagcagaacagaggaattcaggatcaccaaccctaatcaatgcatttcaattgatagggatgtcttcatgcttagacctctctggcttttt

SEQ ID NO: 25422 - DNA, 173 bp, Glycine max
  Clone ID: 700906211H1
gtcaaacgcagaatcggcggcagaaattgccaccggaagcacgtcgaagacggctgaaccagacacagaattccatccaccacttctcttttcaatccccaactcaaatctgtgaagaaaatctcagatttctagattgtaattcttagcactactgctagtagtagtaaaaa

SEQ ID NO: 25423 - DNA, 264 bp, Glycine max
  Clone ID: 700906212H1
attcaattcctctcatggtcatgcaagctattttgggttcttggaataagacagcaggaggtggaaaacacatgggttcggagttagcacatcgaattggcatcaatgaagttgctgagagcattatggctttcaacaccaattacaaggacacgggtctttttggtgtttatgctgttgccaagcctgatagcttggatgatttgtcttatgctataatgtatgagacaaccaagttggcttatcgcgtttcagaagatgatg

SEQ ID NO: 25424 - DNA, 210 bp, Glycine max
  Clone ID: 700906213H1
acaaaatgatgaaggtgaggatgatgaaggaacataagacaaagaaaaaggataagaaggagaaagagaaggatcacaaaaaggaaaagaaggataaagaggagggtgagaaagaggatagcaaggttgaagtttctgttagggatattgatatagaagaaatagaaaaagaaggtgaaaaagaagataaaggaaaggatggtgggaagg

SEQ ID NO: 25425 - DNA, 270 bp, Glycine max
  Clone ID: 700906214H1
attcgatctcctcatctccaagaatggtgccaaacagaattcatgttacctgtgcattagtacatgagaaaatgcacaccggaaggattcacaaaggagtgtgtacaacatggatgaagaattctgtaccattggagaaaagccaggactgcagttgggctactatttttgttaggacctccaactttagactcccttctgataataaagtgcctataatcatgattggtcctggcactggattggctcctttcagaggtttcttgcagg

SEQ ID NO: 25426 - DNA, 63 bp, Glycine max
  Clone ID: 700906215H1
agacagcatatcttaatatcttccatgctccatccagttgggcacgacgagtctaaacgagaa

SEQ ID NO: 25427 - DNA, 269 bp, Glycine max
  Clone ID: 700906216H1
cccaaaacccgaacctccgcttcggatcctaatccagtaatccctgatgggaacggaacgctacacttacatggggcgcagtttgagcgaactccgcatcaacgacgattcctcttcctccgccttcagcgactgcaacagtgacagatctggcgaattcgccaccgcttcttcgcaaacgcggcggtttctcatcgcctgcgccaccgaaaattccgacgacttgatccgccaactcgtcgccgatctccactcctcctccatcgacg

SEQ ID NO: 25428 - DNA, 206 bp, Glycine max
  Clone ID: 700906219H1
ctcttcctcaccgattgctagaatggaatttcgatgctcagtcatctcttttaccattctcttctctcttgctcttgcaggagagagccatgtccatgcatcgctacctgaggaagattattgggaagctgtttggccaaacactcccattcccactgcactgcgagagcttctaaagcctctccctgcaggtgttgaaatcgatg

SEQ ID NO: 25429 - DNA, 267 bp, Glycine max
  Clone ID: 700906220H1
gaaatcggaagaaggattagggtttgtggagatgcaagggcaaggcgttgatgaagtgagcatagaagagttggcgtcgaatctttccctctacaaagatcaactgaaccaggttagagaactcttaaacgatgaccctgcaaattctgaatatgttgacatggagagggaactttccgaggtaagctcaattcaaccccagttttgatgttttgtttccgccttgttctctatcattcattcatcatcgagtaagcagatagatcc

SEQ ID NO: 25430 - DNA, 267 bp, Glycine max
  Clone ID: 700906221H1
acaatggcttctgtgcctcaaccaaaaatctcccttctaaccttattcttcttctcgtccttcaccatcattgcgcatgcaattgttcctcaaaacgaaaccttcaaatttgagaactcaggtgaacttggaccctacatcgttgagtacggtgcagattacagaatgataagcatcttcaactctccattccaagttggtttctacaacaccaccccaaatgccttcactctagctttgcgtgtagggctccaacgctcggagcag

SEQ ID NO: 25431 - DNA, 267 bp, Glycine max
  Clone ID: 700906222H1
caaaacggcgccatgcctaccgtcagtgtggggcgggatcgctgtttgcggctctaggaaagacttacacgcaagaggaattccaagacttgtgcttcagtttcgggatcgagcttgacgacgtcacgacggagaaggcaattgtgagaaaagagaagcatttggaggaagaagaagctgatgaggacgaagaagttatctacaaaatcgaagttcctgccaacagatatgacctcctgtgccttgataggcttgctcaagccctcc

SEQ ID NO: 25432 - DNA, 240 bp, Glycine max
  Clone ID: 700906182H1
ataacactcgatccagcacataacaatggaaacgcagctttacgtgttttctctctagattctgctcttaaacgccgtcgttttcaaactctttttttccccttcgtttctctgtctttgtaaccgaaaggggggaaaatataattaacaccgattttgcgaccaattcttcttctgcgttgaattgggacaacgagaaattggatctcagtttttggcaggaaataaaaattgcatttg

SEQ ID NO: 25433 - DNA, 265 bp, Glycine max
  Clone ID: 700906223H1
atttggaaacagctagcaactatggctctcatgcagcttactagctctcctgttgccttattgctccgtttcatagtaatatttgctctatgttacagaacaatggctttggtgaagttgccaccaaacgcttcatcagttccggcggttttagcgtttggagattcgatcgtggactcaggcaacaacaacaacataaaaacactgattaagtgcaacttcccaccttatggaaaagattttcagggaggatacccaactggtc

SEQ ID NO: 25434 - DNA, 191 bp, Glycine max
  Clone ID: 700906226H1
gaaaaatccccacaattggtgcgagtccttgaagctctgaaagaagccacccacgacatccaacgacaccactcctcggattccccagccataaaggcactcctggaactccactccattctctcctcctcggacccctacctctccgctctctccgaccacctcatccgcctcaaaaccctcgtccactc

SEQ ID NO: 25435 - DNA, 146 bp, Glycine max
  Clone ID: 700906228H1
ctgaggcactgaaagtgtgatatggcaagagtcatttcctcttactgcgcacgcctcgcaatgcgcctcttctccaccagcaccacagccaacgcgttcgccgtcactttacccaaaccctcatcactctccctctcatcgggtcg

SEQ ID NO: 25436 - DNA, 245 bp, Glycine max
  Clone ID: 700906146H1
cttctcttgcggctagggttttagcgcacatcttctagatttacggaagatgggtaaggaaaaggttcacatcagtattgtggtcattggccatgtcgactctgggaaatccactaccactggtcacctgatttacaagcttggaggcattgacaagcgtgttattgagaggtttgagaaggaagctgctgagatgaacaagaggtctttcaagtatgcctgggtgctggacaaacttaaggctg

SEQ ID NO: 25437 - DNA, 246 bp, Glycine max
  Clone ID: 700906147H1
tatcaatcaaatgaatggtgccaattctgtttcagaagatgaaaatgaggatcttcttgctgactttattgatgaagattgtcaactaccaagtcgaagttctaaaccccatcattcaagtagactctcttcacatgttaatgacgaagagaatacaacacaaactggatcttctctctgtctattaaagtctatggataaatatgcaaggcttatgcagaaattggaagtggtaaatgttgagtt

SEQ ID NO: 25438 - DNA, 72 bp, Glycine max
  Clone ID: 700906149H1
tcgctctcgcggtctgtgtcccggtctgagcatggaggaagacaacagtcaatcaaaaaccgagaaccccac

SEQ ID NO: 25439 - DNA, 245 bp, Glycine max
  Clone ID: 700906150H1
tctttccccaatttgtgagtgttactgttgaatcgattggattggcattaggttgatctgaaatacgcaattgacatggcgagcgcgatggtagaggacgcgaacttcgaagatgaccaactagccaatatgaccaccgacgacatcgtcagagcttctcgtcttctcgacaacgagattcgcatcctcaaggaagagttgcagaggaccaatttggaattggaatcgtacaaggacaagatcaa

SEQ ID NO: 25440 - DNA, 243 bp, Glycine max
  Clone ID: 700906151H1
gcactctcttgttttctctctcaccctcatatccatcatcttccacacccatggagcgtcctctgagcaatcaataatcaagttacccacagaccaaccaagggtagagaaactgacccacttgcattttttctaccacgacatcttagagggcaagaacatcacggtggtgaaaatcatcgagccatcagcgagcgaggttcgtgaagcaactgggtttggaaccactttcatgatggacaa

SEQ ID NO: 25441 - DNA, 81 bp, Glycine max
  Clone ID: 700906152H1
gcagcctctgctctgttcctcctcgacatcaaaggccgcgtcctcatctggcgcgactaccgcggcgacgtctccgccctc

SEQ ID NO: 25442 - DNA, 236 bp, Glycine max
  Clone ID: 700906153H1
gtttgttccagcgttggaaacgtgcgctcggattaaaataaccgacccgaacccgaaatgggatatggaaacaatgcccggtgctagagtcatgagtgacatggttttactcccgaacggcgacgttttgattgttaatggagcagccgtagggactgcgggctgggaattgggccgtaacccgctactgagtccgtttctttataaaccaaataatcgggtcgggtcgagatttg

SEQ ID NO: 25443 - DNA, 239 bp, Glycine max
  Clone ID: 700906154H1
tccagatccaagccctcggtgacaccgatccccgcgtcggtgaaacttgccgatacttggcggaggcaaatgtgcaagcaatgcagtttgataaagcagaggagctgtgtaagaagacacaggagattcatcgggcacatagtgaaccggcttcgcttgaggaagctgcagataggaggctcatggcgctgatttgcgaggcgaagggagattacgaatcagcgttggagcatcttgtg

SEQ ID NO: 25444 - DNA, 242 bp, Glycine max
  Clone ID: 700906155H1
ttctttctctcttctctctctgtccgaagatggcttcacgcaggttcgtatcttctctgattcgatcctcccttcgtagatctcaatcgaaaccctcgatttccgcatccgcatcgaggttcacgtcatccaaccgtgcctctccgcacggttacttgctgaaccgcgtcgccgaatacgctaccgcggcggcggctgctaccgctcctccctctgctccgcctccgggcaagaaggaggtt

SEQ ID NO: 25445 - DNA, 244 bp, Glycine max
  Clone ID: 700906156H1
atcagactagagagagtaagagtaagagaagagatggaaagagtagcatcagtatctcggccactgaaaatatacttcctcccattcttctcaccggggcacctaatccctctggtccagctggctcgcttggtggcggcacgaggccagcacgtgaccatcatcaccacccccgccaacgctcaactcttcgaccagaacatcgacaaggacaccgcctccggccaccacatccgcgtccaca

SEQ ID NO: 25446 - DNA, 241 bp, Glycine max
  Clone ID: 700906157H1
gaaacagacacgtggtgggttggaataaaatttgccatgtttacgacaagttctgtaggcatgttggtgcctccatagcagtggctttgtttggaagcgttgtgacagtcttgctcatttggctttcagcttacagcattcatagccgagtccccaagtagatggaaggaacatggatcatgcattctgcatatttatgcatacatcttcatttattgtttataaagttagtgtgctcagt

SEQ ID NO: 25447 - DNA, 242 bp, Glycine max
  Clone ID: 700906158H1
cttgattctgttgttatttgcatttgaagctgtttgcttggggacgaaagtatttttttgctcagagacaaatgaaaaaaaaaatgtaaaacaagattgttacatgcatgtggatgtacaaaatgctgctacatattgcttgaaattttacaataaggaaacaaaaaaaatttgaaatgcaatatgtaaaaatcaagtcttttataccgtgagtgattattgacgaataaagcctgctaaat

SEQ ID NO: 25448 - DNA, 240 bp, Glycine max
  Clone ID: 700906159H1
ggctttgcgagctgcacatggaaaatggggaaagctgggagctgaagaggaagaagaagaagaagaagaagaaaaggaggagggtggtgagtttggtggtgttctgaggatgtgggagggtgaagttcttgattgtttcgatgatcatcgcatagctattgaatccacgtgttgtccttgctaccgatttgggaaaaacatgaagagagctggttttggttcttgctacattcaggcagc

SEQ ID NO: 25449 - DNA, 243 bp, Glycine max
  Clone ID: 700906161H1
ttccactccccccaatagccgctattctactcgcaagcaaatcagaacaagagaagagaatggcaggagcagaggggctaaacagagaacagtacgtgtaccttgcgaactgtcggagcaggcggagcggtacgaagagatggtggagttcatgcagaaggtggtggtggggtggacgccggcgtcggagctcacggtggaggagcgcaacctcctctcggtggcctacaagaacgtgatcgg

SEQ ID NO: 25450 - DNA, 246 bp, Glycine max
  Clone ID: 700906162H1
ctcgttttttctcagaaccttctgaggttaaagcaaaaaacaaagagagagagagagagaaaatgatgaagccatcgatgctcagatctctccactccgccgccacccgcggcgcctctcatctcttccgccgtgggtacgcctccgagccggtgccggagcgcaaggtagccgttctcggcgccgccggctgggatcgggcagcctctctcccttctcatgaagctcaatcccctcgtttcgagc

SEQ ID NO: 25451 - DNA, 245 bp, Glycine max
  Clone ID: 700906163H1
tcgaaaccgattagattagaggcttcaaacaagaggccccaaaacccaaaccctattctggttcacttgcgattatggcgtctgagagcgcttctcgatcgagttccgcggccgattcgtacattgggagcttgataagcttgacctctaagagtgagatcagatacgaaggcatactctacaacatcaacaccgaagagtccagtattggcctcagaaacgtgcgatcttttggaacagaagga

SEQ ID NO: 25452 - DNA, 247 bp, Glycine max
  Clone ID: 700906164H1
aaactgacatagttcagacttcagacttcccattccaatttccaagtttttcaaagaaggtgagtgatgagcatggagcatttgccaggagaattggtgtccaacgtgctctcaaggttaccatcgaaggtgttgcttctatgcaagtgcgtgtgcaagtcctggttcgatctcataaccgatcctcattttgtttccaattactatgttgtctacaacagtcttcaaagccaagaggagcatctct

SEQ ID NO: 25453 - DNA, 247 bp, Glycine max
  Clone ID: 700906165H1
gtgctaaatccctagtaagccgccatggtgaagtactcaagggagcctgacaatccaaccaagtcttgcaaggctagaggcgccgaccttcgggttcattttaagaacactagggacactgcctttgcaatcaggaagttgcccttggttaaagctaaaaggtacttggaagatgttcttgcgcacaagcaggccattccgttcagacgtttctgtcgtggtgttggaaggacagctcaagcaaaga

SEQ ID NO: 25454 - DNA, 244 bp, Glycine max
  Clone ID: 700906166H1
cggtgaagaactacgaaagcaccgaccagaacttcaacaacaacaacagcataatcggaaacgcgagtgagggagcgtcggatatggctttgggtgattcgatccagccggacatcgatgaggatctccacagtcggcaactcgtcgtgtatgggcgagagaccatgcggaggctctttggttccaacgttcttgtctcctggatgcagggtcttggcgttgagattgctaagaatctcattct

SEQ ID NO: 25455 - DNA, 240 bp, Glycine max
  Clone ID: 700906167H1
caaggagcgaaacatcattcataaggtcacatcttcattaactggatcaattattgttgaagatgtaatttatgaaaatgttgatagtgaagtcagttgtatttttccttctggagagttgatgtttcgacgccttgtattcgagagagctgcaaatttggtgcagtctgaagctttgctaaaagatgaacagttgcctaccaaattggttagtgagacagggaagaagaaaaacaatgc

SEQ ID NO: 25456 - DNA, 81 bp, Glycine max
  Clone ID: 700906168H1
cacggagatgatagcgaaagacgaaatttacgatagcttttgaaggtaccagtttttgtcatcactctctcagctgatcgg

SEQ ID NO: 25457 - DNA, 231 bp, Glycine max
  Clone ID: 700906170H1
caaaccttttgcaaaatgtccatagcagaggaggagagtccaagtgtgatgccaaaagtgatcactttcctctgctctcttcttgagagggtggctgagtcaaatgatcacaaccaacacctccaacagcaccagaagatctcagtgttccatggcctgacaaggcaaacatctcaattcagtgctatcttgagagaatcttcaagtacgcgaattgcagcccttcatgct

SEQ ID NO: 25458 - DNA, 242 bp, Glycine max
  Clone ID: 700906144H1
gccttccgaaggtggcagcccctccgacctcctcttcctcgctggcggtggttcttcccattaacattctaaagtagtattagccattaacattacatcctacaccttcaaaagttctctctattagcggtttctggtttcttttgttcttcttctttggtagttgttaggtttggtgaggtctaagatgttgagcattaagagggttcccactgtggtttcaaattatcaaaaagaagaga

SEQ ID NO: 25459 - DNA, 237 bp, Glycine max
  Clone ID: 700906175H1
cgcattctcattgggttcagtgagagttctttcttttgtttgcaactcattaaagttaatgcctttcaagtccattcacactgttgtcagttttcatagagagatctagacactttaaccatttggggtgtgaagaacaatcaaactaacttgtggggtgtgtgtgaggttcatcaatcttcatcaagagtcactgaattggtgaccctttgatcaaagggccaaaagggtacccgg

SEQ ID NO: 25460 - DNA, 232 bp, Glycine max
  unsure (1)..(232): unsure at all n locations
  Clone ID: 700906178H1
cttgcagtaatggcttcaatgaataaccaaaaagaaattgagctctttgagggccaatctcttctgtacatgcagctatatgggcacctaagacctatgtgtcttaagtgggctgttcaactaggtattccagacatcatacaaatttatgccaaacccatttctctttctgacttggtctctactcttcaaattccaccagctaacgctgtcacngtgcagcggttcatgc

SEQ ID NO: 25461 - DNA, 238 bp, Glycine max
  Clone ID: 700906179H1
acagattactgagattgttttgtttttcatttttggttgttttttttggcggaaataactcgtaataagcatgacaagcaccatgcaactaactatggtcaagggcacgatccctgatgctttgagtagaagagtgtgttgtcagtgtcaagcatccctgtggccgccatggcgaattgggttttttgctcccgttccccttgtgaggagagtttcgagtgagagggtggcgacactc

SEQ ID NO: 25462 - DNA, 245 bp, Glycine max
  Clone ID: 700906180H1
agattgggcatccatttctgttcttccagcttctccaatcgcttgtatgagaagaatgaatttgttgaatagtaacatgagatttaggaaagccgtgaataatctttgtagcatgctcagtgaacgatatgcaaagcaactggaaaagtcccagtactcgtcattaaacaatgatcgcaaacagtttgtgcgatcccagtcctgtgaaggaatctcaagaaaatgaagaaattacatcagctatt

SEQ ID NO: 25463 - DNA, 241 bp, Glycine max
  Clone ID: 700906181H1
ctccaatcctgatgatattgtgattgttgttggtgcaacaaataagccacaagaattagatgatgcagttcttaggagactggtaaagagaatatacgtacctttaccagatgaaaatgttcggaagcttctgctgaaacacaaactcaagggtcaagcattctccttactaagtagagatcttgagaggcttgtaaaggagattgaacgatattctggcagtgatctgcaagcctggtgt

SEQ ID NO: 25464 - DNA, 266 bp, Glycine max
  Clone ID: 700906095H1
gctggttttggataactcagtgtgcttcaaggtagggttcatggcggcgaattacgcgattctggaagccgcatttgaggagaaaacggagaataacaggttctgcgtggtggattttgagattggaaagggaaagtcagtatttgcacctcctcaacgcgctctcggcgcgtgaccagaacgcggtggtgaagatcgcggctgtggcggagaacggcggcgaggagagagtgcgcgccgtgggagacatgctgagtctactcgca

SEQ ID NO: 25465 - DNA, 251 bp, Glycine max
  Clone ID: 700906103H1
gtttggtcttgttaggttacctctgtgacatttgtgttgttagttcgtagttgcggctgacacccagaaagaaagaaagcaggaaaaaaacaaaaaggcgcagatgggtagcacaggtttctcatggaaattggcggatcatccaaagcttccaaagggtaagactgtggctgtggtggtgttggatggttggggagaggccacacccaatgagtacaactgcatccacaaggctgaaacaccctgcatgg

SEQ ID NO: 25466 - DNA, 248 bp, Glycine max
  Clone ID: 700906108H1
ctcgagccgcgtttttgacgtaccctctcttctccaagctgtggccgccgacactgttatcgccgctgcgcaatctatcgctttgattggatatctgctgactaatgacactaattcagtgtcaccaaatttgacagcagcgaatggaaggtttcctttagaagacctttttgggaggaaacatgcttatctagaaaacaagaatagtgaaacagaggacgacgacgaggatggagatgaggatgatg

SEQ ID NO: 25467 - DNA, 118 bp, Glycine max
  Clone ID: 700906109H1
gaggaacctctctttcttcttcttcttcttcttcaccttcttcgccgccgtcagatctgatccctcagatcaccgctacaaagaaggcgaccccgtccctctctacgccaacaaagtt

SEQ ID NO: 25468 - DNA, 248 bp, Glycine max
  Clone ID: 700906110H1
gctccgggtcctgttcctcctgctgatggcagtgatggtggagtggatttgcaattgcaatggaattatggtttggagccagagaggaagagactaaaagaacaggattttttggagaacaattctcagatatcttctgttgatttccttcaaccacgatcagtgtcgactgggttgggcttgtcactagacaatactcacctgacatccaccggagactcagctttgttgtcactcatcggtgatga

SEQ ID NO: 25469 - DNA, 247 bp, Glycine max
  Clone ID: 700906112H1
tttcgttattctcttattcatccttctcttctgaataatccatatctctttctgcccttttctccgtcacgcttttcgtgaccggatctgtatggatttgatccagatctacacgccgatggtggttttggccgtgtctttcatagatctggtgcgtagaggctcagatctacggtaccgaggtacaacagataatcgatgacaagaacgcagatccgacggtagatccagccgattccgcttgttc

SEQ ID NO: 25470 - DNA, 248 bp, Glycine max
  Clone ID: 700906113H1
tcgtgatccagggttgcaacatcgtcccagaagccgaacttttccctacaaggttccaagtgaagtcataccttgtagggccatggacgcaattctcaaggacggttgtgatggaatccaccgtgggtgacttccttcaccccgaaggatggtgcccatgggccggtgaacacttcgaagacaccttgtactatgctgaatacaacaacgatggacctggtgccaacgttaacggaaggatcaagtgg

SEQ ID NO: 25471 - DNA, 250 bp, Glycine max
  Clone ID: 700906114H1
ttctctttcaacgcattccaaccctgtggcgctataccctcctagatctactctctaaccgcttcacaggctgggactaagagcagtggttagtcatacatggcactcttggcttcgcgagcaatgtcgaagggtgtggtggtatcagtgcctgttcttgttctatctgctttagtggccactgttttcctgttcttccttttgtcctctctttcatcctgctcctgccctactccttcagaaatatctg

SEQ ID NO: 25472 - DNA, 251 bp, Glycine max
  Clone ID: 700906115H1
ctcacttgccttatttttggttttgagattgagctaaaggccaactcaaccatcgaatttgttggtgattgaaagagaaggaagaagaagcaggaaatggaagcagtgagagctggtcgagaaggagcaataggtctaggtcaaggtgatggcgtagcaaggacagcactgagactgaactcaccaaaatccgtctcctcagggcaattgttgaaacccgtgatccctcttccaaggtaaaccacactatt

SEQ ID NO: 25473 - DNA, 141 bp, Glycine max
  Clone ID: 700906116H1
ctgcccccctttttttaagttgtgttattttataaggggaaaagggcaagaggatgtaaatttttactttttctggttgagaacgttggatgcattaatgttaaaactttgtaattgttccatctggtccatggccagcgt

SEQ ID NO: 25474 - DNA, 75 bp, Glycine max
  Clone ID: 700906117H1
gctagccagaaaacagaacttggtgctgaggtgttgaatgattactgggtgtctgtcacttcaggaagtgaggat

SEQ ID NO: 25475 - DNA, 245 bp, Glycine max
  Clone ID: 700906121H1
ctcagataccaaaatggctatcaccgggtgcacaaaatatgataaggagaattcttgatcctaaccccgaaacacggataacaatggctgggattaaagaagacccatggttcaagaagggttatattccagcaaatcctgaggatgaggatgtacatgttgacaatgaagccttttcctcccatgaagaaccaaatgaagcagaacagaggaattcaggatcaccaaccctaatccgtgcattt

SEQ ID NO: 25476 - DNA, 243 bp, Glycine max
  Clone ID: 700906122H1
aaacttgatatcttgaattaccagaccatgcatgcattaggtctgcttcaactaaaagaccctctaaaattaatttcatttccaaaatccgcaatccaaggtgcaaagcctgtaatctctcagaacttgtggccacgcaaagcttcaaagaactcatcagatccattggtaaagcttgttcatgaactgcagagagatttggaattagtatatgttgggcaagtttgcctctcttgggaaatc

SEQ ID NO: 25477 - DNA, 243 bp, Glycine max
  Clone ID: 700906123H1
acagcgcaacaagcagtgtttcatcaccatagtcttatttaaaaaagactacaactttccccttccttaatccttacgcacaatgattggctatttgacttgttcacttcatggttttcgctaagtttgtcttctacttccgtgttagtgtcacaaaaatttgaaaaaataggttatgtatggaacgtgaaacaattttacaataaaatctcattataaactgccattatattagtttaacca

SEQ ID NO: 25478 - DNA, 246 bp, Glycine max
  Clone ID: 700906125H1
gtctcacacacccttctactctcgaaacccccaagatctcttttggtgctaaggatgttgatgtgacggaatggaaaggggccattctggcagtgggtgttacggaaaaagatttggctagagatgctaactcgaagtttgagaatgtgattttgagcaagattgactcaaagttgggtggtttattagctgaagcctcttctgaagaggatttctctggcaaagttggtcagtcaactgttctta

SEQ ID NO: 25479 - DNA, 244 bp, Glycine max
  Clone ID: 700906126H1
ggtttgtgcagcatcttcaatgtgtacctgcatgtgtctcttcaatcctgaagattctctctaacaaactattattttctgaaaatcaagtatgcggctgaagttcatcgatttatggtttccatcacatactctcaactgtggttgacagagacaccactgggaatgccaaaaaaatgtgccttcttggttgcagctttgtggttgagattcataaggtgatacctttgctattgattcccca

SEQ ID NO: 25480 - DNA, 245 bp, Glycine max
  Clone ID: 700906127H1
agctagcaaagaagacccttggatagatacaaagatgttttttttaagggccaatttgtttacttcagttacatactatcaaagttagagaacgaaggaacttttgtactttctctggcgtgtgtgtgtgtgcctgtctcacaccacaaacactgaaagtacaatcttcttgtggttacaaaaactctgaaaaacacacacacacacacacttcttatgcctatggctggtgagcaaggtgatag

SEQ ID NO: 25481 - DNA, 244 bp, Glycine max
  Clone ID: 700906128H1
gagaatccaacggagacaattgtcaataatttgacggaatatttgaagaagaagggtttgtcaaaaggtttagttattgggagctgcagcattcttgagactgctggtcaaggagcactcattcccctctacaagacattgcagtctgccattacttccaaggaatcggaatcttcaagctccaataaaattatatggctgcattttggggttaacagtggtgcaacaaggtttgctatagagc

SEQ ID NO: 25482 - DNA, 120 bp, Glycine max
  Clone ID: 700906133H1
cttgattgttgcatgatgtcttgtataagcaaagtcatgtcaagatgggaagacccccctttttcaaccgctttctttgccatctcacagagtttggttgccctttctcttctctctttg

SEQ ID NO: 25483 - DNA, 250 bp, Glycine max
  Clone ID: 700906134H1
catttttccttccctccaaaatggaagagaaactacagtacccctgtctctcttccttgttaaccctcttcctctgcatctccgccacttccactaacccacacaacccccaaacccaaacccttctcctccataccctccctgacccacccacactctcatggcccgaatccgccaccgtagaacccgacccggaacccaccacatccctctcccttcaccacatagacgcactctccttcaacaaaac

SEQ ID NO: 25484 - DNA, 244 bp, Glycine max
  Clone ID: 700906136H1
gaagggtcaaaagaacccccatcggggagtgaaatagaacatgaaaccgtaagctcccaagcagtgggaggaggctcgggactctgaccgcgtgcctgttgaagaatgagccggcgactcataggcagtggcttggttaagggaaaccaccggagccgtagcgaaagcgagtcttcacagggcaattgtcactgcttatggacccgaacctgggtgatctatccatgaccaggatgaagcttgg

SEQ ID NO: 25485 - DNA, 242 bp, Glycine max
  Clone ID: 700906137H1
gaggccgctcgtcaccctgatgccaccactgtagttacaggcatagttggttgtgcaggattaaagccaacagttgcagcaattgaagcagggaaagacatagcattggccaacaaagagacaatgattgcgggagccccttttgttcttcctcttgctcacaaacataacataaaaattcttcccgctgattcggaacattctgcaatttttcagtctatccaggggttgccactgggtgc

SEQ ID NO: 25486 - DNA, 209 bp, Glycine max
  Clone ID: 700906138H1
cacattttcactcctcacgcacaactcaccacgcacaatactccattccttatggtctctattgctccattctgattttttgtttgttggcactcaaagggccacaccctcatcttgtggttctccttcctccactcccttcagtctctatcactgtgatacatatatgattcaccttcactcactataattcttcgttcctgttcccc

SEQ ID NO: 25487 - DNA, 244 bp, Glycine max
  Clone ID: 700906139H1
accaaagctctctcatatctcatacagactacagtaatattttatttgcactactactactactttatttaagcagaagcaggcgagtgaggaagagcgaagagtgaagagaatggctcccaagggtttaacctttctggctgtgttaatatgcgtttcagcactgtcactgagtccttctgttgcgggggaagggcaaaataatggccttgttatgaacttctacaaggaatcatgccctcag

SEQ ID NO: 25488 - DNA, 267 bp, Glycine max
  Clone ID: 700906094H1
gttcttaacctttcaatccattcggctgaggttaccttccccttggccataatcacccaaaaaataaaaataaagaaaagaaaagaaaaaagaaccttcatggcaaaaatgcataatttcttccttttaacgtgtttgatagtcatcatacctaccttgcatgccaatgtcaaggaggatgaaatatattggaagaggcaaagtcaaatacttaatgattcatattggaagcaaaaagcatcagttgcagaaaaagagaacaaacaa

SEQ ID NO: 25489 - DNA, 243 bp, Glycine max
  Clone ID: 700906140H1
tatcaatcaaatgaatggtgccaattctgtttcagaagatgaaaatgaggatcttcttgctgactttattgatgaagatagtcaattaccaagtcgaagttctaaaccccatcattcaagagctctctcttcacatgttaatgacgaagagaatacaacacaaactggatcttctctctgtctattaaagtctatggataaatatgcaaggcttatgcagaaattggaagtggtaaatgttga

SEQ ID NO: 25490 - DNA, 241 bp, Glycine max
  Clone ID: 700906142H1
ctctctctccaaagcaaacagaaacagctacaatcacatgactcgtgccttgagatatttaggcgagcgaaactcgtccaccgactccgctgtcgtcgattccgacttcgtcgtcatcctcgccgccctcctctgcgctctcatctgcgttctcggcctcgtcgccgtcgcccgctgcggctgtctccgccgcctccgcctctcctcctctgcaaccactccccagtctcctacctccgcc

SEQ ID NO: 25491 - DNA, 242 bp, Glycine max
  Clone ID: 700906143H1
gggaaatcgacgcttcactcaggtcgcaaccagcgaagatgaggacgaagcaccgccgcctcctcctcctcccaagcagcaatcgtcggtcagtgcccccgaagagaaccgttcgaagcagcagcagcgcaagaggaagagaatgaagcttcaagaagaagaggaagaggaagaggagaaagaggaagagaagaagaagaagaagagaaagatcaaagacaagcaagaagagagatcgaacg

SEQ ID NO: 25492 - DNA, 265 bp, Glycine max
  Clone ID: 700906065H1
gtgaatacgaattcaacagaaggaatctatgggtattggttgctatccaaaacgttgagtgatgcagtgggtgaggctgtgaaagctggcaccaagaagtttgcaacgaaaaacgctaccgtttttgggtctcaaagagtgcatactcttgttcagtgcacgccagatctatcaagcgaagattgcagtaagtgtttgggtgatattatgagagatattcctttgtgttgtctcggaaggagaggtggaatggttctatttccaa

SEQ ID NO: 25493 - DNA, 262 bp, Glycine max
  Clone ID: 700906066H1
cgaatatcttgttgtttggagcgatccgagaaaaactctgtaaacatgttggtttaccaggacctccttacaggtgatgagcttctctctgactccttccgttacaaggaaattgagaatggaatgctgtgggaagttgaggggaagtgggttgttaaaggagcagttgatgtagacattggtgcaaacccttctgctgagggtggaggagaagatgagggagttgatgatgcagctgttaaggttgttgacattgttgaca

SEQ ID NO: 25494 - DNA, 260 bp, Glycine max
  Clone ID: 700906067H1
gagctctagggttttcttcttgctcccgttcttcttgctctcccagggcggacaatggatttgtccaaggtcggcgaaaaaatcttgagctccgttaggtccgccagatctctcggattgctccctcccgtttctgatcgccccgaggttccagctcgagctgctgagacagctgctgtagctcgtgctcttgcagggttacctcctcatcagagatacagtctttcttcaagttcagaagaactaagttcaatatatgg

SEQ ID NO: 25495 - DNA, 260 bp, Glycine max
  Clone ID: 700906068H1
cattttcttcgtagccaaacactctgaaattctcagttatgtcgtggcaagcgtatgtggatgatcacctactgtgtgaaatcgaaggtaaccacctcactcacgccgctatcatcggccaagacggaagcgtttgggctcagagcaccaacttccctcagttcaaacctgaggaaataactgccatcaataatgactttaatgagcctggatcacttgctccactggattgtatatcggtggcaccaaatacatggtca

SEQ ID NO: 25496 - DNA, 257 bp, Glycine max
  Clone ID: 700906070H1
cacagaaaaaatgggttcttcttcttctatgtggacggtgtgtgtgattttggcatcactggcctctgcagcactctgtgccaacccacgcaggccagtggatgtacaatttggccgaaactacgtgcccacatgggcctttgatcacatcaaatatttcaatggtggttctgacattcagcttcatcttgacaagtacactggtactggcttccagtccaaagggtcttacttgtttggtcacttcagcatgtaca

SEQ ID NO: 25497 - DNA, 258 bp, Glycine max
  Clone ID: 700906071H1
ggttcttcggtgagagttagagagagagaagaaggcttttttcttcttttttttttcttttttgttggtttctcttgttcttttttgtaggtactgaggaagaaagaccaagactttatccgtgtgcttcacttagctcaagagcgtacaattcaggcaaaggccttgaagtcggagtgtgttaaggtttcttaggagttgctgctgtcttgactgaagaaatggaggtataagcttagctgctcagggtctaatata

SEQ ID NO: 25498 - DNA, 260 bp, Glycine max
  Clone ID: 700906072H1
gtttagcaataaccaaaccctctctactcttttttcttctccttctcttcgctagggttttagcttcttcctcttcacttcgttcttcttcgcctctacaatgagcttcgactaggacacattcaacgtcgccgatctcacttctgctctcaacgaggactatagagcagaccttgtcaatgctcttaagagcaagatacagagtttggctggacaacactcggatattctagagtctctgtcgcccaatgtccgaaagc

SEQ ID NO: 25499 - DNA, 259 bp, Glycine max
  Clone ID: 700906073H1
ggatgatcagagattctgagacacattatggtttcaggactaagagtgatggtgatggcatttccatctttggtagcagcaatgtttggattgaccatgtttccatgagaaattgtagtgatggactcattgatgccatcatgggatccactgctattaccatctccaacagccatttcacagaccacaatgaggtgatgttgtttggtgccagtgacagttattctgatgataagatcatgcaaatcaccttggcatt

SEQ ID NO: 25500 - DNA, 260 bp, Glycine max
  Clone ID: 700906074H1
ctcaaaatacagaggatgattggcttgagactgagaaaaaagttatcattatccaccgtcttcatcagattcttgagcctttcatgctcaggcgtcgtgttgaagatgttgagggttcactaccaccaaaggtctctatagttttacgatgtaagatgtcagctgtccagagtgccatttatgactgggtcaaatcaactggtacccttcgtcttgatcctgagggtgagaacagtaagattcaaaagaatcctcattac

SEQ ID NO: 25501 - DNA, 261 bp, Glycine max
  Clone ID: 700906075H1
atacgcaaccggtaacactgctcacgccaccgccggaaaatcgcaaccaccgtctgccaccatcagttgattaaaatttgatggataacaataattggagacctaatcaaggcactgaagccaatatggatactagtgattggagaggtggactgccgcacgagtcacgccaaagaattgtcaacaaaataatggacacgttaaaaagacatcttcctgtttctgttcaagagggattgcatgaacttcagaagattgctc

SEQ ID NO: 25502 - DNA, 130 bp, Glycine max
  Clone ID: 700906076H1
agcaaaaccaaaggagaagagcattgtatatagaataaggaaaataaaaaatggaagggtgagtagagatagagagagcaaacgcaaacgctggttgtttcgtttttgttttgttgctgttttcctttta

SEQ ID NO: 25503 - DNA, 266 bp, Glycine max
  Clone ID: 700906077H1
tccaccccgaccagaaatcaaacatgaaacccttgagactctctgtttctgaccttccaatgttgtcatgtcactacatccaaaagggcgtgttactcaccgccccgccctcctcttttgacgacttaatactttcttttaaacacactctttctatcgcgctctctcactttcccgctctcgcgggaaggtttgagaccgattccaacggttacgttaatattgtatgcaacgacgctggcgttgatattattcatgctaaagca

SEQ ID NO: 25504 - DNA, 260 bp, Glycine max
  Clone ID: 700906078H1
cacagagaaagagacttaaaaaaaaacgggatttgttttgctgggttgggttgtgtgaattgtgaaatgcgggtgacggagttgcaacgtgccacggcggtgtaagatcttccggcggcaacgagcatttcttcggcgagatgggttcggggcagattggcggcggcggaaacggtggtggttgttctaacggcgggagttgttgtgatatgagtgtgaagtgttcgtgtaggtggagattggagaaccaacaatactac

SEQ ID NO: 25505 - DNA, 265 bp, Glycine max
  Clone ID: 700906079H1
cacctagacaattggctcagaagaaaagaaaagcaaccaaaaatggttctcacatccactgccacacacccagatgaagaagaccagagcctaaactatacttttgcttccagatatgtgcgtgaacctattccaaagttcaagatgccggagaaatccataccaaaagatgctgcttatcagataataaacgatgagttgatgttggatggtgcaccaaggctcaacttggcctcgtttgtgcaaacttggatggagcctgagt

SEQ ID NO: 25506 - DNA, 269 bp, Glycine max
  Clone ID: 700906080H1
ggcaaactcaccacgtacaaccccagctgcaacatcaccatcttccggcacgccactggcggtaacactaccaccaacagtggtggcgtccccttccaccacaagtacaccgggaactacatcgcagccacctgcaattgtagctcccaaacccgcacctgtgacaccaccagctccaaaagttgcacaggcttcaagcccaaaagccccaccaccccaaactccacaaccacaaccaccaaaagtatcaccagttgtaactcccacat

SEQ ID NO: 25507 - DNA, 264 bp, Glycine max
  Clone ID: 700906081H1
gttggattctttttggtttctttctttcccatgtatatctttgtttttttcatttgattttagtttttcccccagacaccagccatggctcttcctctgaaaccttcttgagccaaaggctgtatcaagctcagaacaatcatcagtcagggtgacatattctgaaggtagtttgatctttgaagaaagtaccttattcttgagaattcttaagattatggaagcttcttcaggtgttgattatgctgacacaaacatgagcat

SEQ ID NO: 25508 - DNA, 101 bp, Glycine max
  Clone ID: 700906082H1
gcttcactttccctctctctctccacaccaacaacactagtatcactctccttcacatcatcctccatcttcttctcttcacaccaattccacacaacata

SEQ ID NO: 25509 - DNA, 259 bp, Glycine max
  Clone ID: 700906083H1
gcaatggaagcaatcacagagggagtgaacaacatcaacatctccgattcttacaagaagaatcgcattcaggtctccaacaccaaaaagcccctcttcttctacgtcaatctcgccaagaggtatatgcaacagcataatgaagttgagctctcagcactaggaatggctattgctacggtggttactgttgctgaaatcttgaaaaacaatgagcttgctgttgaaaagaaaatcacaacatcaacagttgacatca

SEQ ID NO: 25510 - DNA, 259 bp, Glycine max
  Clone ID: 700906084H1
acaacacatgggtgtgtagtagaattgcagtgaaattggaaaaatactcaaacatggagcgctatgatgacctcaaagatattggttcaggaaattttgctgtggccaagcttgttagagacaactacaccaatgagctttttgctgtcaagtttattgagagaggccagaagattgatgagcatgtccagagggaaatcatgaaccacagatcattgaagcaccccaacattattagattcgaagaggtcctgttgac

SEQ ID NO: 25511 - DNA, 254 bp, Glycine max
  Clone ID: 700906085H1
ctcagatcgcttattccagtgctccgcggcgcacgtgtggtgcggtgtgctgtcagatgaccatggaggagaagcctctctctgagaaccaaatgctcgtgtatgtgcctcctcatccgttgatcaagcactgggtttcagttttgaggaatgagcaaactccttgtcccatcttcagaaatgcaatggctgagttgggaaggctactaatgtatgaagcttcaagagattggttgccaactgtttctggagag

SEQ ID NO: 25512 - DNA, 250 bp, Glycine max
  Clone ID: 700906087H1
gcagatgatcaaatcaaggtcccagttcatcaagattgcaactttgagccttgttttctgtgcctctgtggttggtggcaacatttctctcaggtaccttgctgtgtcattcaaccaggctgttggggcaaccacaccctttttcactgctgtttttgcctatttggccaccctcaagagagaggcctgggttacctatggtgccctggttcctgttgttgctggagttgtcattgcaagtgggggcgag

SEQ ID NO: 25513 - DNA, 258 bp, Glycine max
  Clone ID: 700906089H1
cgctctttcagctttgactttggtggaaactaaagactagtcaaaatggtgaagttcacagctgaagagctgcgtcgcattatggactataagcataatatccgtaatatgtctgtcattgctcatgttgatcacggaaaatcaaccctgactgattctcttgtggctgctgctggtattattgctcaagaagttgcaggtgatgtccgtatgactgatacccgtgcagatgaagctgagcgtggtattacaatcaag

SEQ ID NO: 25514 - DNA, 258 bp, Glycine max
  Clone ID: 700906090H1
ctcttcttctcttgcggctagggttttagcgcagttcttctagatttaaggaagatgggtaaggaaaaggttcacatcagtattgtggtcattggccatgtcgactctgggaaatccactaccactggtcacctgatttacaagcttggaggcattgacaagcgtgttattgagaggtttgagaaggaagctgctgagatgaacaagaggtctttcaagtatgcctgggtgctggacaaacttaaggctgagcgtgaa

SEQ ID NO: 25515 - DNA, 258 bp, Glycine max
  Clone ID: 700906093H1
aagaaaaagaaaactagtaatatggcttcaagaactatatgttttaccattcaagtgactcttgtagtagcttttctaacaacaaaggttgttttatctgatgacactgtgccaattcccgcgaacaaagcacaattaggtgaatggtataatactaatgtggggcctttagatcaaagaaagagcaccgtggacccagcattggtgactgctgaagaaggcgctaaggttgtaaaggtgatgcaagatggcagtggg

SEQ ID NO: 25516 - DNA, 257 bp, Glycine max
  Clone ID: 700906063H1
ggctggtggttatgctgctgggttcactggactcacagacatggctggtggttatgctgcatggacacaaaatggacttccaacagaactatgaagtgtttcttttggaactgcagctgtaaatagaataagttttgggaggagtcccatgcatgcaaatgcagaagcacttcaccaagacagtgacaatctgatactggaacatgtaaatgcagaaagagcggggggggcagtctcgcagatttcttatgcagact

SEQ ID NO: 25517 - DNA, 273 bp, Glycine max
  Clone ID: 700906029H1
ccagagtagagtagtgcggaagaaaagaaaaacgaaatccctcgctttgagaaatgggtgtattactcttccggtgggttctgccactgactctgttgctcacttgcgcgttaggtttccaatcggacgagcttctcctcgacgaccaagagttcggcatcgagggaggacgagcctccttcgattccgattcgcacccatctcccacctccaccttgaggaagagcttttctgactcctcctccgactccaagatccacttccctctccaac

SEQ ID NO: 25518 - DNA, 270 bp, Glycine max
  Clone ID: 700906030H1
cacgggtgcggacaacggcgttgcgtataatacagttacggattccgggtcaagttcaggatccggaggagaaacaatgctcgcagatgggtcatatttagctggtttagccatgggagactcccctgaaagaacagtttccatcgcgtttgtttactctgctagctttttgcttattctcttcctgctttagctgcaccagcattgtttgttaaatgtgtaaatggctcttagattttcgggtttttcgtgggtgggttcaagaatttg

SEQ ID NO: 25519 - DNA, 274 bp, Glycine max
  Clone ID: 700906031H1
atgaaagcgaaacctagctatcatcatcatcacagaagaacaacaacagaggaaaaaagaaaaagaaaaatgttagaggtgaagagaatcggtgtggtggggagtggccaaatgggatcgggaatagcccaagtcgctgccatgcacggcatcgacgtttggcttcacgacctcgaccctcaagctctctccaaagcctcctcttccatctcttcctccatcaaccgtttcgtttccaaaaaccacatctctcaggttgcgggtgctgatgctt

SEQ ID NO: 25520 - DNA, 275 bp, Glycine max
  Clone ID: 700906033H1
ccactactctgttcctcagattcaacaccaccttgcgtggcgccaatgggaaaagccttcgacatcggagccgttccgttcaacgccgacgggtggggtccgccggacaacgcgacctcaggcagcaacaacaacaacctccctctgaacgtccccttcgcccccttctcccgctccgacaaattgggccgcatcgccgattggacccgcaacttcaacaatccgacccgctccaagaaccccgccgatgccgtcttcgacttcgccaacgacga

SEQ ID NO: 25521 - DNA, 273 bp, Glycine max
  Clone ID: 700906034H1
tctcgagccgaatcggctcgagaccctcccccaaagccctcagcacttgtctcaacctctaccttgattcgaatcgcgtagatttagcgcgaaaattgcttctacacgccaaacgggatttaactcgtaagccaaatgtgtgtgtgtttaatatcttggttaagtaccattgcaaaaatggggatcttgattctgcttttgagattgtagaagaagcgagaaactctgagttttcttaccctaatttagttacttactcgacccttatggacg

SEQ ID NO: 25522 - DNA, 77 bp, Glycine max
  Clone ID: 700906035H1
gttttcttgtttttattgtgtctctcaatgagagattgtaatggaaaaggatcatcaaagtctgtccaaggaacata

SEQ ID NO: 25523 - DNA, 266 bp, Glycine max
  Clone ID: 700906037H1
atcactgtatgctcattgtataggttacatggttggtaccgcaactttatctcacagattaggtggcctttactgcttctactgtctttatgagactcaaccatttaatccttcttttaaggtctatctatcccttggagaattaaagaaacttagaatccttgttgctgatgcaaaagcaaatgatattaaagtagcacttgctttagtaaaaagaatgcttgaaagaaacacattcctttttggctctgttgacttgatggaag

SEQ ID NO: 25524 - DNA, 267 bp, Glycine max
  Clone ID: 700906038H1
gtaaaaccaatcacaaagtttccatgggaatcacgaaccactcccccagcactaacctttaaggagttgcaattcacagccccatcatagttcaacttaaacaaaccttcaggaggcggactccacctaattccatttggataagacgtgatctcttccatgagacgaagaataaccatcaaggctccatcgctctatccaaactattcattaagaaatgaacctgctatactacaccattggctgctaaccaatttttattaaaaa

SEQ ID NO: 25525 - DNA, 264 bp, Glycine max
  Clone ID: 700906039H1
atcatgatcagtgtgaagcaattagagaagccagaatactgggctccattggatccaggaagaagagcagtgatagtcatctccaggcaaccaagcagcttgaacatgagcttatcaattggacattccaattctctggctggataagtgcccagaaaggttatgttagagcattgaataattggctgttgaaatgtctcctgtatgaacctgaagaaactccggatggcatagtccccttttcccctggtaggattggggctc

SEQ ID NO: 25526 - DNA, 81 bp, Glycine max
  Clone ID: 700906040H1
agaccttaaagtaccaaacttccaactcttctctcttctctcttcactcttcactcttgtcgtcatttccacacaacatac

SEQ ID NO: 25527 - DNA, 267 bp, Glycine max
  Clone ID: 700906041H1
cttcaagaacctcataaaaccctttctctctctctctctctagatctgttcaaatccgaaaccatttccgctctaatttccaagagcaaaccctaatccgctctctctgtatgatactagatttcccctcctcaaaggcgtagttttgtgtcgatttgtaaattcattcggtagtttaggttagaatttttgtgtcaagtttttagggttttgaatcggtgagatgaatcacaacaacagcaacaacaatagagcgaggtaccctcc

SEQ ID NO: 25528 - DNA, 266 bp, Glycine max
  Clone ID: 700906042H1
gccaaggagaaaagaaaaaaaaaaagaactggactccttcaattagtgcattgtttcttttcttcaaatggtagcaagaagacattgttaatttgagagatggcgagttacgaggctattaagaactttgatgatgatgatgatgatgatgatgatgtggagatggcactcccccatagccagatctctgaatcaagatctgccactgtttcttcccccattggccaaactaccccgcttcacattcacaacattattgaggaaca

SEQ ID NO: 25529 - DNA, 266 bp, Glycine max
  Clone ID: 700906043H1
ctatttccgaagtggctgaaccagtgcaactattgcatctaagacaagaactttttgtcgaactggtacaagtcctgaaggatcaaatttcacagaagacatcaaaggcgacccttcaaaccctgatccaattctctccttgggggaggaacaggatcagagctgtggaagcagctgctgttcctgttttgattgagcttcttctcgattgcaaggagagaaagccttgtgagatgatgctggtgttgttggagctgctatgccag

SEQ ID NO: 25530 - DNA, 268 bp, Glycine max
  Clone ID: 700906044H1
cagcaatgggtggggagcgcaacaaggttttcactttggccgaggtctctcagcacaacaatgccaaagactgttggcttgtcattcatggcaaggtttataatgtaacaaagtttttggaagatcaccctggtggggatgaggtcctgttgtcttccacagggaaagatgcaaccaatgattttgaggatattggtcacagcaccagtgccgtagccatgatggatgagttctatgttggagacattgatacatcaaccatccccag

SEQ ID NO: 25531 - DNA, 88 bp, Glycine max
  Clone ID: 700906045H1
atctggattgagcggggaagtggaacaaagacgaggaggatcagcgcgcgtggaggctatacgtaggctacaatgagctccacgcgct

SEQ ID NO: 25532 - DNA, 267 bp, Glycine max
  Clone ID: 700906046H1
cggagtgctgattccaatcctggccgttcatcacgatcaagcgatatgggggaaggatgcgaacgagttcaatccggggcggttcagagaaggggtgtcaagagcgggcaagcatccattgggcttcataccgtttggagtaggtgtgcggacatgcatcggacaaaacctggcgctgctacaaaccaaactcgcccttgcaatcatactccagcgttttactttctgcttggcccctacttatcagcacgccccaaccgtcctcat

SEQ ID NO: 25533 - DNA, 251 bp, Glycine max
  Clone ID: 700906047H1
tcttaacacaattaacaaagatatatcatatcatatcaactccaaatgatgaaaaatattgggttgtttcttcttgtggtggtggctacttttgtggtggcagccacagctggtagcttttaccaagactttgaaataacatggggtggtgaccgtgccaaaatctatgaaaatggaaatcttctaaccttctccctagaaagagcttctggtcctggcttcggttccaaaaaggattacttgtccggaaa

SEQ ID NO: 25534 - DNA, 280 bp, Glycine max
  Clone ID: 700906050H1
ctcttattcatccttctcttctgaataatccagatctctttctgcccttttctccgtcacgcttttcgtgaccggatctgtatggatttgatccagatctacacgccgatggtggttttggcccggtctttcatagatctggtgcgtagaggctcagatctacggtaccgaggtacaacagagaatcgatgacaagaacgcagatccgacggtagatccagccgattccgcttgttcgatcgctacagacccctgtatcggatcattaagcagcgtgtct

SEQ ID NO: 25535 - DNA, 265 bp, Glycine max
  Clone ID: 700906051H1
ctgaaatctgaagctaacttaagggaaatgagatggccaatggcaacactagtcatcgcttcaagctcttgcttttccttctaactctgcactcttcattcgctgagattttcttcgaagagagattcgaagatggatggaagagccgttgggtgctatccgattggaaaaggagtgaaggaaaagcgggtaccttcaagcacacagcaggaaaatggtctggggatcctgatgacaaaggtcttcagacatataatgacgccaa

SEQ ID NO: 25536 - DNA, 263 bp, Glycine max
  Clone ID: 700906052H1
gcactctgttcttatttccgatcatgagggcgcacaagaagggtgttaccgtggggatcactgttgctgcttcttaagcctttttcttttcttatgtgggttccccccttcccctttcggttttctgcactttagagagactaccagacatggctggcagtaaccaggtcaatctcaatgaatctaggagtgttgttccgttaaatacatgggtgcttatttccaatttcaagctgtcttacaagcttctcagacgtgacgat

SEQ ID NO: 25537 - DNA, 262 bp, Glycine max
  Clone ID: 700906054H1
aatttgcatgctcttcatctcatctgggaacccttcattttgaatctccattttatggatcgtcacagtcagatactctaaactcttgtatttccaagacgcagattgatttcacgacgtcgtaccggcggccacttcgctctctcttctttctcatcggaatttgcctaacgcaaggattcagaacactgatatgagacttgaatcgggaacttgcaatgtgtgctcagctccttgttcatcttgcatgcatcttaaccat

SEQ ID NO: 25538 - DNA, 256 bp, Glycine max
  Clone ID: 700906055H1
agcatattgatgctcttactgacaggattggaaggaatgttgtccttgaacttgttagcactgagattgatccaaagaccaaatctgcaaagaaaagtaatgaagcagtgctgaaggattggtcaaagaagtccaatcttaaggcagagagagttaattacacggctgaattcataattgactctagttttggggagccaggagctattactgtgacaaacaaacaccagaaagagttcttcttggatagcataac

SEQ ID NO: 25539 - DNA, 94 bp, Glycine max
  Clone ID: 700906056H1
ctcgagcgatatctgaaacaagctattgtagacaagaatccagtcgttgcaagtgcagccctggttagcggcattcatatactccacacaacat

SEQ ID NO: 25540 - DNA, 260 bp, Glycine max
  Clone ID: 700906057H1
ggggacttgattcagccagatggttatattccatggaacccaattgaaccaaacacacaggattgctacttcgctgagtttggcaacactggaccaggttccgttgctcaagcaagagccaagtttggcaaaggtctcattagcaagcaggaggctgcacaattcactgctgagccttggctccaagctagcacttggttgcctgctgctggcgttcctttcgatgctagcttcaccaaagcttaaggatccgagacaaa

SEQ ID NO: 25541 - DNA, 79 bp, Glycine max
  Clone ID: 700906059H1
atcccttttcagctttcattggtgtggcctagctgttttctcaatgagaaagccttcatctccgagaagcgcacttttg

SEQ ID NO: 25542 - DNA, 196 bp, Glycine max
  Clone ID: 700906028H1
cagggaagactctaatcttggaggaggaaagggtggatgcttgatttgctagttttggttttatggatgttttagagacattgttatttacctttgttggttctgtgctttacttttggttttgatagacggtggtatgtctctgtatggattttgattgtttcaagttttaatttaattgactgtagttttgaat

SEQ ID NO: 25543 - DNA, 268 bp, Glycine max
  Clone ID: 700906061H1
aatttgtgcaaacacaatacacagatggatcagttcaaaggacagcctcgccttccgaaattcgtcgttccgaaacgctatgacatcaggctcaagcccgacctcgtcgcgcaccgttttgcaggttccgtcgccgtcaacctcgacatcgtcgccgccacctctttcatcgttctcaatgccgccgaactcgacgctcgcaacgacgccgtttcattcaccaaccaagattcctccaaggttattaaaccttctcgagttgagttgt

SEQ ID NO: 25544 - DNA, 239 bp, Glycine max
  Clone ID: 700905993H1
attaactagtactcgagtgttggagggttcatttctcggataggaagtggatgtgagagtgacgaggagagccaccaagcagatttgtttcaggttgccaactattagctcactttcatagtgatagaagaaaattggtggattggaactaaacattgtttctgttggaaagacaaatacccactgatctgtctttattcgcttctgagatggaagaagagagccaaataacaaaggat

SEQ ID NO: 25545 - DNA, 239 bp, Glycine max
  Clone ID: 700905994H1
ctttgttttccgtggaaaccaacctatcttcctttgttattttcattctgataaaacaaacatattttcttccacctttttccatctttgcaaaggggataaagggttgctagttgctaccatttatggttttattccgccatttgaaggaaccttatgctcttaaaacaaataaaacccaaagggttctcttgaaaaacaccagaactttcatctaatcaaaacacgtgttgccaaaa

SEQ ID NO: 25546 - DNA, 240 bp, Glycine max
  Clone ID: 700905995H1
cctaattttatgtcaatttctattgcccaaagctctcgtaccctcactctaaaactctcgctattgtgaactttgttgctgcgtttgccactctgtcgttcccctctccgtgatggcaccttgtgtgacaaggtcttttgcttccttctcatgagaaatgcaaaatgggatctgagatttgaggggttttaatctgtttaaagatataagaagtgcaaaatgagatttgagactgagatc

SEQ ID NO: 25547 - DNA, 176 bp, Glycine max
  Clone ID: 700905996H1
cgcagagtagagcagcagagaagagagaaaacggcactgcagccgtagaaggaaaaccgaccatggtgcacgtctccttttacaggaactatggttagacgtttaagaagccccgccgtctgtacgagaaggagcgtctagacgcggactgaagctggtgggggattacgggctgc

SEQ ID NO: 25548 - DNA, 190 bp, Glycine max
  Clone ID: 700906002H1
tgccaatttcaacggcgaactccctcattcctccgctgctatctccgttcgacgctctatctgattagcggatagcgaaaatcctaagcaaaatattataccgtgttctttagcgtgacccaccttcgtaaataaaaaccctatgcaactgcactattctcgtgttcgctttaaatcaaaccgctcattc

SEQ ID NO: 25549 - DNA, 277 bp, Glycine max
  Clone ID: 700906003H1
aagagaaagaaatttgtttctctctaaagagtctccgctgaactttttggtttattgaagatgtcgttactctccgatcttatcaaccttaacctctccgacatcaccgataaggtgatcgagccgagtacatatgggttggtggatctggcatggatatgaggagcaaagcaaggactctctcgggactggttaatgacccttccaagcttcccaagtggaactatgatggttccagcactggtcaagctcctggacaagatagtgaagtgatctt

SEQ ID NO: 25550 - DNA, 274 bp, Glycine max
  Clone ID: 700906004H1
gaatgatgttggtaaaaacagggcagcagcttctgttagtaagctgcaggagctcaacaatgcagtgattgtacaaagcttgactactcagctgactaaagaacacctttccaatttccaagctgttgtttttactgatatcagtcttgagaaagcctttgagttcaatgattactgccacagtcatcagcctcctattgcctttattaaaactgaagttagaggcctttttggttctgtgttctgtgattttgggcctgagtttactgttgtt

SEQ ID NO: 25551 - DNA, 273 bp, Glycine max
  Clone ID: 700906005H1
ctctcctcctcgatcccaattccactagggattcaatttcgatgcgattccgagcttgttagatccacgacaacgtttagacaaccagattcttttgtaaaaaaaaataatcttcctttgcccaacaggtaagttggaaaaaaatggaccatgacaagactgggtgccaagctcctcctgaaggaagtatattgtgcatcaacaactgtggattttttggaagtgcagctaccatgaatatgtgttctaaatgccacaaagacatgttgctga

SEQ ID NO: 25552 - DNA, 272 bp, Glycine max
  Clone ID: 700906006H1
gtttgttttgagtatttgtttgaatcaagaaacgatgtcactgttatgccatgtggacatacgatccataagagctgcctgaatgaaatgagagaacatttccagtatgcatgccctctctgctcaaagtcagtctgtgacatgtcaaaggtttgggagaaatttgaccttgagattgctgctacacgaatgcctgagcaatatcaaaataaaatggtttggatcctgtgcaatgactgtggtaaaacttctcacgttcagttccattttgt

SEQ ID NO: 25553 - DNA, 270 bp, Glycine max
  Clone ID: 700906008H1
ccgagacacagattcttaccaaataaacaaacaaaaaaacacacacacacacactttccattttctgtggttcttcttctcacttctctcttcttctcccccctctgttactccccgcttctctgaatccctttctgttaatcatctgtctttcacctcgtgattccaaaaagattcaaactttgaaaatttttctcgaaagccaggtgttttcagaatcgagatccagtttctttttatccttttgttaagaaattattattttctttc

SEQ ID NO: 25554 - DNA, 271 bp, Glycine max
  Clone ID: 700906009H1
cacttttaccctctccacgcataacaacactgacacatttttcacctcctcctcaaaaaaacgtttcactgacacaagcacacgggcaatgtctcactatatagagccactgatgaccacttcttcatagttcagagagcctttctccataattaagaaaaacgctgtccttttgtgtccttttttcttcctctgtcctcgcacacatgggtcgccattcctgttgtttaaagcaaaaattaaggaaaggtttatggtcccccgaagaaga

SEQ ID NO: 25555 - DNA, 271 bp, Glycine max
  Clone ID: 700906011H1
gttggtaaaaaatgtacaaacacattctagagtccgaataaaaagtatgtgtgggtgtgaactctagataactattcatttgcctagttaagaagggaggaaactgtcagatattttcttatcatttcaaattcatgtttttgttatcattggatgaaaggaattgagagcctttaggatgtatgacttaggtagtgggtacaaatagggtataatgaatacgccaataactaatcagatacatcggcaccgcactgatcacgaggatctt

SEQ ID NO: 25556 - DNA, 269 bp, Glycine max
  Clone ID: 700906012H1
atgatcttaccatatcatttcaagaccttaaagtaccaaacttccaactcttctctcttctctcttcactcttcactcttgtcgtcatttcctcacaaaaccagtgtccgtaacatctccaccttaacgatgtcggtaaaggagtgtcaccaccacaagggaaagaagcacaaactctggagacgcatcttctggggcatagtgatcttcgccttcatcgtgttgctaacagttcttataatctgggcaatcctaaagccttcaaagcc

SEQ ID NO: 25557 - DNA, 276 bp, Glycine max
  Clone ID: 700906013H1
ccaagcaactatagtctggttgcatggcctcggggataatggctccagttggtcccagctattagagacccttcctcttccaaatattaaatggatatgtccgactgctcctactcagccaatatctatatttggtggctttccgtctactgcttggtttgatgttggagatatttcagaagatgctcctgatgatctagaaggtttggatgcttcagctgcacatgttgcgaatttgctgtctacagaacctgcagacattaagcttggtgttgg

SEQ ID NO: 25558 - DNA, 276 bp, Glycine max
  Clone ID: 700906014H1
tctatactataggtctcgcccaatacctactctccgctcccaagagcacgcaccaccactattgcacttcttcctcgttctccctctttttcttcttcttcgctaaacccttttttctatctcactaacacaacaatgggagacgagaagaagggcaagcctgctgcttccggcgtgtggtccaccatcaagcctttcgtcaatggtggagcctccggcatgctcgccacctgcgtcattcaacccatcgatatgatcaaggtgaggattcaactt

SEQ ID NO: 25559 - DNA, 279 bp, Glycine max
  Clone ID: 700906015H1
gttctagatcgcgagcggccgctcgcgatctagaatagaaaaaccatggtgtcaccaatctcacttattgtcctcttgttatcagtttcttaggcagattcagcttcagttcaagaaagttttgtccaatgtctcaacttgaattcggacaaaacatttccattttactcatcaatctacactgcaagcaacccttcattcaccagcatccttgactcctccgcacagaacctaaggcttttggtgccttcagtgccaaaacccgagttcatattcaca

SEQ ID NO: 25560 - DNA, 270 bp, Glycine max
  unsure (1)..(270): unsure at all n locations
  Clone ID: 700906016H1
ggagttgcaagcatgaatgttactcttggagttcctcgtgtcaaagaaataatgaatgganacaaaaaaatcagtacaccaattatcactgctatacttgagagggatgacaatgcaaatactgcaagaattgtgaaaggtcgaatagaaaaaacaaatttaggccacgttgcaaagagtataaaagttgatatgacttcaagatcagcatcagttgttatcacccttgacatgaaaagaatccaggatgcacatctaaatatagatgct

SEQ ID NO: 25561 - DNA, 285 bp, Glycine max
  Clone ID: 700906017H1
tcggctcgagtgcatctttagctgagatggtgtgtgaggacctgccaaaggaagtgtgtgctttctcattagcttcatcagggaagaggtgtttgttggagaccgagaaggtggccgacggttgcgtcgagtaccaatgccggacgtcggaagtggtggtggagagaatggcagagtacatagagacagaccaatgtgtggaggcatgtggggttgataggaactctgttggaatttcatctgatgccttctttgagcctcaattcactggcaagctttgctctc

SEQ ID NO: 25562 - DNA, 273 bp, Glycine max
  Clone ID: 700906018H1
agacaattcaacttaagagatcaatatggccaccaccactacccagcctccctctaatatctgttttttccttctgttgttgcttctagcacactttcatttgggcataagccaacttgagctgaattactactctaaaagctgcccaaaagctgaagagatcatcaaggaacaagtcacacaactatataacaagcatggaaacactgccgtttcgtgggtcagaaatctcttccacgattgcgtggttaagtcatgcgatgcatcattact

SEQ ID NO: 25563 - DNA, 266 bp, Glycine max
  Clone ID: 700906019H1
atcattatctggaactaccagcttggtagatgcaacagcaaggcttactgctgctggaactcttgggaaagcagttttagatagatcagaatcatccatttcaaataattctgatgatgaggtgcaccgatactggcgatgtcagctcccggatgatattacccctgatttcaaggtcttgggagaagatgagtctcgagttcttgatgatatttctttagcaggtttatctatacatgatgacaatgaagcctccaggtttcctt

SEQ ID NO: 25564 - DNA, 270 bp, Glycine max
  Clone ID: 700906020H1
tagggaatcaagaaaattattataccctttaagatgaaaccgtacctacgtgcaatattcctattattccttatccttctcgaccaatccatttcggcgagtgcttttttaaatttaaatggattgctaaacattgaaaagtggccctctggcgagaaaagtttggaaatgggaaagatagggaaggagacgacagatcatatcaaagaccttttaaagaaactgattgagtcccctcccgaaccaccgaagcaaatcaatattgaagtt

SEQ ID NO: 25565 - DNA, 267 bp, Glycine max
  Clone ID: 700906021H1
gttgaaaacacaaaagataaaaaatgggttcttctctgtggacctgtctgattttgttatcacttgcttctgcttccttcgccgccaacccaagagcaccaattgatgtgccatttggcagaaactatgtgcctacctgggcctttgatcacatcaaatacctcaatggtggttctgagattcagcttcatcttgatgctgctcagtggcaaaaactctcctgggttcgccagaaatacaccatctacaactactgtgctgactgca

SEQ ID NO: 25566 - DNA, 267 bp, Glycine max
  Clone ID: 700906023H1
gagattcttcgttacatatattaccaccagaacaaagatggaggttggggactacacatagaaggtcacagtatcatgttttgcactacactcaattatatatgcatgcgaattcttggagaaggacctaatggaggtcataacaatgcttgtgctaaagcaagaaagtggattcatgatcatggtggtgcaacacatataccttcatgggggaaattttggctttcggtacttggtatagttgattggtgtggaagcaacccaatg

SEQ ID NO: 25567 - DNA, 267 bp, Glycine max
  Clone ID: 700906026H1
cgttgatgctgatacaactgataggaagattcaaaagaaggtgcgagaagcacaattagcacaatacaactacatcttggttgttggagaggaggaagctaatacaggacaggtgagtgtacgagttagagacttggcagaacataaggttatgagtattgagaagctacttgaacatttcagagacaaagctgcagctttcgaatgatactttgcatgtgaaaactgtcgaagaaaattttcagccccaaataccttagttttaca

SEQ ID NO: 25568 - DNA, 244 bp, Glycine max
  Clone ID: 700905992H1
tctcgagccgaatcggctcgagatgatgctagctctagttttatgagacaatcagttgaaggaaacgtagacaatcgcacagacagtgatgagcttagtaatacagtagccacttctcgtgattacctagcaaagttgcttttctggtgcatgttattgggtcatcacttaagagggttggaaaatagattgcatctgagctgtgttgttggactgttgtagagaaggtgataggctgtatatt

SEQ ID NO: 25569 - DNA, 247 bp, Glycine max
  Clone ID: 700905961H1
cttcttcctcctctcataccaccttcacttccatgaagccacaacatccatatcaatgacaacaacagtttccaccgatttcctccccaagttcaacccacaccccaaccgcaccaattcccattctaattcccgtacactcccaattctcaatgaaaccaccaacatcaaccgcactctctcttccgtttccaagccccaaacccataccctcgatttcaaagacacccatctcctcaatccctct

SEQ ID NO: 25570 - DNA, 246 bp, Glycine max
  Clone ID: 700905962H1
agctacaagagaagaaaaaaaaaaagagagaaaagaaaaaatttgttttataactttttaacttattgttcacttcttcttcttcttcttcttcaatatcttggttctttgatattattctattgagcaaaaaatgggagttccagagagagaccctcttgcacaattgagtttgcctcctgggtttaggttttaccccacagatgaggagcttttggttcagtacctttgccgcaagttgctggc

SEQ ID NO: 25571 - DNA, 241 bp, Glycine max
  Clone ID: 700905963H1
gagtaagtgagtgagagaaggagattctgatttgatctctcagatctgagcttaccgtcgccggaatccaactcaacctgggtcggattcttgggtatcatcgcatcgccattcgttttagcctctcaataagagattttagttcgcttcaaattcgaggtttgatttgaagttgaaagttggaatagcttaactgttgtgtaaaacaaccaacacacacgagcatgggaagccagacaac

SEQ ID NO: 25572 - DNA, 250 bp, Glycine max
  Clone ID: 700905965H1
gccgacgcctccagataaacaaccttaactttcccacaacaccacccatcattctttttctctctctagatttcatttagttgttgctgtcttcttctgtttgtgtgtgccaacacagagcgaaaaacatggctctgaaccaatcaaaagccgtgttgttgagggtgagtttggtggtggtggcgctcttcatagcagggtacatagtgggtccccctctctactggcatttcgttgaaggtttggctgc

SEQ ID NO: 25573 - DNA, 246 bp, Glycine max
  Clone ID: 700905966H1
caaaagaccactctcgacgagcttcccaaaacaagaagcaccaatggcagtcgcgaatctgcagagactgtcctcgcaagcgcaccgcctcccctccctctcgttcttctccaaatccctgatctaccgccgcacctcctcttccacgaagaaggtcgccgaccgcatcgtacggctctcggcgatcgacttcgtgggaaagaagcacgaggtggtgggcctggccggccagaccttgtgaaggcc

SEQ ID NO: 25574 - DNA, 244 bp, Glycine max
  Clone ID: 700905967H1
gttgactatgattgctcgtgttactgatggtcttcctctagctgaaggtctggatgatggtcgtgatcttaaagatgcggaattttacaaactgcaagtcaaggctttgtttaagaatctctcaagaggacattatgaagcatcaaggatgtcagttgaaactggcccttatgtttttcattatattatagaaggacgggtctgttacttgacaatgtgtgatcgtgcataccctagaaactag

SEQ ID NO: 25575 - DNA, 232 bp, Glycine max
  Clone ID: 700905969H1
agttacttactcctcacactttctctatcgttttcatctctgtttcagatctgagctctcgtatattccccagccatggccgaaaaggtcaccataatgaggctcaaggttgatcttcagtgccacaaatgctacaagaaggtcaagaagattctctgcaaattccctcaaatccgagaccaggtgtacgacgagaagaataacatcgtgaccatcgcggtggttgctgtaa

SEQ ID NO: 25576 - DNA, 244 bp, Glycine max
  Clone ID: 700905970H1
ccgaagctttgttggcggcaaggcaaatctgcattgcgatggcgcctccgaagctcttcgtctttgcgctttctgtaaccctaattttcgccatcgttggggccgaagccgatgatttccatcgaaggaagcactccagagcctgatacctccgccatcaggatccaattagatcaactcaattccaagatccaaattctcgagtctcaaatcagcgaaaagttggaagaagtgagaagaagga

SEQ ID NO: 25577 - DNA, 245 bp, Glycine max
  Clone ID: 700905971H1
gatatatatacgtggtaccctagagtgccattctgtagtttatttctgctcaccaaggcttatcacatcacaatttgtgcattgcctcgtgtcctttttcttctttgcttgccaaaaatcttacacacacaggtatctatcaaatgggttctcaccagcaagaaccatggctattggagaatgggaaaccgagggtgttgaccaaggagaataggcatggccgttctgcacacagatgtcctcca

SEQ ID NO: 25578 - DNA, 241 bp, Glycine max
  Clone ID: 700905972H1
caactgcgtcatctccggcacagtcgacttcatcttcggcacctcctccaccgtgatccagcagtccgttatcatcgtgaggaagcccctggacaaccagttcaacacagtcaccgccgacggaacatcccagaagaacatggctacaggaatcgtgatccagggttgcaacatcgtcccagaagccgaacttttccctacaaggttccaagtgaagtcataccttggaaggccaggaagc

SEQ ID NO: 25579 - DNA, 245 bp, Glycine max
  Clone ID: 700905973H1
caggtagaggcgggtttcatgagaatccatcgacctgcatatgtgaagattctgcagcagccaaagtggacaaaaattcacaatctagaaaatataggaaggataatacaacgaagaaaaatgtagcaaatgatgaaccggatgttggcaatgtgtctgagtggccagacatggatgatgatgatgatgatgatcagaatgatctagcagagaagggtacatttaatgaaacaattcggactatg

SEQ ID NO: 25580 - DNA, 245 bp, Glycine max
  Clone ID: 700905974H1
ggagctcttctccattggttcttcatctgcatgcacacacttgcatagttttggaaaccaagaatttttgaagggtagcatcaacaagaagttctggaaatggagatcaccaatgtcagcgagtatgaagctattgcaaagcagaagttgccaaagatggtgtttgactactacgcatctggtgcagaggaccagtggactctgcaggagaacagaaatgccttttccagaatttttttcggcca

SEQ ID NO: 25581 - DNA, 246 bp, Glycine max
  Clone ID: 700905975H1
cagaaatggaggctccacaaggtggatccggatccggacccgagcgagacaaatccaccgctccctcctcttgtccgatttccgtcgtctccgccttctggaaagattttgagttggagaaggagaaatctatactggatgagcaagggcttcgaattgcagagaaccaggaaagcagtcagaaaaatcgccgcaagcttgccgagaacactagagacttcaagaaggcttcgcctgaggataagt

SEQ ID NO: 25582 - DNA, 248 bp, Glycine max
  Clone ID: 700905976H1
actcaactcaatcgcctccactctctcccgcaaaccattcttcttctcttctctccctctgagcctttcatcgctcctcggagagatggctgcttccgaagaatcatcaaccactcagatggttggcaatgcttttgtgcagcagtattactccatattgcatcaagagccagaccaagtccacagattttaccaggagtctagcatcctaagtcgacctgaagaagatggtaccatgacaatggtga

SEQ ID NO: 25583 - DNA, 242 bp, Glycine max
  Clone ID: 700905977H1
gacgatccaaattatgatgccctcattgccgctttatatccagatattgagaagtactgacaagaggagcttgaatttcgtgaagaggagaagaaccgcaataagcagattcaagcttcaatagcaaaagtagttcaacggcaatctgaagcattggttaagagacgtaaagacacaccaggtgtatttgtaactagaccgcagcgtaatcagcgaaacattcattctaggagacaactcaa

SEQ ID NO: 25584 - DNA, 240 bp, Glycine max
  Clone ID: 700905979H1
ctcgagccgcttttattgaaatcctcaagcttcaatttgctttgtgctcactcatctatctattataaccaaacactcttcttcatattcttcttcttcttcttgttcttgttctatctgtgacgagcatcatggcctcgagagcagtgctattgttggctatgtgtgtgcttccggccatggttgtggccattcgcccagcaaagaaccctttttgcgtgaagggtcgcgtcactgtga

SEQ ID NO: 25585 - DNA, 244 bp, Glycine max
  Clone ID: 700905981H1
catgaagggatgatgtgacgtgttgcccgtctaccacgtggagggttttgattggatgggagagtggattccaaaagaagggcgacctcctgctttggtttcagtggattcctcgaggcggagaatgtcagggcccattttaaatactttatcaagtgccaatgtcttgggtcagtcaagtggatcatctaggcgggctgctgtttctagtagccgtgatgcatttgttggtgctagtcagata

SEQ ID NO: 25586 - DNA, 245 bp, Glycine max
  Clone ID: 700905982H1
agaccaccttccctctcttctgttaccaatggctccctcatcaaactacatttctttccttttcctcaccacccttatgtatgctcttcaaatcagtgcaagagacagccagttcttcagcaaagtcacccattttgacaaaaacagtgtcaaagagacagaacttcccaacaaagaagcaccagaagtgaacaagccagagcaacaaccacctttcattccggagactgaaaacgctatggcct

SEQ ID NO: 25587 - DNA, 243 bp, Glycine max
  Clone ID: 700905983H1
ctcagcactgccattcttcaatcacactaatggctgtcaccttctcagatcttcacaccgaagagggcatcaaatccctcgatcaattcctttctgggaaaacctatatctctggggatcaattgacaaaggatgatatcaaagtgtatgcagctgttgtggaaaagccaggagactcttttcctaatgctgctaagtggtacgatgccgtctcttctcaacttgctccaagctccctgggca

SEQ ID NO: 25588 - DNA, 242 bp, Glycine max
  Clone ID: 700905984H1
gagaaaaggaacatattagaaccagcaggtgcacttgcactagctggagctgaggcatactgcaagcatcatggggtccaggggaaagatattgtagtaataaccagtggagcaaacatgaattttgataaacttcgggttgtaactgaactcgctaacgttggccgtaaacaagaggctgtgctggcaactgttttgccagaggagccgggcagtttcaaacagttttgtgattggtgggg

SEQ ID NO: 25589 - DNA, 242 bp, Glycine max
  Clone ID: 700905986H1
atttaaagaaccttggactccccagccagaagaagaaccaacatggcacccacaatctataatttttcgtattctaaaaggttttcagagtcattcaattcttcaacatcaaaaaaggagtcatccagttccaacatccttgctttccactccatagctcaatggaatgctcattataaagccaccaaagaaactaacaagctgatggtacttgatttcacagccacatggtgggaccttgc

SEQ ID NO: 25590 - DNA, 241 bp, Glycine max
  Clone ID: 700905987H1
atttaaagaaccttggactccccagccagaagaagaaccaacatggcacccacaatctataatttttcgtattctaaaaggttttcagagtcattcaattcttcaacatcagaaaaggagtcatccagttccaacatccttgctttccactccatagctcaatggaatgctcattataaagccaccaaagatactaacaagctgatggtacttgatttcacagccacatggttggaccttg

SEQ ID NO: 25591 - DNA, 244 bp, Glycine max
  Clone ID: 700905988H1
gttcggattgcggcgacgtgagcggttcgctgcccgcgacgttgtgagaagtccactgaaccttatcatttggaggaaggagaagatggagagaaaaggaagaagaagaagaaggaaaagaaagggctgaaagagaagatcgaggagaaaatagagggtgatcatcatcatcacaaggatgaggacacaagtgtccctgttgagaaagttgaggttgttgaaacagcacatgctgaggaaaaga

SEQ ID NO: 25592 - DNA, 73 bp, Glycine max
  Clone ID: 700905989H1
atccccatcgcgtcacacagaatcgtagggtcggagtcgtgcgatacgatgcggtacgatatggctagggtat

SEQ ID NO: 25593 - DNA, 248 bp, Glycine max
  Clone ID: 700905960H1
cggaatcaagatggccttgatgattgcaaggacctcttgcaatccgctatcgagagcctccaactcagcattgacatggttcacaacaacaacttgcacgccgtgtataaccaacaggctgacttcaagaactggctcagcgctgttatctcgtaccaacaggcctgcatggagggttttgacgatcgcaaagaaggtgagaagaagatcaaggagcagtttcataccgagaccttggacaatgttca

SEQ ID NO: 25594 - DNA, 242 bp, Glycine max
  Clone ID: 700905990H1
ctccctcatcagacgctccctctccctccccttccgcaccatcgaattcacacgcaagtacccctccgtcttcgaggagttcctccccgttgcctcctctttcgcctccccccatgtccgcctcacccccgaaaccctcctcctcgactccgaggagcacctccttcacctctccgaccgcttcaaacaccatgccgccgacaggttcctcaagctcctcatgatcgccagaatcacaaaat

SEQ ID NO: 25595 - DNA, 96 bp, Glycine max
  Clone ID: 700905991H1
gatccgaggagttaccccttagctttttctctttccttattctatttcaaacttccacccgtgatggaagagagagctccagaaggaccaccattt

SEQ ID NO: 25596 - DNA, 249 bp, Glycine max
  Clone ID: 700905928H1
tcacaaccctggctttgtagccttagtcttagcagggacggcttttgtcttagatttgaagagagccagggttgtgaatgtacgacaaaagccgctcctgctaagactaaggttacaaagccaaagcaaaaggttgaagatggtatctttggcacttctggaggatttggttttactaagcagaacgagctctttgtgggtcgtgttgctatgcttggttttgcagcatcattgttgggtgaggaataa

SEQ ID NO: 25597 - DNA, 248 bp, Glycine max
  Clone ID: 700905929H1
aaggaacatctttcgacgtatgcgagtaaccaccctgcgcagttcattcttgggtactgctccacctacatcttcatgcaaactttcatgatgcctgggacaatcttcatgtccctcttggctggggcgctttttggagttgtacgaggaatcctattggttgttttcaacgccactgcgggtgcatcttcctgtttctttttgtctaagttaattgggaggcctttggtttcttggttgtgcctgaa

SEQ ID NO: 25598 - DNA, 247 bp, Glycine max
  Clone ID: 700905930H1
atcaaaatgaatctgtaccactcctccaccaccaccaccaccaccaccatcttcaccgtcatattcctcctccttgcaatattattcactctcacaccccacaaggccaacggtgccacgtgtcaccctgaggaagaagcgggcctgttgggcttcaaatccggtatccgatccgacccgtccggcctgctcagtaactggatatcgggtacggactgctgcacatggaccggagtagaagccacta

SEQ ID NO: 25599 - DNA, 246 bp, Glycine max
  Clone ID: 700905931H1
gtaattggagagaggtgttggcgcacagaaagcagtagaaagagaggagaggagaggataggggctgggtgagttgttgtctatctcttcttctctttgtgttttggctgtggacgtaaaataatggctctgtcttttggttttgggctcttgtcttcttcttcttcttcttcttctttatgtgttctccctccatcagaaacccacactttcatgatgaggccttctgcttcttctgtttgcgca

SEQ ID NO: 25600 - DNA, 81 bp, Glycine max
  Clone ID: 700905932H1
cccgtgccggagattcctcggggatccgccggagctaaggcgtcgtcttccggtgacgttgttgatgacagtgttgacgct

SEQ ID NO: 25601 - DNA, 242 bp, Glycine max
  Clone ID: 700905933H1
cagacttacatgccttgtgactctttcatttttctccataccttttcttgttccttctgagcttaatcgtattcctcacttcggctgcttggcaatccaagccaaaagatcctgcagacgtcataagaaaatcttatgaagaaggatatgataactaatgttaccgagtatgaggcaattgcaaaggaaaaattgccaaagatggttaatgactcctatccatcaggggctgaggatcagtg

SEQ ID NO: 25602 - DNA, 249 bp, Glycine max
  Clone ID: 700905934H1
gggagaattaggtttttagggtttacaccgagcagccacacctcccgcagcagccatggttctcaaaactgaactatgccgattcagtggtgccaagatctacccaggaaagggcatcatatttgttcgtggtgattctcaggttttcctgtttgcaaactcaaaatgtaagaggtatttccacaatcgcctgaagccttcaaagctcacctggactgcaatgtacagaaagcaacacaaaaggacatt

SEQ ID NO: 25603 - DNA, 249 bp, Glycine max
  Clone ID: 700905935H1
cagcaatgggtggggagcgcaacaaggttttcactttggccgaggtctctcagcacaacaatgccaaagactgttggcttgtcattcatggcaaggtttataatgtaacaaagtttttggaagatcaccctggtggggatgaggtcctgttgtcttccacagggaaagatgcaaccaatgattttgaggatattggtcacagcaccagtgccgtagccatgatggatgagttctatgttgagacattga

SEQ ID NO: 25604 - DNA, 250 bp, Glycine max
  Clone ID: 700905936H1
cggagaattgaataccacaacagggccgtgacagcgttgtgccaaggctcagacgattagacgctgtgccatgaggttctgtcatcttcgaacagcacagactataaggagtacatcgcaaccgtggtgagaacctcgatggacagcgtgatcaaagcgttcaacatgagcgacaggctgacggtggaacacagtatacagtagcgccggaatgatgatggctctggaggattgtaaggactgttgcagt

SEQ ID NO: 25605 - DNA, 208 bp, Glycine max
  Clone ID: 700905937H1
ctcggctctggttttcttatttagacacttactcctcacactttcttcacacgctttcatctctgattcagatatgagctctcgtatattccccagccatggccgaaaaggtcaccataatgaggctcaacgtttatcctcaagtccatacatgctaccgtctagtctctaaatttctatgtacacaagctccaatcagagacaacgt

SEQ ID NO: 25606 - DNA, 258 bp, Glycine max
  Clone ID: 700905938H1
tcgattcggctcgtgtcagtactttggttgcggcagggcaaatctgcattgctatggcgccttcgaagctcttcgtcttttgcgtttctgtaaccctatttttcgccatcgttggggccgaagccgatatttccatcgaaggaagcactccactgcctgatacctccgccatcaggatccaattagatcaactcaattccaagatccaaattctcgagtctcaaatcagcgaaaagttggaagacgtgaatagaagga

SEQ ID NO: 25607 - DNA, 226 bp, Glycine max
  Clone ID: 700905940H1
tagagagtgaggtcagtgagggatcggtgttcacttgatctcatcataatcggcagcgtcaattgaagaagatgccgatcagaaacatcgccgtcggaaggccttaagaggcgtctcagccgaagacgtttaaggcggctttatctgagtacatctcgagcttcatcgtcgtgttctccggctcaagcttcggcatcgccgacaacgagctcaactgcaacggcgc

SEQ ID NO: 25608 - DNA, 249 bp, Glycine max
  Clone ID: 700905941H1
atcttatcttagctacccatcacaacaaccacgatactatttctcatactctattaggcaaaaacaccaccaaatgggagaggaaaaggagcagcctaagaatgacaccgagaaaaagcccgaggaggtagcccccaagaaagacgacggacccatccctgtcgtttacaaactcgacttgcattgcgagggatgcgtcaagaagatcaaacgcacctgtcgccacttcgaaggtgtggaaccgttaag

SEQ ID NO: 25609 - DNA, 251 bp, Glycine max
  unsure (1)..(251): unsure at all n locations
  Clone ID: 700905943H1
cgcgtctcttcactcttcaattcaatggcttccacgcacttctccattgaatgccacttccacacaacatacgatataaaaatntccgtcgtctccgncttctggaaagattttgagttggacaaggagaaatctatactggatgagcaagggcttcgaattgcagataaccaggaaagcagtcagaaaaatcgccgcaagcttgccgagaacactagagacttcaagaaggcttcgcctgaggataagtt

SEQ ID NO: 25610 - DNA, 250 bp, Glycine max
  Clone ID: 700905944H1
ctcccctcacctctctctccgaaatccccaaattgcctgtgaatgctagaaaccctaggcacgttcgatttgatgctctcccatttgcaatcaagggcgagcgcattcggttcttgcacgcaaggctggtactaccgctgcatcggcctcgatccctgaattcatcattctttctcgcaccatctttttctattccgattcgatttgttgttgttgttgttgttgttgtgtttttgtctcctccttgacg

SEQ ID NO: 25611 - DNA, 243 bp, Glycine max
  Clone ID: 700905947H1
ggagtaatggcaagagagggcacatagagggaactgcttttaagtctaaccgcacaagtgatgaggccaagttcaaggtcaagttttatgtccctccctttttgcctatcattcctgtaacaggggactactgggttttgttcattgatggtgattaccagtacgctttgattggccaaccaagcaggaattgcctttggatattaagcaggaaaccccatctggatgatgagatcacaacaa

SEQ ID NO: 25612 - DNA, 248 bp, Glycine max
  Clone ID: 700905948H1
cttcaggcagttcaagaacgaggataagccaatggggagggtgatgaaaggggtgcaatacttcatcccaatctttgagtggctccccacttacaatttctgcctcttttgctctgacttgatcgctggactaaccatctcaagccttgccatccctcaaggcattagctatgccaaacttgctgaccttccttccctcattggcctttattccatctttgtcccacctttgatctatgtgtttttgg

SEQ ID NO: 25613 - DNA, 250 bp, Glycine max
  Clone ID: 700905949H1
agcttgtttctaagaatttcgtgggtctaagaaaaagaataaacacaatgagggtgagtcaggtagtgaaatttcaagtgctgtgggagaagaaaagttaccaattttagaaattgaagaggaagaggaggaagagaatggggataataagtcaagtaacactaaacctgattgcggaatcacttgttcctatgagaagaaagtgaatagagttgagaattcaggttcttccatggttttattatgatta

SEQ ID NO: 25614 - DNA, 245 bp, Glycine max
  Clone ID: 700905951H1
ctttcttctcttccccattttttcctctttcttcctcgcctagctagctccagaaaattaggatctgcttcagatctagtgtttccctgtcccaaatcacgagtccattgagtttgattttgtggatgaaaagcatagatagggcttttgcaaaactctccaatgtttcttgaaattatatgaccatgcgtcgaattcgtatgctgcactccttctccgtcgtgttcctctactggtttacgttt

SEQ ID NO: 25615 - DNA, 243 bp, Glycine max
  Clone ID: 700905952H1
atcaaagtttcttctttctctgctctttgccttctctgacacatttggtgccttgtagagcgtgttttggcaggaaggtggtatggcgaaggacgttgaggttgctgagcgtggctccttctctgggaaggactaccaggaccctccaccagcaccactcattgatgctgaggagctcacaaagtggtccttttacagggctctcattgctgaattcattgccactttgctcttccctacatt

SEQ ID NO: 25616 - DNA, 226 bp, Glycine max
  Clone ID: 700905953H1
cttcaattagacggataatattgcacggaaacaagcatgtttgtgtgagtttttagtagctccttcccctggtctcggggattttatgttagtggctttttcgtagtgcacaacctaccaaataaaagtgctaatttgaaattgaaattttcaattaaaaattgtatgccaatgtgaagaagctaaaaggaaatacgatttgctgagatgaccataattttgaatt

SEQ ID NO: 25617 - DNA, 247 bp, Glycine max
  Clone ID: 700905954H1
attacactaataattggcctcctagtaaacaccctagtactctataaatagcatttgcatgcaccttagtcttcaccaaaatactcctcttggcatcttgtgttgtgtccctcttttaagctatttccttctcttaacacaattggttgtgccaattgccatagtcaccaaccaattaacaaaggtactatatatcatcatatcatcaccaaatgaaaaatattgggttgttttttcttgtggtggt

SEQ ID NO: 25618 - DNA, 247 bp, Glycine max
  Clone ID: 700905955H1
atttaattttctgcttttgcattctctctctcgacaccaaacaaaggtagttgtgattgcagcaaacaatgggtgtctccttcctctcgacttgcccttccctgcttccactcgttgcttatgatacaccaccctccaccagataccaacctcgttcagtgtccatttgttgtaataaaaccataagcaatgttagtgatgaagagccgttccattggagaaggagagaaattcttaatgcgctggg

SEQ ID NO: 25619 - DNA, 244 bp, Glycine max
  Clone ID: 700905957H1
gatagatttgtattgttccttcctccttcatgagtcgtctcctaaacattttacttccttcttccaccgtatcgtaggataagaccactcctaacacgttattattaccttttaattcctattttctttctattcttccacattttcttcttttccgggtgttccaattcctattctgatcaagaccctgtgagaaatattaaagacgggccactttcaaaatccaccatggaatccatttcaa

SEQ ID NO: 25620 - DNA, 246 bp, Glycine max
  Clone ID: 700905958H1
ttcctctcagattcaggttccaactcttctctctctcgccgtctaggtttttctctcaaaatttcgaaaccccgattttctctcaattcgaatctgcgattcatcgtaacctaaattattagatagttatattatctctctgcgtttctttcagcaattttctattttctcctctcatggcttcagattccaaaaaggatttccctgctgatgacaaagctggaacagaagagagtaaacatccaa

SEQ ID NO: 25621 - DNA, 249 bp, Glycine max
  Clone ID: 700905927H1
aattgatgttatgaaagtggaaaggtaacaattccctcatcattatattgatattgagggtaccactgctgaagatctgagttcaaaatgatttgttccttgttggctgtaaaagtgtatataacaaagtatatcagtttcagctccttgtagagagggaaaaagtttcaatgccttgacccaaaaatacttgtaacaaccacatataagacaagggaagaattgcatttttttttcttcatttttgta

SEQ ID NO: 25622 - DNA, 247 bp, Glycine max
  Clone ID: 700905959H1
atcttctcataagctttacttaattagcaaatccaaatatggcactttcttcttcatcatcttcaacatccatatttgctttagctttgttcactcttttgcttataggaagttcttcagctcaactctctgagaacttctatgatagtaaatgtcccaaggttttctatgccgtaaaatccgttcttcaatctgctttggctaaagaacctcgccagggagcatctatcgttcgcctctctttcat

SEQ ID NO: 25623 - DNA, 255 bp, Glycine max
  Clone ID: 700905891H1
ttctagggttgatattcttgtgcaaattcttgggtctgaggaatttgtggagcgtgatgcagtacataaggctcttatgtctttgctgaggcaggatgtaaaagcttctttgacggctttgtttaagcacttggcagtgttgatgagccaagcacggatgatgtcattcgtgagaaagttataaactttgttagagataaggttttccctatcaaagctgaattgttgaaaccccaggaggaaatggaaagacac

SEQ ID NO: 25624 - DNA, 252 bp, Glycine max
  Clone ID: 700905892H1
caacataacgttgctaattgcttgcacttcctcttatggttgcttcctttgtttctcattagctgttttggtatttgtcttagttctacacctttcctcattctccgcagtagcaacctgcgaaccatctctctgagaaaaaaaaaaatggcgtcgaacgggaatggcagcgttgcgaacgggaacgggaccgctaggaacggactggcgaagattcagacgcacaagaagcataacggaatttgtcacgac

SEQ ID NO: 25625 - DNA, 250 bp, Glycine max
  Clone ID: 700905893H1
gtgagccacgtttgtgtgagatgtgtagccacacccacttccccagagtccccaaattcggcacccttgccagacccaaggcaaaccaaggttctccttccgaagacgaagcctcagaaatggtcaccggggtggctcccggggagtacggtggccctcccaccaccaccaaactccgcaaatactggggcggcgatgacgaagaccctttggcctctgatgactatatgtggaacaaggagtttatggg

SEQ ID NO: 25626 - DNA, 252 bp, Glycine max
  Clone ID: 700905895H1
cgaatatctagatcaagatggttcactttcttgagaagagtattccattaccaaaacggaccaagatccaatctcggctccaaccctttcaattccagcacttggatgatgctggagttgattgcttgttggtccaaatagcaagcacaacattcactttggccatttcgaagagtgtgaagccaatttggcctatgagagtgtggatagcaggttatgatattggttgtgtccttaatcttctgctacttt

SEQ ID NO: 25627 - DNA, 252 bp, Glycine max
  Clone ID: 700905896H1
catgaaaatgggttcttctttgtggactttgtgtctaattttggcttcactagcctcttctgcattctgtgcctttccacggaggccagtggatgttccattcggcagaaactacgttcccacttggcttttgatcacatcaaatacttcaatggaggttctgagattcaacttcatcttgacaagtacactggtactggcttccagtccaaagggtcatacttgtttggtcacttcagcatgaacataaag

SEQ ID NO: 25628 - DNA, 67 bp, Glycine max
  Clone ID: 700905901H1
cacttgtgttggatgtaatcaagagatcattttatcaaataaataatgccaaatggcatgtcgaagt

SEQ ID NO: 25629 - DNA, 275 bp, Glycine max
  Clone ID: 700905902H1
cgcgtattcggctcgagactcaacaaccgaggcagaacttggcaaatcaaactatccctcagggtcaagttcagtcccaactcttgcatccccagaacatggtccaaaccaacaatattcttcagcagcagcaaccatccattcaaaaccatcaactacatagaagcctctctcagaacccatcacagcagcagacaactattggtcagaatcaaccgcaaaatttgatccagtcccctatgcctgatcatgttcaacaattacagatgtctgac

SEQ ID NO: 25630 - DNA, 251 bp, Glycine max
  Clone ID: 700905904H1
agctgagaagcctcaaaacacagtttacattggcaagattgcaccaactgtggaaaatgagttcatgctctctctccttcaattatgtggaactatcaagacctggatacgtcctcaggatttatcaactggaactcctacaagttttgggttttatgagtttgagtctgcagaaggggttctccgggccttgcgtctccttactaaactgaatattgatgggcaagaactgaaggtcaacgtaatcaagc

SEQ ID NO: 25631 - DNA, 253 bp, Glycine max
  Clone ID: 700905905H1
gttgctttcacttcttcctctctgcttcttcttcttccttgccctctctcgctattgagcttttctttttaacacggaatatgagtgacacaaaagggttttgaggctttctatcactctaaagctcttagctcattcacctcttgggtggtgtggtctattatgtaaattaccatttgtgcaattttttctcagatctatccaacttctcttttttatcctttattctgtttgcaaatcgccacatcaccat

SEQ ID NO: 25632 - DNA, 250 bp, Glycine max
  Clone ID: 700905906H1
cagcgactccgcgtggttttggcgaaaacttctagaacattcttccatggaggttatcagggttctagcggcggcgatcgtggtagcggtgcttgcggcggctcttccggcggacgcgtcgacgacaaccgagtattcgcgccgtgcacggacacgcgagtgcagagatccgacggattcacgttcggaatcgcgttcgctccgaaggacaagttcttctacaacaacaacaacagcgttcgttgtcgcc

SEQ ID NO: 25633 - DNA, 251 bp, Glycine max
  Clone ID: 700905908H1
gctaattactagtcgttgaatccatggctcccccagcagcaaagctaagagagattggtttggaaggctttgctctatggtgcagaggcagaagggccagtagcaataatggggtatttcctgcatcacaaggacgttgggtggttcaagtgcccaatgatgagatggaagagcttgccttgaatagcaaccaggtagctgctcgctttggtgggataatgcttctcaattgcttcaaaggacacaacata

SEQ ID NO: 25634 - DNA, 260 bp, Glycine max
  Clone ID: 700905910H1
atcttgtcaatgaagggatattttagtgtcaagcctcaagtagcacaagtcaaggattctctcatgtgctttctggctgcttgagagaaatcccaaatttccagctgagaaaacgaagtcaacatcgtggcatgcatgagactcggtttgctgtaatctttatcactttgagtttgagggtttatcaaatgacacaatacacatctgaaacgaataggagttaaagattccagcctcgacaaatctttataggaaagtaa

SEQ ID NO: 25635 - DNA, 251 bp, Glycine max
  Clone ID: 700905911H1
tgctcgtgtcctttaaattttctgtaagatatacatcgcttttattaaacatttcatttttgttgtttatccaaagttttcttcaagatgccttttcgattttcgtttttccatttcccccctttataaaaccatatagtcattgtagttcaaatactctgcttttttagttaatacactgtatttacataaattatttgtgtttagttggtcttgtcttgactactgatacttattagaaggaaatatag

SEQ ID NO: 25636 - DNA, 251 bp, Glycine max
  Clone ID: 700905912H1
cggctcgagcggctcgagcttcgttccttcgattcgttccatttcttccaaaatggccaaagacccagttagcgttctcgtgactggagctgcagggcaaattgggtatgctcttgtccctatgattgctaggggagtgatgttgggtcctgaccagcccgtgatcctccacatgcttgacattcctccggcagcagagtcattgaatggggttaaaatggaattggtggatgctgcattccctttcttaa

SEQ ID NO: 25637 - DNA, 253 bp, Glycine max
  Clone ID: 700905913H1
ccctcatctccaatctgcaaatccaactaacatgggaagccagcaagccgccgtgtcgttcctgacgaacctggcccgcgccgctttcgggctgggcgcctccgcgaccctattgagctcctccctctacaccgtcgatggcgggcagcgcgccgtcctcttcgaccgtttccggggcatcctcgacgagaccgtcggcgaggggacccacttcctcatcccgtgggtccagaaaccctacatcttcgacatc

SEQ ID NO: 25638 - DNA, 250 bp, Glycine max
  Clone ID: 700905914H1
aacacgagagccactcagtgatcgcttctcttcttcttcatcttactgtgtcaggggtgaagatggttgcatatgttcgtatttggctattgaatgaattgcactagtgttctgctgcaaattttttgacatatattggtgacgggatattttctagatggggggagcatgttctaggaagcaagagtgggataacgaagatagtcttatcagaggactaccacgaagatattgcaaatgcggagtttga

SEQ ID NO: 25639 - DNA, 250 bp, Glycine max
  Clone ID: 700905915H1
tgaagattccgcaacagagagtagaaaagatggcgcggttgatcacagtggtgtggtgcgcggtggcggtgctactgtgcgccgcggcgggcgcgtcgtgggtggaggaggcggcgaacccgatacgaatggtggcgggggtggaggcggaggtggttcgggtgatagggcagatcccggcgcgcgctgaagtttgctaggttcatgagcaggttcgggaagagttaccgaagcgaggaaggatgaggga

SEQ ID NO: 25640 - DNA, 258 bp, Glycine max
  Clone ID: 700905917H1
cggcatcagagagacagatagaaagtgcaacttcctctgttttgctcacctgtttaagccttatcataagcttagaatggcacacaaggaattttccattgccctagtgactctcattgttctctttgtcaacacgaacctccaaggtgccacggctgactatggtggtggttggcagagtgctcatgccactttctatggtgggggtgatgcttctggcacaatgggtggagcatgtgggtatggaaattgtatagc

SEQ ID NO: 25641 - DNA, 252 bp, Glycine max
  Clone ID: 700905918H1
gaaagaatagaggttgaaatgaaggtagctcccatcgtggtgttcttgttcagagatacagagggtttcgcctccaccatctcacaagcatttcgccccaagccttcctcctccttcacgcgccaagaggactcctttgagctctccttggaggcttatggaatcaaacacctcaaagcatctgggagcgtttctcacttcgttgatgatcacggcgcttacaaggtgacaattgtggctatgagcattatg

SEQ ID NO: 25642 - DNA, 250 bp, Glycine max
  Clone ID: 700905919H1
caaatggagggtccttagttctgtttctctttcttctctctgtgctttcaaccaagttctcaaatcactcttcttcttcacccttctgatctgctaattctcaaggtattcaaaattgggtggttttcgattgaactgtgatgtccaagccactgctaggcatagcggaagaggaaggtcaaagcaatgtcactttgttggtttcttcctcagccaccatggaaagtgtgtgcctgaatagtcaaaactg

SEQ ID NO: 25643 - DNA, 249 bp, Glycine max
  Clone ID: 700905920H1
aaagaaggacgatgatcatttttcaccagtggattcttacttcaccgaaaataaagatgtggtgctgagatgttctgaatctccccaagcctctttaagggaaatctctgtgaaggttcttggtcttttaggtggaggccagccaaacagctctatgataaattcagagaaggctgtgaaaactgagaatgctactgttgctgagttgcctgacttgatagacactggtgattcaaatgattaccatgg

SEQ ID NO: 25644 - DNA, 247 bp, Glycine max
  Clone ID: 700905922H1
aaaccatctccgacatgctccgaaagtgtccctcgccatgcaacttcctcgtcttcggcctcacccacgagaccctcctttggaaagccctcaaccacaacggaagaaccgtcttcatcgacgaaaaccggtactacgccgcgtatttcgaagaaaaacaccccgaaatcgatgcttacgacgtggcatacacgactaaaaggagtgagttgaaggagctgatagcttcggcgaaagaacagtagga

SEQ ID NO: 25645 - DNA, 251 bp, Glycine max
  Clone ID: 700905923H1
ttttaatctctctagggttcttttctctctcttagtttccattcaatccctgcgtcttcatcagagctgccaatggaagcggcggcgacggcaacggcgactgttctcacacccccgtcggctccgcccaggccgtcggttttcctcggaagaccctccgcactcgcattccgttccaatcttcgcttctccactaagttgagcacttcagtgtcgttctccaagcaaggtcacgcgagaccagagttgga

SEQ ID NO: 25646 - DNA, 82 bp, Glycine max
  Clone ID: 700905924H1
cccatctctgtctacctttgtatgatctcaaagttggctctcacaggaacgtgaaaaaatttcatacccgtgagattctcct

SEQ ID NO: 25647 - DNA, 251 bp, Glycine max
  Clone ID: 700905925H1
gaagcgtggaggtgcttttgtgggggtaaagagtagagagtagatctgtcacggagcgtatagtcgccggcgacggcgagggtgcactttaaccgcgattaacgatgattaaccttcgccggagcggcgaaaacatccctgcgaaatcgaagcgattcaaacgccaattggtgaagttcgaggagctgccggagtacttaaaggacagcgagttcatattggactattaccgctccgaatggccgtgaagg

SEQ ID NO: 25648 - DNA, 246 bp, Glycine max
  Clone ID: 700905926H1
caaccttgttcagtattcaatttgattaatgacaccaagatccaagcacaaagtttgtgtcttttttcatttatttttttttctgccttttgagtggaacaaagtttgagtcttttttcggaaatttatatgctctgtgacattaactgcactttcttccttgtggggtttcttctgtgcagattaaaacttgggagtgtgtgattattattccaaaatgaccccaccccacacttagtgtatgat

SEQ ID NO: 25649 - DNA, 177 bp, Glycine max
  unsure (1)..(177): unsure at all n locations
  Clone ID: 700905890H1
ttgggaatttttcgaaaccctaaaaagatgaacccctacgatagcagatattctgacgcctcttcttatcgcggccgacgttctgnattcgttgggcctattccgccgccgaacatcgttagcccggaagcgcggtatccttcgatgtccctggacccaacgggttccgatctgtac

SEQ ID NO: 25650 - DNA, 254 bp, Glycine max
  Clone ID: 700905862H1
tacagatgctgctagaagcgcttctgatattgtcctcactgaacctggtctgagtgtcattattagtgcagtgctcaccagcagggcgattttccagaggatgaagaactatactatctatgctgtgtaatcaccattcgtattgtgtttggtttcttgtttattgcgttgatctggaagtttgattttgcacccttcatggttttgattattgccatactcaatgatggtaccattatgactatatccaagga

SEQ ID NO: 25651 - DNA, 251 bp, Glycine max
  Clone ID: 700905863H1
catgaactgggacaactcaattgcttgtctcagccactgttccaggtctgattatggctctctggcctcactgaataggagcttttggaacacaatccgaagtggtgagctgtacaggtggtgaagactaatggcataatagaacactggatttatttttcctgtgccctccttgaatgggaggcctatgatccaattcgtgaacggtggatgcatttaccaaggatggcttctaatgaatgcttcatgtg

SEQ ID NO: 25652 - DNA, 255 bp, Glycine max
  Clone ID: 700905864H1
ctccaaggaagtcccctaatcagaaccagagatggacaccaaacccaccgagatcagcagcggcaagatgttcggaggttacaacaagagattcaagcatttcagccttaccctgggatgctccatgaattccacatctacttccctccatctccttctccctctcacaaattccctgtgctgtactttctctctggcctcacttgcaccgacgagaacttcatattcaagtcgggtgctcagcgtgccgcttcc

SEQ ID NO: 25653 - DNA, 253 bp, Glycine max
  Clone ID: 700905865H1
ctttgtcaatgggtgtgatgcgtccatattgttagaccagggtggtaacatcacacaaagtgagaaaaatgcagttcctaacttcaattccgttcggggctttgatattgttgatgacatcaagagtccctcgaaagctcttgccctggagtcgtatcttgtgctgatattcttgcacttgcagcagaatcttctgtgtccttgtcaggaggtccttcatggaacgtactactcggaagaagggatggtctaa

SEQ ID NO: 25654 - DNA, 250 bp, Glycine max
  Clone ID: 700905867H1
caccaaagaaagaggtgaagtcaaatggtccttagttctgggagtgttgatgcttgagtcttgacggaacgaacggaaaaggggatctcaatggacaacaccaagccccttatcgaactggaactcacgatgatggcagaatcagaagaaccgggaatgtgtggactgctagcatacacattataacagtggttgtaggggcaggggtgctgtctttggcatgggttatggcacaactaggatggttagc

SEQ ID NO: 25655 - DNA, 251 bp, Glycine max
  Clone ID: 700905868H1
cagaaagcaagctcatcctagagttttaaaaatggcagcagcctcctccatggctctctcttccccatccttggctggcaaggccgtgaagctgggcccatcagcccccgaagtcgggagggtcagctgaggaagaccgtcaccaagcaggcctcctccggaagcccatggtacggcccagaccgcgtcaagtacttgggcccattctctggcgagcccccgtcctacctcactggcgagttcccaggtga

SEQ ID NO: 25656 - DNA, 254 bp, Glycine max
  Clone ID: 700905869H1
ctcgagccgagaaaatgaaaagagtgcgtaaagtaaagtgggagcaagaggttaataaaactggagacggcgtggtaccaaaggagcctctctctcctgcctgcgctcgagggagcaattgaagagagaagaagtaataagctacgatgatgtctattacttctataattggtacgccaaggaacagggttttggggttagggtcactaatacctggtaccgcaagaccaaggaacgttacagagccaaactta

SEQ ID NO: 25657 - DNA, 252 bp, Glycine max
  Clone ID: 700905870H1
gtctcaaacctcttcgttccttcgattcattccatttcttccaaaatggccaaagacccagttcgcgttctcgtcactggagccgcagggcaaattggatatgctcttgtccctatgattgctagggagtgatgctgggtcctgaccagcccgtgatcctccacatgcttgacattcctccagcagcagagtcgttgaatggggttaaaatggaattggtggatgctgcattccctcttcttaaaggtgttg

SEQ ID NO: 25658 - DNA, 253 bp, Glycine max
  Clone ID: 700905871H1
attcttccatcccaagccatttttttccacaaaagaagctccttttcatccttttctgctagtgcccaggtggagtctaatgatggttcagctacagtagccacacctggtgaatctgtgacagaggtctgaaaactaaggagtgggaggtgggaatgttccaaaacgaggttgcagctagccaaggtataagaataaggagaagaccaccatctggaccccctttgcattatgtaggaccctttcaattcag

SEQ ID NO: 25659 - DNA, 249 bp, Glycine max
  Clone ID: 700905872H1
catccctccaagctatggaaaaatgtggcagctcaactttctgtctcttgcagggaatgatttgagaggcttcataccaagtgagcttgggaatctcactaacctgactcatctttacttgggatatacaatcagtttgatggtggaatccctcctcagtttggtaagctgaccaatttggttcatctagacattgcaaactgtggcttgacaggtccaattcctattgagttgggaaacctctacaag

SEQ ID NO: 25660 - DNA, 259 bp, Glycine max
  Clone ID: 700905873H1
ggtgtgtgttggagttagagagagagagaaaaaaaaaaggttcagaagaatcagataggttagatttatatacaaaataaagaatagatacacttggagttggagttacacattattctctctctcactcacaacactcagagtgcaagctagagagagagagatggaggatctcgaggaggaagagaacggagcggaggaggtgttggggtcaagcttgaccatggagaaggtggcggcggcgaagaagttcattgag

SEQ ID NO: 25661 - DNA, 248 bp, Glycine max
  Clone ID: 700905874H1
tatgtatcctctatctctgctccattagcaataccacttgtgtatcctaggatgatggctatccatgatcttgactcaaaggaagatgatgactctgttattcctccctttcttcctctttctagtaacacatcagtgatgatggaatatatcttcttgagaatggtcatgattgtttgatatatgttggagactctgtgaatccagacatcgtgcagaaactgtttggtgttgctacagttgacaaa

SEQ ID NO: 25662 - DNA, 253 bp, Glycine max
  Clone ID: 700905875H1
cttagggcttccattaccaacaccaacaccatcaccatcaccatctatggcttgctcaagcgcccaaatacacggcctcggaaccccttccttttcccgaaccctatttttaggtcagaggctaaatccaaggccgcctttatcaaggtcaagtccgcacccactcccaggaggctccgccctctcagagtcgttaatgagaaagtcgtcggtatcgatttgggaaccaccaactccgccgtggccgccatgg

SEQ ID NO: 25663 - DNA, 69 bp, Glycine max
  unsure (1)..(69): unsure at all n locations
  Clone ID: 700905877H1
cactaacgnnnnngnggcnnnctgctaagggtacnaattgaaaaagttgaagcaaaacattcaacactg

SEQ ID NO: 25664 - DNA, 250 bp, Glycine max
  Clone ID: 700905878H1
gcaaaggagagggaccttggttacttcctcatcttcccttatatgatggtgaggatgctgcatgaccaagtttggatcacactctctcgccatcgaactgccaaaggcaaaaacagaattgttgacagggcattgagtttgaacaagttgatcgagaaagcaattgggatgaccagatcttgttcaatgggatcatattttatataggttatatgttagttccagagagttctcacatgcccttgtggag

SEQ ID NO: 25665 - DNA, 253 bp, Glycine max
  Clone ID: 700905879H1
gcacaattctctcttatcatctttgttattacctctttccaaagtccaaattttctagttccaccaaaccaaaccaaaccaaaatggcagcagcctcagcctcatccatgatatcaacaccagcctttctccaaccatccaaaagcaccatcatttgaagccatccaacgtgtgcttccaaggtcttagacccctcgcaaggttcaccaaagcctcatcaaccaaagtgagcaccaccaccaaaagggttatt

SEQ ID NO: 25666 - DNA, 251 bp, Glycine max
  Clone ID: 700905881H1
cgagaaaaaaacttggacggtgaaattggaaggttttccgggatcccaaggccgaatcttggttcaatttacgaaaagagaagagagaggaacaacaacacccgttgttgaatcttcaagctgatcaaatcatatagagagagaaagagagagacccggataggaaaatagcgtttagagagagaaaggtgaagtgaggttgtttaaagtttgggtcttggtgggtgaaagggaaagatgacggatgtggt

SEQ ID NO: 25667 - DNA, 251 bp, Glycine max
  Clone ID: 700905882H1
ggtacttgtttgtgccttattccctctgattctggaacaagttcccgttctttcttatctttctccactgttttattttctccctgatcttcctctaccttaatttcagtcctatttgttcttcgacagatactcttttaccttcaccagctcattcttcttctatcttcttctgctatatatgctcaacctttaaagggtatttctctctctctctctcaactagtttgagtttcattgtactttgatat

SEQ ID NO: 25668 - DNA, 250 bp, Glycine max
  Clone ID: 700905883H1
tttcaatattacttcttcccaaagtttcagataggatagctgctcgctacaatgatgtggaggatacactagccagggcaaatacgtggctgaatgcagctcaagcttcaggtgtccctattgtcttatgaatgtccaaaccgagtccctacttactaagatctctggagagacagcttcttccactgtaaatgcaggcccattatccgacttatctaaccttgcaaatgcaagcctttatggctctaac

SEQ ID NO: 25669 - DNA, 252 bp, Glycine max
  Clone ID: 700905884H1
agcaccaaacctcactaatccaatccaacttaaactttctcatattttccattctccttagctttttagctaattaacgttgtcgtcacaaagaataaagcatttagttcaggtaattgaacatatatataagttgttgtaaacttcatatctgactttgatccttacggattaaaagaagaaaaaaaagtgatcacagagagagaggcacgatggtgaacctggtggcagcacagaggccattgttacatg

SEQ ID NO: 25670 - DNA, 252 bp, Glycine max
  Clone ID: 700905885H1
ttccataatcccgcaaggtaaacgacggtgacgattggtgggtggcgccgtacgcctcatcccatccatcgccatcggcaccttccttaaacgacatcgcgtccatcaccccttttctcttcctccagtcacagcagtggtagcttcccaaaaaagagtgccaatggcatcttcttcagactcatgggtgaaggaatataatgaagcactgaaacttgctgatgatatcagtggcatgatttctgagcagag

SEQ ID NO: 25671 - DNA, 157 bp, Glycine max
  Clone ID: 700905886H1
ctagcaaggtcttataccttagtcacatgctcaatcatcttgtaatgaccgtgacgattgttttatttcttagatttctcatccaacaatctttatttcttctatccacagcatattcattataataataaaaggtttgagtctgtttgagtgtctc

SEQ ID NO: 25672 - DNA, 250 bp, Glycine max
  Clone ID: 700905887H1
gtgaccaagtactttgtcagcagtggctttgcattcatccatgcaaactctgtggctgatataatagctgttgaggccgtgccggtagaccgaattgatgtgaatctagtccagaagggtctccagagttcactcagaaactgaactcagccacaactgatttggagaaagctgaagctcagattggggttgatgtccatagcgctctcaactctgctctttcaggctaataataagtactgtagtgttg

SEQ ID NO: 25673 - DNA, 252 bp, Glycine max
  Clone ID: 700905888H1
ctaagacaaaagaaaaaatgtttgcagggaaaggggctgtttggttctccagagcggtggcgttggcagcaatcgcggtggtagcttgcgttgggcttacacaggcccaacccgaggccaggttcagtgcaacagcgcgaacatccccacgtgtcgcgcgctcataagctactctcacccgaacaccaccaccctcggcgacatccaaaagctcttcaacgtgaaacacatcctcgacatcgtgggagcgac

SEQ ID NO: 25674 - DNA, 249 bp, Glycine max
  Clone ID: 700905889H1
gtggagctgagatcattacatcagacgctgttgtgtcattcagggcgactgtcctggagagatcatgccgcactgtgatgagcaaatcacccaacaagcacaatcgtctgtacatggaagcaagccattggaggaaggtcttgccgaggccattgacgatggcaagattggaccaagggatgaccccaagattcgctccaagatcttgtcagaagagtctggttgggacaaggatctcgccaagaaaat

SEQ ID NO: 25675 - DNA, 253 bp, Glycine max
  Clone ID: 700905861H1
aagcagtgcaatgttgccaacaagcaccatgatcaggacccttgaattttcctccccttgtctatgatcgaggaagaaaatctgtaatatattatgcaaaaaataattaaggtcttttcctttaaatggctggttcaatgaaccgagaccactgcaggttcatggggatgggaggattaagaggctatgttttttaatcttccgatgttactgttgttttttttttaatttcaataaggatattatatatgta

SEQ ID NO: 25676 - DNA, 260 bp, Glycine max
  Clone ID: 700905831H1
ttttgatagagaaacttacaaaacattacttcaagctggagaatcaccaccatgccatcacacaccttcaaccagaggagttatcatcctcactgcttgcatttaaatcccatatgtccaaatcaattgaccactagcatcggatttgaaacccggatcagagacccccctgtccttaacatggtttggaaagtgtttcggcctcttgcccttcatcaacaaggcttttggaaagcttgttgtggatattgactacccaa

SEQ ID NO: 25677 - DNA, 258 bp, Glycine max
  Clone ID: 700905832H1
tgcaggggtatgcttcgttccaccattctcatagaacccagcctactccgttctttaaatttcaattctaacaaacatcacatagcttcactcaaccaatggtcttgccggtttcattctccaaaacccccttatcttcctctcagaacgaaacgccgttgtctcaggaccctgtcttgaaggccatttcagagatttccaaaggcgaagggagggttggccaaacaacaaacgtaattattggaagcactgctgcga

SEQ ID NO: 25678 - DNA, 112 bp, Glycine max
  Clone ID: 700905833H1
accttcctccagtatatcactggcagtccctcgtgagtgcggcatgcaccttttcgtttgtttcggagccgttttggcggggcgtactaaacccactacgttccacacaaca

SEQ ID NO: 25679 - DNA, 259 bp, Glycine max
  Clone ID: 700905834H1
atttctcttccctcaactaaactcatcttccaaaacgcagagccaacccatgtcgttccccttcaaccactctcccgccacccacacccaccaccgcatggacgacgacgacgacgaacgacccaccgtttccctccgccgggaaactccttcagcaacccgccacctccgttctacggcgtccctcaaccaccacccccacagccggagatccacgtgttccattccgctcacgtgacaccaggacacgtgtcccatg

SEQ ID NO: 25680 - DNA, 257 bp, Glycine max
  Clone ID: 700905835H1
ccgcacgaaaccttgcagtaacaaaaaatgcggagtttcactttctttgaacgagtttctagagctttccgcgatcatgggtccaacttcaagcttgtactcctctgcaccaccgtaagtggtggagggatgtagcttacggagaggctgctgccgcatctgaagcagcggcggcggcgacggagaagaaaaaggtggtggtgctgggaactgggtgggctggcacgagtttcttgaggaacctggacaaccccaaa

SEQ ID NO: 25681 - DNA, 257 bp, Glycine max
  Clone ID: 700905836H1
cacagcttttgttctagcacttcgctgtctgaggttctggattctcagtgtttgcggacgcagcatcatcttttagggaagaatggatcatcaagggcatagccagaacccatctatgggggttgttggagtggagctcaattagcatatggttctaacccatatcagccaggccaaataactgggccaccggggtactgttgtgacatcagttgggaccattcaatccaccggtcaacctgctggagctcagcttg

SEQ ID NO: 25682 - DNA, 258 bp, Glycine max
  Clone ID: 700905837H1
atctacatcaagcatcatgttcgttgctcttagataatgttgtatgattatagacgactgcatcgtgtctgcctgctcagatgcgtacttgaccgattcctgtctcttgtaacaccaggtcccacggacagagacgatggataaaacgttgttggcctgtctcggttgtatgtattagctggtgcaccgttcgagagcacgaccttacccatagctgctgagagtacacgatgacaagacgctctagatggcttcaat

SEQ ID NO: 25683 - DNA, 259 bp, Glycine max
  Clone ID: 700905838H1
acgccgcactctcttttcttccacacaacatacgagttttcgaaaagtgcagatgcggcgatcgtggcggcgaccgtggacgttttcggaagtggattcggcgggtgacgaagcggaggttaaaggcggcgaagccggcgccgaggcccccgccgcgaggaatcaggataagtgggtcccgttgaccaaactgggccgcctggtgaaggagggaagaatccgaagccttgaacagatctacctccactcgctcccgatc

SEQ ID NO: 25684 - DNA, 257 bp, Glycine max
  Clone ID: 700905839H1
ggcaaacgtaagatgatgtctgttactgttgctgccgacactacctccgccgccgtaggatcctgtctttcacgatcgcggcggcggtgcttaacggtggctctccgatctaaagtgtcagtcaccccaacagaatattgacgaaactcaaacacgagtgtgccactcctctgccccttcttcaccaagtggccaataacatgtcttctgacatgcgagctgggcttgctgcagaggctgggcctgggcccgggctt

SEQ ID NO: 25685 - DNA, 253 bp, Glycine max
  Clone ID: 700905840H1
tggatgtgctcctaatcgtgctacatggaacaccatgcttgctgtatgtagcgaggagggtaagcacaattatgttaacaaggtcttgagggaaatgaaaaactgtggatttgagcctgataaagacacatcaatacattgattagtgcatatgctcggtgcggatctgaagttgattctgcaaaaatgtatggggaaatggttaaatcaggctttactccatgtgtaacaacttataatgctcttctaaatg

SEQ ID NO: 25686 - DNA, 250 bp, Glycine max
  Clone ID: 700905841H1
tggaagagaaaaatgggagacacaaaggagagagctacgaagaaacccgcggcaaaatggcctctcatcaaacccaaaaagaatcttcagattagccgcctccgagatttcgatctcttcacggggagctaggtccaacttatggcgaacattcagagataatgatcgaatgttggtggatgatcctgtccttgcagatactatttgggagtctggacttagcaaactattttctgatattaaaattcga

SEQ ID NO: 25687 - DNA, 256 bp, Glycine max
  Clone ID: 700905842H1
ttcgatttgttgtggattggatgatggaaaaaccagcaagcccctttcattgaaagggcgcagtgaactgtaattgtgaaaaggttggaagatctggccaaagaaggtgatagccctgtagattcgttccatggttcgatccttgcccagtacaacgcggcgtgttcgaattctgatcgcttttacgcgagaaagggggaccaccctctaagcctaagtattcctcaatgaccgatagcgtacaagtaccgtgagg

SEQ ID NO: 25688 - DNA, 246 bp, Glycine max
  Clone ID: 700905843H1
ctctatttgcgttttctcattttctttctttcgttctcttccgtggaacgagtagtcgaaacttgaaatcaaaaggcagcgggggaaaaagatcagagagcagtagggttcgaaaatggcagcagaatcatagagggcgaagaagataccaggttaagcggaggtaaccaattgctcatagttgacgatggcttaacggaaatgggaaagcaagccgcttggagcgtgagttcctgcaaacgcggt

SEQ ID NO: 25689 - DNA, 257 bp, Glycine max
  Clone ID: 700905844H1
caaacctgcagcttcttcagatggggatgaggatttcatgtccctaacagtaccaaatgatcaaaataagaattttttacccaatcagagaggaactccaaatgcatctatagataatgatatgggctacacttccagcaatctatgggttaattcttcttccagtagaggagcacggattcaagctaattctcgagatttggatgagcttagtccacaagaaatcctatcatctcagcatactgggaaactttctg

SEQ ID NO: 25690 - DNA, 103 bp, Glycine max
  Clone ID: 700905845H1
gactttcaaccccatccaatcctcacatgcatgctgtgtctgccaaagtgccaagtcacataacatttccattgttaccattctttctttccacacaacatac

SEQ ID NO: 25691 - DNA, 255 bp, Glycine max
  Clone ID: 700905848H1
cttcaattcaatcttcaaggtcctctcagagttccacaagttgcttaagcttgacaggaaaaatgggttcccttccattttcatgggagtctaccctggctcattttatggaagactgttcccaaacagttcttgctctttgtccactcctccttcagtcttcagcggctttcaagggttcctccatcagtctatgctgagcacaaaaggccattgaacaaagggtgtgtttacatttgtgaatcaagccctgaa

SEQ ID NO: 25692 - DNA, 248 bp, Glycine max
  unsure (1)..(248): unsure at all n locations
  Clone ID: 700905849H1
acgagatttttngtcaaaatggtagtggtaagttgagtctagggcttcgcaaagtgaagccttaccttgctatattgtcccttcaatttggctactcagggatgtatatcatcactatggtttccttcagcatggaatgtgtcattggatactctcagtgtatcgtcatgtagttgccgctattataatagtcccttttgcacttgtccttgatagaaaaattagaccaaagatgactcttcccatct

SEQ ID NO: 25693 - DNA, 256 bp, Glycine max
  Clone ID: 700905850H1
tgagtgccaaaaacacaaaattaaatgctggcttgccagaagaggagaatgagaaatctgatcaggttccaagcccctctgctccacagccatctgatcaggttactgaaaagcatgtcacccatgcaaggctgttgatactgaagctgatgcaagtggtgtgaacttatctcctaaatctaacaatatacagtcgcctaattcctctaagaattcagagccaagctcacctttttcaccaaggaagtccttgcat

SEQ ID NO: 25694 - DNA, 257 bp, Glycine max
  Clone ID: 700905851H1
gtttgttacctcactttgttttttttctctgcagtagtagacaaaaaagaaagacagaagaagaagaagaagaagaagaagaagatgttgagggttgcagctagaaggctctcttctctctcctcctccctccgtggcggcccaaccacgccgcttccgcttatgtctctcgaaacgcagtcgttgatgaccgcagatccgatccttcctcccatcccctttttcccttcagaggttttgctactgaatccctgatc

SEQ ID NO: 25695 - DNA, 254 bp, Glycine max
  Clone ID: 700905852H1
cacgaggatgataatggggaagaagagtaatgcggaaaacgatgaggtggccaggttgaggaaggtggtgagggaggtcggggagctgcttggggcgtttaacttgggggatgttattgggttcatgagcctttggatctgcaagggtttgggaagaagaacatggaaactcaccacaaggtggatgcgatgatggagaaggtgttgagggagcatgaggaggctagggctaaggaagatgctgactctgatag

SEQ ID NO: 25696 - DNA, 254 bp, Glycine max
  Clone ID: 700905853H1
aagcctttgttgcattcttctggctccatgttaccctccaaggacaaagaactttctgtttctgccagaaaactcgctgctacattgtgggaaatcaatgatttgcctccttcgagggtgaagaaggattcgaggttgatcaactgagaggcttcaaggagaaggttagaggcagacataagaagagtgtgcggttgtacagatcgggcctgttaagggcatagatgtcagatccgtcgcatagtcctgtctca

SEQ ID NO: 25697 - DNA, 254 bp, Glycine max
  Clone ID: 700905854H1
catgaactggaaggttcatctagtaacactatggctgcacgtctgcgtcggcatggcaacagaactgtatccgttatcaattctggtaatgcttggccagcagcaggtcgtggactggtacagtcataagtaatccttcacaatctaaactttcaacaaataatgtccttggactgtctcgtaacactgggcagatgaaaacagtaattaacagtggaccgtcatcatcaacttatgctggttctattcaggct

SEQ ID NO: 25698 - DNA, 193 bp, Glycine max
  Clone ID: 700905856H1
agataggcttcacttcaacacttcaagcagccttgggctcatgagcatgagcctgttggcagtctcctagaagctgttaaggtaatcaagcctacagttttgattggatcatcaggagtgggaaaaacattacaaaggaagacattgaggctgtgacttctatcaatgaaaaacctcttgttttggccctctc

SEQ ID NO: 25699 - DNA, 254 bp, Glycine max
  Clone ID: 700905858H1
agcgagtcactgttccgtgttcccactgagtcggtatcaacgagtgaccgagtcgaaaagcgagtcaccactccccgcgctgcatggaccctctcgaagctttggtcgcccaaatccaagggctatcggctctcccggcgacctcactcgcctccacactgttctaaagcaagccgatgactcgcttcgatccgagtcaactcgcctcgctccgattctcacacagctcgacccctccattcactccctcgggt

SEQ ID NO: 25700 - DNA, 102 bp, Glycine max
  Clone ID: 700905859H1
atctaaatgtcctttttccttcgtgtccgtagtcaataatgcctcttccaactcctccacgagggagccttcggacgtgcatcgaatttcagaattccaaac

SEQ ID NO: 25701 - DNA, 255 bp, Glycine max
  Clone ID: 700905860H1
caaacaaccacaagtgttcttcctctgtacacaaactctattcctagttcagagtaccgtccttttaccttgcgtacacatcaatgaagaaaaaaaatggaaggagctgggtattgtgggagtttctttagaggtgcaagccttacatagccatggtttctctgcaattcggatttgcgggtatgaacataatcactaaggtttccctcaaccgtgggatgagccactatgtgcttgtggtttatagacacgcct

SEQ ID NO: 25702 - DNA, 256 bp, Glycine max
  Clone ID: 700905830H1
gccacttagaggttgaagcagcgcgcggcttcttagtgagattcaatggcgttcattggtgcagtcaaattcttgctgcagcacttacttctattatgcctcttcaactatctacctttttctcaaggtaagagaactggaatgaagggtacccgtttataagaagagcaagttcattgggttataatgggaaaagtggtgggtatgattatataatagtggggggtggaacagcagggtgtccattggctgcaac

SEQ ID NO: 25703 - DNA, 248 bp, Glycine max
  Clone ID: 700905795H1
atctcactcccactcccaatcccaataacagtaaccgtttttggttcttcactccctcactctgttccaccacgctcatggccactgctcacaaggtcctggttcccatcgccgacggcaccgagcccatggaggctgtcatcaccatcgacgtcctccgacgctccggcgccgacgtcaccgtcgcctccgcgtccgacaacctcgccgtccaagctctccatggcgtcaagatcatcgccgacgcc

SEQ ID NO: 25704 - DNA, 221 bp, Glycine max
  Clone ID: 700905796H1
aaaaaaagtatcggatatctcaaaggtttatgcttcagtgaagagaaatggcagctgaggcaaatctttgatagcaaaagcagcaggtggtctttgcaggggatgacagctctcgttacaggtggttccaaaggaatcggatatgctatcgtggaggagttggcacaacttggagccactgtacacacttgcgctcgcaacgaagctgaactcaataaatc

SEQ ID NO: 25705 - DNA, 262 bp, Glycine max
  Clone ID: 700905802H1
caaaaagtcagtgcagcgaaaacggacgatccgaagaatacccttttcatctctctctacaataatcatcctcttcctcttcagtaaattattgtacctgacgatcttctcggtttgatcttatatcaatggaaatttttagacagaactcggattcacagggaaatctaattgcataggaacagtaaagacaacacctttttatctctacacaagtgattatggcggttgctgagaatgttggggccaaaatcggttcttc

SEQ ID NO: 25706 - DNA, 263 bp, Glycine max
  Clone ID: 700905803H1
gcgaaaccgaaaaccaaatccgaagagtgaaggttcgttgaatcccatggcgagagtgaagcacacgccagcttctcgcaaatccgctaaaaagcaagcgccacgcgcatccacttccacgcagccgccaccacatcccaatcgcctgcaactagagagaggaggagagctcaacaagtggagccgcagcaggagcctgaggctcagggaaggaagaagaggcgcaataggtcgggaactgtggcgcttcgtgagattcggca

SEQ ID NO: 25707 - DNA, 261 bp, Glycine max
  Clone ID: 700905804H1
acttcgatcatacacttagttgcttccaattaagatggttctgctagagaagctctgggatgatgttgtggctggccctcaacctgagcgtggccttggcaagctcagaaaactcaccaccctcaaaactattgtgaaggagaaagtagcaagctgcagaagacgttgtcgatgccgtcgacaccaacaaccccgatgactccgacgactccaacgacaccgggatcggcccgtaaagctgacaacgtttggaggagcgtc

SEQ ID NO: 25708 - DNA, 261 bp, Glycine max
  Clone ID: 700905806H1
attcgaacaatagtaaacattttctgcaagcaaaccaaagttaagcaaagcaacttttcccagaaagtttcaacgtgaagagcgcagatgattatgatttaccatgaatgaaaaagtcaatataaggaagcgaaatggaagaagagtaaaaagtcatatcagaagtttcagtgacaaaggttgttgaggaggcggatcataagaatgaaagcattaaggagacaaatggagacctgccaagtgaagtaaagatagaagagg

SEQ ID NO: 25709 - DNA, 259 bp, Glycine max
  Clone ID: 700905807H1
ggatttttctacagctaatatgataggaggaaaaggtttaaagggaaattcctggcctgatttggacatgctaccatttggatggctaactgatccaggatcaaatgaaggtccacacaggtttagtaaactcctctagaagaaaaaaggacacagatgactttgtggtctttggcgaagtctccccttatgtatgggggggatgtgaggaagattgatgcaaccacatatgaacttatcacaaatcctaccctgctag

SEQ ID NO: 25710 - DNA, 253 bp, Glycine max
  Clone ID: 700905808H1
tgggtagattagcttaaaaagaaagatctactgggggcgtcagacccatatgtgaaactcaaactcacagaagagaaacttccttcaaagaaaacaactgtgaaatacaagaatttgaatccggaatggaatgagaatttaatgtagtcgtcaaagatccagaatctcaagtcttggagcttacagtttatgactgggagcagattggcaagcatgacaagatgggtatgaatgtcattccactgaaagagat

SEQ ID NO: 25711 - DNA, 209 bp, Glycine max
  Clone ID: 700905810H1
gacagatgagagagaaagagagggagtaagtgggtaaacgacagagtactaaagagacacacctaacacaacacaaatccttgaaacgacgacggatatggccgtttcgagctcgcacatgcgtttcacctctggtgccgctccgatcccgatttctcgccccccccgccgtccttcgacatactccgccgccgaaacttccgctcatc

SEQ ID NO: 25712 - DNA, 257 bp, Glycine max
  Clone ID: 700905811H1
gtcttgatgttatcaatcaaacctggagtcccatgtttgatcttgtcaatgtgtttgaggtgtttctaccacaacttcttctgtatcccaatccatcagaccccttgaacggtgaagctgcagctttaatgatcgtgatcgagccacttatgaacaaagggttaaagagtactgtgagaagtatgctaaacctgaagacataggagctgccacagaagagaactccagtgatgaagagctaagtgaagatgaatatg

SEQ ID NO: 25713 - DNA, 258 bp, Glycine max
  Clone ID: 700905812H1
catttctggaacatccatgtcatgccctcatgtaagtggcttagccgcaattctcaaaggagcacaccctcagtggagccctgccgccatcaggtccgcactcatgacaacagcgtacacgagttataaaaacgtgaaacgattcaagatatttcaacaggacaacctgggacgccgtttgattacggtgccggacacgtcgatcccgtggccgctcttgatcctggtctcgtctacgatgccaacgtggacgattac

SEQ ID NO: 25714 - DNA, 261 bp, Glycine max
  Clone ID: 700905813H1
ctaatcttcatattcatcaaactcatcaaaatgaatctgtaccactcctccaccaccaccaccaccaccaccatcttcaccgtcatattcctcctccttgcaatattattcactctcacaccccacaaggccaacgtgccacgtgtcaccctgaggaagaagcgggcctgttgggcttcaaatccggtatccgatccgacccgtccggcctgctcagtaactggatatcgggtacggactgctgcacatggaccggagtag

SEQ ID NO: 25715 - DNA, 263 bp, Glycine max
  Clone ID: 700905814H1
tggcagaaatcctttctatgttgcttaagaagttacctacttatagcaagagaatctagctctattggttgtgtaaggtaaaaaaaaaaaacgcataaccatgtcaaccaaattgattgacacaagccttagcctttggtatggcttgtaattgcaacatcagcaatagcacaatctgataaccccccagttcttgacacagaaggccaccctcttgagcctggcagagattactacatcacaccagcggtaacagacattgg

SEQ ID NO: 25716 - DNA, 261 bp, Glycine max
  Clone ID: 700905815H1
tgcttaagcagataaaggaaatgtgaacgtgcaggaaggagccaatgatgaagtaaatgaaagacgaagaattaaaacaccagctgatacacttcccctttaccttcacataaatttctctgtgccattttattagatacaaattgatactattctgtatcaaatttcagtcagatattggctgtgtacatagggttatattattgatgcactgtatttgtattcaaattccaattccaaatggcgaacatatttgattgc

SEQ ID NO: 25717 - DNA, 261 bp, Glycine max
  Clone ID: 700905816H1
gttgtctctgtcaatgatcaggagcatgaaaaggttccttctgattctagccagaagcattgtgatgtcgataagggtgttgtttcatcatctattagtgaaggtagcatggaaatcaagttgacaacttccacatatcaatccatctcacacctatcaataattctgtttcacaagttgtttcggaaaataatagtttgacatcacatgagataatagacattccaccttctagcaaagttgtttccactcatgaagtta

SEQ ID NO: 25718 - DNA, 237 bp, Glycine max
  Clone ID: 700905817H1
gtgttgctgttctattaaacttttgtactcttgctttgaaactagttggttatgcaagttttagttttctattttatttcagacttttcaggtgctcatattcttatgatatcatcaaactgcaaatatagtgagcccattaagctattactgaaatttgttgcagatttgaaattcttctaagatggatacttcttataggactggtggagtcaagtacgcgtgcttgctttttga

SEQ ID NO: 25719 - DNA, 259 bp, Glycine max
  Clone ID: 700905818H1
atttgaactactttagtattatgttagcattttcatatgttaacacatcatttttaatcttgtatagttatacctattatttgccagttatatggataggtaagtaaggtgctgctaacataggggatttgtagtacaaaaatttacggatgtttcgaggtggaagagtgatgttggtgatggaaatggtaatttgtatactaagtggaccaccaaattgcaaacaccacaaggatactttttattataaagcacatct

SEQ ID NO: 25720 - DNA, 258 bp, Glycine max
  Clone ID: 700905819H1
gaagaagataagctagctaaggcagcaatgggtaatccttctaagcttttcccatttttctttgcattcattgtgtttctgatgcccttagtttccttatcccacaatgacttctctacctttgccataaaaccgtttcatacctagtttcctttagtgaaaatccaaaccataatggccacatcaccacaagctccaatgaaagagacaaatcacgtctttggaggaaagccttcattggcttaaaaaatactcacg

SEQ ID NO: 25721 - DNA, 259 bp, Glycine max
  Clone ID: 700905821H1
atccttttgctgagcacatagcctactttgtgttatttgccattccattatacacaactgtggttgccagaacagcttctatagcatcatatgctggttatctcgcatacattgacttcatgaacaatttggtcactgcaatttcgagtgcatcccaaaggccattttcacagcatttcccttcctaaaatatctcatgtatacaccatcgttccattcactgcatcatacccagtttcggacaaattactcactcttc

SEQ ID NO: 25722 - DNA, 259 bp, Glycine max
  Clone ID: 700905822H1
gataattagaggggttttctctttgagagaatcgtatcttacaacttttcgtgaccacttttagtgagggaagagaagctaagagagagactccaattagattcaagagagatggccatcagccatgaaactgggctttcattttcggtcttctaggcaacgtgatctcctttatggtgttccttgctccattaccaactttttaccaaatctacaagaaaaaatcatccgaagggtttcaatcactaccttatgttgt

SEQ ID NO: 25723 - DNA, 257 bp, Glycine max
  Clone ID: 700905823H1
ataagtatgatgttcaaattgatattgaggttcttgatttgcttgacactgcttcaagacaaaaagagatccacattgttacaaaaatatactggggggatgcaagagagaaacttttggatgctattgaagtttgaagctggattcgctggttatgggaagcaggggcctcagcacaatccaaaggattatattgggaagtgtaagcaactttgtgatgacccatgcctcttgccctgtgactatcgtcaaggaaa

SEQ ID NO: 25724 - DNA, 259 bp, Glycine max
  Clone ID: 700905824H1
cgcaaagtagcaaacttccctggttatggctatggagaacgccgggaatttagaagcggccatagaacaattgctgaatgcggagaagcaagcgaggctcgccggcgacgtcgccgccaccagaaacgccgtactgaaattttacggatgtgcttcgaagcgcgtgcctggaaaaccctcaatgaccagattgttctcttgtccaaacgccgtggccagcttaagcaggctgtgacagcaatggtccagcaggctatgc

SEQ ID NO: 25725 - DNA, 258 bp, Glycine max
  unsure (1)..(258): unsure at all n locations
  Clone ID: 700905828H1
gcttccaaccctctacatttatctttgtcaatataacatttctgatgctggactttttttgtattttccatccacacatcttatttttgtggcnacaccttncacattggnggagacattgnnagttagtgtagaaactcatagacttgagactaaacaatgagtctcattcactggtctttaatcttatggatcaccatgatgatgcttattatccataatttggataacgtggaaggaagataccactatcacagg

SEQ ID NO: 25726 - DNA, 258 bp, Glycine max
  unsure (1)..(258): unsure at all n locations
  Clone ID: 700905829H1
cgtcaccacaaaacctaagattttcaatagatcttaacttggtaaccactttctcacggcaacggctgtttacactnngaaccgtcgccgtcaaccgtctgccactgccagagttcatttggacaaaagacatgggggagtagaggattctataaaccttgggagctgtcatctatacagggattatagtgcnacttgcattattcatttacttagataacaagacacataggatggaacccagtagagagcaaagaa

SEQ ID NO: 25727 - DNA, 247 bp, Glycine max
  Clone ID: 700905794H1
caagaaatagagagagaacttcaagtgagggtgagagtgacacaaatctagagagagcactagtactctaaaagtctattatattcttcaaaatatgaccatgcatcgcgagtattgggcttttgtcttcggcgttatgggcaacatcatctcctttggagtgttccttgctccattgccaaccttttaccaaatctacaagaagaaatccactgaaggtttccagtcacttccttatgttgttgca

SEQ ID NO: 25728 - DNA, 249 bp, Glycine max
  Clone ID: 700905758H1
ttcatcttctggttttggatcattcagcgccacacagacatacatggctcttgagtcagctcctgattcagctgacatcagaggagttcacactcatggtggaggctatgttcagtataatatctatggaaacctctttgaggtctctaggaagtatgtccctcctattcgccctgtgggacaaggagcatatggaattgtttgtgctgctgtaaatgcagagacgcatgaagaagttgccactaagaa

SEQ ID NO: 25729 - DNA, 253 bp, Glycine max
  Clone ID: 700905761H1
agcaaagatgacaggtgggatgtttggaaggaaggggcaaaagataaaggggacagtggtgttgatgccaaagaatgtgttggacttcaacgccataacctccgtcggaaaaggcagtgctaaggacaccgccaccgatttgttgggcaaaggcttggacgcattaggtcatgcagttgatgctctcactgccatcgctggccatagcatctctcttgcagcttatcagtgctactcagactgatggtagtgg

SEQ ID NO: 25730 - DNA, 251 bp, Glycine max
  Clone ID: 700905762H1
ggcttcttctacatcacatccacccttccaacccctcctgaacctgtctgcatccattcccatttgatcttccgcatgcatgttcccaacgtctacaaaacctagcaaagcaacaaaacggcgtcatgcttgggaagtagcatgcaatggtaaccctagaaataggagggacattctgatcggccttggaggactctatggtgctacaacaagtctcacaagtaacaacactggttctgcacttggtgctt

SEQ ID NO: 25731 - DNA, 252 bp, Glycine max
  Clone ID: 700905763H1
cactaataaaccagccacaaagaacaccctctctcacattctccttcctgctctttctagccctctgcaccccattggatgctgctcacaccgacttcgcaggttcagcctgcctcaaagtttcccctagccacttcgccggctcggtcaccgaagtcatcgctgccatacgtcaactcgcttcgatcctctcacgcttcggctctcccttggccaacttccgcctcagcaccgccatcgccgactgcctgg

SEQ ID NO: 25732 - DNA, 278 bp, Glycine max
  Clone ID: 700905764H1
gcacgcacgctcggaactcggatcgagagaatcccacgcgaggagaaagatggaggggaacgagcaggatgtgtcgttgggagcgaacaagttccccgagagacagccgattgggacggcggcgcagagccaagacgacggcaaggactaccaggagccggcgccggcgccgctggttgacccgacggagtttacgtcatggtcgctttacagaccagggacagcagagtttgtggccacttttctgtttctctacatgaccgtcttaaccgttatgg

SEQ ID NO: 25733 - DNA, 251 bp, Glycine max
  Clone ID: 700905766H1
gaaaacattcttgtggggtaggtactctttggaaatgtctgctgttatttacaaggactgggttttcactgatcaagcattgcctaatgatcacaccaagagaggagttgcggttaaggatccatctgctccccatggagttcggcttttgattgaggactatccttatgcttctgatgggctagagatatgggatgccatcaagtcctgggtgcatgaatatgtctcattctactacaagtcagatgcag

SEQ ID NO: 25734 - DNA, 252 bp, Glycine max
  Clone ID: 700905767H1
atacagcagagcaccaagacgcacttaaaccaattgtggaaattggcttacccggacagggagcttccttcacttaaatcagacctttggaacgaaatgggatggcaaggttctgacccttcaacagattttaggggtggaggatttatttcattagagaatctcatcttctttgcgatgaagtatcctgattcattccagcgattattgcataaacaagatggaaccacagctgagtgggaatacccactt

SEQ ID NO: 25735 - DNA, 234 bp, Glycine max
  Clone ID: 700905768H1
ttcgacggcgacggcatgctccacgcgcttcgcatctaccatggcaacaaacccaccgctctgcagccgctacgttaaaacctacaaatacaccatggaaaacgacgccggtttccctctcatccccaacgtgttctccggcttcaactccatcgtggcctccgcggcacgtggctccctgtccgctgcacgtttcttaacggggcacttcaaccccgctacggcattggcctg

SEQ ID NO: 25736 - DNA, 246 bp, Glycine max
  Clone ID: 700905769H1
gccgcttgtaagctctttcgtcgagtgcgcgatcatgacaggactcgaggaagaagccccggctaactccgtgccagcagccgcggtaacacggggggggcaagtgttcttcggaatgactgggcgtaaagggcacgtaggcggtgaatcgggttgaaagtgaaagtcgccacaaactggtggaatgctgtcgaaaccaattcacttgagtgagacagaggagagtggaatttcgtgtgtaggggt

SEQ ID NO: 25737 - DNA, 250 bp, Glycine max
  Clone ID: 700905771H1
ggagcttatctttggccaggattatgtcacaactggagcaagtagtgatctccacactgctactgagcttgcccaatacatggtatcaaattgtgggatgagtgatgcaatcgggccagttaatataaaagagcgaccaagttctgaaatgcagtcacgtattgatgcagaggttgtgaaactccttagagaagcatatgatcgcgtgaaagcccttttgaaaaagcatgagaaggcattacatgtgctg

SEQ ID NO: 25738 - DNA, 255 bp, Glycine max
  Clone ID: 700905774H1
atgctgagacaaactgaaccggatcctgtagttgaggatgactaccagtgatgaagaaattgatgtggatgaactcgagaagaggatgtggagggacaaaatgcgtctcaagcgattgaaagaacaaaccaagtccaaggaagggactgatgcagcaaagcaaaggcaatcccaagagcaggcaaggaggaaaaagatgtcaagagcccaagatggaatactgaagtacatgctgaagatgatggaggtttgcaa

SEQ ID NO: 25739 - DNA, 252 bp, Glycine max
  Clone ID: 700905775H1
gtgttactgctcactccatctcagtctcatcactctccaaccacaatcggctgtattggcgcagcgccgcctccgctcgcatcattccctccgtgtcactctccacctcttgtcgctccttcttctccttatcatcctcttccaaactcaaatgcttgcgctcctctcctcgcatttcgcacctctttctcaatcagcaaagagcggaggctcgcgtttcgagtggaggacacggaacggtatcggcgccga

SEQ ID NO: 25740 - DNA, 251 bp, Glycine max
  Clone ID: 700905776H1
gcacaacacaggaaaccaactaaattctgagaagaagaaaaacattcattcttttccattacaaaaaaatggaacgctctacaaaactcttctcggcggcgttggttctcttcgcggaactggtggcacaccaggcagcagcctcacaggatctaaaaggacagaagctaatcaacaaggtatgcacaatcgccccaagcagagacctctgcgttcaaatcctctcatcggacccaataagaagccctaac

SEQ ID NO: 25741 - DNA, 249 bp, Glycine max
  Clone ID: 700905777H1
gcgcagaaagatcttcagtgcacaagaatcagagacaggagaaaccctcttcggcttgacacgagcctcgaagtggatccttcgcgacacgaaaatgaccctagcacccatgttgctgctggagaaccacccaattcacctgaaccctgcgcactacatcagtgagattattagagaaggcacaaaaaatggcactgctttctttaagtgccatggacatgagcaatttgagatgacgggtttggatcc

SEQ ID NO: 25742 - DNA, 249 bp, Glycine max
  Clone ID: 700905779H1
accatcttgtccatctatcccacaactaatttttgattttacttgtttatttatcttcttcctcccttgtttgtttgtttctttgtttctttggcttgacaagaagaagatgatgatgatggacaagggggtgttggatgatgtgataagaaggcttctggaagggaaaggagggaaacaggtgcagctctctgagtccgagatccgtcaactctgcgtcaacgccagacaaatcttcctctctcagcc

SEQ ID NO: 25743 - DNA, 249 bp, Glycine max
  Clone ID: 700905782H1
attagctgaaccctcacctcaatcttgcgtgctagctagctttattccaattcctacagaaccaaattattctgctagctagctagtacgtcaaataaaatacaataatcaaatatggcattcagcgggacccaacagaaatgcaaggcttgcgacaaaactgttcactttgtcgaaggttcatctgccgatggagctgcttatcacaagaactgcttcagatgcagccactgcaatggccttcttgcg

SEQ ID NO: 25744 - DNA, 257 bp, Glycine max
  Clone ID: 700905783H1
ccaggctccaggttgcgttccgagcttgccaacgcaaacgtatcgagccagcctcacaagctacggatcttcaccgcgctccacccttcttccctatcccttcgtcccctccaattggaatgtgtttgtgacttcatatgctggtagttgacattttgaaattgcaactgtggtgggagcaataatatattttgacatcatcacggagatacagacttgtggcaggccgattgactccttgctagagaaagtgcttt

SEQ ID NO: 25745 - DNA, 251 bp, Glycine max
  Clone ID: 700905784H1
aatatactgatcataaatcacatagctagttgtttaaagtgagagaaaaagaaagaagaaaatggcaaactttccagttgttgacatggggaaacttaacaccgaagagagagcagcagccatggagattataaaagatgcctgtgagaactggggtttctttgagttggtgaaccatgggatatccattgagttgatggacactgtggagaggctcacaaaagagcactacaagaagactatggagcaaa

SEQ ID NO: 25746 - DNA, 249 bp, Glycine max
  Clone ID: 700905785H1
tccgtggttcgattcaatagtttagtacaaatgttgtgttctctgctgaacccttcgttcaccaccacccctctccctcgcttcaattccaatccgtaataaccgccgcgcgtgcaccgtagtatcatgcacgtcctcacacctcaccacctccaaccactacgatgtttgttcgccgccgaacatcaaggacgtggcccgctgccgccccgcggcggagaacgacttcacggcgaagtacgtcccttc

SEQ ID NO: 25747 - DNA, 249 bp, Glycine max
  Clone ID: 700905787H1
gcgatccaaagtaggtgtacatactgcatctcctggcatggttcttacagatctgcttttaagtggctcaacggtccaaaacaggcagatgtttaacatcatctgtgagcttcccgaaactgttgctagaacactagttccacggatgcgggttgttaagggaacaggcaaagctatcaattacttgacccctcccagaatcttacttgctttgatcactgcttggttacggcaaggtcgctggtttga

SEQ ID NO: 25748 - DNA, 245 bp, Glycine max
  Clone ID: 700905788H1
ggcgacgagtcttccaattcccgctggggttcatctagggtttctgacgagcccacgagaaacggttttggggctagggattccaatcgcgagcttcccccttcgcgcgctgacgaaactgataattgcaccgccgcgaagaaaccctccggggggtttgaaaggacggagagggacaaaggagggttttttgactcgcagtcgcgcgctgatgaatctgacagctgggtttcgaataagagttt

SEQ ID NO: 25749 - DNA, 246 bp, Glycine max
  Clone ID: 700905789H1
cgggcccgtgcccatgcacaggcccaaattttggctaccggaactcgaatttgggttttccaccaaaccagaaccctgttcgtgtttctcctcctgtttctgttccggttcaggttcagtcatctgaacaggacaagaagatcatggaccacaggcttcttgaattggacaagcagcttctggaagataacgacgaagaaggagaagcagatgctgcgtctgtgataaccacgagcgagtggtccg

SEQ ID NO: 25750 - DNA, 249 bp, Glycine max
  Clone ID: 700905790H1
cggcgatcatatttctctgcaatccgaacagacccacccttctctgcaattagttgctgagttttaggtgagagaaaagtgttcggaatttcccaaggtttctgtgaatatggcgaataacttagcggtgcaacaactggttggttcagagatacatggattccacacaccgcacgcctctaacgccgggagcattatggaggaagcaagaaccagatggctccgtcccaatgagattcatgccatgct

SEQ ID NO: 25751 - DNA, 250 bp, Glycine max
  Clone ID: 700905792H1
aacgattcaagatatttcaacaggacaacctgggacgccgtttgattacggtgccggacacgtcgatcccgtggccgctcttgatcctggtctcgtctacgatgccaacgtggacgattaccttagggtttttgtgcgcactaaactacctcgtcatttcaaatcaagcttgctgcgacgagggactatacgtgtgacccgaagaaggactacagagtggaggacttcaactacccttcttttgcggtta

SEQ ID NO: 25752 - DNA, 256 bp, Glycine max
  Clone ID: 700905757H1
aatgtcttggctccttataattgtgtttctcagcctcacacatggtagtttttcagagacctaaccacgacaagaagcttacttatgctgttgtggttggcactgtctactgtgacacatgttctcaacaggaattctccattggaagtcatttcatttcaggtgcctcagtagttgcagaatgcaaagatggaaattcaatacaaagtttcaagaaagaagtgaagacaaatgaacatggggaactcaaagtgca

SEQ ID NO: 25753 - DNA, 258 bp, Glycine max
  Clone ID: 700905723H1
aggagacagttgagagaatcgatcaggttatgaagagtgttctcatcaccttggatccgagaattgatgactatgttccaattctaagtccgtttttctcaaagcaaagaaagaaagccttggaggttcgtagagaacaagttgagttcttagttccaattatagaacaaagaagaagagcaatccaaaacccgggttcagatcacaccgccacaacgttttcctacctagacacactttttgatctcaaagttgaag

SEQ ID NO: 25754 - DNA, 259 bp, Glycine max
  Clone ID: 700905724H1
attgacacccttggacctggtgctgtaaattttatcatagatcatgcagaagtagattttgtgttcgtccaagataagaaggttaaagagctttcaaatcctgaatgtaaatcctcaaagcgactgcaagccatggtgtgcttcactacattaacagaggaagagaaagctaaagccacagcaattggaatttagccatattcgtggcatgaattcttgcacttgggaaaagcgaacccaaaaagtacttttccacctc

SEQ ID NO: 25755 - DNA, 260 bp, Glycine max
  Clone ID: 700905726H1
cacacacaactcgcatctcagtcagcatgtcttaatttacttggtgtcaacggtgccaacaaagaatctccgggtgcaaattctaggctacctggccaccattgtagccggttcagtcctcgccggggagctatcgctcatgtctgctattgcagctggacaaccttgttaagagccacatgaaatacaacagatctagcagggatatatctacaactgtccaatgaactggccacagtacacttaaacttgtgtcagag

SEQ ID NO: 25756 - DNA, 261 bp, Glycine max
  Clone ID: 700905727H1
ccacacccccctagctacagagcagccaccaggggacgaataataataagcctatattctaaggccggaaaaatacaaaaggaataacaccaatgtctggaaaggtaattatctcggctgtttctctcatcctggtggttggagtggccataggtgtggtggtggccgtcaacaacaagggcgaggatcccacacttcaatctcaacaaaaatcagtaggggttatctgccaaaacactgatgaccagaagctctgccacg

SEQ ID NO: 25757 - DNA, 267 bp, Glycine max
  Clone ID: 700905728H1
aaaaatctctacagaaatccaccacaccaccaaaccaccaaccaaccatatggaggtgctaagggtgcaaaccatagcttccaaatccaaagatgctgccatcccagccatgtttgttagggcagagacagagcaaccaggcatcacaaccgttcaaggggtgaaccttgaggtgccaattattgattttagtgacccagatgaagggaaagtggtgcatgagattttggaggcaagtagggactggggcatgttccaaattgtgaa

SEQ ID NO: 25758 - DNA, 258 bp, Glycine max
  Clone ID: 700905729H1
actttggttcccctccaattttatccctccccctcactagcactcaccacatttcttcatcatcacaaactccaccaccaactcctcctccacaatctcagcctccaacttcgtctccacagcagctaagaacaacaaatttgaatgatgaatcaatgcaagtgtgcactgaagctaagcaacagaagcccatcaaaccatccactaaggttgaatccacagattggatagccacttccttgaccagaaggtttggga

SEQ ID NO: 25759 - DNA, 257 bp, Glycine max
  Clone ID: 700905730H1
cgagcaaaactgaaagcaaaggctaactcggagtgcaacacaaccacaatctcatcgttccaatcattatcggcacttgtttggagatgcataactcgtgcgcggcgcttgccgtatgatcaaagaacaagttgcaagttgtccgcaaacaacagaacaagaatggaaccaccactgcctcaggagtactttggaaactcaatttatacactgaatgcaggaaccgccacctcagggaaattgcttgagaatggtat

SEQ ID NO: 25760 - DNA, 261 bp, Glycine max
  Clone ID: 700905731H1
atctttcattaccaacgtcacaaccacaacccctttgtattctattccaattacaaatgcccttgttctctgtgtctctgtttattctcatttcacaactcatcaatcccctctctctctctcccacacgcaaaacctaagcatggctcagaaggcccacaaaaacgacactgagtttaaggtccccgaacccatcatcaacccctgcaccaccaccaccaccaccaccacctcgatttccgaaccttctagattcttcga

SEQ ID NO: 25761 - DNA, 265 bp, Glycine max
  Clone ID: 700905732H1
cgatctctatccaagggatttggcttgtattatttagcttcgttttgaagagttcatttaattttcacaaaattttgaagcagcaccaccactttttgttctactacccatttcatggaagagaagtagaaaggggaatgctttttgtccaagttggaaaacaaaattatatttttgaatatttctttgctcaatttcattctctacatgcaatgggatataaactacgtgtgataccctgttctgccccaccaccatcatttta

SEQ ID NO: 25762 - DNA, 256 bp, Glycine max
  Clone ID: 700905735H1
gtttgcagtcactgctttgtttagatcagaaccagatcgtgttctgttcttccattggcaaacatggcaactcaaatgagcaagaagagaaagtttgaggcggatggagtgttcttcgccgaactgaacgaggttctgacacgtgagttggcggaggacggttactccggcgtggaggttagggttacgccgatgcgcaccgagattatcatcagagccaccagaacccaagccgttctcggtgagaagggaagga

SEQ ID NO: 25763 - DNA, 255 bp, Glycine max
  Clone ID: 700905737H1
caatcccacacgcttcttactcatctcataacttttctgctccccgttgagaaagatttgaatccacaggaaaaataacgctaatggctccaagagacagccgagccaccgcgctcattgggcccggcccaagcctatcaccggcccacaaagagatccgctacagaggcgtcaggaaacgcccctggggccgctacgccgccgagatccgcgatcccggcaagaaaacccgcgtctggctcggcactttcgaca

SEQ ID NO: 25764 - DNA, 257 bp, Glycine max
  Clone ID: 700905738H1
tccatccgttcttcatgttctacttctatctccctaccatactcattcaaacagacatgaaaattatggaatcattagctcttatccttctacagtactcttgttttagctacgatttcagttccagcaactaactccagaatcatccatcaaaaaaacaatgccaatctgattgaagaaacttgcaagcagacaccccatcacgacctttgcattcaatacctctcctccgaccctcgcagcaccgaagcagatgt

SEQ ID NO: 25765 - DNA, 256 bp, Glycine max
  Clone ID: 700905739H1
gacggagcaaataaagcacagaatagttgaagtgaatggcataaaaatgcatgttgcagagaaaggagagggtccagtggtgttgttcctccacggcttccctgagctctggtactcatggcgccaccagattctctctctcagctccctcggctaccgcgccgtcgctcccgatctccgtggctacggtgacaccgaggcaccaccttcaatcagcagctacaactgcttccacatagtgggtgatctcgttgcg

SEQ ID NO: 25766 - DNA, 254 bp, Glycine max
  Clone ID: 700905740H1
attccaatcatgatgatgaacatacttttaaggagttcaactcagtgcagtggacatctgaaaatccgcccaagattcttgtaccaattgccaatggttcagaggaaatggaagctgttattatcattgatattctgcgaagagcaaaggcaaaggttgtggttgcatctgttgaagataaactagagattgtggcatcgcgcaaagttaaactggaggcagacatgctccttgatgaagcaaccaaactttca

SEQ ID NO: 25767 - DNA, 258 bp, Glycine max
  Clone ID: 700905742H1
cagaaacttcttgggattgcatttgtggtgtaaatcaggatgcatccaatataagtgtatatttttgagagatttctctatcctcgaaatagcatctcttatttttttcacaagtgccggcgaaggttgcactctggtcccagtgcatttgtctgtgaacagatctgatatgataaagtggctgctgtaggatgactgttgaagcatgatgcctacaatttggagacaaaggactgctacttacagtttgttttttgg

SEQ ID NO: 25768 - DNA, 256 bp, Glycine max
  Clone ID: 700905743H1
actctgatacaaaaacaacaagaactaaacacccttctgtttgtgtatgcaaagtgtcaaacttttccacctcaaccacccccacacccaccttgctgcaaagttgcatatcaaaaactttgcatggggggctgattcttgcagcttccgttgtaaatggtggagctgccacagctttaacgtacgatgaagccctgggacaacctttgagcctccctggtgctggggactttgatgtgaacggttttgtggagag

SEQ ID NO: 25769 - DNA, 256 bp, Glycine max
  Clone ID: 700905745H1
agcgcaccaacagccaagactctgacttacctggcccaggagaaaaccccagaatcgagcttcgttcgggacgacgaggagcgtcccaaggttgcctacaacgaattcagcgacgagatcccagtgatttctcttgccggaatcgacgaggtggatggacgcagaagagagatttgtgagaagatcgtggaggcttgcgagaattggggtatattccaggttgttgatcacggtgtggatcaacaactcgtggccg

SEQ ID NO: 25770 - DNA, 253 bp, Glycine max
  Clone ID: 700905746H1
tgaaagcaaagcaccccaccgcgctctttgcctaaccgactcactcccatggaatcccacacacacgacgccgtttttcccgacaaagatctcgacgacgacgacgaaactccagaggatgaagaggaggaggaggacgacgacgtcttagatgacgatgaaaccgaaccccctccctccgtcatcgccgtcgcgccgcccgcttcccaaacgctcgacaccgcgttaattccgatctcctccgtcgcggatt

SEQ ID NO: 25771 - DNA, 252 bp, Glycine max
  Clone ID: 700905748H1
taaggtaaaccaagattgaagccgcccttaccagccaatgctgggttgtatggatgtcctacccactgtcacaaatgtggaaactgttgctgtttctccaaccattctaaggcgtgggcctgaatggtttgccagttttggtaggaagaacaatgctgggacaaagttgttttgtgtgtcggggcatgtgaacaagccttgcactgttgaggaggaaatgagtactccactgaaggagttgatagagaggca

SEQ ID NO: 25772 - DNA, 261 bp, Glycine max
  Clone ID: 700905749H1
atggatttaaccccaagtccatatcaatctatatatatttgcagaatatcattgttttgttcaactatccttatctgttatatctcaccacctaagtttattatcactcaaaacccacaagctagcaagctaccttgcaaagcaacacatggcttctacagacaagcatggcgacactgaatacagaacatcatcttcaactccagctcctgcgggtgttgattactttaaatttgatgtcatcctaaggtttgtgttatt

SEQ ID NO: 25773 - DNA, 254 bp, Glycine max
  Clone ID: 700905750H1
tactattctcctcattgcttcatttttaaacctagctccatctccctccactcaccataccaccacaaccacaagccaatgctgccaacaccaacttctgtgtaaatgttagcaacaatggctacattagtgctaatgaccccttgaactggggtgcggcggcggaggctatggctgggagccacctcgacgaggtcaagcgcatgctagaggagtaccggaggcccgtcgtcaagctcggtggagagaccctg

SEQ ID NO: 25774 - DNA, 255 bp, Glycine max
  Clone ID: 700905751H1
gaacctcgatggacagcgtgatcaaagcgttcaacatgagcgacaggctgacggtggaacacggcaacagcagcgccggaatgaagatggctctggaggattgcaaggacttgttgcagtccgccatccacgacctagaggcctcaggcgtgttggtcaaagagagcagcctacaggacgtgcaccagcgcaccgccgagctcaagaactggttgggagccgttgttgcctaccagcaatcgtgcctggacggct

SEQ ID NO: 25775 - DNA, 254 bp, Glycine max
  Clone ID: 700905752H1
atcaactcaagtaaggattttgtctttgagaaaatcgtatcttacacccaccagcaaacactttgagtgagagaagagaaattaagagagatactcaaattagattcaaaagagatggccatcaaccatgaaacttgggctttcattttcggtcttctaggcaacgtgatctcatttatggtgttcctcgctccattaccaaattcccactacatctacaagaaaaaatctacggatgggtttcaatcactacc

SEQ ID NO: 25776 - DNA, 253 bp, Glycine max
  Clone ID: 700905756H1
gaaagataaagcattccatagcctcccatcaaaaatcgaagaatactatcttctctgctctctttctactttgtgccttcaccacctcatacctaccttcaaccaccgcggtggtcgataccgacggtgatattcttcagaatcctggcacatactttatcttgtccgtttttcgacccggcggcggagtagaattcgccgccactggaaacgaaacttgccctctcactgtcgtgcagactcttcgggaggg

SEQ ID NO: 25777 - DNA, 252 bp, Glycine max
  Clone ID: 700905722H1
ctccgccttggccaaatccctcagctcttgttgtttgattgagatgacgatggcgttgttagcgggtcagagctccatttccgcgcttccatttgttaacccaacttccttgagcttcaaacctctcgcctttaccaaatccctagctctcccttcagcacagaggccaacttcgctgaggctgaaatgcaagatggagaccaacggcaacattctgcaggggaacactcgcacggtgacgacgctgatggg

SEQ ID NO: 25778 - DNA, 249 bp, Glycine max
  Clone ID: 700905677H1
tttcttcctcagtagtgtcatttacgcttctcttctctgcagcaactatgcctaaccctaaggtcttcttcgacatgaccatcggcggtcaatctgctggccgcatcgtgatggagctctacgccgacgtcactccccgcaccgccgagaacttccgcgcgctttgcaccggcgagaagggcgtagggcggagcggcaagcccctccactacaagggctcgtccttccaccgcgtgatcccgagtttca

SEQ ID NO: 25779 - DNA, 241 bp, Glycine max
  Clone ID: 700905679H1
attattgtaaactaatagggatgaaaaaatcttaacttgtacccctttattggcagctgaagtatccagcaccaggggctccacacttcgtacggcttctgaaggagctactcttaggatcagggtttagccatgtggatgaagataagaaacgtgggcttgaccatggtgcatgggtgccactcttgtggatgtacccagaggcagacatcccagtgtgtcaactctctatttcatcaaa

SEQ ID NO: 25780 - DNA, 242 bp, Glycine max
  Clone ID: 700905681H1
gcggattcatcttcggtcattttattttgtataataaaagaaagataataaagagaataatcatattaaatattaaatagaaaaaatggcccgatcatttatcaaaggccaatcttcggtagaagagaaggttcctttggaaaacttatttctatttcagtataccgggtctctttctttcatttcaaaaaatttatagaatttcgattttgaaatgaaagaaaagtgtggggataaatata

SEQ ID NO: 25781 - DNA, 243 bp, Glycine max
  Clone ID: 700905682H1
gtaagttcgaattgcggaagcaccattcacgataaatcatgttctagtttttatcgaggaataaaggcaagctctatttggagtcaagtgaaacatctatcttcctgtccaagttctttgaataaaagtctgaatgtgtcatctctgcactacaatatttgtgattctgaccaagttggttctatttatttgatggccatcttgcacgtcctgatcttattgtgttcaagtgacagacaaatc

SEQ ID NO: 25782 - DNA, 240 bp, Glycine max
  Clone ID: 700905684H1
aaacaaacaaacaaacaaaatgtcttctccaagcaagcggcgagaaatggacttgatgaaactgatgatgagtgactacaaggtggagatgattaatgatggaatgcaagagttttatgtgcacttccatggacccaatgagagtccttatcatggaggtgtatggaaagtaagagttgagctgccagatgcttatccttataaatctccttccataggctttatcaataagatctatca

SEQ ID NO: 25783 - DNA, 240 bp, Glycine max
  Clone ID: 700905685H1
taagaactctactcagtagagagcaccctcatatggcagagaaatatgaacgctttctgcttgaatcttacattgaagacaataagagagttaaatggtgccccagcacacctcattgtgggaatgcaatacgggtcgaggatgatgaactgtgtgaggtagaatgttcatgtggtgtacaattttgttttagttgtttgtcagaagcacactccccttgttcatgtctgatgtgggagc

SEQ ID NO: 25784 - DNA, 241 bp, Glycine max
  Clone ID: 700905686H1
aagaaaactcaagctcccagattctgttccaatgcctcccgtaccactttcccccatcaaagttgggcacattgatgatgtccaagagctaagaaaaaccaagccaaggacaattcctcaaagatttgtacgagacttgatagaaagaccaacactcactacacctcttcccccaccacatagtgcactgccagtcattgatttctctaagcttagcaaagggaacaaagaggaagtcctc

SEQ ID NO: 25785 - DNA, 175 bp, Glycine max
  Clone ID: 700905687H1
tgacgacatagcgtatggtcatgaagagtttttcttttcggtttctccattgggtttgggtagatagaaatttttagtttggtcctgatcacaggaatttattatactgtattgttttacagtccaaagcagtccggaatcgtcccaatgcaatgcttacagatttattaccgct

SEQ ID NO: 25786 - DNA, 240 bp, Glycine max
  Clone ID: 700905689H1
gcttgaggacttggttttagagctccaaaccttcagatccacctcattcgtctccagatcttccttccttgataacgttttcgggttcgagaaggcacttgtttgtttgtcgtacgaaatggagactaaaccgagttcggtgatggttacgctcagttacggcgcgttgacgtgcgccgcggaagttctcgcgactttgctagcttctgctgtcgtcaaagccacgcttttggccccgga

SEQ ID NO: 25787 - DNA, 237 bp, Glycine max
  Clone ID: 700905691H1
gtcccagcatattgaaaatgatggggtttctggggaagaatctgaagtggcagatgtttcaattgataaggatgttgataagattgggagtgagggtacttctggagctggccaaactccagtggggaatgtactaaagaaattctccaagactcgagcttcaatccctgagtggcagtattccacaagaaaaatagataatgatgaaaagttccttgttagtttgatgagagaaaa

SEQ ID NO: 25788 - DNA, 244 bp, Glycine max
  Clone ID: 700905692H1
atcatcatcattcattagctgggcggtttgaaaaggctaaattctaataacaccaacgtcttcatcttgtaagctccgtctcttgacaaaatcaacgtcccatttatgcaagctttgattaaccattttcattccctttttccttcgcactactccctcattctgtgccatgtcttcctctctcgttcttccttccactcccttcttcgccaatggaacaagaaccctccctctcactcgatct

SEQ ID NO: 25789 - DNA, 260 bp, Glycine max
  Clone ID: 700905693H1
tcagaattctgctcgttgctctacgcactatagtctttgttttcatttactaccatatttagttatcagcaatggacttctactttggaaactctcctccttatcccaataattatgctcataattctcttaatatggctctatcttcccctgagattgcactatccgattatctcatgctcgatgactatgttgatcatcaagattctcgatcatcacaaagcaccgagtcatctgaaaaagcaaccttcaatgatgcc

SEQ ID NO: 25790 - DNA, 237 bp, Glycine max
  Clone ID: 700905694H1
gcacgtatactttgctctgctccttactccaaagtgcccctctctcgcgcttcgtctttcaccaccgtacaatttttccgcagcttcaacgcaacctgatcgagacaattccagcattcactccgctagcgtctttcactcataaaatttggaacgtttcgtgaaactcccaaaccagaagccgaagtttccaagtgaaaatggacggtacgtttgacgatgaagctgaaccggccg

SEQ ID NO: 25791 - DNA, 238 bp, Glycine max
  Clone ID: 700905695H1
cccaaattcattttaatcctaattctgcacttcttgatcattcgatttttctcctcaagatgcagatattcgtaaaaactttgaccggcaagaccatcacccttgaggtggaatcctccgacaccattgacaacgtaaaagctaagattcaagacaaggaagggatcccacctgaccagcagagacttatctttgcgggtaaacaacttgaggatggtcgcacccttgccgattacaa

SEQ ID NO: 25792 - DNA, 231 bp, Glycine max
  Clone ID: 700905696H1
ctcacataacactgtttatcgatgatgctctgaactctttatctatatatgcctctctgatgccgatgggtgcctccagttttccggcaagcttcaaacttcccttcgccggccccgattttgatcacttttccggtatgaatcgtttgcgacaccccctttgttgatttagaaatgctagatctattcgtcgcatcacacgttcgatccaaaacctggttccacaagagg

SEQ ID NO: 25793 - DNA, 265 bp, Glycine max
  Clone ID: 700905701H1
ccacaaccactcttaatttctctgtgcattgctcatttacacacgtgtccaacctttcactttcagctttatttgaatccctctctctcctttccaaatggccagcgttgagctttcttaagcttggcacgagactttgttaaatgcaattagcaatctcccaggttgcacatcaaacaccaacaacagttccagaaaatgaaacaaccgcggtaatcaagacccaggaaacaaccccggaaccagtaccagccactgaggctcc

SEQ ID NO: 25794 - DNA, 262 bp, Glycine max
  Clone ID: 700905704H1
atgagttgagagtattgtgttgttcacctgctaacgtaacaagtaagctccagcactgtatttcattatctttcctttgatccatggaagcctgtgatctcatgtgatagttggtgtgctgcataggcaacgctttctaacgtgtcttctaaggtggtatcactgctccacggttgccgaatccagcctcttgcttctttctccttccaagatatcctttgattcaactttggatcttcacctctgatttcctttcatcgtt

SEQ ID NO: 25795 - DNA, 260 bp, Glycine max
  Clone ID: 700905711H1
acaaccacaacaaagggaccaaaaaagtatccactttcccttcttcttcttccatttgggttttctcaaaagtgaaaagcaaattccgtgacttccacaatcaccactcgcatcaaactcttgagtgatagactttgaatgaaatcttgtttttcattaacgagattcaattgaagtgaagtgattattcactggaaaacttatttttcatagtattggaggtacaactgaagctgttagatttgttttaactacacgag

SEQ ID NO: 25796 - DNA, 261 bp, Glycine max
  Clone ID: 700905712H1
cagcaacaagtgcactttctttgtccagtcaagctgctgctggtacagtaacatccccaaggcaagcggctgttagccaaagcaagaggcacaggctgataaatgagatggaaaccgagtcataccctctcacagaggtcactgcaacgtggatcagcttctagtggtgaaaacaacagaattaaagtccatttgccacagagggaatcaagaactggaagcggtgggggcagcagcaccagggagcaacagcaggaagat

SEQ ID NO: 25797 - DNA, 259 bp, Glycine max
  Clone ID: 700905713H1
tagttaagaccgctgggcttctaggtgatggatttggttccacgcctgaaatgtgtaagaagaacctgatatgggtggtgactaagatgcaggttgtggttgataaatatcctacatggggtgatgttgttcaagtagacacgtgggtttctgcatcagggaagaatggtatgcgtcgtgattggattgtgcgtgacgccaaaactggtgaaatcttgacaagagcctccagtgtttgggtcatgatgaataaagtgac

SEQ ID NO: 25798 - DNA, 254 bp, Glycine max
  Clone ID: 700905715H1
agctagaagcaataagatgacaatgaaagtgcttgttttgtttgttgctacagttttggtagcatatgaatgccatggctcagactaccagaagttccctctccaaatgaaaactgggtttggtgggcaatacagcaatgaggtggcatgtgccagttggaggcttggcgtggaagcaaacaacgtagtcaagtggcaaactgttcctgcagcttgcggagagtacatagctgactacgttctaggagaccaat

SEQ ID NO: 25799 - DNA, 260 bp, Glycine max
  Clone ID: 700905717H1
aggtaggttgtgtaagaactgtggggtgagggaaccagtggtgttgttgttgccatgcaggcatctttgcctttgcacaatgtgtgggaccaccgataaggaattgccctatttgtgactctggcatggatgctagtgtgcatgttaatctctcttagtacaacttttgtttttttttacataggtttttattgtagagtttacaacaacagaaactagaaagaaaaaaaacatcttgtcgaaaagacagatagaagaaa

SEQ ID NO: 25800 - DNA, 259 bp, Glycine max
  Clone ID: 700905718H1
aagatggctggtattaagagaagattatgtagtgattcagatattcatgctcttcacaaagaattggacagcagttcatgtcctatctgcatggaccatccacataatgctgttctactcctttgcagctctcatgacaacggctgcagatcttacatttgtgatacaagttatagacattcaaattgcctggaccgattcaaaaaaatgagggccaattctaaggagaaccacaatttacccagttctttagtagaca

SEQ ID NO: 25801 - DNA, 266 bp, Glycine max
  Clone ID: 700905719H1
cacgtgtgcaagattgcctaccagctccttccaatgtagtggtgcttaccatctgaaaattttaatgaggttgtcttagatgaaaccaaagatgtcttggttgagttttatgcaccctggtgtggacattgcaaaagtcttgctcctacttacgagaaagttgccacagcatttaaattggaggaagatgtagtaattgcaaatctggatgctgataaatataaggatctggctgaaaagtatgatgtgagtggacttcctacctt

SEQ ID NO: 25802 - DNA, 260 bp, Glycine max
  Clone ID: 700905721H1
agtttcttttcgtgaaacaaaagaccacaacagattaggttttgtgatgtcgggcatggagaggcttcagaggatgttcgcaggtgcaggtggagcgctgggccatcccccaccggattcccccaccctcgattcctccgagcaggtctacatctcctccctcgcccttctcacaatgctcccacacggaagagctggggtacccatggaagtgatgggtctgatgttgggggagctcgtggatgagtacaccgttcgcg

SEQ ID NO: 25803 - DNA, 245 bp, Glycine max
  Clone ID: 700905675H1
gtccaaaacggtatcgtattttaaataaaacgtaataaatgaggtgtaagaaacacttaccggacctcaccagcaccatcggcgtgtgcgcttcgtgcctccgcgaacgcctccagcctctcctcgcagcccaggcccaagcccaggcccaatcagaacgttccaccaccaattccaatccggataataatcatcgtcgaagaaagcccaagcccaagcccgaagaaaaccctccgccgctcaat

SEQ ID NO: 25804 - DNA, 254 bp, Glycine max
  Clone ID: 700905629H1
attcattcattgatcaaactcccaaaacaatggcttctttcaatctctcttattcttcctcaccagccctctcacatcctcgggcgagcaaacaattcaaattattcaatgatgtgccttttgtccgaatgaattctaaatttccctcaagtgacaatgctattgggagaattaaagctaagttgatctctggagggggtgatctactttcctatccaaatggcaatggcattgtgataggtaaaaatctggtt

SEQ ID NO: 25805 - DNA, 249 bp, Glycine max
  Clone ID: 700905630H1
aggattctcaaatactcaactcattagcccttatcttgcccttattcctcttcatgattctgatcctaaaactagggagaaaactcaagagatctgaattgtctctaaacatataccgaggaccatggaaactgcctattataggaaatttacaccagcttgttacatcgacaccacaccgaaaattaagagacctggccaaaatatacggacccatgatgcatctccaacttggggagatcttcacaa

SEQ ID NO: 25806 - DNA, 248 bp, Glycine max
  Clone ID: 700905631H1
ggagctcgttggtgcaacgctgaatgcttttttttctttttgtgtgatagattttgcaagttgcgtgtgtgtgagagtgagtgagtgcagaagatgtggccattgagcagaaaagggtcttctgggttttcatcatcatccactgcagagcaagtcactgaaggaattgatggaactggtctcactgccattgtcacaggggcatccagtggtattggaactgagacttcacgtgttcttgctttgcg

SEQ ID NO: 25807 - DNA, 247 bp, Glycine max
  Clone ID: 700905633H1
tgacacaagtcatcattaactctatgcctattcactctttcctcagtttctctatccatccatctctttcatcactttcctctatctatctatatatatatatatctccctctctctattctcttttactactgttctgcaaaaaagctattttggccctgtgccaccaaagccatctcccccatttttgctcctctatctcttttttctaatcatcacaattgggtgagaaaaaaacacacacaca

SEQ ID NO: 25808 - DNA, 251 bp, Glycine max
  Clone ID: 700905637H1
ctctgggtaggtaaagatggaaggtgctagtagagtcttatgcttgtttctggcggcatttttgtggtttaatgctcaacatgcttttgtaagttgtgctttgacatttgagttgcaaagcaaaattgctaaagccaaccaagagggaccttacctaggtttaatcataccaaattcttttgaactagaccctcttcttcagaatcctggctacacagctagtgacaccatcatagacttcgctggaagga

SEQ ID NO: 25809 - DNA, 246 bp, Glycine max
  Clone ID: 700905641H1
tagttatctactcttttctgcatgtttgttctctcaacgactcctccgcgaaagagtattattcaatattttggttgggttgaatcccggggttgaagcgttgcagacatcacggctattctaagagtgtctcgctccctcattcatgtccgatctgtacgacggaggacgggtagttgcgtaactgccgttaacccttcgccgcacggtgggcgtggtgctttgccttctgaaggtggtagccct

SEQ ID NO: 25810 - DNA, 247 bp, Glycine max
  Clone ID: 700905642H1
attggttacgtacacatgccaacttggaaccatttatattggcggctcataggcaattaagtgctatgcatccaattttcaagttgttggacccccacatgaggtacaccttggagatcaatgccttggctagacagagtttgatcaatgctgatggaatcattgaaaattgctttactcctggtcgctatgccatggagattagttctgctgcctacaagaacttttggcgctttgacatggatag

SEQ ID NO: 25811 - DNA, 250 bp, Glycine max
  Clone ID: 700905644H1
atactgtttctaagcataatcaaatcaaccatggctaccctcattgctccaatcaccttttcgcctggtttagatgcagaagctcttagaaaagcgttccaaggatgggggactgatgagatgaccgttatagcaatatttgttcacacatatattcatcagaagcggcaaatcatacagatttatgaggaaatttaccaagaggacctcatcaaacgcctagagtctgagctctctggtgactttgaga

SEQ ID NO: 25812 - DNA, 248 bp, Glycine max
  Clone ID: 700905648H1
atctatctcttgtttcaatttcaacaacggttactccattttcgttttgagtttcaatcaagccatcatcatgtctaccgcatcgcaacccaaggccaagaaaacggcgtcgtccaagaagcccctctcccaccctcccttcgccgtgatgatagcagaggcgattgcgagtctgaaagagagaaccggttcgagccaatacgcgataaccaaatacatcgaagggaagcacaaggagttgcctgcaa

SEQ ID NO: 25813 - DNA, 89 bp, Glycine max
  Clone ID: 700905650H1
gggaaatcgaaggaccacgcctagccagcattctttggaattgaattgtgattcgtgaaggaagggatagagacatgagcaacgttaac

SEQ ID NO: 25814 - DNA, 246 bp, Glycine max
  Clone ID: 700905651H1
ccggagcttctctttatagcggtaaacccttgtcggattcgccgcttcctcttgtttacgctgggaacgcgagtaactcttctgtagggtatctatgtttgcaagattctctgattcctgagaaagtttcagggaaaattgttatatgtgagagaggtgggaatccgagagtggaaaagggtttggtggttaagcttgctggaggtgctggaatgatattggcgaatagtgaagcctacggagaag

SEQ ID NO: 25815 - DNA, 247 bp, Glycine max
  Clone ID: 700905652H1
aagaagatgcaggatatttatggagcttctggttactttttggagaaggattctgtgaaaaaggagaaacatttgcaatctttgaaattgactgaggtgactgtaagtgaccagcttgaaggttttcgagcatcaaaagagcatttcaaaggattgagattccccactatttcttcagttggctcaaatgcagctataattcactattttccaaaggcagaaacatgtgctgaacttgatccagaca

SEQ ID NO: 25816 - DNA, 250 bp, Glycine max
  Clone ID: 700905653H1
cggattcattgcatcaccgtcaccaccactttcatcatcataaaacatttttcatataaataaaatatattcattcattcacacatcgtaataatacttatctatcattctctctctttcaattttagacagaagactaaaagagtgaagagaacaaacagagcaatggaaggaggaggagctgctccgccggccgacaccgtgatgtccgacgcggcgcctccgccgcagcaagcgatggctatgggga

SEQ ID NO: 25817 - DNA, 246 bp, Glycine max
  Clone ID: 700905658H1
atccttcagaacaaggtagacttgattcaagaaaatgtcgcaatcaatcagcatgaggcaatttcaaagtttatacaaggaactgttgctgatggtgcaccagtagtacctatttcagcacagttgaagtataatattgatgttgtgtgcgaatatattgtgaagaagatcccaatccctgaaaggaactttgtttctccacctaacatgattgttattcggtcatttgatgtcaataaacctggt

SEQ ID NO: 25818 - DNA, 128 bp, Glycine max
  Clone ID: 700905659H1
ctatgttccgttttttctctgccgttatggtcaatcctaaacctcacaaactcttctcttccctctctatcttcccttccgccaccgctccccgcgactttcaatccctcaaattccacacaacatac

SEQ ID NO: 25819 - DNA, 251 bp, Glycine max
  Clone ID: 700905661H1
ccctcgagcgaatcggctcgagcgccgctgatgaggctgcacttcgtcgtgcctgtgctgcgaaggttcacatgtgcaataagctagctagtaggcatgtgagggttggtcttgcaagtccaagtgatgtgccacggtgtgacatatgtgagaatgcaccagctttcttctattgcgagacagatggaagttccctttgtttgcagtgtgatatgattgttcatgttggtggtaaaagaacgcatggaaga

SEQ ID NO: 25820 - DNA, 246 bp, Glycine max
  unsure (1)..(246): unsure at all n locations
  Clone ID: 700905662H1
acgaagtcgantttcctcactgctcaatccgagcaagagcgccaaagaaggtcaaatatcaacttctgggatgtttttagatccaaagaaatcagactggcattcctcgtcggtgccggacttctggcttttcagcagttcacgggtattaacacagtcatgtactacagcccgacaattgtccaaatggcagggttccatgctaatgaattggctcttcttctatcccttatagttgccggcatg

SEQ ID NO: 25821 - DNA, 245 bp, Glycine max
  Clone ID: 700905663H1
ctccagcactttcttctacttcttcatcatcattgtcaccacaactcacaatggagatcaagagtagagagaggatacaagtgtcaattgaaaaggtgaggagagacagcacagttgaagttgaagatgaagaagaggaggatgaaagtgtggttggtggtgagggtggtcttgcagaagatgagaagaagaaaggtggtggagggagtgggagaagagggtcaagtggagtttctccaccttct

SEQ ID NO: 25822 - DNA, 249 bp, Glycine max
  Clone ID: 700905664H1
tactcgagcgaattcggctcgagttaagctagagcttcatagttacttcttcttttctcagcttccttctctcccttcagacaaagggacaaaaaatcagtgtgtgagagagagagagagaaattccaaaaccatgtcccacagtcatctaagtttcgcctttgggattctaggtaacattgcctccttcgtgtgctttctggcaccactaccaacattttatagagtttgtaagaagaaatcaaccga

SEQ ID NO: 25823 - DNA, 158 bp, Glycine max
  Clone ID: 700905666H1
attttcttcaaaaacaatggtaggcgaggtggtgaagaaggaagactctctcaacctgagagtcactaacaagagtcatgttcaacctgaggagaaaattggaaggaacgagtaccagctggtcacttttgatcttccctacttggccttctactaga

SEQ ID NO: 25824 - DNA, 246 bp, Glycine max
  Clone ID: 700905667H1
ataaaaggttagagaatgttgttgtaatttggtctagttaacttggtggctcgctgacgtcacgtggttaagttgagaaacaacaacagagacacggtggtgtactcacggaatgaattggaatcggatcgtgtcgtagccaccgctcctacctggcgccgtctttcactttctgcttctcccatctcccactaaacaaccatggacctggatcctcgccaatacgaaaaccttgctgtaaatgat

SEQ ID NO: 25825 - DNA, 245 bp, Glycine max
  Clone ID: 700905668H1
gaagacttcattttcttctgcatttctccgttaaagaaaaagcaagaacaaaattaaatttactattttgtgtgtgacactgtgtcttatttatgctctttctgtattttctttctacatctatattctaaaccttccttttcctttctgtctgctactgcgttttcatttattgatgtccttcttttgttttatttgccaagatgattttctgattggtttttgatgttacaaggaaatctggg

SEQ ID NO: 25826 - DNA, 245 bp, Glycine max
  Clone ID: 700905670H1
ggtcgttattgcaggaacttaagagtcttgtttttagaggaaagctcacttgttgagaatgatggtgactggctccatgagcttgctttgaataatacagttcttgagacactgaatttttacttgactgatattgccaacgtcagaatccaggaccttgaacttatagccagaaattgccccaacttaaactctgtgaaaattactgattgtgaagtattagatctggtgaacttctttcgata

SEQ ID NO: 25827 - DNA, 245 bp, Glycine max
  Clone ID: 700905671H1
taagaaggcagctgcagctgctgttgctgctaagcttgctgcctctacatcctctgcccttatgcttacatctgttctttcttcccttgttgcagaagaagctgcctccatgaatggtagcttaaactctactgggtttacttcagggttacctgttttccgtccagagaaaagacaaaaacttgaaaaacaaatgcatgcttctgagtttaacagtactgatatggggagctcttcttttctgg

SEQ ID NO: 25828 - DNA, 253 bp, Glycine max
  Clone ID: 700905628H1
cgttagggcactcaacattttacactcttttcttcttctcgttgttgcttcggtgttgaatcatggatcagaaagtcgatttcagtgctccgcattccatgggaaccactatcatcggcgttacttacaacggcggtgtcgttctcggagccgactctcgaaccagcactggagtgtatgttgccaaccgagcatcggacaaaatcacacagctcactgataatgtttacgtgtgtcgctctggatcggctgc

SEQ ID NO: 25829 - DNA, 243 bp, Glycine max
  Clone ID: 700905673H1
ggactcactgtgtcgtggaaccttttgtaattgcaacacataggcaacttagttccatgcatccaatttatagattattacatcctcatttgagatataccatgcagattaattcccttgcacgtgaggcacttattagtgcaaatggggtcattgaaatttcattccttactaataaatattcaatggaattaagctctgtggcatacgatcaactttggcaatttgattcgcaagcacttc

SEQ ID NO: 25830 - DNA, 246 bp, Glycine max
  Clone ID: 700905674H1
gagctttagttcatctaagttttgaaagttttgtgcttgtttccatttgaagtttctgtggcagcaggttagctgtgtgaagcagctcttcatcaaactctcaaatcacaactaaacaaacaaatcaaatacaccaccaagtatcagatcattggggttgtatgccctgcattactctcttttttattgcgtttataacttattcttttgtgcattgtgaatttgtgggttttaagattctcctct

SEQ ID NO: 25831 - DNA, 260 bp, Glycine max
  Clone ID: 700905593H1
gcaaagctgcctttgtatgctttcaagaaggctaatggaaaggatttggccctgcatgcatgcgccggggagcctcccctcacattcctcgactcacttcttctgggagagtgggaagatcgcatgcagagaggactttttcgctatgatgttaccgcctgtgaaaccaaggtgattcctggtgaatatggtttcgttgcccagcttaatgagggtcgtcacctcaataagagaccaactgagttccgagttgacaaggt

SEQ ID NO: 25832 - DNA, 263 bp, Glycine max
  Clone ID: 700905594H1
aatgtggggaaaagcaaccgaagagaatgtgggggaagatgtccctggccagcaatcaccaaccacagaaaacgttcctctcttgcaaagctgtaaaactgatacagctgagaagaaaatgcatggaagtgtataaatgacaaacaaaactgttcataaatcttaacattattgaaattacacgaaatagcaaagaaaagcatggttttgttatcccccaagctgaccatgcaacgccaatagcaaagtaggtacccactcct

SEQ ID NO: 25833 - DNA, 257 bp, Glycine max
  Clone ID: 700905595H1
gtgactgtgacaactttcatcggcacttgtcaactttttactgatgatgatgatgataaatacatgtttgtaattgagaggagagaaaaaaaaatcctatagatactgggttgttgtttttgttatgttagagatgctagaaaggggcatattgatgtctgtgcagacaatgaatcaccctccatttcttactggtgatgcctttagaaagaggactcagactcggtgcagatggagagcaaattcaagcacagctt

SEQ ID NO: 25834 - DNA, 260 bp, Glycine max
  Clone ID: 700905596H1
gctcactgaatgcagtagccaatgatggaggatggatatatcttggaactaacaaaactatggcaaaatcaagtatcactggctacagtcagtggtccctctcaaaggatcatcttcaggtgggtgatacagtgcgctctagaaagctttccaattcatgcgatcctcaaaacatggaggtcccagaaggaaatgttgttggtttagaacgcaatgtagatcatggatttgttctagtgaggctccatggtgttcatgac

SEQ ID NO: 25835 - DNA, 255 bp, Glycine max
  Clone ID: 700905602H1
atgatcctgtggctgtggatgttgtacataatggagccacattccaggttgcaggtttgacaaacaattcttatatagcagaagcatctgaagtgcgccattgtgtacagaaatataagactcttggtaaatatgtgctacaagttgcaaagaagagactggatgagatgttatatgttggtcttactgaggagcacagaaaatctgccacaatgtttgcaaatgtggttggtgctcaagtgatatcacaactta

SEQ ID NO: 25836 - DNA, 253 bp, Glycine max
  Clone ID: 700905604H1
ggttccaacaatgatacagaggacaacaagaaaaatcatgttgtttcttctataaaagccgtccaaaccctttgtcatcccacaaattataagaaagaatgcgaggaaagccttatagctggggctggaaataccacagatccaaaagaacttatcaaaattttcttcaacatcaccattacaaaaattggtgataaactcaaagaaactaatattttgcatgaggttgaggaggacccagagccaagatggc

SEQ ID NO: 25837 - DNA, 255 bp, Glycine max
  Clone ID: 700905605H1
ggcttcttctatgttagttactgtcagtgcgaagttggcggcttctatattggttactgtctatctcaggtcagtttcggcatttaatatctcagttttggagaattcactgttgaacagaatgatgtatgatcaactttgaacaatatttgagtacacttaatggtaggaagaatcctattacttcttaataattatatgaactttactcttttgtgtgggaagttatttaacagaagttgacttgttcaaaaa

SEQ ID NO: 25838 - DNA, 252 bp, Glycine max
  Clone ID: 700905607H1
cttcgctctgattcttatctcacactgaactctcttgctaatcgagtttctcactctgaaaaaaccttcaacgatggccgctgaaacgattccgtaccagaatggcgttgttgccaactccaacgactcctccgccacggtcaagagatcgatggatagcgaccgtcgccgccgccgctggaagcagaagaagagctacaggactctgaggctccggttcctaactccgctgaagatagtgatgatgcgaaa

SEQ ID NO: 25839 - DNA, 252 bp, Glycine max
  Clone ID: 700905609H1
gcgatcagagcctctgatgcagttgttttgtatgaatctgctcccttattgtcgcttgcagataaagtttttcctgtgtagatatctaactgaaacagttggtgtgataatgccgcctagaatcagagaaatgggcatcaagtgtttgactgtgactgctctgcaacagcaccgagcccaatccattctcgagcatttggaaggagaggattggatgtctgaactggctaggcttgaggccagttgtctttc

SEQ ID NO: 25840 - DNA, 91 bp, Glycine max
  Clone ID: 700905610H1
aagaaaaaaaaaatggaaaagaaacaagattgagaattggggtttgaagaagccggtggtgtctccttgcttgttctcgatcgatcttgtg

SEQ ID NO: 25841 - DNA, 252 bp, Glycine max
  Clone ID: 700905612H1
cccatttctcatgaacgcagctctgttctctcatctcaaacccacacaacaccgtgacaccgtcgctcctgcaaggttgccgcgccgcaccgtcatctgacggtggaacctgtctcaatctggcatccttaccgtcgccgtcacggaggctgctggaacagcgaccaacggcctccctttctgaacggcgaggtaatctactgtctgtttgaggtgttaaatagcatgtgggtgtctattgatcattttcct

SEQ ID NO: 25842 - DNA, 256 bp, Glycine max
  Clone ID: 700905613H1
cttgattctgttgttatttgcatttgaagctgtttgcttggggagtacatatttgtttgctcagagacaaatgaaaaaaaaaatgtaaaacaagattgttacatgcatgtggatgtaaaaaatgctgctacatattgcttgaaattttacaataaggaaacaaaaaaaatttgaaatgcaatatgtaaaaatcaagtcttgtatacagtgagtgattattgacgaataaagcctgctaaataatttaatttttgtg

SEQ ID NO: 25843 - DNA, 254 bp, Glycine max
  Clone ID: 700905614H1
agcgtattaacccttgtgatattagtggggtgccaaagaagagcagctgggacatgattgtggatactacttctcttgtaaacaaggaatcaaggaaagctatgcagcttttacaaggtctcaaagggactcggttaatcattccaagattggtcataggggaacttgaacgtatgaagaagcagttcacaattttcagaagaatttcagaggtttctttggcattggaatggattgaagaatgtatggtgaag

SEQ ID NO: 25844 - DNA, 249 bp, Glycine max
  Clone ID: 700905615H1
ccgagaaagttcattcgcattgcccatctgtgcttgcgtatctgttgatcccgctctgattctatccaattctcacacgcgtttatcccttgttctccaaatatgggctcagtttgaagttgatgtggtcaaagtcaaaatggattcacatgtaatatgataaagacatcacctagccaactgggttttctgaaggttgcaacatgttgatggacctttccctttttgtagatcacttctacaatgaaa

SEQ ID NO: 25845 - DNA, 247 bp, Glycine max
  Clone ID: 700905616H1
cttaagagatcaatatggccaccaccactacccagcctccctctaatatctgttttttccttctgttgttgcttctagcacactttcatttgggcataagccaacttgagctgaattactactctaaaagctgcccaaaagctgaagagatcatcaaggaacaagtcacacaactatataacaagcatggaaacactgccgtttcgtgggtcagaaatctcttccacgattgcgtggttaagtcatg

SEQ ID NO: 25846 - DNA, 250 bp, Glycine max
  Clone ID: 700905617H1
tttttattttatgcttttttctccgatgtgactggcgtttgtttggtgtgtttttcgtgtgcgtcgaaccctctgcgttcgttaattttgttttgtgttttcggatcgacttgtttcgcgttcggttgcggggatcttcggtttaggtaaatgagtggtaaatgagtggtttttgagcagaagcagttaaaagagaaagggattcagcgaagatgacatcggttggtgtggcaccaacttcgggtttgag

SEQ ID NO: 25847 - DNA, 253 bp, Glycine max
  Clone ID: 700905618H1
ctctttgccattcttgtaggttctgcttcccttccgagggggtccttcaacgtcatttgagggaccctcgtcctttaatttagctattcttattcttattaattaatttagccaaagagattatatatatatttatgtataaaaccgagagggattttgccattgtttctgggtgaaaatgttgtttagaacaaagaattcataaatatcatttccaaatttcttccgccacaagttcttggaggttgtttat

SEQ ID NO: 25848 - DNA, 251 bp, Glycine max
  unsure (1)..(251): unsure at all n locations
  Clone ID: 700905620H1
tgctatctgcttcctcgtagtacttcattgagagagacatggacactgtactaagtactacgctgctactcatgttggcatgctccatcgtgcatgttcttcgttcactacaagcaagaatgagaagaaaatcaaactacaatcttccaccaggaccctctctcancaccatcattagaaactctaaacaactctataaacagccacagcagacaatggccaagcttgccaaaacctatggccccataatg

SEQ ID NO: 25849 - DNA, 251 bp, Glycine max
  Clone ID: 700905621H1
tgagtttcttgttaccattaccaaccctcttgttgtgtcactttgttgtgttaatttattccctccaatcaaaggccgatgaatttgatttcgatgagtccttgttcaatgcaaaaaacgcttccagtggcagaaaacttgcaggaagatgcaacttgttccgtgggaaatgggtttatgacccttcataccctctctatgacccttctacatgtcccttcatagatccacaattcaactgccaaaagtac

SEQ ID NO: 25850 - DNA, 252 bp, Glycine max
  Clone ID: 700905622H1
ttaattcgttaacaatttgcactcctttcaatcattaaaagatggcagatggtgaggatatacaacctcttgtttgtgataatggaactggaatggtcaaggctggatttgctggagatgatgctccaagggctgtgttccctagcattgagggtcgtccacgccacactggtgtaatggttggaatggggcaaaaggacgcatatgttggtgatgaggctcaatccaagaggggtattttaacactgaaat

SEQ ID NO: 25851 - DNA, 252 bp, Glycine max
  Clone ID: 700905623H1
gcgaggcttttgttctccctcctttccttgttcctcttccgtcctccttcgtttctggtggacgtggaccccacaccggcggcggcactcccacgttaacatacattaatcatgtctgttcaacagccgccatgtgccgccccgctgcaaaacaccacaatggtggctgttgacaaagacaaaaacagtgttcatgctttccgttgggccgttaatcacctcgacaaccccatcatcattgccgtccatgtc

SEQ ID NO: 25852 - DNA, 229 bp, Glycine max
  Clone ID: 700905624H1
tatttattagcacccctcacattaccttgtgtcaccaactaatttgactcctttaccataccattacaataattatcaaacctaaccagtaaaaatggtgaccgtggaggaaatccgcaacgctcagcgttcccatggacccgccaccatcttggccttcggcaccgccacgccgtccaactgcgtctcccaagccgattaccctgactactacttccacacaacatac

SEQ ID NO: 25853 - DNA, 248 bp, Glycine max
  Clone ID: 700905625H1
tcttcttcttctttttcatcaatcatcaccagtggttcttttccttctgagaagatcgaattgtgttttgcaaaaatgggagttccagagaaagaccctctttcccaattgagtttgcctcctggttttcggttttaccccaccgacgaggagcttctcgttcagtatctgtgccgcaaggtcgctggccaccatttctctcttccaatcattgccgaaattgacttgtacaagttcgacccatgggt

SEQ ID NO: 25854 - DNA, 246 bp, Glycine max
  Clone ID: 700905626H1
gcatcctgattgtgtgatgctggtttatccaagtggggttggtgggtttgatgtgaattggaaggagttaagtgaagctatattgggatttgataagttggactggaaagggaagcctaattcccttagcaaagagcatgtgtgttgggaagttatttataggactgctgaggctgtgaagaagcctttgacattgggggaaagattcttggttgagccatttcagaggagtggtgtttgtgggga

SEQ ID NO: 25855 - DNA, 251 bp, Glycine max
  Clone ID: 700905627H1
cagaacacaaactttattggttctgatctgaaccacacactcatccatcacatagtatcatagcctctcaataattcaattgactcattcctggaaacctgtgtggtgaatctcaaccgcacacatcatgctaccttatcatctttattaaccgttcatttcctagccagtttcacacaccccactgaactcactcactggaagccttgttgtgagtaagggaaaggcttcctgcactgagcaccaagttg

SEQ ID NO: 25856 - DNA, 258 bp, Glycine max
  Clone ID: 700905590H1
aagatagtagaagatggcagacactgaggatattcaacctcttgtttgtgacaatggaacaggaatggttaaggctggatttgctggagatgatgccccacgtgctgtgtttcccagcattgtaggtcgtcctcgtcacactggtgtgatggttggcatgggccaaaaagatgcatatgttggtgatgaggcacaatctaagaggggtattttgactctcaagtaccccattgaacatggaattgtgagcaattggga

SEQ ID NO: 25857 - DNA, 265 bp, Glycine max
  Clone ID: 700905549H1
cgtcctcgtcaccggcgctgcggcttcgtcggctcccacgtctccctctcgttaaaacgacgcggagacggcgtcgtcggactcgacaacttcaacgactactacgatcggtctctgaaaaaagcccgcaagtccctcctcgccaagcatgacgtcttcatcgtcgatggcgacctcaacgacgccaagctcttagcgaagctcttcgatgtggtcgctttcatccacgttatgcacctcgcggcgcaggccggggttcgctacg

SEQ ID NO: 25858 - DNA, 260 bp, Glycine max
  Clone ID: 700905551H1
cttcaacctcaccaaaggaactaagaatttcattgaggctagagaaagtggtgatcaatatgtcaaagaatccaaaagttttctttgatattctaattggaaagatgaaagctggacgagtagtgatggagttgtttgccgatgcaaccccaaaaacagctgaaaacttcagggctctctgcactggggaaaaggggattggacgatctgggaaacctttacactacaaaggttctgtatttcatcgtattattccagaa

SEQ ID NO: 25859 - DNA, 258 bp, Glycine max
  Clone ID: 700905555H1
ggaactttctattcagctgcaagagaccccattttttattctcatcattcaaacattgataggatgtggtccatatggaaaacacttggtgggaaaagaagggattttactgattcagattggttagaatctgcgtgtctcttctacgatgtgaacaagaaccttgtgcgtgtgaaggtcaaggattctcttgacactagaagactacggtgatattaccaagatgttgacattccatggttaaattctaacgccacg

SEQ ID NO: 25860 - DNA, 262 bp, Glycine max
  Clone ID: 700905557H1
ataataacaacaataacgcaagtaatggaaattctaagagtagcttcagcggtgaacttgtccctgaagaaaatttcttgggtatatgcagtagagaattattagccagaggttgtgaactcctcaaacgcacacgcaaaggtgatcttcattggaaggttgtatctgtgtatgtaaacaggatgaatcaggttatattgaaaatgaagagcaggcacgttgctgggaccatcacaaaaaagacaaagaatgtggtgcttga

SEQ ID NO: 25861 - DNA, 167 bp, Glycine max
  Clone ID: 700905558H1
ccacctctaaaagatgtgtgtgttgaaagtgtcgcactagaaaaaagaagagtcatatgaccatgtgaaagtatttattggccctccgctaaaacaataagcatttagatcatccctgctttctgggtactgtacatatgcatgatagagctccctttagtcgaatt

SEQ ID NO: 25862 - DNA, 263 bp, Glycine max
  Clone ID: 700905560H1
ggcaattcgaattgcagtgtttacataggcaatctggatgagagggtgacagacagggtcttgtatgatatattaattcaagcaggacgagtggtagacttgcacattcctaaagataaggaatcagagaaaccaaaaggttttgcctttgcagaatatgaaactgaagagattgcagactatgctgtccggcttttttcaggcctcataacactgtacaacagaacacttaagtttgcgatatctgggagagacaaaactac

SEQ ID NO: 25863 - DNA, 263 bp, Glycine max
  Clone ID: 700905561H1
cccatttgcagagctgtggagatagcagcgaagaagagttatcggtgcttcctcgtcacaccaaagtggtcgtaacaggaaataaccgcaccaaatcggtgctcgttggtcttcaaggtgttgttaagaaagccgttggactaggtggatggcattggctggttcttacaaatggtattgaagtgaagctacaaaggaatgctcttagcgtgattgaagcacccaccggtaacgaggaagatgatgaccttgagtttgaaaat

SEQ ID NO: 25864 - DNA, 265 bp, Glycine max
  Clone ID: 700905563H1
ctcagattgcaattgcctcttctcttctcccagaatcggtgtaggttacaggtttaagggttttgttttcatttaggtcactaatccgatatcatgaagctcgatacgactagtctcgaatcgtttcccacactgattgcacctcaaaacgacgtcgccggagaactctccgccgctccgttctttgaccttccgaattccaatgacttcgatgggttcttgaaagacgctattcagatggtgaagcccgcgaagggtactacaa

SEQ ID NO: 25865 - DNA, 263 bp, Glycine max
  Clone ID: 700905566H1
gggacatcaagcgccatctattgcctcgatctcattagaaaggttcctctattccagaactcggatgatcgtattcttgacaacatctgtgacagggttaaactcctagtcttctctaaagatgaaaagataatcagagaaggtgatcctgtaccaaggatggtgttcatcgtccgagggcgcataaaacgctaccaaagccttatcaaaggcatggtatcctcaagcatccttgagccaggagggtttttgggtgacgagct

SEQ ID NO: 25866 - DNA, 258 bp, Glycine max
  Clone ID: 700905567H1
tggcatcgtccaaggtatcgacgacgacgacgacgacgacgaattcggatatttcgagccagcaggtatgggacggcgccaccatggagatggagtctcaagacaacatgaacatgagcatgagcctccaggatttgttgaccgaaaacgacgccgtgccaccctctcatagtcatggaaggggaaagagaaaaaccctagtggaggaacccctcgtcgtcgataaggtcactcttcagaaacagagaaggatgataa

SEQ ID NO: 25867 - DNA, 259 bp, Glycine max
  Clone ID: 700905569H1
agacaagagtacaaggatttgctgtatggcttagagaaggcgtcgcagagggttgtgatggctaagagcgaacttggtctgatccggaaacaagaatttgctgtcaagcagttgaaggattacgtcagccagcttgaaagcaaagttttcgagattggagaatgtcaaagagacatatcagaggcaaaagccttggtggacgaagcagaacgctctctgttggtaaatgttggaggtcctgaaaatggcagtacatcca

SEQ ID NO: 25868 - DNA, 254 bp, Glycine max
  Clone ID: 700905574H1
ttcacaactcggggagttgttgttgtggttcatcttcctcctctattcactggcacttgatagatccctctctcacagcttccattcgcaatccagtttctctttgatcggatgcatcttctgggttttgaaccttttactcctcatcaacattatttgttgagggataggttgtgtcatttcagtttgatcagctttagaatctcaagacatcagttatggctccttctaggaaatctagaagtgtaaataag

SEQ ID NO: 25869 - DNA, 261 bp, Glycine max
  Clone ID: 700905575H1
catggatcgtgattacagaactgcaaccaataaccaacaagcctttacgtacaagttcacaacacatgtttcacaaatgtagcaagaccaacactcaaacgcgagttcagaatagggaagagaacaaatatcagctcaccagctcattgaagggaagagaagtggataacagtgatcaaagtttgaaatggaagagatgaggtcaagaaagggaatagctacctttggagtgtttcgagtttaaaggagagggaatacagc

SEQ ID NO: 25870 - DNA, 255 bp, Glycine max
  Clone ID: 700905576H1
ataaaagacgagcagagggatccaaacccgaattagaaacgatttcggaatccctaattcgcaaatcgcaaccctagttgtgctgtgcgttgttgtagtggtttttggaagaggaggcttgagctaaacgctgcgtttcgacgacgatgatcgtgagccagaacatggtgacggaggcggaaattatttgcaagcagaacattccgatgttggacgtgaagaagtaccaccttcgcgtggcgcaatagctcggcg

SEQ ID NO: 25871 - DNA, 258 bp, Glycine max
  Clone ID: 700905577H1
aaaaaccattattagcctgcgtttgttttgaaagatttttctgaagttcactaagttaagccaagtcaatgatttgctgttgcctatggttgaagttgtttctttctgagggaataattagagatgatctgcactgttgaatatttacggcagataaatgagatagtgaagtttacattgttcttcctgttaagctgtgttaccttgaattgtactggttatatatatccatttcgtttctaattcaaatcaaatgta

SEQ ID NO: 25872 - DNA, 263 bp, Glycine max
  Clone ID: 700905579H1
gctacaagcccaacaaacttggttttaattggtataggcgtgccaaggtcttgttaattttgagcgttaagtgctgcaactaatcagatcccaagaccttggcctaccttgccatacagaaaaaaaaaaagcaaaaaaaaagccaaggtttggagccaacaaaaattaacacaaagcacaagtcatggaaagaataatggttggaagtgcacaaaggttgctttcaccctcttggccactttcgccattggtcattccaggcc

SEQ ID NO: 25873 - DNA, 264 bp, Glycine max
  Clone ID: 700905580H1
aaatttctctgaagtaatagaaattcttcagcagatagcaaaagaggtcaatgatcacaaagataaagcatcccatggctttctctcagctcttagacggggccatcattgatattgatataagagtattacgcgacagtatagcctttttgtcctgtatagtagtcagactctgactaaatatctattgagttcgttgtttataatactcttgagagattccgttgtattgtgtttgccttaaatttctgttacaatctgcgc

SEQ ID NO: 25874 - DNA, 141 bp, Glycine max
  Clone ID: 700905581H1
ggctcgagccgaatcggctcgagctcacccttctttgactgttctagcacaccacacccatgagactcctcctgctccttagtctcctctttcacgcggcggaagccaagggacagtggcagctcctccacaaaaacatcg

SEQ ID NO: 25875 - DNA, 264 bp, Glycine max
  Clone ID: 700905582H1
tgcttatagagatatttatgaaatatggctgcaatcacagagaacaagcaatgtaagagacaagacaccggatagagatgagtggactgaagatgttaatgggaagaaaatggctcttattcgccagatatttatggaagctaaacgtctgtctacagatgagagactacgccagtccaaggagtttgaagatgccttggaagttttaagttccaataatgatctgttagtcaggttattggattctcaaaatctttatgaact

SEQ ID NO: 25876 - DNA, 262 bp, Glycine max
  Clone ID: 700905583H1
taaaatatattatgaacaattcaggtcaaagcatatattttgattacatccatacccttgggaggaacctgattgctgatagcatcaagaagcaaaggataaggcagtcaagtggtatggatgtaatcaaaatatattatgaacaattcaggtcaaagcatatatcgcgggatgattttgtgaagatgctgaggttaatagttggagatggtctgttgagaactacaatagaagatcttcagttcaagataccttccggtgg

SEQ ID NO: 25877 - DNA, 235 bp, Glycine max
  Clone ID: 700905585H1
cgcactcaagaacatgctgtgacagcgctcctgaatctttccatatacgagaataacaaaggaagtattgtttcttcaggagcagttccaggtatagttcatgtgctgaagaagggaagcatggaagctcgggaaaatgcagctgcaacacttttcagcctttcagttatagatgaaaacaaggttacaattgggtctttaggagccataccaccactggtgacactgctaagtg

SEQ ID NO: 25878 - DNA, 257 bp, Glycine max
  Clone ID: 700905586H1
atacccgtttgaattctctactgttgaaatgccgtatgaatcatacaatggaatcaatgttaggcttaggtacattttgaaagtgacaattagtcgaaattatgtcaacaacattgtggaatacatggattttggtgtacgcaattatgctccagctccacctattaataacagcattaagatggaagtaggaattgaagaatgcttacacatagagtttgaatacggcaagagcaagtatcatctgaaggatgtca

SEQ ID NO: 25879 - DNA, 253 bp, Glycine max
  Clone ID: 700905587H1
gcaaaggtgaactatgaagcaaatggctgggttgtacatcaagtttctgacatatgggggaaaacatcaccagatcgaggtgaggctgtttgggctttatggccaatgggtggagcttggctttgtacccatttatgggagcattattcttatacaatggacaaagtttttcttgaaaataaagcatatcctttgttggaaggatggacatcatttctgttggattggttgattgagggccgtggtggattat

SEQ ID NO: 25880 - DNA, 261 bp, Glycine max
  Clone ID: 700905589H1
gctcgagctctcaacaaaacccaccgttttctgcgaaaatcaaacccacactcaccactctccaatctcccattctcccctctttctccaactcagcgcaaccgtcacgattgcgcccaaaatctcgatcttcactgcgaggcgtgttttgtgagcacggaatacgaatatggatcaccaagaggatgaaagtaacagcaaacaagacgatgaggaagctgttgctcgccttgaggaaataaaaaaatccattgaggcgga

SEQ ID NO: 25881 - DNA, 265 bp, Glycine max
  Clone ID: 700905547H1
gcagggataaggattgcttgagcaagtggttttctccatgtgagaaattgggtctctctgctgagcacggttacttcactaggtggaccaaggattctccttgggagacttgcggattgacgaccgattttgaatggaaaatgattgcagaacctgtgatggcgctttatactgaagcaactgatggttccttcattgaacataaagaaagtgcaatggtttggcaccatcaagaagcagatccttattttggatcatgccaagc

SEQ ID NO: 25882 - DNA, 262 bp, Glycine max
  Clone ID: 700905510H1
cgaaactcttgattaccataaccatgtcaatggcaacaacatcccctcacaccgccctcttccaaaaccgcaccaaccctttcactctctcctccttcaaacccacatccatcaaatgcgccacccaactccatacccaagccccgcccctcacccactcccaagatcgcgtcttcaacttcgccgccggtcccgccaccctcccggaaaacgtcctcctccgtgcccaatccgagctctacaactggcgcggatccggcat

SEQ ID NO: 25883 - DNA, 262 bp, Glycine max
  Clone ID: 700905511H1
tttccttctcctaaccctctttcctattaagaggagaaggaataacaaaaacaatatacacaatggctttcgctttcactttcaccaaaaccctaattctcatcgtctccctctcctccctcctcctccaaacccacgcggcccgcggcccccgcaccgtccaggcccgcctctacagcctctgcaagcccaccaccaatgttgggctgtgctacaggaccatcctgccggaggtgctgggcctgccccgcttcaactatta

SEQ ID NO: 25884 - DNA, 265 bp, Glycine max
  Clone ID: 700905512H1
ctacaaaggaaggactgaagatgataggttggttgctgtgaaacgcttcaacaagtctgcttggcctgatcctcgacagttcctagaggaagcaagggcagtggggcagctgaggaatgagcggttggctaacttggttggttgttgctgtgaaggggaagagagattgcttgttgctgagtttatgccaaatgaaactctctccaaacatctctttcactgggagagccagccaatgaaatgggcaatgaggctgagagtggct

SEQ ID NO: 25885 - DNA, 266 bp, Glycine max
  Clone ID: 700905513H1
ggccttactttcagaggaattcccaacagcatctctatctaatgagagtgtgtggtgtgtggtgtgtggttttctttccttccaacgtacctctcattgacaaataaacgtgcaaacttatgtgtgcataattttcttatgtatgcttaagttttgtaattggatgctatctagtttttcatatctaatagggtgttgtgtcagtttttatgtatagtattgtgctcctatcatgttcacccgtatcatgttcacccgtatgtaag

SEQ ID NO: 25886 - DNA, 268 bp, Glycine max
  Clone ID: 700905515H1
cagcacctcattccccaagtgatcctacagtgaagaaagttgctgacaaattggcaagttttgtggctaaaaatggaaggcaatttgaggatgtaacacgtcaaaaaaatcctggggatacacctttcaaatttttgtttgatgagagatgtgctgaatacaagtattatgaatatcggcttgctcaagaagaaaatgctcttgtgcaatcaagggaatcacaggtgcctcgtaatgggggtacaagcacttcatcttccaaacagac

SEQ ID NO: 25887 - DNA, 267 bp, Glycine max
  Clone ID: 700905516H1
ctttccctctctaactgtgctgatggtcttatcgacgtcatccagggctccactgccatcaccatctcaaattgccacatgaccaaacataacgatgtcatgctgttttgtgctagtgactcatacagcggagacaagataatgcagataacagtggcattcaaccacttcgggcaaggactggttcagaggatgccaaggtgcagatggggtttcgtgcatgtcctcaacaatgactacacccactggatgatgtacgcaattggt

SEQ ID NO: 25888 - DNA, 269 bp, Glycine max
  Clone ID: 700905517H1
aaacaatcatgcaatagaaatctttcaagatcatgtaaggagctccatagagaacttcaaagcttgagggacatcagatctgacttacttactccgtctaaagattcaagaaagaggagggacatgactgatgttcgaattctttacagccaccacttggatgaagatattgttaagcatcagaagaagattttagcacggcttggagtttctgtggcttcctccattgcagatgcaacccatttcatagctaatcaatttgtgcgtac

SEQ ID NO: 25889 - DNA, 264 bp, Glycine max
  Clone ID: 700905518H1
gaaggagaccctcattgaccttacagttatagaaatcttgtcaaggcacgcatctgatgagttctaccttgggcagagagatggtggtgactactggacttctgatgccggtccattagaggcatttaagaggtttggaaagaagcttgaagagattgaaaagaagcttatagagaagaacaaagatgagacattgagaaaccgctatgggccagctaaaatgccttacactctgctctatccttctagtgaggagggattgac

SEQ ID NO: 25890 - DNA, 264 bp, Glycine max
  Clone ID: 700905520H1
gtttgttgtgagctataagctagtttatcgtgaggagaatatgaagttgtttgttttctttgttgctgcagtagttttggtagcatggccatgccatggcgcaggctaccaaaggttccctctccgaatgaaaactggctatggtgagcgttcttcggaggtaaaatgcgcaagttttaggcttgctgtggaagcacacaacatccgagcctttaaaaccattcctgaagagtgcgctgaaccaacaaaggactacattaatgg

SEQ ID NO: 25891 - DNA, 265 bp, Glycine max
  Clone ID: 700905521H1
tgtgaatcagcaccacattcacctgagctttttgtgacgattccaaagcatggcttcccttgcagcatccactgctgctgcttcccttggcatgtcagaaatgcttggaaaccccatcaacctcagtggtgccacaaggccagctccatctgcctctagccctgcctccttcaagactgtggctcttttctccaaaaagaaggctgcacctccaaaaaaagctgcagctgctgctcctgccaatgatgagcttgccaagtggtat

SEQ ID NO: 25892 - DNA, 262 bp, Glycine max
  Clone ID: 700905522H1
ctctctctcaccaaagccttcctagaacgaaaaaaaaaagaagagcaattttccctcaccaaagaagaagaagcaaacaatggccgatcaacttaccgatgaacagatctccgagttcaaggaagccttcagcttgtttgacaaggacggcgatggttgcatcacaaccaaggagcttggaactgttatgcgttcattggggcaaaacccaactgaggcagagctccaggacatgatcaatgaagtggatgctgatgggaat

SEQ ID NO: 25893 - DNA, 263 bp, Glycine max
  Clone ID: 700905523H1
tgaagattctccttttcaaatttcaacctttttcccccaaaactaacaaacccctcttcttctcaatcattgcatggctcttcactgattctataataataatttcagattcgtttttcgttttttgttaccatggagttgatttcaggtctaccagaggacgtagcccgagactgtttgattagggttccctatgatcaattcccggcggttgcttcagtctgcaaaggctggagcgcggagattcactcgccggactttca

SEQ ID NO: 25894 - DNA, 223 bp, Glycine max
  Clone ID: 700905524H1
ctagactcttccgtttctcttctctgtctaaggggtgccctgagatcacattgaacaatggtgaaagctgtgtgccgtctttggagcagtgagggtgtcactggaactattcacttcggtcaggagggaaatggtcgaaacaccgtgactctatgccttgctggtcttaagcctggtctccatggtttccatgtccatgccttgggggacactaccaatggtg

SEQ ID NO: 25895 - DNA, 263 bp, Glycine max
  Clone ID: 700905525H1
cgtgtttcatttgtgaaactaacaacaacacaaggccatcatcatggcagctgcttcgccaatggcaagccaactcaagtccaccttcactaggactcttgtagctcccaagggcctctctgcctcttcaccacttcacctcgtgccttctagaaggcaatttagcttcactgttaaggccatccaatcagagaagccaacctatcaagtgattcagccaatcaacggtgacccattcattggaagcctggaaaccccagtta

SEQ ID NO: 25896 - DNA, 260 bp, Glycine max
  Clone ID: 700905526H1
cattttcctaattaatcagaccaaccaccaacgagatgatttctgagtccctcttggtagtattcctcattgtcttcatttctgcttcccttctcaaactcttgtttgtgagagaaaacaaaccaaaggcccacttgaagaacccaccaagcccacctgcaatacccataataggtcatctccacctccttaaacccctcatccatcactcattccgagacctctctctccgatatgggcgcctcctaagccttcgaatt

SEQ ID NO: 25897 - DNA, 262 bp, Glycine max
  Clone ID: 700905528H1
cgaaatggaagatgatgtggtctgaggcacctcttggtattgtttccccattgatggtgagggtgttggcagcaaagattcccaattctttatgcttgatattcaagtcatatgacatactgaaaggtcaggtcaggggcatgctattattcccattttcagcgaggaactgatgatactggttatagtgctgtaaagaaatattatatctgaaattttgtttctgccgagagttaactgacctgtagatgttaagccatca

SEQ ID NO: 25898 - DNA, 262 bp, Glycine max
  unsure (1)..(262): unsure at all n locations
  Clone ID: 700905530H1
agaatccacacaaactcagggtgaangagagagagagagagagagagagagagagagagagaatacgagtgtggtgtatcgcggtgcatggtggcgcttgtgtcgactctaatctcccactcgagcgccaagaagaagcgaaacaacttctcacgcgctgtctcaatcttggaatctctgctctaaattctaatcttcccgccatatatgtcgtcgaacttgtggtgagggaattggaaacggatccgctgttcaagtcggg

SEQ ID NO: 25899 - DNA, 265 bp, Glycine max
  Clone ID: 700905531H1
ggggaagaaacatttaatttgggttgataatagtttatgttaagatatcactactgctatatatatgttgccatagccaagttagccttataaagggaaactcacttgccttatttttggttttgagattgagctaaaggccaactcaaccatcgaatttgttggtgattgaaagagaaggaagaagaagcaggaaatggaagcagtgagagctggtcgagaaggagcaataggtctaggtcaaggtgatggcgtacaagggaca

SEQ ID NO: 25900 - DNA, 116 bp, Glycine max
  Clone ID: 700905532H1
atcaaaacaacctgctttctctcaggttcttgatcagtgtcaaaaccaaaagggtggttgcaaattgcaatggctaagcatgatgttgagggtggttccttcgctggcaaggacta

SEQ ID NO: 25901 - DNA, 85 bp, Glycine max
  Clone ID: 700905533H1
gtttgaggcggagaatagctccaacagttcccaaattggaaccctagcattcgccattgccgccacctttccccacgcagctttt

SEQ ID NO: 25902 - DNA, 260 bp, Glycine max
  Clone ID: 700905538H1
ccggtgcacagatcttctcagagggaggccttgactacttgggcaacccaaacctgatccatgctcagagcatccttgctatctgggctgttcaggttgtgctcatggggtttgttgaaggttacagagttggtggtggaccacttggtgaaggacttgacccaatctaccctggtggtgcttttgaccctcttggtctggctgatgaccctgatgcattcgctgagttgaaggtcaaggaactcaagaacggtcgcttg

SEQ ID NO: 25903 - DNA, 263 bp, Glycine max
  Clone ID: 700905542H1
tttccatctagagttgttgcggctctcttctctgcacactcagaatgcagtccacactcttcaacaccgaacattcccttatccccacttcaccacactctatcagatccaattctggtcatgcttctctctccgttcgcgcctccatcgccgtggaaacccccacggagacggtgaagctgaacaagtacagctcccgcatcaccgagcccaaatcgcagggcgcctcccaggccgtgctctacggcgtcggtctctccgag

SEQ ID NO: 25904 - DNA, 251 bp, Glycine max
  Clone ID: 700905545H1
cagaggggcagtagccgagattccgtgagttgcaaaaatgaagacgattctttccaccgagaccatgaaataagcggacggcgtgagcatcaaagttcatgccaaggtcatcgaagttgagggcccccgcggaaaattggtgcgagacttcaagcatttgaatctcgattttcagctcattactgacgagaacggtataagaaagctgaaaatcgacgcgtggtttggttctcggaaaacatccgccgcca

SEQ ID NO: 25905 - DNA, 264 bp, Glycine max
  Clone ID: 700905509H1
caaagttcggtggttcaatatgtatatagacgtgttgtttcaacctgatttttgcgatacagactcaagtaccaatcacttctgctaaggagttatctttgcttactgaagaatattgcattcctgccatgtaccaattctcggtctcttccagtgttatagcgtcggtaggatcgaagatggttggcatgtagccatttgttttggctgggtgataatatcttaatagaatatggaaatgttgtgacgaactctgcagtagca

SEQ ID NO: 25906 - DNA, 266 bp, Glycine max
  Clone ID: 700905546H1
cctcgagcctgattcggctcgagctgagcctctgtagaaatttgtcatggcatccgctatgctgaatcgaggtggttctagcatcatcaaatccctgtcttcaactcttggtacgaggttttacgccaaggttgcaacagggactgacatagtctctgccgcacccaatgtttctctccagaaagctcgtacctgggacgagggcctggcttccaagttctccaccactcctctcaaagacatcttcaaggacaagaaagttgtca

SEQ ID NO: 25907 - DNA, 92 bp, Glycine max
  Clone ID: 700905467H1
ctccgatcttaatatacattgactaaaagatgaataaagggatcagatttaagttccttgatctaataagatccttgcttttaattgtacta

SEQ ID NO: 25908 - DNA, 228 bp, Glycine max
  Clone ID: 700905468H1
gtgcaaaagagcgtcgtagtcgcaaccctaatcagaagaagcgcagcttcaagcgagtgacagccaccagccatgggtcgtatgcacagccgcggtaagggtatatcctcttctgctttgccctacaaaaggacacctcctagctggctcaagatctcttcgcaagatgtcgaagaaaatatctgcaagtttgcgaagaaaggtttgaccccgtctcagattggtgtc

SEQ ID NO: 25909 - DNA, 227 bp, Glycine max
  Clone ID: 700905469H1
cggagaaggaaaatgaagatgtttggaatgtgtggtggtagcgacgatgataatcacagagatgatgaagacaaaagcccgattggggcaagagaagatggcagccaatacagcctcacaggagttcttcttccgtctctcggggccacagctattcgcaatggcagcggtagaccaaagtttcgccaatacattgtctcaccatataatcgtcattacaaactatg

SEQ ID NO: 25910 - DNA, 223 bp, Glycine max
  Clone ID: 700905470H1
cacaggttctggcatgggaacactgttgatatcaaaaattagggaggaatacccagacagaatgatgctcactttctctgttttcccatctccaaaagtttctgatacagttgtggagccatacaatgccactttgtctgtacaccaactggttgaaaatgcagatgagtgcatggttcttgacaatgaagcactttatgacatttgctttaggacattgaaa

SEQ ID NO: 25911 - DNA, 224 bp, Glycine max
  Clone ID: 700905471H1
atgatgttggccatagaagccaatattgcaaatttgacaacgagctccttacactcttcacctcttccttgtatcttgctgcattagtagcttctttctttgcttccaccactacaaggatagatggacgcaaggcctccatgttcttaggaggcttgtttttccttgtgggggcattattaaacggcttcgccgtcaacattgaaatgctgatcataggccgc

SEQ ID NO: 25912 - DNA, 225 bp, Glycine max
  Clone ID: 700905472H1
cactaagtgagtgagaatgaaaatgttgcaggtggcaatagtgcaattggctgcgttgcaggtttttgttattttttttgagtggtggtgctgattacataccgccttcaaggttggatgggttcgtctaccaaaatgggtacttagatttggatactgttttgatagaagcgttttatgatccggtgtgcccatacagcagggattcatggcctccactcaaac

SEQ ID NO: 25913 - DNA, 228 bp, Glycine max
  Clone ID: 700905474H1
gcgcaacctcgttgccccccgaacatgggaaactgctgcgccacgccgtccaccgacgaaacggcgaacaagaagggcaaaaagggaaaaaaggaaaaccccttcgcgatcgactacggtttcaacgccaccgccgcgaacgggtcgaagctcaccgttttgaagtccccgacgggccgcgagatcgaggcccgctacgagctgggccgtgagctgggccggggcgat

SEQ ID NO: 25914 - DNA, 228 bp, Glycine max
  Clone ID: 700905475H1
gcgaaaaataaggcacaagctagtttgcgattaaagtaataagatagtgggacacttggatggataggaaggatctgtataggtctctgcaagaaaatgttaggagactcgaggcaggtgaatgactatatagtttaggttgtacatagaaatctcttgcaggaaaatgcaatttgcatccaaaggggactacccagttgcagaaagctcctgctgcatggatactat

SEQ ID NO: 25915 - DNA, 226 bp, Glycine max
  Clone ID: 700905476H1
ctggagttgtgattcttcaataccatatattctctctctttctctttttctttcttgatttgtgctgtgaaacagttagaagtggtgttgatgtctgaggcattggaagatgttccttcaatgaaaggagggtgtgaagaagaagaagaagggttgaacctgaaggctactgagctgaggcttgggttaccagggtgtgagtcaccagagagggagggtgcgttta

SEQ ID NO: 25916 - DNA, 225 bp, Glycine max
  Clone ID: 700905477H1
tccaagactttcatgatattgtttcttagaattttgtatttttttttataatttatttaattattttctccctacaaaatcttgatctctctgctgttgtggagtggtgttgtgttaatctcattcacacattcacagttatactctctctctctttgtcgcttggatcactgatctcatctcaattttcagatatgtcgacatctgataagccagaagtggtgg

SEQ ID NO: 25917 - DNA, 203 bp, Glycine max
  Clone ID: 700905479H1
gttacagaaaaacaaacacttatctctgtttctccgtcttacggcaattgaaggaagcactatctctgcaacttccgtcacattcacatggcagcttctgcatctgctactgctgtgccatatctagacaagacagattttctaaagcttcaaaatggcagatacattcgtggtgtggctgttgatggtgttgagggagagcc

SEQ ID NO: 25918 - DNA, 204 bp, Glycine max
  unsure (1)..(204): unsure at all n locations
  Clone ID: 700905480H1
cccgtagtggtggaggacaaggagggggtgtaggatatggtggtgatcatggagctggatatggtggcggtggtggtggtggtgcgggttatggtggtggtgtagagcatggtagtggaggtggttatggtgaaggtgaaggaggtggagctggaggaggatatggagctcttggggcacatggntgntggttttgaggaggcg

SEQ ID NO: 25919 - DNA, 229 bp, Glycine max
  Clone ID: 700905481H1
gggaaagctgtgccctcagcttcagcatgttgaattgagtggactcgagggagtgacagatgcagggcttcttccactccttgagagttataaggctggtttggttaaagtgaaccttagtggttgcacaaacgttaccaatcaagtagtttcgtccttggccaatctgcatggttggactcttgagaatctaaaccttgatggttgcaaaaacatcagtgatgctagc

SEQ ID NO: 25920 - DNA, 229 bp, Glycine max
  Clone ID: 700905482H1
gagaagatcggggattaacgaactatgaattgaactttctcaatggctcagattcccaacctagacaatgctcctgtcaatctcacatccattagggagcattcgcaaaaagagctcctcaacatcctcaagaatgttcgaggaaagaagttattagtcattgatccgaagctcggagactctctctcgcttatcatacagacatccattctcaaggagcatggagttg

SEQ ID NO: 25921 - DNA, 227 bp, Glycine max
  Clone ID: 700905483H1
gagctatgatatcgaatttggcatttgtattccgtaatatcttttccaaaaagggcatgaagggaaagtctgtcagtggaatgaattactatgcttgtttatctattttgtcccttgcaattctcacacccttcgcaattgctgtggaaggaccacagatgtgggctgctggatggcaaacagctatgtgtcatattggtccccaattcatatggtgggtagctgct

SEQ ID NO: 25922 - DNA, 227 bp, Glycine max
  Clone ID: 700905484H1
ctttctcaaattaattaattccctttattatcaaaatggccctggctatggctgcttgcagtccttggacttcacttgagtgctgataacaccttgagaccttttgaaaaaaccaccgtcttgaaggccctctctatctcttatgttactaaaccatgttacatttctcacaaaacaagattatcatcaccttcatcttcaggaataacaatgatcgcacgagcaac

SEQ ID NO: 25923 - DNA, 223 bp, Glycine max
  Clone ID: 700905486H1
ctggtgtgacatgttgtcttcgattccctggtcaactcaactcagatcttcgcaaactcgccgtgaatctcattcccttccctcgtctgcacttcttcatggtgggatttgccccactcacttcccgcggttcccaacagtacagggctctcactgtccctgaattgacccaacaaatgtgggatgctaagaacatgatgtgtgcagctgatcctcgccacgg

SEQ ID NO: 25924 - DNA, 224 bp, Glycine max
  Clone ID: 700905488H1
gcctggaaaaaaagttagcatgtatattgctaggttgagaaattctaaaccaggagttcctcttatatctccacctcctcatcatgatatttattctatcgaggaccttgctcagttgatctttgatcttcatcaggtgaaccctaaggccaaggtgtctgtaaaactggtggctgaagctggaattggcactgttgcatctggggttgcaaagggcaatgctg

SEQ ID NO: 25925 - DNA, 227 bp, Glycine max
  Clone ID: 700905489H1
aacaataattcagaaatgttactgcaaacattagctatccctacaatactccttgtgatattcatatgggtggtacaaccaaagcaacgtcatgggaagattgcaccaggtcccaaggcgttgccaattattggtaacctccacatgctagggaaactcccgcaccgcacccttcaaacctttgcaagaaaatatggacccataatgtccttgaagctagggcaagt

SEQ ID NO: 25926 - DNA, 226 bp, Glycine max
  Clone ID: 700905490H1
ctctctcccttagtcaaagggactcgttgttcttctcccaggttatttagaaaagcaaaatggtgaagatttgctgcattggtgctggatatgtggggggtcctactatggcagtcattgcacttaagtgcccatccattgaagttgctgttgttgatatctctaaatcccgcattgcagcctggaacagtgaccagcttcctatctatgaacctggccttgatgg

SEQ ID NO: 25927 - DNA, 225 bp, Glycine max
  Clone ID: 700905491H1
tttaagagtgagatagtagagagagagagaaacacaactgctttgccaaaccttaatttcagggcacttccaagctaacaggaatatatgttgttccctttttgtgttgtttgattcagcgatttctggttttcgttttttttctttctttgttacaaggagagttcgatgtctttaagttgaataacttgttgggacatatttgactcggtgcttttcttttgg

SEQ ID NO: 25928 - DNA, 226 bp, Glycine max
  Clone ID: 700905492H1
cccaaattaggattaggattagggctaccaataccaataccaataccaattctattctatggcttgctcaagcgcccaaatacacggtctcggaaccccttcctcccgaaccctatttttaggtcagaggctaaataccaaggccgcctttatcaagctcaagtccacacctagaagactccgccctctcagagtggttaatgagaaagtcgtcggtatcgatttg

SEQ ID NO: 25929 - DNA, 209 bp, Glycine max
  Clone ID: 700905495H1
aagagggggtcagagtgagaaagagaaagagagaattcgtaaaccctaatttcggaaagatcggcgatgactccctccaaggatcgcgagaacttcgtctacatcgccaaactcgccgagcaggccgagcgttacgaagagatggtggaatcaatgaagaacgttgcgaatctcgacgttgaactgacggtggaggagcggaatttgct

SEQ ID NO: 25930 - DNA, 171 bp, Glycine max
  Clone ID: 700905496H1
gctcactgaatgcagtagccaatgatggaggatggatatatcttggaactaacaaaactatggcaaaatcaagtagcactggctacagtcagtggtccctctcaaaggatcatcttcaggtgggtgatacagtgcgctctagaaagctttccaattcatgcaatcctcaaa

SEQ ID NO: 25931 - DNA, 231 bp, Glycine max
  Clone ID: 700905466H1
ctgttgcacctctgattgcacttgcacggtctgaagcagaggatgttcatgaaactgccgcaggagcactatggaatctggctttcaatgctagcaatgctctaagaatagtagaggaaggtggagtatccgcacttgttgatctctgctcagcatcagtttcaaaaatggcacgattcatggctgcgttggcattggcttacatgtttgacgggagaatggatgaatatg

SEQ ID NO: 25932 - DNA, 271 bp, Glycine max
  Clone ID: 700905502H1
ctttcccttctgttcactcaaaagagcagaaagagacaagatcccggaaaggcgtgccggcgtcagagactcatcagttctcactcgtacggcgttgtgctttgctttctcaccttcttcttcatttctttcatcatcatcatcatcacaatataaagttcgctcctttctcagtctttcacccatacccagatgggtaacagcaccatctcggatctgtgtccctcctttaagtgaaaaaggatgccttgcagggtgctgcttccaatct

SEQ ID NO: 25933 - DNA, 262 bp, Glycine max
  Clone ID: 700905503H1
ctttggtggccacagcaacaataacaatggcagcctcactacaagctgcagctaccttcatgcaacccaccaaggtgggcatggccactcgcaacctcaaatctacacaatgcatttctaaggcttttggcttggaacccgctgcagctaaactcatttgctcccttaagcccgatctcaaagattttgctcaaaaatgtgtcgacgccaccaaaattgcaggattcgcccttgggcactcagctctcggtgtttctggagc

SEQ ID NO: 25934 - DNA, 257 bp, Glycine max
  Clone ID: 700905506H1
tgatccccaaaaaataatacccaggataatgcatggcttactctctctctctgcaacaattagggttttaaacctttaatccaatccagaaactcacatttattatcttactgcgatttttccacctcgcgcgatatggtattgtccctttccatttcccattagcttcttctcctcacgcccgctcatgagccaccatcgcaacaaccacgctgcgctcactggttcaaccggcgatgcgaatcccgatgactgtc

SEQ ID NO: 25935 - DNA, 115 bp, Glycine max
  Clone ID: 700905507H1
ggcgatctggtaaggagcttgagaaggagcccaaatttttgaagaatggtgatgctggtatggttaagatggatccagccaagcccatggtggttgaaactttctctgagtatcc

SEQ ID NO: 25936 - DNA, 235 bp, Glycine max
  Clone ID: 700905428H1
tccaacaccaacaacaccatcctcaaaatctccaaactcgcgatcctcctcgttttgttcgcttcagtctgcaacgtcgctatgtcggactccaccgccaaacccctcgaccagcacgccaccacgggctctgaccctactgcgccagcggttcacatcgtgtacaccgagagaccacagaacgaggagcctgaggcctaccacatcagaaccctcacttcagtccttggcagtg

SEQ ID NO: 25937 - DNA, 234 bp, Glycine max
  Clone ID: 700905429H1
ggaaactcctcacaagaggcatcacaagtttattgaattctatgatgttagagcggccgaagcagcacttaaatcattaaacaggagtgacatagctggtaaacgcataaagcttgaaccaagtaggcctggaggagctcgtagaaatttgatgctccaattaaatcaagagcttgaccaagatgaatctcggagtttccgataccaagtgggttctcctgtagctaactctcc

SEQ ID NO: 25938 - DNA, 235 bp, Glycine max
  Clone ID: 700905430H1
tcacaaaacaaaactcagtttgtaactctcacaccattttcactgatatcccataataaccaccatggctcgacctaaagaaattgctaccatcatttaccacaatggtcacattgtagacgatctagttcaaggatcgatgtacatgtgtacgaccctaatatttttttacgccagtcgttctattacgtttacacaattcattcggagtattaacaatcgtctccttactcaa

SEQ ID NO: 25939 - DNA, 190 bp, Glycine max
  Clone ID: 700905432H1
gcctgccggaattgaattgaattgaagagagatgttgtttcaggtgggcgggcaaggcagtcgccccaccttcttcgagatggcggcggctcaacaactgccggcgagcctccgcgccgctttgacatactccatcggcgtcttggcctttcggagacccttccttcacaaactcctcacgctcgaagac

SEQ ID NO: 25940 - DNA, 237 bp, Glycine max
  Clone ID: 700905433H1
cacccttactggcaaaacaatcacgctagaggtggagtcctccgacacaatcgataacgtgaaagccaagattcaagataaggaagggattcctccggatcaacaacgtttgatcttcgccggaaaacaactcgaagacggcagaaccctcgccgattacaatatccagaaagaatcgactctgcatttggtgcttcgtctccgcggagggatgcagatcttcgtgaaaaccctaac

SEQ ID NO: 25941 - DNA, 235 bp, Glycine max
  Clone ID: 700905435H1
cgcaggattacagaagagtcagattgatgagattgttcttgttggtggaagcacaaggattccaaaggtacaacagcttttgaaggactactttgatggcaaggagccaaacaagggtgtcaaccctgatgaagcagttgcctatggtgctgcagtgcaaggaagcatgttgagtggagagggtggtgaagaaaccaaagacatccttctcctggatgtggctcccctcactctc

SEQ ID NO: 25942 - DNA, 135 bp, Glycine max
  Clone ID: 700905436H1
aaaaaagataacacagagagtagcgtcttaataaacgctcttctctgaaaaacctgatgtcttctcttcttctcttcgctttcgtttcgatcttcgatctctgaaaatgagagagtgcatttcaatccacatagg

SEQ ID NO: 25943 - DNA, 224 bp, Glycine max
  Clone ID: 700905437H1
cagcttctctaaattctctgtctacttcaccaagcacttttggttgcagctttggttaatttccaatatggtgtttcctctcctatctatctttgctttactcaatcttgcagtggtggcaacccatgcagaaaccttgccccctgaagtttactggaagtcgaagcttcccaccactccaatgccgaaagccattacagatatccttcacccagatttggcag

SEQ ID NO: 25944 - DNA, 229 bp, Glycine max
  Clone ID: 700905439H1
ctctcaaatctcttcgttccttcgattcgttccatttcttccaaaatggccaaagacccagttcgcgttctcgtcactggagctgcagggcaaattgggtatgctcttgtccctatgattgctgagggagtgatgttgggtcctgaccagcccgtgatcctccacatgcttgacattcctccggcagcagagtcattgaatggggttaaaatggaattggtggatgctg

SEQ ID NO: 25945 - DNA, 229 bp, Glycine max
  Clone ID: 700905440H1
caccgtagtaattctagagctaatacgtgcaacaaaccccgacttctggaagggatgcatttattagataaaaggtcaacacaggctctgcctcttgctttgatgattcatgataactcgtcggatcgcacggcctttgtgccggcgacgcatcattcaaatttctgccctatcaactttcgatggtaggatagtggcctaccatggtggtgacgggtgacggagaatt

SEQ ID NO: 25946 - DNA, 232 bp, Glycine max
  Clone ID: 700905442H1
cgccggctcggaggaggacaccaagccgcttatcggctcggctcggctcaagctggtggacattctcgacgacgttggaatcggcgagcgcgtgagccgcacgctctcgctgaagcgtccctcggggaggccgcacgggaaggttgaggttagcgtgacaatcagggagcccagctaccgtgcgcagggtgggtacaacgcgcctccttacggcgtgagggattattcccct

SEQ ID NO: 25947 - DNA, 229 bp, Glycine max
  Clone ID: 700905443H1
cgatgatggagatggcgaacgaagacgctgtcgttgcggcactcgcggcgttggtgctactcgcggcgagtgtggcggtggatgctcaggagaactcggacgtgaagacgctggtgaagtacaagcacgggaagaagtactgcgacaaaggatgggaatgtaagggctggtcaatttactgttgtaacctcaccattaccgattatttccagacctaccagttcgcgaa

SEQ ID NO: 25948 - DNA, 231 bp, Glycine max
  Clone ID: 700905447H1
cttttgtggattcaagaaaactaaatgaatcactgtttttgtatcatttgtatgtatgtagttcctttcttcatcatgattattatgatccgttcacacttttgtactctggtaaattggtttgttttcggcatctttgaggaatttgcttgtggcttttataaggaattaaggttggatgcttaaagggaggaaatatcccaaactgaaactatattcagttcgtaaaaa

SEQ ID NO: 25949 - DNA, 222 bp, Glycine max
  Clone ID: 700905448H1
cattactgcaaatggggtttcagatgagacagatttgattcgccggccatatctcttggagcatttgcttgctatttatgctgccatgatcatgggtgtgcgtgtacttggttacctgttctggactatttctgataactgggagtgggctgatggatatggtcccaagtttggacttgttgcggatgaccgggcaaactaacatgcacggaccccacgccc

SEQ ID NO: 25950 - DNA, 235 bp, Glycine max
  Clone ID: 700905449H1
cgatgatatttctatagttaaagagctgcctaaagagttcagctggagcacaagagagtactatggcttggctattcgggaaacccgaatcaaggctgcgcctgtgcatgcatcagcccattggtatctggagaatgttttgcctgttctacagagttatggtattgctgcaatctctccattttctcacagactgagttttgacaacttgcctatggatattcaacacctacgc

SEQ ID NO: 25951 - DNA, 231 bp, Glycine max
  Clone ID: 700905450H1
cgttaaacctcggagccagatattcagagcgggtcccaccgatgatggatactggcggaggaggcggacatcgtcaccgacagccaccatgtcgcggtggaagtttgcggcgtggcggcagttccagcacctgctggataaatcgacgccgcacgtgggacgccggtggctggggttcgcggcggttgcgcttttgtacgcgctgcgcgtgtacttggtgcaaggcttcta

SEQ ID NO: 25952 - DNA, 232 bp, Glycine max
  Clone ID: 700905451H1
ctctgaatgtgctcgttgtttagaaaaccctaatctgattcaattccagcatggctcaaaaacaaaagctgcgcccttctcctctggacgagccacccaccgcttcctcttccgattccgaggaagaagaggagcaacaacaacaacaaccatcctctcagcaacacgaacaagaggaagaagaagtttcctccggagaagaagaggaagcttcctccgaagaagaggaaga

SEQ ID NO: 25953 - DNA, 231 bp, Glycine max
  Clone ID: 700905452H1
ccaaacccaaaccccggatggcacagaagcagcacctccttctggatctatcccaaatctcaatctccaaaccctagaacgaacattcaagtttccccctttcccctttctcctttccctttcaaaaacactccctttccactcttccgctgcgattggatctcttgggtgtcttcctttccgcgatttcgatctgcaacttgagggttgtggaattcggaatttcacatt

SEQ ID NO: 25954 - DNA, 228 bp, Glycine max
  Clone ID: 700905453H1
cggggctaccgctgagtttaagcatatcaataagcggaggaaaagaaactaacaaggattcccttagtaacggcgagcgaaccgggaaaagcccaccatgaaaatcggtcgccctcggcgtccgaattgtagtctggagaagcgtcctcagtggcggaccgggcccaagtcccctggaagggggcgccagagagggtgagagccccgtcgtgcccggaccctgtcgca

SEQ ID NO: 25955 - DNA, 226 bp, Glycine max
  Clone ID: 700905454H1
ctttttctctctcaatctttgttcatcaaagtgctgcatctctctcactctcttacttaactcgacaacttcagccacattattccatggatgccaaggtattcaaattccagatcctccaaggctccatcgctaagcgcgtggtcattcgctcaatactactcgcgtgcgccgtctcaattgtctccatctaccgcgcgcaatccctcttcgatttcggaaccct

SEQ ID NO: 25956 - DNA, 223 bp, Glycine max
  Clone ID: 700905455H1
ccttggtgaaatcaccaacagtgcattcgagccatcatctatgatggccaagtgtgctccccgccatggcaaatacatggcgtgctgtctcatgtacagaggtgacgtagtgcctaaagatgttaatgcagctgactggaattatcaagaccaagcgcactattcaatttgttgactggtgccccaccgggttcaagtctggaatcaattaccagcctccgac

SEQ ID NO: 25957 - DNA, 228 bp, Glycine max
  Clone ID: 700905456H1
cagtatctgttccatttcctgtgaaacaatcgcaggagacaaagctttcccacttggatattgttggtagacctgttgttgtgctggagaagaacaatgttgtacctgagcataatgagcattttcaggtctactataagttcaacagtctttctatgctcagggagcctttgatgttgatttctggctttttatttctgtttgttgcgtgcattgtctacacgcatg

SEQ ID NO: 25958 - DNA, 230 bp, Glycine max
  Clone ID: 700905458H1
ccaagctcccctcgtgctggtaagcctctgcttccattggatgcaaaggaggatgaagagaaggagaaagcaaagccagttacatattcatatgccttcttccacttgattttctctcttgctagcatgtattctgcaatgcttctgactggttggtctacatctgttggagagagcgggaagttggttgacgtggggtggccttctgtgtgggttcgaatcatcacttc

SEQ ID NO: 25959 - DNA, 229 bp, Glycine max
  Clone ID: 700905459H1
gaagcatctgagtgcttattatttgtaatatatatagtcactcaagcttctaggatttgtgccagctacatgaaaatgggaagcaacttctggtttttgagtctttgcctcttggcattgattgcatcaacccatgctcaacttcagcttggtttttatgccaagagttgcccaaacgctgagcaaatcgttttgaaatttgtccatgaccatatccacaatgctccat

SEQ ID NO: 25960 - DNA, 230 bp, Glycine max
  Clone ID: 700905460H1
atggtatacaacataggatttactcttggcaggatggagtttcaggaactaattgtctaattccagcaggttggaattgtacatatgagtttcaagttaaagatcagatagggagtttattctacttcccttccctaaatttcctgagggctgcaggagtatatggaggaattatcataaaaaaccgaccagtgattcctgttccttttggattaccagatggagatatt

SEQ ID NO: 25961 - DNA, 235 bp, Glycine max
  Clone ID: 700905427H1
acaattcaacttaagagatcaatatggccaccaccactacccagcctccctctaatatctgttttttccttctgttgttgcttctagcacactttcatttgggcataagccaacttgagctgaattactactctaaaagctgcccaaaagctgaagagatcatcaaggaacaagtcacacaactatataacaagcatggaaacactgccgtttcgtgggtcagaaatctcttcca

SEQ ID NO: 25962 - DNA, 224 bp, Glycine max
  Clone ID: 700905461H1
agataaaatgggttcttcttcgtctatgtggacggtgtgtgtgattttggcatcactggccttcgcagtatgctgtgccaactcacgcaggccagtggatgtacaatttggccgaaagtacgtgcccacatgggcctttgattacatcaaatatgtcaattgtggttctgacattcagcttcatcttgacaagtacactggtactggcttccagtccaaagggt

SEQ ID NO: 25963 - DNA, 232 bp, Glycine max
  Clone ID: 700905462H1
ccttgctcttcttcttcttctctctcaccctccaaattttctcactctctctttatcttcaccttttcagtttaaagcttcagatcacaaccgatccaccattcaccactttctcttcacaagctcaagttactgacaggcaaatctaacaagaaaagtagtctctgaagtcgatccagtgccttgtgaatttggaattggtggtgaatttagatctaaaagccatagcaat

SEQ ID NO: 25964 - DNA, 267 bp, Glycine max
  Clone ID: 700905391H1
ctcttcttctcttgcggctagggttttagcgcagtgtcttcgagatttaaggtagatgggtaaggaaaaggttcacatcagtattgtggtcattggccatgtcgactctgggaaatccactaccactggtcatctgatttacaagcttggaggcattgacaagcgtgttattgagaggtttgagaaggaagctgctgagatgaccaagaggtctttcaagtatgcctgggtgctggacaaacttaaggctgagcgtgaaagaggaat

SEQ ID NO: 25965 - DNA, 268 bp, Glycine max
  Clone ID: 700905392H1
ctttaccataccattacaataattatcaaacctaaccagtagaaatggtgaccgtggccgaaatccgcaacgctcagcgttcccatggacccgccaccatcttggccttcggcaccgccacgccgtccaactgcgtctcccaagccgattaccctgactactacttccgccttaccaacagcgcacacatgactgatctcaaagaaaagttcaagcgcatgtgtgaaaagtccatgataaagaagcgatacatgcacctgacggagga

SEQ ID NO: 25966 - DNA, 272 bp, Glycine max
  Clone ID: 700905393H1
ctagaactagaaaagaaaaataaaatcccacaggtaagggtaataaacaaataacagaagtcagaaaaacaaaaaacagattggcagccttgtgtcccagggatgaacatgattgtggagcgagcgagtgatgctcaccacatcacgtgcttccaaaactgatctatttcccttctccttcttacttcttccttctctctgctgcaaatccaaaatctaccatagcggttccattttctgaatttctcgagcgaacttcgcccagttctagg

SEQ ID NO: 25967 - DNA, 273 bp, Glycine max
  Clone ID: 700905394H1
agaagatcgatcatggcttatatctcctctctatcatctttctccctctccaatttctctgcacctcttcccatttccatctgttcctcatcttccgccttcctaactttccagataccatgcatacccaccatacgtagcaaaccataaggccatcatgtttccatagtgtcatgcatcagtaaccagatcactccaacatcatacccagattgatgaggaaccatcgtcatacagcattctaggcaaacatcggagggatgttctccttgg

SEQ ID NO: 25968 - DNA, 275 bp, Glycine max
  Clone ID: 700905395H1
aatttggtttaggagaaaagatggaggaaataggatagggggtgggaaaattgatgaatagaggtatttctgcagtttggatggataggtgaaaacaaagggtcaatgtacagaatatgaaactgttctgtttccaaaatcactctctcttctggcatgtttcacacgctatgtagctatgcttctgtgaacttcccttcctattgaactgattgttctttcaaactttctattatgaaattttctttgttgggttttctttcaaggatttttta

SEQ ID NO: 25969 - DNA, 274 bp, Glycine max
  Clone ID: 700905396H1
gtttccttgctctttcatcttttcctctttctctatgcaaataaccgattgatcaatcgaatttttttgtgattcaatttcgctcttttttctcggcgcgagaaatcatggctttgggaacggtgactcgacggttggggaataaactcttgccggcgttatctccttctcccaggcttctacattctcacgccaccagtttcgggttcaaacaagtaaacgaagaagaaaaggctcgcatggttggtgacgtattcacgagcgttgcttcaag

SEQ ID NO: 25970 - DNA, 238 bp, Glycine max
  Clone ID: 700905404H1
cagaagctttcaaaaggtttggaagcaaactgactggaattgaaggaaaaatcaatgcaaggcacagtgatccaagtctgagaaaccggactgggccagttcagctgccatacactttgctccatcgttcaagtgaggaagggttgactttcaaaggaattcccaacagtatctctatctaattaaaaagagtttgtggtttccttatctatgttgtacttctgaataacatagactt

SEQ ID NO: 25971 - DNA, 236 bp, Glycine max
  Clone ID: 700905405H1
ccaagaacggctagagcggttgacgagaattggtggagatttaaatttagaatatgctgaagatagctgcgaggaagaaaatttggaggaaaaatctgagtgcatgttggtgaatgatagattagaagatagacatgatgacaatccaatgatttctcaatcaagcctaagaaattcctcacctgaaaacattgagaatgatagtaattatcccaagaaacaaatggttaacgggg

SEQ ID NO: 25972 - DNA, 234 bp, Glycine max
  Clone ID: 700905406H1
cgaggacgaaaaaggtacaaggaaccgattctagagagagaaagcgtgttgaatttctagagagagagagcggagggcgcgcgggatggttcagatcgcaaggaggaggaagaagggacggccgtcgaaggcggatctggcgcgccgctcaggccagtctccggccgccgcatcgcagcctgattctcggcggagctccggcgccgaagcgtgaggtacaacatcatcgactac

SEQ ID NO: 25973 - DNA, 218 bp, Glycine max
  Clone ID: 700905408H1
caacagcagctgcaaagtgtcaggcaaaacaacttacagaagataagtatagtgtccctggcggaacaaatggtgcttggaaggaagagttagaatctgctgttaaaaggtatgcatctgtcatgacagaacttgatgctgcaaagcaagcactgagcaagactcggcaagagtatgattcatccttggatgaaaaaatgtttgcgttcaagcaagca

SEQ ID NO: 25974 - DNA, 237 bp, Glycine max
  Clone ID: 700905410H1
cgaaatttaagtgaggagctagagaatgatgatgaagtctgctatgtgtgcagtggtggttgtagcacttcttcttctggcggaggtggggcccatggctgaggctgtgacatgcaccccaacagagttgagtccgtgtcttccagcaatcacttccggtgctaaaccttccaatgcttgttgcacgaagctgaagcagcaaaaaccatgcttatgtggctacctcaaaaacgctag

SEQ ID NO: 25975 - DNA, 235 bp, Glycine max
  Clone ID: 700905411H1
cagaaacagtgtgatgaaaatgaaggtccttgttttcttcgttgctacaattttggtagcatggcaatgccatgcgtacgatatgttccctctccgaatgaacactggctatggtgcccgtactccggaggtgaaatgcgcaagttggaggcttgctgacgaagcacacaacatctttggctttgagcccattcctgaagagtgcgttgaagcaacaaaggaatacatccatggc

SEQ ID NO: 25976 - DNA, 236 bp, Glycine max
  Clone ID: 700905412H1
gctctttcctccgatctcaggtgttgtttaagcttcctgtgttggcttggtatccttgcaagttcttctgtagcagattccaaggtgaaggtgtcatgttaaagtttctttcatgtttgaacaggctactatccatttgggagcaactgagctgcttggattgtatttttcttcttctagaaaaaattacagaccctcaccacccagacttagttgtatgaacggttggccacctt

SEQ ID NO: 25977 - DNA, 237 bp, Glycine max
  Clone ID: 700905413H1
cacccatccgcaaatgggaagcgatcatccgaagaattctaaacaaatcttctgatcctgaaagcaagcacaaaagctacagtgcccctcattctcctgttcaaaaaacttcttcttctgcttctgttaatgctctagcagacagtgtagatgttaatccactagacatgatgaacgaggagtatttaggaacttttgacaatgatgatctagaacaagaggaacagaaaagcagca

SEQ ID NO: 25978 - DNA, 238 bp, Glycine max
  Clone ID: 700905414H1
aataattgagacttgagagagaaaaaactaaactatagggcaaaatgagaaatatttgagctctcaacttcattgcccattcttgcccagaaccccataaaacacccaaggaaattgatgctgcttataagcaaggcggtggtttggcttttctagtaactttgactcactgacttcaaacacagtaaccaagcctcttccttcatgggaatatgagaatgaaactaaattcaccgtg

SEQ ID NO: 25979 - DNA, 223 bp, Glycine max
  Clone ID: 700905415H1
acttaggggaacaatcacagcatctggtgatcttgttcctttgtcctacattgctggtttgctaactggtagaccaaactccaaggctgttggaccctctggtgagattctgaatgccaaagaagcctttgaattggccaacatcggtgctgagttctttgagttgcaacctaaggaaggccttgcccttgtgaatggcactgctgttggttctggcttggcc

SEQ ID NO: 25980 - DNA, 94 bp, Glycine max
  Clone ID: 700905416H1
cgaactttcacttattcaatttctcaccatacaaattagagtcatcttctgcgttatatctttggctgccattaatgtttccacacaacatacg

SEQ ID NO: 25981 - DNA, 239 bp, Glycine max
  Clone ID: 700905418H1
caaatatttgcttcattccttcaccgccgcactatcgtttccgagaaccatcactttttctcgctgctcttcaaagcaatcgcaacgcgcgttttgcttctcttttcatcgcagatcctctgcgtcgccaccagattcactcacgtttcgtgattcgaacgcggcgtcgtttagactcaagcttgcgggagaagagaaaaccctaatcagacatggggaagaagaagccgacggcgagg

SEQ ID NO: 25982 - DNA, 237 bp, Glycine max
  Clone ID: 700905419H1
agtcacaatggtttcttctaattgctactatcttgcattggtatgctgctgtgttctgctgctgctgaaccccaccgtgggggagcaggacgagcagaacttggtgctccagtaccacaaaggcgcgctcctcaaggggaggatcaccgttaacctgttatggtacggctgcttcaacccaatccaacgctccacaatcgttgacttcataaagtcgttaagctcctccccgggggc

SEQ ID NO: 25983 - DNA, 234 bp, Glycine max
  Clone ID: 700905420H1
ctttctctgaactgttcaccgaggatgagattaaggatgccttggctgagtcatatcagaacatggatgaagagattgattttgagtccttcctaagggtacatttaaatctgcaatcccgagcaatagctaaagatggtggttcaaaaagttcttcttcatttctgaaggcagctacaacaactgttcatcatgcaattaatgaatctgagaaagcttcttatgttgcacata

SEQ ID NO: 25984 - DNA, 234 bp, Glycine max
  Clone ID: 700905421H1
gtttcttcctccttcaaacaccatcgcagattcttcgctcctttccattgattcaaaacatgattaccaccaccactcctgctagatcttttctccaagtcgccgctacagaggaggccgcgccgcctctcagagtcgttcagattgaaggactggttattctgaagataattaagcattgtaaggaccactcgccttctttagtcatgggacaacttcttgggttggatgttg

SEQ ID NO: 25985 - DNA, 232 bp, Glycine max
  Clone ID: 700905422H1
aaaaaaaacccacacctttttcactctctttccctaacagtcgcagattcaaatggagcccgagcccgaacccaagcttgagcctgagccagagcccgggcctgagtttagttcgaaagaggaagcattctcatactaccaaacctacgccaaatccgtgggcttttccgccataatcaaagcctgccgtcgatctcgaatctccggcaacttcattgacgccaaattcgcc

SEQ ID NO: 25986 - DNA, 232 bp, Glycine max
  Clone ID: 700905423H1
cggctttacagtgtttctcttccttcttcttcttcttcttcttcttcttcgttgaatcgcgattgttctgtgcgagagaaagaagagagagatcgaaaatggcgttggctttcgacgagttcggaaggccgttcataatcctgaaggagcaggagcagaagagcagactccgaggattggacgctcagaaagccaacatctccgccggcaaagccgtggctcgcatcctccg

SEQ ID NO: 25987 - DNA, 234 bp, Glycine max
  Clone ID: 700905424H1
ccttttggagaggatatgtctgcgtgcgtggatttgaccgggaaaagcgagcaccccgacctctgttggctagactacacttcccggttagcaggttgcctaagaatagggataagacccaacaagagtccgcatcggcaaactcacaaggattgaattttaaacaaaatccagaacagccagaattgctttccaacattcggcagaccggaggatcctgaaggcaaataattg

SEQ ID NO: 25988 - DNA, 269 bp, Glycine max
  Clone ID: 700905390H1
aaaaaaaaataataaataagaaaattaagagccatagttagaattctgtatgatatttacgtttacggcgtgtgataaaaagatactatatagaactaaaggagattcccgtttcagttacattcaattcaacgattgaccaaaagagaattcaaaaaataacatttagatcacccaaattccaatatttctatgaaacaataattaaatctaacgagtttatttcgattgattgtatccatatggggtaataataaaagggggaggag

SEQ ID NO: 25989 - DNA, 235 bp, Glycine max
  Clone ID: 700905425H1
ctggtggaaagaacttgtccaagtgggtcatggtgatttgaaagataagccatggtggcaaaagatgcaaacttgtgaagagttgattgaagcctcggccaccctcatatggatcgcttcagcccttcatgcagctgttaactttggacagtatccatatggaggtttaatcttgaacaggccaaccattagcaggagattcatgcctgagaaagggtctgctgagtatgctgct

SEQ ID NO: 25990 - DNA, 234 bp, Glycine max
  Clone ID: 700905426H1
gtgaattatttaatgcgcgaaaatgggcagtgaggagaatagtgtgtgatccacttctttcatcgcttcggatcttcaatctcatctccgatctcaaaatgcccgctgtttatggagctcgcttgaccaccttcgaagactccgagaaggagagtgaatacggttacgttcgcaaggtttcaggacccgtcgtcgttgcggatggcatggctggtgctgctatgtatgaactcg

SEQ ID NO: 25991 - DNA, 249 bp, Glycine max
  Clone ID: 700905357H1
gacacttttcttcttgggttgcaaagacacacaaagaaacattgatctcagtcctcactagtaacgcaattcatgctcttcgtctccgattcatgcgttaagccccttccgctgaagaagaaaaaccctttctctttatgtgttcaacatcaatggcttcctcgttctgcggctattccaaggcccaaatgtgcttcttcaagattctccgcataatttcatccatcccaccctccacacaacatacga

SEQ ID NO: 25992 - DNA, 270 bp, Glycine max
  Clone ID: 700905358H1
aaaaaaaaatagtaagtagaaggattaagaaccagaattagagttgctgtatgatatgtacgtttacggcgtgtgataaaaagatactatatagaactaaaggagattcccgtttcagttacattcaattcaacgattgaccagaagagaattcaggaaataacatttagatcacccaaattccaatatttctatgaagcagtaattaaatctaacgaatttatttcgattgattgtatccatatggggtaataataaaagggggaggag

SEQ ID NO: 25993 - DNA, 278 bp, Glycine max
  Clone ID: 700905363H1
aaagaatacaaaccttgtctttgaaccagctcatggatcttccaccccagttcatccgtctagccaatgatatgcctgagagcaccatagccatagacggtgtcactgtgcctctcatctcactgtctcatacatatcatctcacggtgacggcaatagctgaagctgctccatagtggggatcttccgtcatattcgcttatggtatgtctacaaacatcgatccaacgttcgcaagtggtaggtacggtagtctgtgccctccctcaagaagagaa

SEQ ID NO: 25994 - DNA, 274 bp, Glycine max
  Clone ID: 700905364H1
atgatagtaaccccctttttccctctccatacccttttgctttctttatccaataataagaacttcccacgagtggctttaactggtctggtctggtctggtcggacacacaaaaatattagtatggagaaggtgagttttgtgaagaatggagagcttagattgcctccggggtttcgtttccacccgactgatgattacgcggttttgcagtacttgaagcgcaaggtcttctcctgccctctgccagcctctatcattcctgaggttgatg

SEQ ID NO: 25995 - DNA, 266 bp, Glycine max
  Clone ID: 700905366H1
cgtcgctccgcaccagtttcagcgcacgtatatcttgttgtttggagcgatccgagaaaaactctgtaaacatgttggtttaccaggacctccttacaggtgatgagcttctctctgactccttccgttacaaggaaattgagaatggaatgctgtgggaagttgaggggaagtgggttgttaaaggagcagttgatgtagacattggtgcaaacccttctgctgagggtggaggagaagatgagggagttgatgatgcagctgtt

SEQ ID NO: 25996 - DNA, 264 bp, Glycine max
  Clone ID: 700905367H1
gacaggttcaaaccggagcaaaaaaacttgttacgatggtttcttccgacaaggatccacgagaggaagtccttcaagcatggtacatggatgatagtgatgaagatcaaagactcccccaccacaaagaacccaaggagtttgtctcgttggaccaacttgctgaacttggagtccttagctggaaattagatgctgataaccatgaaaatggtccagagctgaagaagattcgtgaagagcgtggctacacctacatggatg

SEQ ID NO: 25997 - DNA, 263 bp, Glycine max
  Clone ID: 700905368H1
gtagtacacaacacatagagataggaagacaaaacattctcactccgaacaaaatgtcgattaacagcgaatctacgccgccaccgctgatcggcaaaatcgggccttacaccgtcttcatgacgccgccgtctacacccaaaccctccgacgaccacctcgtcaccaccaagatcgcacctccgccgcctcagattcccaaagccgttccttcccccaaacccgtctccgaccccgacgattccgtcttacggcttcttcag

SEQ ID NO: 25998 - DNA, 263 bp, Glycine max
  Clone ID: 700905369H1
ggatgcacgtcttgaacgcaatttcaaggagatggataagttctaccaagaagccattgatgaacacatgaattctaagaaaaagactccagaggaagaggatttagttgatgtcttacttcaactgaaagagaacaacacgtttcccatagatctcaccaatgataacatcaaagcagtgctcttgaacttacttgtaggagctacaggtacaactgaagtcacaacaatctgggccatgactgaactaataaaaaatccaa

SEQ ID NO: 25999 - DNA, 256 bp, Glycine max
  unsure (1)..(256): unsure at all n locations
  Clone ID: 700905370H1
aaagtctttgactttgaagggaaagcctcattttgctgacttcagtttggtgccttatgattggggtggctttgtgcatccatgggttgaggcactggccatgagcagggttggtttggaggagcttaggctcaagaggatggtggtctcggatgagagcctggagctactttctcgttctttcacacactacagcggtctagtncttgttagctgtgaaggggtctgtancgatggccttgctgctatagctgca

SEQ ID NO: 26000 - DNA, 239 bp, Glycine max
  Clone ID: 700905371H1
taagatagaacgagaataatcaagacgacaacgttgcacttttgggaggtagaccgaggtaggtcgatggccatggagatttgtggtgaagtggaagagaccgtgaaggagtggaggcaatacttcagcactggaaaaatcaggagtgtgacatggaggaaaaaccagctcacagctctcttagagcgtgttcatgataatgaggatctatatgtaaggcgctcgatcaagatcttggg

SEQ ID NO: 26001 - DNA, 212 bp, Glycine max
  Clone ID: 700905372H1
ggaaaaggttcttcctgatcttccaatgagaatgtttcacaaggtttaaaagaagaggtacgagatgcaagattagaagttctagcaagcctaagacaagaaacagatgaagagcgcttgtcgtggaaagagctatctgcgttgcttagattagaatgtcgagagtacactccgttacttgcaatgattatggaatgtttagttcctaagag

SEQ ID NO: 26002 - DNA, 262 bp, Glycine max
  Clone ID: 700905374H1
gtgttctgggctttggctttagtgagcctctgtctgccaggtaccttccaatgcccaaggggtaacatctgtgccggcaaactcgccacctgcagccctagctgcaacgtcgccgtcttcgggcacgccaccgtcagtaagacgggcagcatcccgtcccagcacgagtagtccaccaactatttgccagccacctgcaattgtagctcccgaacctgctccagtgacagcacctgctccataatgtgcacgagcttcaagc

SEQ ID NO: 26003 - DNA, 153 bp, Glycine max
  Clone ID: 700905375H1
cttttagctccttatcgtcgtggaggacaaataggacgtttcggcgcagctggagtgggtaaaacggaactgattatggaattgatcaataacattgccaaagctcatggaggtgtatctgtatttggcggagtaggtgaacgtactcgtgag

SEQ ID NO: 26004 - DNA, 269 bp, Glycine max
  unsure (1)..(269): unsure at all n locations
  Clone ID: 700905376H1
acaaaagataaaaaatgggttcttctctacgganctgtctgatttggtgatcacttgcttctgcttcgttcgccgccaacccaagagcaccaattgatgttccatttggcagaaactatgttcctacctgggcctttgatcacatcaaatacctcaatggtggttctgagattcagcttcatcttggtaaatacacaggtactggcttccaatcagattggtcctacttgtttggtcacttcagcatgtacataagattggttgctggt

SEQ ID NO: 26005 - DNA, 243 bp, Glycine max
  Clone ID: 700905377H1
ccgtcatgggactcagtctcatatcattgtcatggactccattggtgcccgctgacttctcatctgcggtcactgctgcactctgctttaatcgctggagatctagttgttgttgattgtgtttcatccgtatgtgtcctacctgattctgcttcgaagacaagaccttgggtgttagggttcaggcttgttcttactgtcaataagctggacatgtgcttccttgaactcgaagtcgatgga

SEQ ID NO: 26006 - DNA, 273 bp, Glycine max
  Clone ID: 700905378H1
tataaaataatgttgttaccttcctctctctaacctacaatttaacaactccttcgtatcttctttcttttttctagaacctcaaaaccaaaaacacaacacaactttcgtaacgtgtctctcccttcttcccctcctctctccggttccctaattctgccctcactgcacccaattccaattcccctcacccccaattcggggaattagggtttcgccccattcattcatcgatgcaccaccaccatcgtcgctagggtttgcttcgatggc

SEQ ID NO: 26007 - DNA, 270 bp, Glycine max
  unsure (1)..(270): unsure at all n locations
  Clone ID: 700905379H1
tgaagaaagacacagccattgtttacttttcattgattgagccagatctttgtaggttctgctctgatnntccattgggtggaagaaagtctcaacctttattcgaaagagcaagtatctgagttgagttgagtgatcatgtgtggtggtgcggttatctccgacttcataccggcaggtcccgccagcggggcgcggcgcgtgaccgccgacatcctgtggccgagtttgaggaagcgcttctcgaagccgctgctggacgatgatttc

SEQ ID NO: 26008 - DNA, 275 bp, Glycine max
  Clone ID: 700905380H1
atttcctagcctcccaacaaggaggccccctatgctcaacagcagaaaataaataaagggcattggggtgcaatggccattgcaaagagtgcttccattcttattattttgtgctttgcattggcctgcaatgcggataatgctggaaaaccagacccagttgctggtcctgacatgttcagcaataaaaatgtggctaaggatgtgctccttcccggggagcaaatagttaacgtccaggattttggagccataggtgatggcaagttcgactg

SEQ ID NO: 26009 - DNA, 263 bp, Glycine max
  Clone ID: 700905383H1
gaaaagatggcgcggttgatcacagtggtgtggtgcgcggtggcggtgctactgtgcgccgcggcgggcgcgtcgtgggtggaggaggcggcgaacccgatacgaatggtggcgggggtggaggcggaggtggttcgggtgctagggcagtgccggcgcgcgctgaagtttgctaggttcatgagcaggttcgggaagagttaccgaagcgaggaagagatgagggagaggtacgagatattctcgcaaaacctcaggttcat

SEQ ID NO: 26010 - DNA, 263 bp, Glycine max
  Clone ID: 700905385H1
cattcgaagagctcttaaccttggtgtcaatgttaagatgattactggggatcagcttgccattggaaaggaaacaggccgaaggcttggaatgggaacaaacatgtacccttcatcggcattgcttggccaagacaaggatgcttctatttcagctcttccagttgatgagttgattgagaaggctgatggatttgcaggagtatttcctgaacacaaatatgaaattgttaagaggctgcaagagaggaagcatatatgtg

SEQ ID NO: 26011 - DNA, 264 bp, Glycine max
  Clone ID: 700905386H1
gcgcaatgggaatgagtatcttatcattctcattgactcccctagggcacgttgacttctcatctgaggttactgctggactccgtattactgatggagctctagttgtggtcgattgtgtggaaggagtttgtgtccaaactgggaactgtgctaagagaagcccttggagaaaggattaggcctgttctgactgtcaataagatggacaggtgcttccttgaactccaggttgatggagaggaggcttaccagacattccag

SEQ ID NO: 26012 - DNA, 264 bp, Glycine max
  Clone ID: 700905387H1
ttgttgcgttgcactcgcggaacggagaaaaccaaagaatcaagcttcgtcaaagtgtctgtcacacacagtctttaagatctggaagcgcttctcacttgcccacaataagaattcctctcaaatttcaatttttcatttgaagataataaaaccctaaaagaggggttgcaagcaaaatgagaagctcgaagatgtggatggttttcatgtgtctgacggtgagcttcttcgctcgcattgaatcgctatccgtgacggtga

SEQ ID NO: 26013 - DNA, 256 bp, Glycine max
  Clone ID: 700905388H1
gataagatcgcgcggttgatcacagtggtgtggtgctcggtggcggtgctactgtgcgccgctgcgggcgcgtcgtgggtggaggagacgacgaatccggtacgaatggtgtcgggtgtgcaggcggaggtagatcgggttctagggcagtgccggcgcgcgctggggtttgctaggttcatgagcaggttcagggaagagttagcgaagcgacatcgagatgagggataggtactcgatattctcgcgaaacctc

SEQ ID NO: 26014 - DNA, 234 bp, Glycine max
  Clone ID: 700905389H1
gaattggtttcactaggtggtttggcaaattgcatggaaaatagaatgtgttagtttccataagcgaatgccaattatttagtttgagaactaggatgttggtggttttattatatgcttttactagtgcatgttcccgtgcatcaggagcaaaacataagagagaaaaaacaaatatgaggtacaagatttgttgaggcaactgactgataattcgaagtactccgcggagtt

SEQ ID NO: 26015 - DNA, 266 bp, Glycine max
  Clone ID: 700905356H1
tagactctgctctcaaacggcgtcgttttggaactctttttcttttccctttgattcttctctgtgcttgtaaccgaaagaggggaaaatataattaataccgatttcgcaaccaattcttctcttgcgttgaattgggacaacgagaaattttggatctcagtttttggcaggaaaaaaaaattgcatttgagtataaataacagagtgtagtgttcggtcttgttcttgatactgtgctagatttgttggatggcggagaaatc

SEQ ID NO: 26016 - DNA, 281 bp, Glycine max
  unsure (1)..(281): unsure at all n locations
  Clone ID: 700905312H1
gatttcgatcatcgtttattgttgttcagagatgatcccgtaccttagacagtggcttctcntagcactagcatttccatgtttactaacacttcatctgttagtatcaggtgtagtagcaacaacatcgttcacactggttaacaaatgcgactacacagtgtggccaggcattctctcaaacgcaggagtcgccacgcttccaacaacaggtttcgtccttcaaaccggagagtccaaaaccgtaaccgctccaacctcttggggtggccgtttctggg

SEQ ID NO: 26017 - DNA, 273 bp, Glycine max
  Clone ID: 700905313H1
ttcgagcgaatcggctcgagggcaagcaacagaggctctttgatttcagtccgtacagaatattattcacagccacattacaaccacgtctctcttctcttaagtcttatctataaaataagaaagagaggaagctcaacctctcacaaactctctccacatccatctttgccacctgcatgttggttctctgtaaacagatactgcaaaagaagaataatattgaatatttggttgggttgaatcctgggttgaagcgttgcagacatcacg

SEQ ID NO: 26018 - DNA, 277 bp, Glycine max
  Clone ID: 700905315H1
acagcacgaggctattctgtcaaatgatatgcatagtgaagtgattatgtctagtggggcaattgggattcctcaattgctaatgcttagtggaatagggccaaaagcagaactccagaagttgaacatcccagtggtccttgacaacccctttgttgggaaaggaatggtagacaatcccatgaacacaatgtttattccttctaatagaccagttcatcagtcactcatagaaactgttggtatcaccaagatgggtgtgtacattgaggctagc

SEQ ID NO: 26019 - DNA, 273 bp, Glycine max
  Clone ID: 700905316H1
gtaagagccatacggtatcttatcccataggtcaccatgatccttccattagaagttgcagtaacgtgatagaaatggctttgagacgctttcttttatggctagctatatattctgaacccgatcccccctcacaagacttttaaatcacacaattgctgtgtttcgcacacgtggtagcaatgccaatttcacctgtaaaatgccttcctttggttgaccagccatacttgcatggaggaggtgtactttgttgtccaggcttcgacagag

SEQ ID NO: 26020 - DNA, 268 bp, Glycine max
  Clone ID: 700905318H1
atttcacaaaaaataaaaaaaaataagcctctttctctctctgaatttctaagcctctctcacaacaatggaggagccacaaccaggacccagcccgttacgcaaaatgattttggtgtcatcaatggcggccggtatccaattcgggtgggccctatagctctcccttctcaccccatatgttcaaaccctaggcgtcccgcacgcttgggcctcatttatttggctatgtggcccgatatctgggctgctggtgcagccattgtgg

SEQ ID NO: 26021 - DNA, 266 bp, Glycine max
  Clone ID: 700905321H1
aggtattattagtttttccgagcttagcaatgttcaggcagcattttcaggctttagcaattgtgtgaaagttcaatttaccatttgtggtgtttgtttgtgtaattaggtttatgtttacttaataaagcttcttaagcttcctctttttgtttttttactttattgattgtattttgccatatcttctgacctttatatatattttttgggctgctgaaactggtgcatgtaatgatttgatttggctagcaatgcaacgtatt

SEQ ID NO: 26022 - DNA, 267 bp, Glycine max
  Clone ID: 700905323H1
cagcttttatattttaccctttatctatttgttgatattgttttcatcccttgtgccttttcattccttggcgattacgaaattggggtttgatccagagagaaagagagagaaagacataaaatttaaggaagaacagagattgattttccataggaaccctaattttctctttcttgttcttttggggttctgcaatttgtgtggggttttgtgaagcggtgatcggaaagtctcgatctttgatcggttttcgtcgatggagag

SEQ ID NO: 26023 - DNA, 271 bp, Glycine max
  Clone ID: 700905326H1
gctttgattagtgtggcctagttgttgttttctcgatgagaaaggcttcttccactatgcattgcgcatttctgcgcttttgggttcccttgttgctgcttgctagcttcagctatgctccttctgtttcggccacaactgaaatttcagggaatgaagtgaacacagatgggaaggtgataaatgaagagttagcaaaaccaagtctaaaaggacatgatgaagaagcaaagttcaaaggattttttccaaaaccaattcctatagttag

SEQ ID NO: 26024 - DNA, 272 bp, Glycine max
  Clone ID: 700905327H1
acaacacatcacaaagactttctcaaacaaaaccagacggttgtctagtcttccaaccttccccatattcctattcctattcctattatatcaaaaacaatgaatagataacacttcttcttctttatatatatatatatatatgggtgtgttttttggtcgcttgcccgctttttgcacccttcagcactaagttagagacggccccctttccttgcagatctttttccagggaaaggtttggattttttgagcgttttgtgataagagtg

SEQ ID NO: 26025 - DNA, 275 bp, Glycine max
  Clone ID: 700905329H1
gtgaatacacaagcaaaattagattaattaattaagctgaaagcaagagaaaatgaagatggaaatcgaggaatttggcaactgcgaacacttcccctgctttcactgaaccacgtgtcccttttgtgcagatcagtgtgggagtctatgaggttttatgaggatgtcttgggctttgttcccatcaaacgcccttcttctttcaagttcactggagcctggttttacaattatggtattggaatccacttgatcgagaatcccaacattgatgg

SEQ ID NO: 26026 - DNA, 277 bp, Glycine max
  Clone ID: 700905330H1
ctctctcctcctcgatcccaattccactagggattcaattccgatgcgattccgagcttgttagatccacgccaacgtctcgtttgccagattcttttgtaaacaaaaataatcttcctttgcccaacaggtcagttggaaaaaaatggaccatgacaagactgggtgccaagccctacctgaaggtcctatatattgcatcaacaactgtggattttttggaagtgcagctaccatgaatatgtgttctaaatgccacaaagacatgttgctgaaa

SEQ ID NO: 26027 - DNA, 279 bp, Glycine max
  Clone ID: 700905332H1
catgtcctaatctttctgcaccatcgttctccatttttggctttacaaaaccactgtgtctgattaagggttctttaatatttccaatatttcttgtagtgaaaaagttgttagctaaaagaagaccaagtttttggtgttgtagaaggaagagaagaattaacatgaaaattcagtgtgacgtgtgtgagagagctccagtaacagtgatttgttgcgcggatgaggctgctttgtgtgccaaatgtgacgttgaagttcatgctgcaaacaagcttg

SEQ ID NO: 26028 - DNA, 263 bp, Glycine max
  Clone ID: 700905333H1
ctgaggcactgaaagtgtgatatggcaagagtcatttcctcttcctgcgcacgcctcgcaatgcgcctcttctccatcaccaccacagccaccgcgttcgccgtcactttacccaaaccctcatcactctccctctcatcgcgtcgattcctcttccctctctcccatgccatcgtccctcgctccacccgcgtcgccggaatccggtgccgcgttaaccgcgccggagactcggcgtactcaccgctgaactcggggtcgtc

SEQ ID NO: 26029 - DNA, 265 bp, Glycine max
  Clone ID: 700905334H1
aaccttactggcaaaacaatcacgctagatgtggagtcctccgacacaatcgataacgtgaaagccaagattcatgataaggaagggattcctccggatcaacaacgtttgatcttcgccggaaaacaactcgaagacggcagaaccctcgccgattacaatatccagaaagaatcgactctgcatttggtgcttcgtctccgcggagggatgcagatcttcgtgaaaaccctaaccggcaaaacgattacgctagaggtagagt

SEQ ID NO: 26030 - DNA, 195 bp, Glycine max
  Clone ID: 700905338H1
gaagtgagaaggctgtgcgatgcaccataagcatctcaactcatgtctgcgttttccgtaaaatgtaatatttgattattgagatttcttgtactaaaagtttgaataactaaagctaaattttttttccaagttgtgaaaaaaaagaaggaaagaaggaaagaaaagaaaggggggccgccgaaggatgggtgg

SEQ ID NO: 26031 - DNA, 265 bp, Glycine max
  Clone ID: 700905339H1
gttgaggccttacatggaatctatggttccactccccggaatctatgaccccgatttcattgctgccaaccaaggagaccgtgccaacaacgtgatcaagggcacaaagaaagaacaagttcaacaaatcatcaaagacattaaggagtttaaggaaagcactaaggttgacaaggtggttgtcctgtggacagccaacacagagaggtacagcaacctagttgtgggactaaacgacaccatggaaaacctctttgcttccttg

SEQ ID NO: 26032 - DNA, 267 bp, Glycine max
  Clone ID: 700905340H1
attcacgtaggcaacggctacgaaatccgtcgctataattcacccgtttggatttcaaacagccccattcaggacatttctctcgttgaagccacaagaaccggcttcaggaggttatttgactatattcaaggtaagaataactacaagcagatgattgagatgacagcacctgtgatcagtgaagtattacccagtgatggacccttctgtgagtcctcatttgttgtgagcttctatgtgccagaagagaaccaagcaaacccg

SEQ ID NO: 26033 - DNA, 271 bp, Glycine max
  Clone ID: 700905343H1
gatcgatcgatggctcttgtaggagttggactgaagcatgctgcggagggcgtaccggaggcgaattgctccgccaagcccaccaagcagggcgagggcctccgccactactattctctcaacatccacgagcatcagctccttcttcgccaagagagtcatgacctcaaccgtctcgaggctcagagaaacgacctcaattctagggtgaggatgctgcgcgaagaattacagcttctgcaggcacccggctcttatgtcggtgaagttg

SEQ ID NO: 26034 - DNA, 277 bp, Glycine max
  Clone ID: 700905348H1
atgcaatatatgggtttattgcccatctgagtttgggtgtcattctccagatatctaccagcacaaacatcaggaatgttggctgaaatatgctgagaaacctcgattaaattttaaggataagtatcctgaattatatcgaaattcacatccttctgcaccagtgatcgttccgtgggtctctggagttattagttcatgagtcaaataaccaaacaccagatgtaacgagatcagccagagctaccttgtagactacacaacggcacaaagctag

SEQ ID NO: 26035 - DNA, 267 bp, Glycine max
  Clone ID: 700905351H1
ggagaacaaagtatagagtgaaagaatgggttagagaagcaagatttggatcataggaggcaccggctacatcggcagacatatagtggaagcaagcgcaaaggctggaaatcccacttttgctttggtgagggaatccacactgtctgagacctccaaggcacaactcatgcacaattttgaggctttgggcgttaatttggtccgcggggatctgtacgatcatgagaagttggtgaaagctatcaagcaagtagatgtcgtcat

SEQ ID NO: 26036 - DNA, 263 bp, Glycine max
  Clone ID: 700905352H1
ctcagcttaacatgctactctcgatcattcatcagtgcatgtgtaaacaccctctctaggctctgcagcaagactagcagttggacagtggctttaaaaacacttattttcattcaaaggctgttatcagatggtgatcctgcatatgagcaagagatattcttctcaactcgccgcggaacacgcctcctaaacatgtctgatttcaggggcaactcaaaatataattcatgggacttctgtgcatttgtgcgcacctatgc

SEQ ID NO: 26037 - DNA, 265 bp, Glycine max
  Clone ID: 700905353H1
cagctctaatatggtgcagggttctagctttcttagttgcttgccaagctctacgcatagtgacattttatgctacgcagcttcctggtccaaactatcattgccgggaggggtctaaacttgctacactgcctcgtccggatagtgtctttgaagtcctcttgattaattttccacaagatgcgatatatggatgcggtgatttgatattttcatcacacatgatctttactctagtctttgttaatacatatcatagatacgg

SEQ ID NO: 26038 - DNA, 265 bp, Glycine max
  Clone ID: 700905354H1
cttcgcgccttattgtacatgaaagtatagcaacagaatttttgaataggattgtgaaatgggtcaaaaacatcaaaatttctgatcccttggaagaaggttgcaggctaggccctattgttagtgaaggacagtatgaaaagatattgaagtttatctcaaatgctaagagtgagggtgcaaccattttgactggtgggtctcgcccagagcatctaaagaagggattctttgttgaaccaactgtcataactgatgtaactac

SEQ ID NO: 26039 - DNA, 273 bp, Glycine max
  Clone ID: 700905311H1
cttcttcctcttcttcaccaacgaccaaggtggagagtactggttcccaaaagaagaaggaggagcttagaaaagtgttctccactttcgacaaaaacggcgacggattcataacgaagcaggagctgagggagtccctgaggaacatcagaatcttcatgacagaacaagaggtcgatgatattgttgtcaagtacgattccaacggggacgggttgatcgattttgaagagttttgcttgttgactagtgagtgtgtaggagtggatcatg

SEQ ID NO: 26040 - DNA, 244 bp, Glycine max
  Clone ID: 700905274H1
cgcgccgacatggctttcgcgcactacggtcccttctggcgccagatgcgcaagatctgcgtcatgaagctcttcagccgcaagcgcgccgagtcatggaacaccgtcagagacgaagtcgacttcatcatccgttctgttacgaacaacctcggaagccccgtcaatgtcggagaactcgtcttcaacctaacgaagaacatcatctaccgcgccgcgttcgggtctagttcccaggaggggc

SEQ ID NO: 26041 - DNA, 246 bp, Glycine max
  unsure (1)..(246): unsure at all n locations
  Clone ID: 700905275H1
atcgagccgaatcggctcgagcttcaacaccatggtggtcacctctgtctcactagtccacaacagagtgagtattaatcgttacttcaagatcaggataagctttttccttctgcttcatccccttccatggccgcaccttccctctcctccgctctcaactccctctcctctctatccctctccacctcctcatacttctctctcctccctcaacantccctcctctcaaaactatcaccctcc

SEQ ID NO: 26042 - DNA, 245 bp, Glycine max
  Clone ID: 700905276H1
cagaaagaaaaactcagcacaacacccctcccaaccctctttttctcttaatttctcatcatatcatatctattaatcttacacatatattaagacatagatataatttttttcgttttatttttccttgcatgggctgttaagataagatgtctcgcacgtgctcacagtgcggcaacaacggccacaactcgcggacatgcaccgacggtggcgccgccgcttcctgggcgggtctcccaggg

SEQ ID NO: 26043 - DNA, 245 bp, Glycine max
  Clone ID: 700905277H1
ataaaattggttctttatatacgtctctagctacataatcttctttcttcaacacacaagaatatatatatcagtgtggaggttaattaaaaaatgagcgataaagaagcgaatcttcaggcgaagttggaggcaacttcaacatgggctgttgcagttgtgtgctttgtcatgcttgctatttcaatcctcattgaacatattcttgaagaacttggaaagtggttacaaaagaaacaccaaaa

SEQ ID NO: 26044 - DNA, 244 bp, Glycine max
  Clone ID: 700905278H1
agagcttcgtatagcggacatactagaccgttatggtaaaccactatccttgtcgcaaattgtggagaacatagaagacgcaccctccccagatgcctctcttctccagagagtcctgagagtacgggtgcgcagaaagatcttcagtgcacaagaatcagagacaggagaaaccctcttcggcttgacacgagcctcgaagtggatccttcgcgacacgaaaatgacctagcacccatgttgc

SEQ ID NO: 26045 - DNA, 244 bp, Glycine max
  Clone ID: 700905279H1
attttgttctcaaagaaagaagactctgtctctgtctctgtatctgtctttgtctctgttcgtctcgctgaaggaatcgcttaggatcacattctttttcaagtttagttcctgcttctggccacctctcaagttctctgcttttgtttttagggctcctttggttctgaattggattggattgcaattgggtgcctcaccctgttttgctcaattgctgccactctactgttcatagaattgc

SEQ ID NO: 26046 - DNA, 246 bp, Glycine max
  Clone ID: 700905280H1
catgaattaggaatgaactataatttcatccgtccagacttgattgtggaatcatgcctacagactcctgaagatgtagacaagttgcgtagaattggagtgaaaactatattttgcttacaacaagattcagaccttgaatattttggagttgatattaatgccatacgagaatatgccaagacatgcaatgacattcaacacttgcgtgctgagataagggactttgatgcatttgatctacgg

SEQ ID NO: 26047 - DNA, 249 bp, Glycine max
  Clone ID: 700905281H1
gcgactctctttccttccctctttttccgaatctgaatcgaaatggcttcggagactgagacgtttgcttttcaggccgagatcaaccagctcctcagtctaatcatcaagaccttctacagcaacaaggagatatttcttcgaaagctcatcagcaatgcctctgatgctttggacaagattcgatttgagagtcttacagacaagagcaagcttgatgctcagccagagttgtcattcacattattc

SEQ ID NO: 26048 - DNA, 249 bp, Glycine max
  Clone ID: 700905282H1
ctcgagccgcccaaaaccatttatagggttttcttttctttgccaagaaaatgagagagtgcatttcaatccacattggtcaggccggtatccaggtcggaaacgcctgctgggaactctattgccttgaacacggcattcagcccgatgggcagatgccgagtgacaagaccgttggaggaggagacgacgccttcaacacattcttcagcgagaccggcgccggaaagcacggcctcgcgccgtctt

SEQ ID NO: 26049 - DNA, 247 bp, Glycine max
  Clone ID: 700905283H1
gcctccactctcatcttcatggacatcactcattcgaatgccttcttgattggaatcggcgtatgaatattgcaattggttctgctgaaggaattgtatcttcatcaccaagcaacaccgcatatcatccacagggatattaaagcaagcaacgtgttgctggattctgatttccgtgctcgtgttgctgatttcgggtttgctaagttgatccctgacggggcaacgcattgactacaaaagttaa

SEQ ID NO: 26050 - DNA, 245 bp, Glycine max
  Clone ID: 700905284H1
cctaaacgactctatctctcttcgttttgttcttccttgcgctcctcctcgttcgttcgttctccctcgcgtagatcggcaatggcggagaccgagacgtttgctttccaggctgagatcaaccagctcctcagtctcatcatcaacaccttctactccaacaaggaaatcttccttcgtgaactcatcagcaacgcctctgatgctttggacaagattagatttgagagttgacggacaagagc

SEQ ID NO: 26051 - DNA, 235 bp, Glycine max
  Clone ID: 700905286H1
ggttggctgaacaaaatggtacagtttaaagagaaatctcgcaaggcggtgcgttcattgctggagctgaagaagttggggttgcccttttgacttatcctgttctgatggcttctgatatacttctatatcagtctgattttgtcccggttggtgaagatcaaaagcagcatttggagttgacccgtgacttggctgaacgggttaataatttctatggaggaagaagtggaag

SEQ ID NO: 26052 - DNA, 245 bp, Glycine max
  Clone ID: 700905288H1
atcaactgcttttgcagttgccgtggaattggcgtgtattgtcatgtatgatgcctcgggagttagacttcatgcaggtagacaagcagaattgcttaatcaaattgtgtgcgaactacctccagaacatccttgttccaatgacagacctctgcgtgattcacttggtcatactccacttcaggttgttgccggtggcatattgggatgcattatagcatttttgatgagaagatcaagttaag

SEQ ID NO: 26053 - DNA, 243 bp, Glycine max
  Clone ID: 700905291H1
gagggtcagagtgagaaagagagagagagagagagaaactgagagaaattcgcaaaccctaatttcggaaagatcggcgatggctgcctccaaggatcgcgagaacttcgtctacatcgccaagctcgccgaacaggccgagcgatacgaagagatggtggaatcaatgaagaacgttgcgaatctcgacgttgaactgactgtggaggagcggaatttactttcctgtgggtacaagaatgt

SEQ ID NO: 26054 - DNA, 240 bp, Glycine max
  Clone ID: 700905292H1
tcactcttcttctcttgcggctagggttttagcgcacttcttctagatttaaggaagatgggtaaggaaatggttcacatcagtattgtggtcattggccatgtcgactctgggaaatccactaccactggtcacctgatttacaagcttggaggcattgacaagcgtgttattgagaggtttgagaaggaagctgctgagatgaacaagaggtctttcaagtatgctgggtgctggaca

SEQ ID NO: 26055 - DNA, 242 bp, Glycine max
  Clone ID: 700905293H1
caactcccatttctagctccctccctccctctgcttttcttctcttctcattttccttcgaacctcctaatctctccctccagcttctgggttctccattttccctcgttttctgcatctgcatttcgtagattcagttctcatcggaaaatggacgttcaccgaagacccattccttcttccggcgaacaccgacaaacccagaagctgaagaccaccaccaccacaccaccgattcgaaa

SEQ ID NO: 26056 - DNA, 241 bp, Glycine max
  Clone ID: 700905294H1
gtactctcccggatcctccgcctggaactcttgttttgccgcgctcgtgcttccgcttcggatccatctagcgtcacgaaaaaaatccagaattctgtgttcggttcagctcttttggatttgctagatccgaagcgcgaaccatttcgaagatcgttgaagaatggcatcaacggcgagtggggccaccggatggtacaggggaagagtgaaggcggttccttaccgggactgtttggtc

SEQ ID NO: 26057 - DNA, 243 bp, Glycine max
  Clone ID: 700905295H1
ttcacctttccttccttccacattcaatttccaacaatttcacgactccttcggagatctctctctcgcccataatccaaccatggcaaatacgggaaatttagacgcggcgatagagcaattgctgaacgtggagaagcagatgaggctcgccggtgacgtggcaggtaccagaaaggcggctaccgatattttgcagctctgcttcgatgcacgagcctggaaaacctcaatgaccagatt

SEQ ID NO: 26058 - DNA, 246 bp, Glycine max
  Clone ID: 700905296H1
ctctttgcaacacaacaaaaaaagacaacacagagagaagcgtcttaataaacgctcttctctgaaaaacctgatttcttctcttcttctcttctctttcgtttcgatcttcgatctctgaaaatgagagagtgcatttcaatccacatcggtcaggccggtattcaggtcggaaacgcctgctgggagctctactgcctcgaacacggcattcagcctgatgggcagatccaagtgataagactg

SEQ ID NO: 26059 - DNA, 265 bp, Glycine max
  Clone ID: 700905301H1
caaagatcccatcttttcacgatttggagcagaacaacaattctgggtatcttcatatctgtgccaatgagaccatccatggggtggagttcaaggactaccctgttcccaagagtggtgttttggttgctgatatgtcctcaaatttctgctccaagcctgtggatgtgtcaaggtttggggttatctatgctggggcccagaagaatgtggggccctctggtgtcaccattgtgatcatcagtcaggacctcattgggaatgc

SEQ ID NO: 26060 - DNA, 235 bp, Glycine max
  Clone ID: 700905303H1
agataattgagacgacggcgaacgagaacgctgtcgttgcgcgaactcgctgcgttgttgttggtggtgctagtcgcggcgagtgtggtggtgcaggctcatgagaactcggacgtgaagacgcttgtgaagcacatgcacgggaagaagtactgtttgaaaggatgggaatgtaagggctggtcaatttactgttgtaacctcactattactgattagttaccagacctacgag

SEQ ID NO: 26061 - DNA, 261 bp, Glycine max
  Clone ID: 700905306H1
cctcgagccgaatcggctctaggttgcacggcacagagtggagtcacaagatggtgtcctggacagctgcagaagctgctcgcagctagcgtcctaaagtgcggcaagggcagtgtctggcttgatccaaatgaagtcaatgaaatctccatggccaattctcgacaaaacataaggaggttggttaaggatgggtttattatcaggtagccgactaagattcactctcgctcccgtgctcgtcgaatgaaggaggccaag

SEQ ID NO: 26062 - DNA, 268 bp, Glycine max
  Clone ID: 700905307H1
caacctcaatcaatccacatttaaattataacaaacgcccttcaagatacaaacaatgtcatctcgcattgttgcggagaatgctctatcgctcaccaatattgtcacgcctccatatttcgacctaatggaactggacgatctcacgcgccgaacctccgccggagacatgcccacgctcggacagctcctcaagcacgtcggagacgtgcggaaggaagcctccggcgacggaagcgagacgcccgtgcaccacgctctcgacatc

SEQ ID NO: 26063 - DNA, 242 bp, Glycine max
  Clone ID: 700905273H1
caaatcttctatggaataatgggaagttggactgcttatctgattagcattctgtacatcgagtacaggaccagaaaagagaaagagagtgtcagcttcaaaaaccatgtcattcagtggtttgaagtgctggaaggtttactgggtccatactggaaagccattggcttggccttcaattgcacttttctcctctttggatccgttatccagcttattgcttgtgcaataacatatacctc

SEQ ID NO: 26064 - DNA, 263 bp, Glycine max
  Clone ID: 700905308H1
attgctttgtaaatggtttggagcaccgagatgcaactgcaattttcaattgcttacgtgcatatgctgctatagataacactaagagtgcagaagaaatttttcgagttactgttgtggctccattgatacagaagattatcccacatggatcatcagctgtggttgctggatcatttggggatggtctagacgatgattatcaactaattaaggagttcattgataaagactgtagatttttattggacattacttcagct

SEQ ID NO: 26065 - DNA, 272 bp, Glycine max
  Clone ID: 700905310H1
gttgtaactcaagggttgctgtttttttcctcgtgacatgatttgatttccaccttcactcaagttctcttttttctttcccttcctttcatttatttattgtgcctatgtttctttaaattttaatttatagttttataccatgttatgttaatgtcatatgtgcgctctttcttatattttgtacaagatttgttgattcaattatctgagaattccaagtactttgttgattgtgatttgtgaagcaggtttcaattgggaatctgatg

SEQ ID NO: 26066 - DNA, 249 bp, Glycine max
  Clone ID: 700905245H1
ctgggccatatcacactctgttagcatatggagaagaacactccattgttgacattgagaagagaagagaagcaggagaatgcaatgggggctttgtacatgtcagttatggagatactcttgttcctcttcatattcatatgctctctcacaccaatctcacagtcacagggattacatcaatctcccccttttctctttggcacttcttcttcttcgtaccagtatgaagggcttatttgagtgatg

SEQ ID NO: 26067 - DNA, 247 bp, Glycine max
  Clone ID: 700905247H1
cttctcttgctacttgctatgctcatcttcaaaactcagccttactcatactcatgctgagccaaaacccaaacccaaccaccatggacatgattcctgggaagatccgaaaacgaggctgttcctcctcggcctcctcctcctcctccgtgctccacaactaccgcttcaagaggactattctcgtcggaaagaggggcggatccagtacgcccgtgcccacgtggaagctcagagctcgagatct

SEQ ID NO: 26068 - DNA, 253 bp, Glycine max
  Clone ID: 700905249H1
agcgaaagagccattttctgattctaccaaatctagggttagggattcaatttaccaacttcctctctctctctctctctcttcatattcttttccttgctacgagaaatataattactctctatatctctctcttgctcattacgaatatcagtttacctcgagctaatcatattcggaagaaacatggttttattatccggagaaaatcatcgtcacaattttctcggctaacctttgaattatatataat

SEQ ID NO: 26069 - DNA, 256 bp, Glycine max
  Clone ID: 700905250H1
gagaaaagtggcggtgaaaaatgaaagtgacttggaagaacaagaagaagaaacgttgtttacccacgttgtcacacttcactgaccttccctttgagcataatcatcaacaacactccaacaccgacgctgaagatggcgcgcatgttcccgacgccacacaattggctaacgaatttcaagctcaaggagacaagcttgctatggatgggaagtaccgggaagcactaggtaaatgggaagctgctcttgcgtt

SEQ ID NO: 26070 - DNA, 252 bp, Glycine max
  Clone ID: 700905251H1
ctgttgccaacttctataagacttcggcttcgatggctggaacacctgagcatcttgggatattgattagtgagaaactgaggcacccaagtacatggctcttgttgctgtcattatggctgctgtccacatggtttggcacattcatactgtgtggcatgttgagcctctcaacaaagtttcccttcttccatagctaccctgagttgtctcttcttaaacagcaaaaagtgatgagtcttggtctctcag

SEQ ID NO: 26071 - DNA, 249 bp, Glycine max
  Clone ID: 700905252H1
cttcactagtgctgcttctctttgactggagcggaaagagagatgcttcgagaaaaaggttcgatatcaaagccggaaaagactggcagagcagcggcctcgggtgaaggggcagtttgtacgacaacataatcatccattcgctgaggctggtggtgattcatgaacattgttctctttaggtttcctgtagtattaaattacagttgactgtaacaccgattgtgtcgacaagattagcagtagggt

SEQ ID NO: 26072 - DNA, 250 bp, Glycine max
  Clone ID: 700905253H1
gtaacttcaaaacatacaccccttctctctgtttctcttcactctctctctccctccctcttcaactaacatggcaatccacaaccaagacaccgctgtcagagaaatcaagcccaagaacaggagaatcatgggtgctggagggcctgatgatgaggacaataggtggccaccgtggtcgaagccactgctgaaagagagcttctatgttcaatgcaagttgcatgctgattctcacaagagcgactgc

SEQ ID NO: 26073 - DNA, 243 bp, Glycine max
  Clone ID: 700905254H1
agagaaccccaaagcgtccaacagcattgcaaggatagttaataaaaatcatttcatgagactccagaaccttctcactgagccaagggtcaaagaatcggtggcttatggtggttcaatggacgacaatgacttatttattgaaccgacaatattgctggatccgccacttgattcagcagtcatggctgcggaaatctttggccctgtacttccaataatcaccctggagaagattgaaga

SEQ ID NO: 26074 - DNA, 245 bp, Glycine max
  Clone ID: 700905255H1
gtttgataaaatattgtacacataaatctagctccaattcctaatcacctggttaatttcttcacatagagctatcaagatccaacgttaacatgaagaatgttttagtaaggtcagctgcgcgagctctgcttggcggcggtgggcggagctactaccgccagctctcaacggcggcgatcgtggaacagagacaccagcacggtggcggcgcgtttggaagcttccacttgcggaggatgtcc

SEQ ID NO: 26075 - DNA, 247 bp, Glycine max
  Clone ID: 700905257H1
gactaacccttccttggatctctttctacctcttttctccgcgactggtttcagtttgaacctaaggcagagaagccagagagtctcctctgccttagagaaactctcacaatggcgtttcaggactttgatctcatctcagagaggagaaggaacgagaagaggcaaaaggcgaggaagaggatcatgattggcgtggtctcttccgttgtcctcgttgccatgataggtgcatactcttcgttgt

SEQ ID NO: 26076 - DNA, 248 bp, Glycine max
  Clone ID: 700905258H1
ccctcgctctatttctcagtctctgtgtttgcggctgaggattccgaacgagtgaccttcttcgtttctcgcaaagtttaagtaatcatgggtaaggaaaaggttcacatcaacattgtcgtcattggacatgtcgactctgggaagtcaactaccactggtcacttgatctacaagcttggaggtattgacaagcgtgtgattgagaggttcgagaaggaggctgccgagatgaacaagaggtcatt

SEQ ID NO: 26077 - DNA, 244 bp, Glycine max
  Clone ID: 700905259H1
caccaatttagtttgaagaatttggctgaatcactaaaaacactaggtaacaaggcaatgcaatctaagagatactctgatgcaattgagttgtataattgtgccattgcagtccatgaaaagagtgctgtttactactgcaacagggcagctgcttacactcagattaacaaatatacagaagcaatccaagattgtcttagatccattgagattgatccaaactataccaggcatacagtcg

SEQ ID NO: 26078 - DNA, 246 bp, Glycine max
  Clone ID: 700905260H1
ccggtcccttgtgatttgctcacaaaaccagtgtcggtcacaccatctctcccttttctccacctgcaacgatgtcacattaaggagtgccaccaacaccacaagggaaagaagcacaagctctggagacgcatcttctggggaatagtgatcttcgccttcatcgtgttactgacagttcttataatctgggcaatcctagagccttcaaaaccaaccttcatcctccaagcgtcaccgtttacg

SEQ ID NO: 26079 - DNA, 247 bp, Glycine max
  Clone ID: 700905261H1
cccttccattcactccacttcttaacacccccaaacagaacaacggcagagcaagcagccagaaaaatggtgttgctgtccaaagcaacaacagaacaatactcctacatcaagaactacatgccaactgcattctcctcaacaattcccatagtggacctctccaaacccgatgcaaagaccctcatagtgaaggcttgtgaggagtttggattcttcaaagtcatcaacatggtgttcccattga

SEQ ID NO: 26080 - DNA, 245 bp, Glycine max
  Clone ID: 700905262H1
tacaaaggggagcaccatggtgaacacagtagtgagtacaaaggagagcatcatggtgaacacaaagctggagagtaccatggtgagcacaagccagagcacaaagaggggttcctagacaaagatagagacaagatccatggtgagggcggcgccgccgagggcgagaagaagaagaaggagaaggagaagaaggagcatggccatgagcatggccatgacagcagctgcgcagtgacagtgat

SEQ ID NO: 26081 - DNA, 247 bp, Glycine max
  Clone ID: 700905263H1
gacaaaccagagaacacaggctctgcttaatttttgttgattttgtctggtctctacgttttgtataacaatttgaattgtacctggaaaaatcgtcgtgggtgagagttgatgctgggattctttgctggaaaaattggtaatgggtgaattatctgagattcggattatttttggtcaaatctacgttctataagtggaattacaatgcttgtttacatttgagttaaagaccctattttccttt

SEQ ID NO: 26082 - DNA, 248 bp, Glycine max
  Clone ID: 700905264H1
ggaattcatattgagtacatgttccctgatgcggttgaggttcaggcattagtaagaactaaggggctcttctcattttacgaggatgggcatcaagagtgctgtagagtaagaaaggtgaggcccttgaggagagcccttaagggtctcaaagcatggattactggacagagaaaagaccagtctcctggtactaggtctgaaatccctattgtccaggttgatcctgttttgagggactggatggt

SEQ ID NO: 26083 - DNA, 254 bp, Glycine max
  Clone ID: 700905265H1
gccatgggataggtagatccagctttcatccaagacctagaacacagaccaaagctctccataatccaagctgcaggaattcccataattgagctctctccagtatccaaccacacagtttcagatccatcttccattgaaaacttagtgaagcagatagggagtgcatgcaaggaatggggtttctaccaagtaaccaaccatggggtacccctgactctaaggcaaaacattgagaagcctcaagattgttc

SEQ ID NO: 26084 - DNA, 249 bp, Glycine max
  Clone ID: 700905266H1
gtacccgtcaagcaccggtattgacaagtgcgtcaagaaaaacatccaactctttctcatccagaaatgcggattctcagaatccgaagccttcaccctccgagttgatctcttcaaaacctacggaagcacccttgccggtttaagagcactaggccatgatatcaccgcagaggagtaccatggtttcgtgcacggaaggctaccttacgactccatcaaccctgatcatcattacggaacttctct

SEQ ID NO: 26085 - DNA, 246 bp, Glycine max
  Clone ID: 700905267H1
aaacaaaacaaggaacatacctaagagtttgcgagagagacagagagagatgaagtggagtccgaaccaagtctcatagctgagagtttaggatcggaattctgccaccgttcttcttcatctcacctacaaccttaacctcatattagcacaaaattagtttgcttctatgagccaactgtcgtgttttcttcagcttcataatggtcttgaagggtctatgtgagaggattgttcttcagaatg

SEQ ID NO: 26086 - DNA, 248 bp, Glycine max
  Clone ID: 700905268H1
caccaatttagtttgaagaatttggctgaatcactaaaaacactaggtaacaaggcaatgcaatctaagaaatactctgatgcaattgagttgtataattgtgccattgcagtccatgaaaagagtgctgtttactactgcaacagggcagctgcttacactcagattaacaaatatacagaagcaatccaagattgtcttagatccattgagattgatccaaactatcccaggcatacagtcgtctg

SEQ ID NO: 26087 - DNA, 245 bp, Glycine max
  Clone ID: 700905269H1
ggcatttccatgggacaacagcatgttgtcttggcagagaactgcttttcatttccaaccagagaaaaactggatgaacgatcccaatggtcctatgtactacaagggatggtatcactttttctaccaatacaacccgaacggtgcagtttggggtgacatagtttggggacatgcagtttcaagggacatgatccattggcttcaccttccactggcaatggtggctggacaatggtatgaca

SEQ ID NO: 26088 - DNA, 221 bp, Glycine max
  Clone ID: 700905270H1
atataatccgtgacaacagtggaaagaccagaaaagtgtgggaccatccctaacatcaccttcacagcttctaccgattgctgaaacaaaagactctaccagcaatagcctctgatttcttctttcagtttctttaggttatggttttctcagaagattgaacttaaacacgcacaccaagaacgacagacagatcgaagatgggcattgcagtgggacgt

SEQ ID NO: 26089 - DNA, 250 bp, Glycine max
  Clone ID: 700905244H1
attaaatttgtccattccacgctatcgtctcttacacttccgtgcaacgcagaactttgctggcgtactcatcgtgacgaaattaacccaacagcacacagcactttccccaaatcaaatcatcgaaaccctaactcgcgattcccgatcgaaaccctaactcgcgatggcgatcttgctgggcgaaattcttcaatcgctggagctgtggctgaagctgatcaagaacccgcagctcagccctacgtga

SEQ ID NO: 26090 - DNA, 245 bp, Glycine max
  Clone ID: 700905271H1
catatttgctatggctccaatacttcatatatttaaatgaaggaatttagttcgaaagtggttgtcttctgaagagaatttttttttttttgttatcattcatgggtttttttgtagcacatgtagtgcaagggtcagcactagccctttttggtttatggcacaccatccacaccatcagatcttacctggtaaagggccctgcaaatttcactgtaagattctgggaccagtttaacacaacc

SEQ ID NO: 26091 - DNA, 241 bp, Glycine max
  Clone ID: 700905272H1
agtaataggacggccaagaaacatcagaaactcaactaccactgttcggtttagttgtagaaagacttaccgtgtttacattatatgcttatcttgggatcgaactgaaggagaacaaaaaaagaaagaggtaatctgtttattggaaatagttagatatggtataaagactacaaaggaaataattttttctgagataaatgtttttctgcattcacaatgccggactaggtatttgtta

SEQ ID NO: 26092 - DNA, 253 bp, Glycine max
  Clone ID: 700905216H1
gtgtgcttcaaattctgtgcggatagttgaggacttggagatgtttgtttctcaatcgaagcatcttaaagtatctttggaagaaagaggaacgcttgaattagttttgaagaattgcagaatatgggagtatgaagcatgttctgtactagatgatgctcggtgcttattggataattctttgcctgaaataaacagtggtttaacttgtaaagtggaagatttgattgaaagaatcaatctgctatagcat

SEQ ID NO: 26093 - DNA, 257 bp, Glycine max
  Clone ID: 700905217H1
caaatccgccgtgcaaattgaccagctcactatgtactccggtgtcttgggtgatcccagggataatggggatttatatcccggcttcaacggcggtgggaccgtgaccggagccaccagcaaaggcaacactgacgggtccagcagtgacgatgggggggacttcttcgggatgatattcagaggtggcagcagcagcagcagcagcagccaagcagcgccaccatcgtccgttctatttgttcaatctttttgtc

SEQ ID NO: 26094 - DNA, 257 bp, Glycine max
  Clone ID: 700905218H1
cggtggcctttcaacaagctagtaagagaaaaggcccttcaggtaacaatgaagcatatcctttacgaagatgaaaatagtcgatacataaccattgggtgtgtggaaaaggctttatatatgcttgcttgttgggtggaagatccaaatggagatgctttcaagaagcatcttgcaagggttccagattacttatgggtttctgaagatggaatggccatgcagagttttggtagccaaggtgggatgctagtttg

SEQ ID NO: 26095 - DNA, 253 bp, Glycine max
  Clone ID: 700905219H1
cgcaattacacaatctctctctctgctcgtgagctttctacggtttcgattcgatcattcccctcttgttttatggaggtataggtagatgatgggaaaacgtgtctcaagagagcactttcaacccaggccgtgttctgggaagacagagaatttaaaaaacaccgtgtttattgatgtagatgatcaagttgatgatgtggatgtggtgatcatagattacaaagagttcatgtctaaacacatggatctg

SEQ ID NO: 26096 - DNA, 251 bp, Glycine max
  Clone ID: 700905220H1
ctcttgatttgaaggttgttttgtgcttatagataaaagttctgccaaatcaagaggggttttcagatcatagtgtgtgtgtgtgtgtgttaaacaatggctaagttctttgctgctatgatcttggcactcattgccatttccatgcttcaaacagtggttatggctgctaatgagcaaggaggccacttgtatgacaacaagagcaaatatggaagtgggagtgtcaagctggaacaatgcccatcaca

SEQ ID NO: 26097 - DNA, 251 bp, Glycine max
  Clone ID: 700905221H1
caagaacaactctataaacatatatcactttgttctcaacttttcacaacatatcctaagaatcttccttctctctctctctctctctctctctctctagcacaaaccacacacacaaagttgcatcaagatcaagatcagtcttattatactattactattactttccacatcaacagagaggcgctcctaccccacgattgttttagccaccatgtgtgtgaaggaccaagagagaatatgatggatag

SEQ ID NO: 26098 - DNA, 250 bp, Glycine max
  Clone ID: 700905222H1
attaaatctctcttccccctctcctgatcttagatctcgtctgacactactcttaagatcttctgccataaacctccaaacccttctcttatccattgctctctttggccactgagatcatagacacaactctgccatattcaatcttttatttgcttttacagctatatttgtttctgaatcatgccacacttttcaagtccaaacgcattcaactaggattttcaaggtacaaatacctacacgcctc

SEQ ID NO: 26099 - DNA, 248 bp, Glycine max
  Clone ID: 700905223H1
atggactctcccaacgctttgtctaccgctccggcagcgggtagtaggaagaacgcgacgctaatttgcgtcccaataatgggagaatcagttgaaaagatggagattgacgtggacaaagcgaaagccggaggcgcggaccttgttgaaattcgattggattctttgaaaacctttgacccctatcgagatctcaacgctttcattcaacaccgttctttacccttgttgttcattacaggcccaaa

SEQ ID NO: 26100 - DNA, 252 bp, Glycine max
  Clone ID: 700905224H1
agaagaaaaacaaaaccctcactgagcgctgctgctttgagagagagatggctccgaaccttgaatgtcgtatgtacgaagcgaagtacccggaggtggacatggcggtgatgatacaggtgaagaacatagcggacatgggggcgtacgtgtcgtagctggagtacaacaacatcgagggcatgatcttgttctcggagctctctcgacgtcgtattcggagtgtgagcagcctcatcaaggttggccgca

SEQ ID NO: 26101 - DNA, 250 bp, Glycine max
  Clone ID: 700905225H1
ttcacttcagaagttccctctctctctctctctctctctctctctgcactgagcttgagaagagatatactcaaaagagacagatagattcactgagaaacacgatgccgtcattgccttcttcttggttcttcacaacgcttctactatgcttcttcttacatgttacttttgcaggtgacccttatgttttctatgattggaccgtgtcctacacctcagcctccccacttggagtaaacagaaggta

SEQ ID NO: 26102 - DNA, 248 bp, Glycine max
  Clone ID: 700905226H1
gcggtccttccggaagaacatgttagctgtacaaaagagcgtcggagaagagaacgagaagaacagcagcagccctaatgcaagctttgtcaaagttagcatggatggagcaccttacctccgcaaagtggacttgaagatgtacaagagttaccgagagctctctgattctttaggcaaaatgttcagctccttcaccataggcaattgtgaatcccaaggaatgaaggatttcagaatgagagcaa

SEQ ID NO: 26103 - DNA, 230 bp, Glycine max
  Clone ID: 700905227H1
gttcttgtgatgttgatatcattgacacctcaaaaacatcacaaggaaattatgtacaacttagacctgcattgagcataatttccttgtgatgttcttgtgatgttgaaatcattgacacctcaaaaaaaaaaaaaaaaaaaaaaaaaaaaaaaaggggggcccccagattagggactctgcggcccgagaattttattggggccgggcccttgagggggatccatttt

SEQ ID NO: 26104 - DNA, 251 bp, Glycine max
  Clone ID: 700905228H1
atatattccattctctctgtgtatttccctacctctcccttcaagatgcagatcttcgtcaagaccctcaccggcaagactatcacccttgaggtggaaagctctgacaccatcgacaacgtcaaggccaagatccaggacaaggaaggaatccccccggaccagcaacgtctcattttcgccggaaagcaacttgaggacggccgtacccttgctgactacaacattcagaagggagtactcttcacctc

SEQ ID NO: 26105 - DNA, 250 bp, Glycine max
  Clone ID: 700905229H1
gttgggcaagaagaggtcctcttccaatttgaagctagcgaggatggacaagtccagttctttccaaatgctccagttgatgttgacaattctcccagctttgttgccatcaatgtcagtcctattgagtatgggcatgttttgctgattccgcgcattttcgagtgtttgcctcaaaggattgaccgtgagagcttcctccttgcacttcacatggcagtggaagctgataatcatattttcgattggg

SEQ ID NO: 26106 - DNA, 105 bp, Glycine max
  Clone ID: 700905230H1
gtagtccaaaaaagatagatagctacggcgagaagagatcgaacgaaggacatcgaagccaaagaacaaaaatgaacggaacaacaacactttcaacaacaccac

SEQ ID NO: 26107 - DNA, 248 bp, Glycine max
  Clone ID: 700905231H1
cttttgggggagagtgagtgagagtaaaaagatgtttctgcgtgcggtggcgcggccgttgatggcgaaggtgaaggcttcgacggggatcgtggggctggacgtggtgccgaacgcgagggaggtgctgattgggctgtacagcaagacgctgaaagagatccagaaggttcccgaagatgaagggtaccgcaaggccgtggagagcttcaccaagcacaggctcggcgtgtgcaggaggaggagga

SEQ ID NO: 26108 - DNA, 253 bp, Glycine max
  Clone ID: 700905232H1
gtcgaacagtcaactcagaactggtacggacaaggggaatccgactgtttaattaaaacaaagcattgcgatggtccctgcggatgttgacgcaatgtgatttctgcccagtgctctgaatgtcaaagtgaagaaattcaaccaagcgcgggtaaacggcgggagtaactatgactctcttaaggtagccaaatgcctcgtcatctaattagtgacgcgcatgaatggattaacgagttcccactgtccctgt

SEQ ID NO: 26109 - DNA, 256 bp, Glycine max
  Clone ID: 700905234H1
cttgagcttttctttctttctctgctctcttttcttttaggtttccactctcacacactctccctcttctctttctctgcaataatctctcttctcttcttcactctctcaactcctgccaaacccccatttccgcagttcttaaatttggcgtctgatgtctccgccattgctggttaccgaagatgaagggcagtgccatgcctcgatggtagcatctgcatcttcaccatccctgaatgtttctccctaaatg

SEQ ID NO: 26110 - DNA, 257 bp, Glycine max
  Clone ID: 700905235H1
gtctgtcttgcgcatgctctctactcacctttgtagtcccggccgtcaaaatacccattcccatcgcctttctctctccttcttcctctgccccccaaaaaaatgaagcgcttcatgctcccaagaaaccctctcagcgacgcagcagagcttccttcttcgccaagcccaaccccaactaccagctttgccaaactccgtccctcttctcacaaacacaaaccctccaaagagaacgacttccctccgatcccaat

SEQ ID NO: 26111 - DNA, 254 bp, Glycine max
  Clone ID: 700905236H1
acaggaaggagttcaatgtacctcaccggtcatcaccaagacttgctggaagtaaacctgtccagttggccaacaatgtgatgaatgaacagactctccaggttcctaaaagaaacttgaggaaaagtagaaacactctagatattgatatttctgaagaccaaacagtttctaaggaacaaccgcatcagcaagaagcagataaaatagaagacaaaaagccagaaattcaaattagctcaaacaaatcaagt

SEQ ID NO: 26112 - DNA, 251 bp, Glycine max
  Clone ID: 700905237H1
acaggaaggagttcaatgtacctcaccggtcatcaccaagacttgctggaagtaaacctgtccagttggccaacaatgtgatgaatgaacagactctccaggttcctaaaagaaacttgaggaaaagtagaaacactctagatattgatatttctgaagaccaaacagtctctaaggaacaaccgcatcagcaagaagcagataaaatagaagacaaaaagccagaaattcaaattagctcaaacaaatca

SEQ ID NO: 26113 - DNA, 249 bp, Glycine max
  Clone ID: 700905238H1
cctcgctctatttctcagtctctgtgtttgcggctgaggattccgaacgagtgaccttctttgtttctcgcaaagtttaagtaatcatgggtaaggaaaaggttcacatcaacattgtcgtcattggacatgtcgactctgggaagtcaactaccactggtcacttgatctacaagcttggaggtattgacaagcgtgtgattgagaggttcgagaaggaggctgccgagatgacaagaggtcattcaa

SEQ ID NO: 26114 - DNA, 250 bp, Glycine max
  Clone ID: 700905239H1
ctaatgtgctcttcgactctatcgtcctattctttcctcacaatcagctccacatttttcaaatcccaattttgccctcctcccttcccctctcgcgtggtggcgtgtcacgttggatccaattccaatgttcaaaagcacgttgccaccgacctcaagttcgtcctccacgacgccctccatgactctggaatcaacaccactcatgccagagaagctagcgagcatttctgctcacaaattaggagat

SEQ ID NO: 26115 - DNA, 130 bp, Glycine max
  Clone ID: 700905240H1
gtgatgatggaattggaagttgacgagaacgaattgaaagctgcaggtgctgagatattcgtagacggtggtgggagcggcatacgaatcaatggttgggtgatcgagattaggaggaactccatactca

SEQ ID NO: 26116 - DNA, 248 bp, Glycine max
  Clone ID: 700905242H1
cttctttattccttttgtaatttcattcattcttaatctttgtgaaaaataatgttcatcgagaattttaaggttgagtgtcctaatgtgaagtacaccgagactgagattcagtccgtgtacaactacgaaaccaccgaacttgttcacgagaacaggaatggcacctatcagtggattgtcaaacccaaatctgtcaaatacgaatttaaaaccaacatccatgttcctaaataggggtaatgctt

SEQ ID NO: 26117 - DNA, 251 bp, Glycine max
  Clone ID: 700905215H1
caaaatctaccatagcggttccattttctgaatttctcgagcgaacttcgcccagttctagggttccccactgccatgtaccaggccgaattaacctccgaacaggttctgaggagggacatcccatgggagacctacatgtccaccaagctcatctcagggacgagccttcagctcttaaggcgctacgatcaccgaccagaaagtcacagagcacagttgctcgatgatgatggtcctcttatgttcgc

SEQ ID NO: 26118 - DNA, 255 bp, Glycine max
  Clone ID: 700905175H1
gcggtgcgttatggaggaatgatcggagtagcagccatgcccagtggatgtagcatcagagcaatatggattctcaacaaccttgacggcgtcgttttttcccggaggtttccggtggtagagaagcgttggcgagctgcttgcaactcaaacgcccacaatgatacccatcaaatcttctcttccttacccactgactccgacctcgctgatgcttttctcgaccgaaagcatagggagggatctgcacgagga

SEQ ID NO: 26119 - DNA, 257 bp, Glycine max
  Clone ID: 700905176H1
gtgaaaaaacgtttacaataatgagtcttggtcaatttatttgcgaaaatgtatgtatagttcaaacgaaaaatgcaccacacctaaaatcgggtcaaattctaacagttcaaatggattctgtaggaataagatcggctaacccttatttggcgactcctggagcaacggttcatggccattatggggaaatactttctgaaggagatatattagttacatttatctatgaaaaatcgagatcgggtgatataaca

SEQ ID NO: 26120 - DNA, 257 bp, Glycine max
  Clone ID: 700905177H1
gaagaagtgaatgctggtgttaaagagatgctggaaactaatcacttaatttggaagcaatactataataaggaaaaggaccttgactatactcaagagcatagtagatatttggaggctttaaggcccagcagcctatccttgatgaatcaactccgcatttatttgcccgagctctttccagatctcaaaaagatagtattcttggatgatgatgtagtagtacaacatgacatatcttctttgtgggaactaga

SEQ ID NO: 26121 - DNA, 259 bp, Glycine max
  Clone ID: 700905178H1
ctccacaatcccttctccgcccaccgcaccgcctccggcgccatcttcgcccgcggcgcccaggacgacaaatgtatcgctattcagtacctggaagccatccgcaacctcaaatcccaatccttcactccacaccgcacaatccacatctccctcgtccccgacgaggaaatcggcggcatcgacggggccgccaagttcgtggagtccgaggaattcaacggactcaacgttggattcgcgctcgacgaggggcagg

SEQ ID NO: 26122 - DNA, 261 bp, Glycine max
  Clone ID: 700905179H1
gttgccggctccagcaacctctgccaatctttaatgggtgtgattgatttctacaacactggtgctttgtgctgggttaagtccaacgccaatctgaagcagcaagtgggtttggcaccaagacccatttgttcatttgaggggaataatcagaggaagtttgtggcaatggcttctaccgttcctgtggagcaagtcaacaatggccccctgcaggtgacaggtgactccttcatcagagagcatctgaggaagttggct

SEQ ID NO: 26123 - DNA, 263 bp, Glycine max
  Clone ID: 700905180H1
gttcctttgtcaataagcaagaccaatacactgtggaaggagtgcagaatcttggagacaaagcagtgatgtgtcataggctaaatttcagaactgcagtattttactgccatgaagtccgtgaaacaacagctttcatggttccattggtggctggtgatggaaccaaaactcaggcacttgctatttgccactcaaatacttctggaatgaatcatcaaatgcttcatcaacttatgggagttgatcctggaactaaccct

SEQ ID NO: 26124 - DNA, 263 bp, Glycine max
  Clone ID: 700905181H1
ctctcttcaaattttgttcgttcaggtcaaagaaagtgtcactgttgttaccatggccgaggaagttccaaagacaagcacaactccagaggaggtggtggtctctgacgtggcacctgctgacgagaaaccagacaccaccaccgacgttgttgttcccgtagagaaagacgcacaacaagaacaagaaacctcgccagagaaggagaaagagaacgttcccgaaacagctgaaaccgagtccgaggttgtttcaaaaccaa

SEQ ID NO: 26125 - DNA, 259 bp, Glycine max
  Clone ID: 700905182H1
cagaaatagaatcatctctctgtctagggtttcattctttttcagctttatttgttctgtagatccatctagcttcggtgctgcaaatggacgtcgcagtcactgccgttcggtcaccgctgatcgtcctgggaagtccggtcaacgggtccgcctcagctcggttgggttccacttttgggttttccagaaagtatttatcccgaagcaagttcgtagaagagggtttgttgttagagctgcatcctcatctccggag

SEQ ID NO: 26126 - DNA, 259 bp, Glycine max
  Clone ID: 700905184H1
cctcgatccaccatctccaatcctcctccctaatccctattcacatttcacaatctcacactacccaatttctcacattccaaaacgcaactgcgacaccgccgacgaggttgtcgtttccacgttttcccgccacccacattcccgatcaagttgccgttttgatgcctcccacgcgcccctaccaaaaaacgaatcgtgggtttgggttcccagcgattagcatcaaatgcagctatcgaaacgaatcgtgggccct

SEQ ID NO: 26127 - DNA, 256 bp, Glycine max
  Clone ID: 700905185H1
tctgcttcccctggcaaccttcttcttagttctctccgcttcttatctccagattgctggggcgaaagcacaaccgttgactagtctcaagcttaactctccgatccttcaggagtctattgctaaagagatcaatgaaaatcctgaggcaggatgggaggctgctataaatcctcatttctccaattatacagttgaacaatttaagcgccttcttggagtcaaaccaacgcctaagaaggaactgagaagtaca

SEQ ID NO: 26128 - DNA, 257 bp, Glycine max
  Clone ID: 700905187H1
aacatattcttcagttagctcccccaacctatacacttcaccaccacaccacaaccctaccctctctctctgtcatggtcattggaggagccttccctcgtttcgacccaatcaccaaatgtagcacccaagaccgctccaaccagaccatcgcctcggacctcgatggcaccctccttgtctcccggagtgccttcccctactacttcctcgtcgccctcgaagccggcagcgtcttccgagccctccttctctta

SEQ ID NO: 26129 - DNA, 154 bp, Glycine max
  Clone ID: 700905190H1
tccaattccctcaccagaacacgggcagagttgttttccctttcaacaacattcgccatagtttcgcgacgaagagaaaaaaaaatggggtgttagggtttcgattctctgcgacgctctccgcattgcgctaccctgcaccttccacacaata

SEQ ID NO: 26130 - DNA, 253 bp, Glycine max
  Clone ID: 700905191H1
tcgatattcgaggtggactgggcatagattacgacggttccaaatcgtgtgactctcatatttccgttgagtacagtctcgaggattatgcagtcgcggttgctcacgcggttcagtgtgtgtgcgaccgaagtccgtgaaacacccagttatctgcagcgagagtgggagagccatcgtgtctcatcattcggtcttgattttcgaggcggttggcaccagcagcaccaccgggggaggagcttcccctgca

SEQ ID NO: 26131 - DNA, 253 bp, Glycine max
  Clone ID: 700905192H1
tcactcttcttctcttgcggctagggttttagcgcacttcttctagatttaaggaagatgggtaaggaaaaggttcacatcagtattgtggtcattggccatgtcgactctgggaaatccactaccactggtcacctgatttacaagcttggaggcattgacaagcgtgttattgagaggtttgagaaggaagctgctgagatgaacaagaggtctttcaagtatgcctgggtgctggacaaacttaaggctg

SEQ ID NO: 26132 - DNA, 259 bp, Glycine max
  Clone ID: 700905194H1
ggtaggtactctttggaaatgtctgctgttatttacaaggactgggttttcacttatcaagcattgcctaatgatcttgtcaagagaggagttgcggttaaggatccatctgctccccatggagttcggcttttgattgaggactatccttatgcttctgatgggctagagatatgggatgccatcaagtcctgggtgcatgaatatgtctcattctactacaagtcagatgcagcaattcaacaagatcccgagctcc

SEQ ID NO: 26133 - DNA, 85 bp, Glycine max
  Clone ID: 700905195H1
ttccaatatattccattctctctgtgtatttccctacctctcccttcaagatgcagatcttcgtcaagaccctcaccggcaagac

SEQ ID NO: 26134 - DNA, 213 bp, Glycine max
  Clone ID: 700905196H1
aaacttcgaggtttggggaacactgctgccagtagtgatggaagtagtagtggtactttcttcagggctgttctattggttcgtagaggaaagtatgatgaagcacgcgagtatgtagaaagagctagaaaatgtctggcaacagagcttgctgctctggttttggagagttatgaacgtgcttacagtaatatggttcgtgttcagcaacta

SEQ ID NO: 26135 - DNA, 265 bp, Glycine max
  Clone ID: 700905201H1
gagagcagtagctccaacaccttcccttatactattagaacgaaaccttaacaaccaagtcaacaaccaccttccttaaaaagttgattatcacctagtttttttttttttaattctctttccctttccctgtaatcatcatcaaccacttgttgaaaggaagcatccctcccaatgagaccggcattagttaaagggtagcctgcagagtatggtactgatagtagcagtgtgtaatggactccccattttccttcaatttaac

SEQ ID NO: 26136 - DNA, 258 bp, Glycine max
  Clone ID: 700905204H1
gcgagagttctgagaagaaaagagaagatcggtgagtgaggaagcaaatagcaatagcaccgccaccgtcaccactgccactgccactgccactagcaacagcagaatgggaaccttgggcagagttttctacgccgtcggattttggatccgcgagaccggccaagccatcgatcgcctcggctctcgtctccaaggcaactacctctttcaagaacagctgtctaggcatcgacctctgatgaatctgttcgacaa

SEQ ID NO: 26137 - DNA, 252 bp, Glycine max
  Clone ID: 700905206H1
ctgcattcggtgctctccggtggggctccgttgagcaaggaggtcatagagggctttgtggccaagtatcccaacgtcaccatccttcagggttatggtttgacggaatccaccggcgttggggcctccaccgactccttggaggagagtcgaaggtacggcacggcggggctcttgtctccggccacccaggctatgatcgtcgatcctgaatccggccaatcgcttccggttaacgcaccggggagctct

SEQ ID NO: 26138 - DNA, 254 bp, Glycine max
  Clone ID: 700905208H1
gcaagtgttgaagataatactttagttagcaaggaagagccactagcatttgattctgatgaacgagatgccaagaggccaaagcttatgaatgcaggtggtccaagtcgcagattcactagaagcatgataaaaagaacgtgtaatgtcgtgtaaatactgttataaccaccctgctgctactaacactatttacacgacattacacgttctttttatcatgtaaatagtgttagtacagcagggtggttata

SEQ ID NO: 26139 - DNA, 228 bp, Glycine max
  Clone ID: 700905209H1
accagatataaagtcgcagctgaagtgaaagggtgttataattgcgcttttgtgttgatatttaaggtatcgagatcttttttatgggcaggattcatcaactgcagaaaacctccataccatcaaccttcctatgcttgtttgtattaattaactgataataatactgtatggtttggtacttgctaaataaaaagaaaagataaataaggtatcgaaaatcagggg

SEQ ID NO: 26140 - DNA, 254 bp, Glycine max
  unsure (1)..(254): unsure at all n locations
  Clone ID: 700905210H1
ctaggtagtgattccctgcaatctagtgccattgcaagaggttctgtcatggattatccacaagcaattactccattacacccttatcaaactactcctgtgaggaattttcttggacataacacaccttggatgtcccaaaccccccttcgaggaccatggattggttctccaactcctgcacctgacaatagcacccatatttctgcacctggnncctcagatacaattaagctaggttcagtcaaaggatc

SEQ ID NO: 26141 - DNA, 252 bp, Glycine max
  Clone ID: 700905211H1
cttagtttctccaaacccaaactttcaccacagggacctgtcagagttagttaacgtttttacatcatcactgtgtgaagataatatagatatggaaatctcccatgacatcaagatcaaggatgacaagctaggtggtgtgaaggaagagaagattaaggtagaagttgaactgaagaataaatcagttgagaaagagcatacaaaaagtaaagaagagaagaaacataaagatgagataaatcaaagaaa

SEQ ID NO: 26142 - DNA, 251 bp, Glycine max
  Clone ID: 700905212H1
tataaattcaattaagcagttgatgccctgatcccgggaataagataactttctcttccaggtattcactcatcccctctcagtggcaagagtgagtagatagcagaagttatttcattcctcattcctgggatattcgttaagtttgcccattaggggtctttctcaccggtgctatcaataagaaggagccttttccctgggtaggctaagccagaaaagagagaaagagaaaaagagttaaaaggcta

SEQ ID NO: 26143 - DNA, 257 bp, Glycine max
  Clone ID: 700905174H1
attcaacttaagagatcaatatggccaccaccactacccagcctccctctaatatctgttttttccttctgttgttgcttctagcacactttcatttgggcataagccaacttgagctgaattactactctaaaagctgcccaaaagctgaagagatcatcaaggaacaagtcacacaactatataacaagcatggaaacactgccgtttcgtgggtcagaaatctcttccacgattgcgtggttaagtcatgcgat

SEQ ID NO: 26144 - DNA, 265 bp, Glycine max
  Clone ID: 700905134H1
tgggagcttttcctccagttgacttacgagcagtttgctttgcttgcattgcaagaggctgctgaggcataccttgttgggctctttgaggacactaacttgtgtgccattcacgccaagcgtgtgactattatgcccaaggatattcagctggcaagaaggattcgtggtgagcgtgcttgagttggtgcgttctgtgtttgtgaagatggattgttggtggctgcggatggtgttttgttactaagttttctttttgttgaag

SEQ ID NO: 26145 - DNA, 58 bp, Glycine max
  Clone ID: 700905135H1
tcaacttgcttgactcgttgaatcaaccaagtcactgattcgaaatccactcaaacca

SEQ ID NO: 26146 - DNA, 261 bp, Glycine max
  Clone ID: 700905136H1
ggcaaggaccagcttctgaaccttctttgcgacgcggcggcgaagaccgcgatgtggaggagaggatccgaaaggcggcggatggagatccggtgcaccggaagatatttgtccacggattgggctgggacactaccgccggaaccctaattagcgcgttccggcagtacggagagatcgaggactgcaaggccgtcaccgacaaggtctccggcaagtccaagggctacggcttcatcctcttcaagacgcgccgcggcg

SEQ ID NO: 26147 - DNA, 261 bp, Glycine max
  Clone ID: 700905137H1
gtttttactggattttgttaaataatatgtatggtttttattgacaatcccgtgcagggctctccagtttcaattcagtgtttttgaaattagataaatcctactgattatttattttgtatttatgttgttatttcacatgctgcagtcatggatgaattttgtctcatacataagttgtagctttgaagtggtgtagcttgattgttttgaattaactttgcattttgttactgaattactcagatgctcttttttatc

SEQ ID NO: 26148 - DNA, 263 bp, Glycine max
  Clone ID: 700905138H1
gagggatcagcctctcgtgatcaacatggcttgatctccacaagattatccctttgacacttcaagtactaccaacattgattaaatcagactagtgaaatgtcaaaagaaaaggactcagctgacaatcaagtggatacattttctgagccagtcatgttggagagatttcatacacttatggagattgacaatctgcatcttgaaccagattgggatccgattgctgaacttgatagcatcttatctgatagttataatat

SEQ ID NO: 26149 - DNA, 165 bp, Glycine max
  Clone ID: 700905140H1
ggagattatataaactagaggaggcaattacaaggagtgacaatgttcaaggaactttatcatattgcctttacatctctcattcctttgtaaaccttaggtagtacagacaggaggttctccgtctccttgttaaagtatttcaaaagcttccttcaccagttt

SEQ ID NO: 26150 - DNA, 265 bp, Glycine max
  Clone ID: 700905141H1
gcttccacaacccttctccgactagaagaagttcagagacaatgggtttcaacaaaagttaccttcttttcaccgtgtccctctcatttctcctcctatccacccatgccatcagcagcattattgctccttctccctccccattcccaacccacaccaacaccaaaaccaaaaccatagactccatcttcaagaaagccctctcaaaaacccaaaacatgttaaaatcacccaaccccaaggtcctagacttctgcaaatccac

SEQ ID NO: 26151 - DNA, 261 bp, Glycine max
  Clone ID: 700905142H1
cccatggccaccacctccgcattcctcctccttccgctcctcctgctgctccacctcgccatcgccgctcacggcatcggcatcaactacggcacgctcggcgacaaccttccaccgcccgcggcgtggcgaacttcctgaagacgaagacgaccatcgaccgcgtgaagatctacgacgtgaacccggacatcctgcgggccttcgccggcagcggcatctccgtgacggtgaccgcccccaacggcgacatcgccgcct

SEQ ID NO: 26152 - DNA, 262 bp, Glycine max
  Clone ID: 700905144H1
tctttctctttctaagctctgaccccaatttctgtggcggctctctctctacttattttctcttctgagattgagatttggatccaccctcttccccttctttcggtctttgatttgatcttttccttacctttctttgggtttgggtctgggtcttcagcttcaacttcaacaacaacaccaaatcgctatggttacccaacaacagccacagccacagcttcaggttcagcctcagcagtcgacaccaccctcttcacaa

SEQ ID NO: 26153 - DNA, 264 bp, Glycine max
  unsure (1)..(264): unsure at all n locations
  Clone ID: 700905145H1
gagaaggctaaaaaaggctattatggcaggaggaggagctccagctaaagcagatgagccacagccacatccaccaaaggatcagttttcanatatttcttactgtattactagtcctcctccatggcctgaggccatacttcttggttttcaacattttcttgtgatgcttggcacaactgtgttgattcccactgctcttgttccccagatgggaggtggcaataatgagaaggcaagagttatcgaaaccctgctttttgt

SEQ ID NO: 26154 - DNA, 265 bp, Glycine max
  Clone ID: 700905147H1
gttggtttcggtgggtgaatgatcatccgaagaggctcaggaaaaggacaacttcgcaactcgtgaatcgattactgtagaaatcgtcgattctatcttaaaacgtattgggcactggccgccattttgaattctggttgagggattgaagtgcgattataggtggaggaggatggcttgtaggggatgctgggaatgccttttgaagcttttgaacttcatattgacccttgctggtctggccatggtcggctatgggatttat

SEQ ID NO: 26155 - DNA, 66 bp, Glycine max
  Clone ID: 700905148H1
cacacagcacgagggccaatcaatggatcgccgtgtccaactcccttgctctaacgacgtcgtcgt

SEQ ID NO: 26156 - DNA, 265 bp, Glycine max
  Clone ID: 700905149H1
gcatcaatgggccaaaagaaaagttagattccaccgttattagccagcctgctatttatgtcacaagtcttgctgctatagagctacttcgtgcacgtgaaggaggtcagcagattattgactcagttgatgttacatgtggtttaagcctgggagaatatactgctctggcatttgctggggctttcagctttgaagatggactcaagttggtcaaactgaggggagaggccatgcaggatgccgctgatgctgctagaagtgc

SEQ ID NO: 26157 - DNA, 116 bp, Glycine max
  Clone ID: 700905150H1
gaaaaaaaaaaagagagagaagatgacgcggggaaagcagaagatcgaagcgcagaagcgaaacgcagagaggaatcagaagggaaagggctctcagctcgaggccagagccgttg

SEQ ID NO: 26158 - DNA, 264 bp, Glycine max
  Clone ID: 700905152H1
aaagaatacaaaccttgtctttgaaccagctcaaggagcttccaccccagttcatccgtccagccaatgaaaggcctgagaacaccaaagccatagaaggtgtcattgtgcctctcatctcactgtctcagtcacatcatcttttggtgaaggaaatagctgaagctgcttctgagtggggatttttcgtcataaccgaccatggtatgtcacaaacattgatccaacgtttgcaagaggttggtaaggagttctttgccctcc

SEQ ID NO: 26159 - DNA, 262 bp, Glycine max
  Clone ID: 700905153H1
gtggaattttttttcgttcctgtgaagttccattccatattctgggtatgggtctataaaacaagcttccaaattggagagaaagtcccaaacttttcggttcaattttgagttttcgcaattgggtctgtgatcttcatgtgtgggtgagcaaggtttgaaaaaactttctgtgatcgtgattttggccccaacttcaattgtggctgcatccgctgtaatttgttcacaattttccgcaatatcaaaggatcgtgacgac

SEQ ID NO: 26160 - DNA, 261 bp, Glycine max
  Clone ID: 700905155H1
atcagaggattcgctccaacccctatcgagtaaggtattatctgtcaatttacattcgaaagggttaggctattgaattttaaataattacagataaaataatcgatagctttgattttaaaaattaatcataatcatcggttaggttgcaacataatacttaattcgcttaattttttaactgcgcctcagagtattcataacatattctattaaattaataagctggtgatgtaattaatattaatatgtagttttggc

SEQ ID NO: 26161 - DNA, 259 bp, Glycine max
  Clone ID: 700905159H1
agctcactattactgatgatgatgtgatagagaagagtaacttaagcagacagttccttttccgtgattggaatattggacaggccaagtccacagttgctgcttcatctgctgcagctataaatcctagttttaatattgaagctctacaaaatcgggttggttctgaaactgagaatgtgtttaatgataccttctgggaaaacttgagtgtcgttgtaaatgcactggacaacgttaatgcaagactatatgttga

SEQ ID NO: 26162 - DNA, 165 bp, Glycine max
  Clone ID: 700905162H1
cgggtgggttctgttcaacattctgcagccggcgctgaaccaactgaaccgcatgcgcagaccaaaggcgtgatcattgggttggggcttggcggcttggctggcttggtggctgcgccgcatgcatcggcggcggcggcttctgaagtggcggcgatggctgaa

SEQ ID NO: 26163 - DNA, 198 bp, Glycine max
  Clone ID: 700905164H1
ctcttccttaaaaaccccaaacgcataaaaaacacagagacagtgttcttagcgccgccgttgccctaccatcttcatattattctattgcctttctttcacgtttttctggtttttaagcccttccagtgccctatttacgcttatacccttctggttatgatagcttccattcggcgtcagcatagagccgaagct

SEQ ID NO: 26164 - DNA, 263 bp, Glycine max
  Clone ID: 700905165H1
tcgtgttgtaacttctctcttcaaccctagcttagggtttatgctctaaaaccctcccttttcaggtttattgggagagaaaaatgctcgtattgtttgaaacacccgcgggttttgccctgtttaaagtgctggatgaaggcaagctttctaaagttgaggacttgtggaagaacttttccagtgcagatactgctagacaggtggtcaagttgaaagcattttctaaatttgagaacacttcagaagctctagaggcagct

SEQ ID NO: 26165 - DNA, 262 bp, Glycine max
  Clone ID: 700905166H1
gccctgttcggaaaatacgagctgggccgcgtcctcggctgcggtgccttcgccaaagtccactacgcgcgcaacgtgcaaacggggcatagcgtggccgatggcggtgcggtggaagaaggagtgtggggtggagttggaagggatgaatgggaggtttgggattggggtggaggtttaccggctcacggcggagctcgcggtggtggaggtaaggaagaggggcggcgacgccgtggccgcggcagtgaggggtgtgtgg

SEQ ID NO: 26166 - DNA, 118 bp, Glycine max
  Clone ID: 700905167H1
gttcttgattgtaggataacattggagttacgttgattgtctgaatgtatggtatacttccatacagaccttggtgatcccttctttggttgttactgtgatatgtagatagtagatt

SEQ ID NO: 26167 - DNA, 199 bp, Glycine max
  Clone ID: 700905168H1
gtcattttcccttttcagctttcattggtgtggcctagctgttttctcaatgagaaagccttcatctctgcaaagcgcacttttgcgctttggggttcccttgttgcttgttatcaccttctgttatgctacttctactgctgcagcaacaactcaagtttcagggaatgaagagctgccaaagacaaacctaaatggg

SEQ ID NO: 26168 - DNA, 261 bp, Glycine max
  Clone ID: 700905169H1
aacctgagaaacagcaccacccttccttccttccttcgagaaaagaaatggaagacgtgataacagaagcagcacccccatcaaggttcctggaagaagacctaaacatcttcacacccccatccccacctctccccacacccttcctcatcttcccacacaacaaactacccctcaaaccctctcttctcatcatcgccctctccccctcttccctcgccctcttcaaccaaaccctaaccctaaccctaacccctctcg

SEQ ID NO: 26169 - DNA, 257 bp, Glycine max
  Clone ID: 700905170H1
agagagtgtctgactccgagtctgtctttgttgcgtttcgagtgtctgtggaatccctaaccctaatttattgtgtggcgaaatgggatcaattggggtactcctggtggctcaggtgataccgtacctggagcaagagctggacaagcgctacaagctgtttcgggcgtatgatcagccgcagacggcgcaggttctaagccagcacgcgagctcgatccgtgcggtggtcggaaactcgaacgccggcgccgacg

SEQ ID NO: 26170 - DNA, 256 bp, Glycine max
  Clone ID: 700905173H1
catagtcatttctcagagttcgctcgggaagatgatgatttggaaagtctggagagagatgttagtgaagaatctggctggaaacttgtgcatggtgatgtttttcgaccgcctcgcaacttagttattctttcagctgttgttggcacaggtgctcagcttgcgttgctggttcttcttgtcgtcttgttggctattgttgggatgttgtatgttgggcgaggagccatcatcactactttcattgtgtgttatg

SEQ ID NO: 26171 - DNA, 272 bp, Glycine max
  Clone ID: 700905133H1
ctggttcagaacatgaaattgaagatcatccttctgaatcagcagctgccacaggcacaagtcagagacaggacaatcttggcaatcttgctttggtgactagcaatccaagtgaaaagatggataataagcttgtttatgtgacacaccgtggtatacggagacgctgtctagattttgaaatggccagtgtgcaaaggaggaacccagctgataattcaaacaccaactcaagtacagcaaaatctgaggagaggaatgttagtaatgaa

SEQ ID NO: 26172 - DNA, 245 bp, Glycine max
  Clone ID: 700905090H1
tgttggatgagtttttgaaacctaggattgccgatttcgggcttgctaagcttgtccaagccaacgttggcaaggattcctccactcgtgtcattgccggaacccacggctacattgctcctgaatatggctacacatacaaggtgaacgagaagagtgatgtgtacagctttggggtggtgttgatggagttagtaactgggaaaaggccaattgaaccggagtttggggaaaataaggacata

SEQ ID NO: 26173 - DNA, 246 bp, Glycine max
  Clone ID: 700905092H1
gagcaagatgtgctggatccacctgaagattgttttcgcataaggttgatcattactctgcttgaaacttgtgggcattactttgatcgtggctcttctaagaggaaacttgatcgattcctaatacacttccagaggtatattttaagcaaaggggcactgcctctggacatcgaatttgacttacaggatctgtttgtggacttgcgtcccaatatggttcgtcacaattctattgaggaagtg

SEQ ID NO: 26174 - DNA, 245 bp, Glycine max
  Clone ID: 700905093H1
cttgtctgttcttatcttcatcctacgccaatagcccaaaaccttgttctctttttgtggttcatttctctcttccagatgccacttgccgttcttcaccctcacgattttctcaggaaaaacccatctaaccagtaccagaccataatccctcactctcccaacatgaatcctaataagtctcatcggacttcccgaaaccgtaagaagcggcccgatccaagcccacaaggcgttgtcagccc

SEQ ID NO: 26175 - DNA, 75 bp, Glycine max
  Clone ID: 700905095H1
aacactcattaattgcaagaatggcacttcgttgcttggtgatgtccctttctgttctcttcactcttggtcttg

SEQ ID NO: 26176 - DNA, 189 bp, Glycine max
  Clone ID: 700905096H1
cctgtttcttgcactcatagcattgtcagtaggatgatgatcaatgaggagcttcatgcaagctgggaccagccaactgggtgcattcttttccaagatgttgaacactctaggctgcaggccttggcattccagttgacagagaaattatctatccttgcagagagtaatgaaagagcaacagaggca

SEQ ID NO: 26177 - DNA, 257 bp, Glycine max
  Clone ID: 700905105H1
cttggaaagagaaagacaacaaacatgcttgcattctatataattgtcatttacagctgaccacgactttgagcgaggagttggtgtttttagcttggctgataaacccagcacatgaaaaagaagcttgaaaattttgcattatggttggttgagtgagggctggtttttttagatatgtaaattttactgacacacgttgatattgagatgtacagacgaaattaacttataccactacaaagattgtaattacc

SEQ ID NO: 26178 - DNA, 267 bp, Glycine max
  Clone ID: 700905107H1
gtgccctccctctttctagctatttccctctcttaacacaattaacaaagatatatcatatcatatcaactccaaatgatgaaaaatattgggttgtttcttcttgtggtggtggctacttttgtggtggcagccacagctggtagcttttaccaagactttgaaataacatggggtggtgagcgtgccaaaatctatgaaaatggaaatcttctcaccctctccctagacagagcctctggctctggctttcgttccaaaaaagaa

SEQ ID NO: 26179 - DNA, 270 bp, Glycine max
  Clone ID: 700905108H1
tagaaacataaaaaactaaattatttttttaaaatataaatgaccaaacttaagttcagctgaaattttatgttgatactgttggagtattagttgatgcctgtagaaaacaaaatctagctctgttgagatcctatgagagaggcataatatatatagccacataggatttccaataattttccaaaggaatgtgcgtgaaacaataaagttttgacttctgcaaataggatatgattattgttgcagtgtgggcaggatgacattttg

SEQ ID NO: 26180 - DNA, 267 bp, Glycine max
  Clone ID: 700905109H1
ttcatgatcaagacactgcgaagatctgaagtcaaggtccttctaagaatgcttccagactatcatcatcatgtgaagtcatatgaaaatacacttatcacaaaattttttggtctgcacaggattaaaccttcaagtggtcaaaagtttcgctttgttgtaatgggaaatatgttctgcacagacttaaggatccatcggaggtttgatttaaaaggttcttcccttggaagatcatcagacaagatagaaattgatgagagtact

SEQ ID NO: 26181 - DNA, 269 bp, Glycine max
  Clone ID: 700905110H1
aactcgaaagcgcgtaatattaataatcgtaacaaacaagagagagaacagaactactactgtttctttttttgcctttgtttctctgcccctttgtgcagcgtctcacacaccaatggaagaaccaagtggttgcaacaagagcgctccaaaaggaaaaaaggatgacctttaccatgtacttcacaaggtcccttatggagatagcccttatgtcagagctaagcatgcccagctggtagaaaaggacccggaagctgcaattgtat

SEQ ID NO: 26182 - DNA, 268 bp, Glycine max
  Clone ID: 700905111H1
ggatagggttaaggccatggagcgcatcatctgcgccaagtacaagctaggtcgcaagatcggaagcggatccttcggcgaaatctaccttgcgacgaatattgataccttcgagatcgtcgccgtcaagatcgagaacggtaaaacgaagcatccacaattgctttacgaggccaagctctacaatattcttcaaggaggaagtggcatcccgaacataaaatggtgcggcgtagacggggaggatactgtgcttgttatggacttg

SEQ ID NO: 26183 - DNA, 269 bp, Glycine max
  Clone ID: 700905114H1
aatatccattgcacctttctctttctccgatggctaatccctcactcttgttcttcagtctcctcctattatccgccaccgtagccgccgccgaacggatcgacgatgaagacgaccttctgatccgtcaagtggtgccggatgcggaggaccaccacctgctcaacgcggagcaccacttctccgccttcaagacaaagttcggcaagacctacgccacgcaggaggagcacgaccaccgcttccgtatcttcaagaacaacttgctc

SEQ ID NO: 26184 - DNA, 261 bp, Glycine max
  Clone ID: 700905116H1
tgaagttctgttggtgagtgtgagtgagtgtatcaatcggccacacagaaatgggcagtgcttctctgattccagtttcctggttgccctggcggccactttctcctttcaagggaacggtgaaaatcttggtcgcaaaaccatggctgaagaagattcagcaagcaagacccctcatttccgtggttaacaaggctgcctctctatcttcccccgtgacagcacccagcgtcggcgttcggtttcggctggacaatttgg

SEQ ID NO: 26185 - DNA, 271 bp, Glycine max
  Clone ID: 700905117H1
ccaccttcttctcatcacatgagtttaaaccttgagctaaatttgatgtgtgaatcaccgaggaaaaaagaagaaggttatggttatgaaatgaatgagaaaaagagttctggttcttcccctgggggtttgagtgaacgtgaggatctgtgtaaaaaaagattcagatggtaaaattctttctccctcgtggttgtcatcatctgaagatgattacaaagagatggttgcaacagtttgcatgcgctgccacatgttggtcatgctatgc

SEQ ID NO: 26186 - DNA, 269 bp, Glycine max
  Clone ID: 700905119H1
gaaaactcttgagactactcctgtcatgtcgggtctcaaagaaggaatggacagattgaaagctagattatcaaaatactctcctggattttctctgtcaaatataaaagatcgtgaatacaagcaagatgaaagtcgccaaacacctttagaggaaaaactgtttagtttaactccagatagtaacgtgcataaaggcttggttgatagcaatgatcatggaattcagtcatttaaaaatatttgcaaatcaagtcaaaatgaagaga

SEQ ID NO: 26187 - DNA, 250 bp, Glycine max
  Clone ID: 700905120H1
gaggttaccgcctgtgaaaccaaggtgattcctggtgaatatggtttcgttgcccagcttaatgagggtcgtcacctcaagaagagaccaactgagttccgagttgacaaggtccttcaaccctttgatgaaaacaaattcaactttaccaaagttgggcaagaagaggtcctcttccaatttgaagctagcgaggatggacaagtccagttctttccaaatgctccagttgatgttgacaattctccca

SEQ ID NO: 26188 - DNA, 267 bp, Glycine max
  Clone ID: 700905121H1
attcttccccctccacccacccagcatatctctctattcctatttattagcacccctcacattaccttgtgtcaccaactactttgactcctttaccataccattacaataattatcaaacctaaccagtaaaaatggtgaccgtggaggaaatccgcaacgctcagcgttcccatggacccgccaccatcttggccttcggcaccgccacgccgtccaactgcgtctcccaagccgattaccctgactactacttccgcattacca

SEQ ID NO: 26189 - DNA, 266 bp, Glycine max
  Clone ID: 700905122H1
gcttttcatggctctgcatgttgtttccgttcccaccttcttcacttttcttcttccaccgcttcatctccagcattccttgcttcgaggaggttccaatcatgcccttcaacaagaaaatctctcaagttgaattgcagttcaagtggcaataatggtgaccaagattaccttctggatgcttcagtttctgttggagatggattctctttcagtggagggaagtattcagatggccctagtccaagtgatgaatggtttaagca

SEQ ID NO: 26190 - DNA, 265 bp, Glycine max
  Clone ID: 700905123H1
ggcatattgtgccctccctctttctagctatttccctctcttaacacaattaacaaagatatatcatatcatatcaactccaaatgatgaaaaatattgggttgtttcttcttgtggtggtggctacttttgtggtggcagccacagctggtagcttttaccaagactttgaaataacatggggtggtgagcgtgccaaaatctatgaaaatggaaatcttctcaccctctccctagacagagcctctggctctggctttcgttc

SEQ ID NO: 26191 - DNA, 265 bp, Glycine max
  Clone ID: 700905124H1
aaactgcgaatggctcattaaatcagttatagtttgtttgatggtatctactactcggataaccgtagtaattctagagctaatacgtgcaacaaaccccgacttctggaagggatgcatttattagataaaaggtcaacacaggctctgccttttgctttgatgattcatgataactcgtcggatcgcacggcctttgtgccggcgacgcatcattcaaatttctgccctatcaactttcgatgctaggatagtggcctaccat

SEQ ID NO: 26192 - DNA, 259 bp, Glycine max
  Clone ID: 700905126H1
ccacaaccttgaatgtttaccgccccgccggataaggagaaggagaaggaggatctgcgtcgcaggcactgttcatcgccatgtctcgggttgataacagaaattcctcagccaccaagcgtgctaggactgatggtagtcgtagggaagatgattggacatgccccagctgtggcaatgtcaatttctctttcaggacaacttgtaacatgcgtaattgcactcaaccaaggccggctgatcataattcgaaatctgc

SEQ ID NO: 26193 - DNA, 263 bp, Glycine max
  Clone ID: 700905127H1
gaaaactagtaatatggcttcaagaactatatgttttaccattcaagtgactcttgtagtagcttttctaacaacaaaggttgttttatctgatgacactgtgccaattcccgcgaacaaagcacaattaggtgaatggtataatactaatgtggggcctttagatcaaagaaagagcaccatggacccagcattggtgactgctgaagaaggcgctaaggttgtaaaggtgatgcaagatggcagtggggaattcaagacca

SEQ ID NO: 26194 - DNA, 263 bp, Glycine max
  Clone ID: 700905128H1
tgcttccctcatttctaagcctggtgtcagtgtacagcctctacctccgacgctgcttcacgggcgcggggctctcatcgcagacgcttagagtggacgacgaatccacgctccacttctgggccccgacaaacccaacggcccagaagccttccctggttctgatccacgggtttgggccggagtccatatggcagtggcgcaaacaggtccaattcttagcccctcacttcaacgtgtacgttccggacctaatattcttc

SEQ ID NO: 26195 - DNA, 268 bp, Glycine max
  Clone ID: 700905130H1
atggtacttttgatagagaaacttacaaaacattacttcaagctggagaatcaccaccatgccatcacacaccttcaaccagaggagttatcatcctcactgcttgcatttaaatcccatatgtccaaatcaattgaccaactagcatcggatttgaaacccggatcagagacccccctgtccttaacatggtttggaaagtgtttcggcctcttgcccttcatcaacaaggcttttggaaagcttgttgtggatattgactacccaa

SEQ ID NO: 26196 - DNA, 160 bp, Glycine max
  Clone ID: 700905131H1
ggcattttctttctttctttgtcttctccttgaatctgtagtaaaataaatgtggggtgtgttcccaagttgggtaagttcctatctgtcatggttccatttcaattgtaattttgaatttgctgctacctccaaaatatgatgtaattttctttccaaa

SEQ ID NO: 26197 - DNA, 241 bp, Glycine max
  Clone ID: 700905089H1
caaaccatggaagttgaggcaaagaagatgagaagggaagtagctgctatggagaaggaggtagctgctatgcgtgtggagaaagaacacgagaacagagcaaagcggttcagcaatataaagggccctgtaaacattgctcagcaacagctaatttctggaagaaatatgacacggggtggattaacacgcagcacccaatgacagttagtctatgacagtggcgcttgggagtagtaat

SEQ ID NO: 26198 - DNA, 143 bp, Glycine max
  unsure (1)..(143): unsure at all n locations
  Clone ID: 700905051H1
aaaaaatctattgtggcacccttgagaagatgtggtggtaagncaacatcaacaggccgagaccattttatgttgaaacgtgatcgaccaccacatgttacaattctttgtcttgtaagggctgctgcagctagattacctgg

SEQ ID NO: 26199 - DNA, 207 bp, Glycine max
  Clone ID: 700905053H1
gcaccataatgataatgggtttagctttttctttcttttttgtatgttttggggggaccaagttaggctgagagtatagctatagggtgaaaggaataaccaattgttcagcaattctgtaaatgactaaatgcttgcttgtcattgtggagggttttcgtttttttaacctgtgtcatatatgcctcataacaaatatgcggttcg

SEQ ID NO: 26200 - DNA, 246 bp, Glycine max
  Clone ID: 700905056H1
gtcttttgatactccagttgtggaagttgattcagctgttcaagatgaaattctcaaccttggaggacatagggctgcttgcaatgaaaaaattgatatttccaagatgtcagaatctacccgtcttgaatcatatgtctgtgatagcagttctcttgctgcaactcctggaaatgttgtatgggcgaggacagatggtcaagtgtggtggcctgctgagatcctggaagaaacatctgcattatc

SEQ ID NO: 26201 - DNA, 251 bp, Glycine max
  Clone ID: 700905057H1
cacaaaccctaacaccaaaaccagaagcgaaatcgcaatcgcaatccagcgaatatgaaggtcgtcgctgcatacttgctcgcagtgttgggagggaatccttccccttctgccgatgacatcaaacacatcctcggcgcagttggagctgaggctgagaatgagttgattgagttgctcttgactgaagtcaagggaaaagacttcaatgagctaattgctagtggaagtgaaaagatgtctgcagtgtc

SEQ ID NO: 26202 - DNA, 248 bp, Glycine max
  Clone ID: 700905058H1
ggatatgtatcttatccttgtcaacctaaatggttatactaagggtgccagaaatgagatatttgctatgcaacctgcaccaattcaagtttcatatatgggattccctggaacaactggggctacttacatagactacttagtcactgatgagtttgtttcaccactagggtatgcaaatatatattcagagaagattgtacatctcccccattgctactttgtaaatgattataaacagaaaaatc

SEQ ID NO: 26203 - DNA, 198 bp, Glycine max
  Clone ID: 700905059H1
ctcaagaaggccgacctgcacaaattacaatcagaaatcttgacgtgtctcccttccatgcctgatttgcacatactcagggagggaatctcaagttggcatattaaagaatatctgtacaattgtttgccacatagtgtaaaagatgacttggcgaacataatagcaccactcatgattagaccaattacaaggtgg

SEQ ID NO: 26204 - DNA, 254 bp, Glycine max
  Clone ID: 700905060H1
gcttggccaagatcatctgtggggcatccatttgcatcgatggaaagagccatgccttcccatattcaactcagaatagttcttttgttggttcatcacagcatcttcaccaccatcatgtcggctccgccccatcaggtttgccttttgagaggcactttggtttccatcccgagtcatctgaaacttcattcatgaataatgttggctatggaggcattggtccagggcataatgatggaaatcacatggtt

SEQ ID NO: 26205 - DNA, 249 bp, Glycine max
  Clone ID: 700905061H1
aagagagcaaggcaggaagtcagtgtttataaaacgacagtaggagcctggtctggtcggtgtggcactcaaacattgtttgttgtaggaagaggaatcttgagaaatggcaggggacagcaagagcaagattctgttcatcggagggactggttacatcggaaaattcatcgtggaagccagcgccaaagctggccacccaactttccttttggtgagggagtccatctctccaaccccgcaaaatca

SEQ ID NO: 26206 - DNA, 253 bp, Glycine max
  Clone ID: 700905062H1
tggagaaagagggatgaaagaagattttgggaaggaaatataaaacatttattcattgtcaacaaattttgttccctgcaagagagagaagaagaagttgttgggttgagttgggtttggattggatttctaatctaatctatacctttctttttcctatgcttttaaggcacaaatccttctcccttctctcttctttcttcttcttctcctgacccttattattattccttgcccttaccctttaggcaag

SEQ ID NO: 26207 - DNA, 159 bp, Glycine max
  Clone ID: 700905063H1
cattgttggagggagtttcagttattccctcttcattcttcgttcctctttggttgctccaagaagtgggcatgatcatggactccaagaccgagatcatgatcatggactccaagaccgggttcctcatcatgtcattgacttaggttcacattcaca

SEQ ID NO: 26208 - DNA, 252 bp, Glycine max
  Clone ID: 700905064H1
cggaaaaaacacttccctcggcaccgtttccgcggaaccggtccaagtttcagtcctaaagccgcatttggacacacgaaccccaacacgaatttttcccatcgcaattctccccctttcagaagcttccaaacacgccgttagctttaaaaaggaaaaaaaggaatatagcacgttggagcatcatgtcttgttcgttacagtccctcgcttcacgtattaagaagagcccaaagcgaattcgaacttaga

SEQ ID NO: 26209 - DNA, 206 bp, Glycine max
  Clone ID: 700905066H1
ctacaagagaatttgttaaaattggatactctaaatggaagaaccggtgcttgttctcagccgatgtctcgagccaaagagacactttcaagagtagctgtgacaagaacttcgtcagagaaatattcggatttttgcatgccaacctccgatttgtctaaggagcattgtaaatcatgcgatatttgcagacgatcagagtttat

SEQ ID NO: 26210 - DNA, 120 bp, Glycine max
  Clone ID: 700905067H1
cacaaaccctaacaccaaaaccagaagcgaaatcgcaatcgcaatccagcgaatatgaaggtcgtcgctgcatacttgctcgcagtgttgggagggaatccttccccttctgccgatgac

SEQ ID NO: 26211 - DNA, 185 bp, Glycine max
  Clone ID: 700905068H1
cctttcttctccttctcgcactgccatttgaaacccctgacccgaatcgtttcctttctcctcatcctctgcctcagtctcccaggatccaatataaatggaaatggaagcttcaaaatttatggctacaacgaactgaagcctctatcagacttagcttgcccgggttagtgggagaatttggg

SEQ ID NO: 26212 - DNA, 108 bp, Glycine max
  Clone ID: 700905069H1
ctttttgggtttctgagaagtgcgtgtgttgatggggggtcaaaattctaaggaggaaagtcggaggcagagttcatctgtcaggtcttcttcttcttcttggagtgc

SEQ ID NO: 26213 - DNA, 65 bp, Glycine max
  Clone ID: 700905071H1
gttctttgactggtatagaatattgggatggatgggcaatggtctctattcctccctcatcatct

SEQ ID NO: 26214 - DNA, 251 bp, Glycine max
  Clone ID: 700905072H1
gcctttttgggcacccagatttccaccattctgagtaacttcacacactatataacagaaaatgagggggggcttatggcaactcgggcaatcaatcactcgccgtcttgcccagggtgataagaaggctgttgctcgtaggtattttgcctcagatgctgagctgaaaaagacagtcgtttatgacttccatgttgctaatggagggaagatggtgccatttgctggatggagcatgccaattcaatata

SEQ ID NO: 26215 - DNA, 203 bp, Glycine max
  Clone ID: 700905073H1
caagcacatgcttgctaaacaaacagggcttaccaggagccaggtttctaattggttcattaatgctagagttcggctttggaagccaatggtggaggaaatgtacttggaggagatgaaagagcatgaactaaatggttctgaggagaaatcaagcaagagtggtgaagatcctgctacaaaaaccacaagtccacaagaga

SEQ ID NO: 26216 - DNA, 249 bp, Glycine max
  Clone ID: 700905074H1
ttaatatttgcttcattccttcaccgccgcactatcgtttccgagaaccatcactttttctcgctgctcttcaaagcaatcgcaacgcgcgttttgcttctcttttcatcgcagatcctctgcgtcgccaccagattcactcacgtttcgtgattcgaacgcggcgtcgtttagactcaagcttgcgggagaagagaaaaccctaatcagacatggggaagaagaagccgacggcgagggacgaagaga

SEQ ID NO: 26217 - DNA, 251 bp, Glycine max
  Clone ID: 700905075H1
agaggattcgctccaacccctatcgagtaaggtattatctgtcaatttacattcgaaagggttaggctattgaattttaaataattacagataaaataatcgatagctttgattttaaaaattaatcataatcatcggttaggttgcaacataatacttaattcgcttaattttttaactgcgcctcagagtattcataacatattctattaaattaataagctggtgatgtaattaatattaatatgtag

SEQ ID NO: 26218 - DNA, 249 bp, Glycine max
  Clone ID: 700905076H1
actccctctacctgagaaggaggatccctgtgctagctcgatcaaagatcaaagatggaggagcggactcgcagcattctgattttgatgaccttgctttccatctccattgctggcccgaatgcaggtggcttgcagcatcataagggtaggcatggtaagcatggtcgtcatatgtctgctcgtaatgtgacctacgacggtaagtcactgttcattaacggaaggcgcgagatccttttttccggc

SEQ ID NO: 26219 - DNA, 248 bp, Glycine max
  Clone ID: 700905077H1
cgagaacagaaatctcgtgtggaacaaaagggtaaaagctcgtttgattctgatttccagtacgaatacgaaccgtgaaagcgtggcctatcgatcctttagtccttcggaatttgaagctagaggtgtcagaaaagttaccacagggataactggcttgtggcagccaagcgttcatagcgacgttgctttttgatccttcgatgtcggctcttcctatcattgtgaagcagaattcaccaagtgtt

SEQ ID NO: 26220 - DNA, 250 bp, Glycine max
  Clone ID: 700905078H1
aggagataaaaaaatcttaaagaatatcgcatgccttgaagcatgtaaacaacttcataagattggagctttgtcagataatcttgttcctgatattgtcatggaagaagcagaggtggaggaattagggaatgaaccttatgatgaaaaccaaccaacttttgtcccatttggattggtaaattctgtgtcaaataatagtcaaacggtctatcattgttatttcatggaattcaataacaaatttagc

SEQ ID NO: 26221 - DNA, 249 bp, Glycine max
  Clone ID: 700905079H1
cttttccctcgttgaaatgaaaatgggttcttctttgtggactttgtgtctaattttggcttcactagcctcttctgcattctgtgcctttccacggaggccagtggatgttccattcggcagaaactacgttcccacttgggcttttgatcacatcaaatacttcaatggaggttctgagattcaacttcatcttgacaagtacactggtactggcttccagtccaaagggtcatacttgtttggtca

SEQ ID NO: 26222 - DNA, 113 bp, Glycine max
  Clone ID: 700905082H1
ctctacttttctagaacctcaagcaccttatactcagtgaaatatcacttttgactaccttgacggacagtgtttgacattttgatattaatattactggtgtctctaatttt

SEQ ID NO: 26223 - DNA, 251 bp, Glycine max
  Clone ID: 700905048H1
tgcagatgaggaagaacgaatgatcgtgcagatcttgatgtttccactgatatgtcactgaagaagaaagggaaagcaagtgctggtgaatcaaccaagcaaggaaagatggatgcttcttccaaaagcggtggagcagcagcatccaatggatcaaagggtgcatccacgaagtctagccagaaggccaaagatggcaacaaatccaaaggttccaaggctaatagcaaatctgaggataaagttagtag

SEQ ID NO: 26224 - DNA, 254 bp, Glycine max
  Clone ID: 700905084H1
cacctcccaactcgccctcgactcacatccttgtccgattccgcgaacgagtcgagtgaatcgggttggtaagatctattctgtttcttcgtcatggcaaccggacaactattctcgcgtactacacaggctttgttttacaactacaagcaacttcccatccagcggatgcttgattttgacttcctttgcggcagggaaacaccatcagttgctggaataattaaccctggttctgaggggattcaaaaact

SEQ ID NO: 26225 - DNA, 255 bp, Glycine max
  Clone ID: 700905085H1
attaaataaagctaaggagaaatattgagaagcaggaagaagcaagttatggcgacgaagcagcttccgcagatcgccattctgggagctggtatctttgtgaagactcagtaccttccgagactctccgagatctctcatcttttcattctgaaatccatttggagccgcactcaggaatcagctacagctgccgtagacatagctcgtaagcattttccccaagtagagactaagtggggagataacggtttt

SEQ ID NO: 26226 - DNA, 78 bp, Glycine max
  Clone ID: 700905086H1
tcaggctgcaacccacttccaccagagatatggcttttgcccaagtacgcccccattcatccagggaaaatgttatgc

SEQ ID NO: 26227 - DNA, 78 bp, Glycine max
  Clone ID: 700905087H1
cttcttttctctccgtgggttgaacttgaagaacctctgaaaatccgttctttctttcatcgatcactctctctctct

SEQ ID NO: 26228 - DNA, 261 bp, Glycine max
  Clone ID: 700905012H1
ataatcttcatattcatcaaactcatcaaaatgaatctgtaccactcctccaccaccaccaccaccaccaccatcttcaccgtcatattcctcctccttgcaatattattcactctcacaccccacaaggccaacggtgccacgtgtcaccctgaggaagaagcgggcctgttgggcttcaaatccggtatccgatccgacccgtccggcctgctcagtaactggatatcgggtacggactgctgcacatggaccggagta

SEQ ID NO: 26229 - DNA, 258 bp, Glycine max
  Clone ID: 700905013H1
tgtgccttccttttccaaagggagcagcaacaacttgtgtactcttcttgttgttttccacttctcagaaagagatgcctcaccacaactatttcccttgcttgttgaagcctagtatcattattgtctagttcttgctgtgcttttttgtgttctctctctctctctctctcttttatggatcttggggtagtgggtttggagggggtggtgggttcagaaagtggttgcgtgtttggttcctctcttgcttcagat

SEQ ID NO: 26230 - DNA, 248 bp, Glycine max
  Clone ID: 700905015H1
ctataatgcattaatgctctgttgtcttctcttttcagatttggaatcttggctctcctgatcctaattttactttggatgctcatcagcaaggagtgaattgtgtcgattactttacaggtggtgactaaccatatctaatcactggttctgatgatcacactgctaaggtatgggattatcagaccagaagttgtgtcaagaccctagaaggtcacacacgcaatgtatctgctgtatgctggcat

SEQ ID NO: 26231 - DNA, 262 bp, Glycine max
  Clone ID: 700905016H1
tgtgatttcagtgagtgatcggtgttcacttgatctcatcataatcgtcagcgtcaattgaagaagatgccgatcagaaacatcgccgtcggaaggcctgaagaggcgactcaccccgacacgttgaaggcggctttggctgagttcatctcaaccttcatcttcgtgttcgccggctcaggctccggcatcgcctacaacaagctcaccgacaacggcgctgccacccctgccggcctcatctccgcctccatcgcccatg

SEQ ID NO: 26232 - DNA, 78 bp, Glycine max
  Clone ID: 700905017H1
atgacccttctcagcaaaagccctagcacaagagtgccaagtggtttctctgtccaaatctttttgatttaatttctc

SEQ ID NO: 26233 - DNA, 264 bp, Glycine max
  Clone ID: 700905018H1
gcacaatatcttagaaagcgaagactgatgccagataagaaactaggtactcttactagtgatattgctgggcagttgaaagagctaagacaaggccgtgtagagtttaaaatggaaagtaaatcaattttgcatgtgggacttggaaaggtaagctacaaagaagaggctttacgggagaatattagtgcatttatgaatgctgtattgcttgcaaagcctgctggcttaaaaaagactccaaatatgctgggtatgtgttgt

SEQ ID NO: 26234 - DNA, 134 bp, Glycine max
  Clone ID: 700905019H1
gagggaatccccccagaccagcaacgtctcatcttcgccggaaagcaacttgaggacgggcgcaccctcgccgactacaacatccagaaggaatcaacccttcacctcgtcctccgtctccgtggtggcatgca

SEQ ID NO: 26235 - DNA, 72 bp, Glycine max
  Clone ID: 700905020H1
cggaaaatttaaaggacttattccaaagcctattcccatagttaagcctattccgaagtcaattcccagtgt

SEQ ID NO: 26236 - DNA, 253 bp, Glycine max
  Clone ID: 700905022H1
ctttccaaaagataaaatctttacccttcacaccccaaccccttttggtttctcttctcaattttgcatctgggaatcaggctgcttctcagttcacaccaccaccaccatggtttcactcggagctacctgtgctttgtgctgttctgtgttgattgtgtttgtcactttgagttcggctggggacatagtgcaccctgatagtattgctcccagaaggcctggctgtgacaacaactttgtcctggttaaa

SEQ ID NO: 26237 - DNA, 253 bp, Glycine max
  Clone ID: 700905023H1
agaacacagaatcgcgtttgcgactgaggaatgagtttcctgcagggtatcgttgattccttcaactccatcttcatacccgataacaacaattatcacgacaccaattctccttcttcttcttcttcctcaacgaatcgaatggaagcttctcctcctcctcctcctcttcctccttcggtttcgaacgaacgcgttgcctacaagctcaaaggctacttcgatttggcgacgcaggagatcgcgaaaggcg

SEQ ID NO: 26238 - DNA, 167 bp, Glycine max
  Clone ID: 700905024H1
ctccattcgtgctttcagctccggcaacctctcttccggcgccgccgtatctcggccgcgcaccaatcttcaatttgattacttgggtcaacgatttctgtcattctcaatcatggcaactagacttcagtttgaaaataattgtgaagttggagtcttctctaaac

SEQ ID NO: 26239 - DNA, 253 bp, Glycine max
  Clone ID: 700905026H1
aacagatggcacaaaattgacaaatcatatcccattcctgattattgtgaggcagaggcacttcaaggtaagtttgagattccaattctcaccattacaatgccaaaaaaggccacttcacaagctgctactaaacaacaagaagtgggaacatcccaagagaaaggtgcagtagtagctgaaccaaagcctcaagaaaaagtccaagagaccacttcagcaccacaacctacaacaactactaaagtggaag

SEQ ID NO: 26240 - DNA, 254 bp, Glycine max
  Clone ID: 700905027H1
cacaaatcttagccgccattgatttttcctcttccatttctcttactttctcagcctttttcgattacccatttggttatttcgccctaatggctcttgctccatccaaagtttccaccttttctggtttttctcccaaacccagtgttgggggtgctcagaaaaacccaacttgctctgtttctctgagctttttgaatgagaaacttggaagcagaaaccttagggtttgtgcctcaacggtgcctctcact

SEQ ID NO: 26241 - DNA, 165 bp, Glycine max
  Clone ID: 700905028H1
tgcttccctcatttctaagcctggtgtcagtgtacaggctctagctccgacgctgcttcacgggcgcggggctctcatcgcagacgcttagagtggacgacgaatccacgctccacttctgggcaccgacgaacccaacggcccagaagccttccctggttctga

SEQ ID NO: 26242 - DNA, 100 bp, Glycine max
  Clone ID: 700905029H1
gccaattcttcaccctcccctccttttcgcagacgaaggcgcattctattctaacgttcacaagataggaaggcaagactaaagattccaccacctgata

SEQ ID NO: 26243 - DNA, 257 bp, Glycine max
  Clone ID: 700905030H1
cactcagattgttgcaaatttacagaggcagcaggttcagtccaagctcatcgcctctgattacttggatactaatttggatcttatggatgtcttggtatctggatatgaaaacacagacatggctttacactacggtgcaatgttgagggagtgcataagacaccagattgttgcaaaatatgttctggactcacctcatatgaagaagttttttgactacattcagcttccaaattttgacatagctgcagatg

SEQ ID NO: 26244 - DNA, 257 bp, Glycine max
  Clone ID: 700905031H1
tgccagagcgaatctcgcagtgctcggagcaattcctcctctcgtcggaatgctcgatgattcagaagacgctcattctcaaatcgcatcgctctacgctttgctcaatctcggaatcggcaacgatgcaaataaagcggctatagtgaaaattggcgcggtacacaagatgctgaagctaattgaatcgagcggttcagattcgtcggtgtctgaagcgatcgttgcaaatttccttggcttaagcgctttggatt

SEQ ID NO: 26245 - DNA, 256 bp, Glycine max
  Clone ID: 700905032H1
ctaaactcatattccaaaacgcagagccaaaccatgtcgttccccttcaaccactctcacgccacccacacccaccaccgcagggacgacgacgacgacgaacgacccaccgtttaccctccgccgggaaactccttcagcaacccgccacctccgttctacggcgtccctcaaccaccaccccctcagccggagacccacgtgttccattccgctcacgtgacaccaggacacgtgtcccatgacttcaacaact

SEQ ID NO: 26246 - DNA, 263 bp, Glycine max
  Clone ID: 700905034H1
tgaagattccacaacagtgggagggagatccaaaaagagagagtggaaaagatggcgcggttgatcacagtggtgtggtgcgcggtggcggtgctattatgcgccgcggccggtgcgtcgtgggtggaggaggcggcgaacccgatacgaatggtgtctggcgtggaggcggaggtggttcgggtgatcggggagtgccggcgtgcgttgaagtttgctaggttcgtgagcaggtccgggaagagttaccaaagcgaggaaga

SEQ ID NO: 26247 - DNA, 123 bp, Glycine max
  Clone ID: 700905035H1
gtaacaatggggtctctaatggcctctgccacattgactcttgtattggcaatagtgtctctaagcttgccgtctcaaatttcagctcataactacttgtactcatcacctccaccacccaag

SEQ ID NO: 26248 - DNA, 82 bp, Glycine max
  Clone ID: 700905036H1
accaaagccagggtttttctctttcaattttcatgccactcagattcacgggattatgtttcttctgccacacaaacccttt

SEQ ID NO: 26249 - DNA, 261 bp, Glycine max
  Clone ID: 700905038H1
aaaattcttctccttttgtgcttccaactcttttctttgttatattattctctttcactttctgccaacccttggagtcaacatgactatcctcattgagcaatctgatcactttggggctgaagtagaggcaaacactgaaccaataaatgagagagaactggtgttggatggtggatttctgataacacagaccaactcatttgggcacatgtttagggcttataatgatgctgaaagtgagaagcatgaaggagtgga

SEQ ID NO: 26250 - DNA, 85 bp, Glycine max
  Clone ID: 700905039H1
cttcgtctcaaatctcttcgttccttcgattcgttccatttcttccaaaatggccaaagacccagttcgcgttctcgtcactgga

SEQ ID NO: 26251 - DNA, 254 bp, Glycine max
  Clone ID: 700905040H1
aaagaaagcaagaatttgaaggaagaggggatatgaatacaaggagctagttgtctatttgcaataacataacatcatcaagcaggatcatcgatccaaccttagtattcaacccagagagatttgtagtaataattactacaacaacttaaaacaatggcaggaggaggttatgtagattcgggaaatgcaaagcaatttgaagggaaggtcactgcattcgtattggttacatgccttgtggcagccatggg

SEQ ID NO: 26252 - DNA, 258 bp, Glycine max
  Clone ID: 700905011H1
ctcagaaccttctgaggttaaagcaaaaaacaaagagagagagagagagaaaatgatgaagccatcgatgctcagatctctccactccgccgccacccgcggcgcctctcatctcttccgccgtgggtacgcctccgagccggtgccggagcgcaaggtagccgttctcggcgccgccggcgggatcgggcagcctctctcccttctcatgaagctcaatcccctcgtttcgagcctctccctttacgatatcgccgg

SEQ ID NO: 26253 - DNA, 110 bp, Glycine max
  Clone ID: 700905043H1
cttgaatcagcatctctgtaggatgcattgcaaactgctatcctcctcattcatctgatggatcgttgctgatggctgacatacgctgtcttcctggtgtgagccatttc

SEQ ID NO: 26254 - DNA, 254 bp, Glycine max
  Clone ID: 700905044H1
tgaagaaagaggaagagatgctttctgctgttaaggatagacaatccaaggatggggataaggagttctctaaggatgttcttgatgaacgtgccaagaaagcagaagcttggcatcatgattctgcagttcgtgcacggtacactaagccatcatcaccaatcacatgtgccactttcgcccaagatgttctagaaggaagagcaaaggcttcacaagcacacgatcacaagcatcaaccactaatatttgga

SEQ ID NO: 26255 - DNA, 254 bp, Glycine max
  Clone ID: 700905045H1
tgcagatgaggaagaacgaagtgatcgtgcagatcttgatgtttccactgatatgtcactgaagaagaaagggaaagcaagtgctggtgaatcaaccaagcaaggaaagatggatgcttcttccaaaagcggtggagcagcagcatccaatggatcaaagggtgcatccacgaagtctagccagaaggccaaagatggcaacaaatccaaaggttccaaggctaatagcaaatctgaggataaagttagtagaa

SEQ ID NO: 26256 - DNA, 154 bp, Glycine max
  Clone ID: 700905046H1
gcttcgcttccccttaattcccaaccttacattattaacttcaccaactcatctccctctaccaaacaaaacgacgcagcaaaaccctgtctctaaaaccctctctctgtctcccttccttctcatcttcaccaccaccaatggcgtcgcgccg

SEQ ID NO: 26257 - DNA, 256 bp, Glycine max
  Clone ID: 700905047H1
agaaattctgcaagcaataaatctagtggttctgtggcttcctcaaagaaaaacaacgaatgcagcgagagattaagtgaggctcaaagcacttgtacatcaccaattttcgaagctgagagtacatacgtggaaaatatgcaggatgtgccccagtatgtacattgccaagttatgcaaactcttgtgcagagcacttgtacatcccctatttttgaagccaagagtacatatgtggaaaatatgcaggatgtgc

SEQ ID NO: 26258 - DNA, 256 bp, Glycine max
  Clone ID: 700904963H1
caacaacatagtgaacaacaaccttggtaataataaccatggagagcaccgaagactcatccacgagttcacagcaacaaccgaacctgccacccgggtttcggttccaccccacagacgagatactcgtggttcattacctcaagaagaaagtagattctgttcctctccctgtttcaatcatcgctgatgttgatctctacaagtttgatccatgggaattaccagccaaagcatcgtttggggcggaagagtg

SEQ ID NO: 26259 - DNA, 255 bp, Glycine max
  Clone ID: 700904964H1
cttacccccagatgtgctcaaagagagacttcctggcatctctgaaactgctgctatttttgctggtgtggatgttacaaaggaacccattcctgttttgccaactgtacattataacatgggcggtattcccacaaaccattatggagaggtggttaccattaaaggtgacaatccagatgcagtggttcctggattgatggctgccggggaaacggcctgtgcatcagtccatggtgccaataggcttggtgc

SEQ ID NO: 26260 - DNA, 250 bp, Glycine max
  Clone ID: 700904966H1
gacccaaacaaagccgaaagaaagaaagaaagcacgattacttgcacttgttcttcctctgcagtaaaaccctagctagccatcatcgtaacgtaatcgatccctctgactctcactctagaaccttcgactcgatccgaatccctagatcggattgcaaggctggcgggtattctggtcaagtaaatgacggatctcccccgccgcggcttcttattatcgttgatagggttaccgcgctgtgacgatt

SEQ ID NO: 26261 - DNA, 249 bp, Glycine max
  Clone ID: 700904967H1
cgcggcttcaaccttgtagttattctctttcttcttttttagctatccctctcttgaaaaatctagatctcgttcttccttgatctacgttacgcttttagtgaccggatctgtatggatctgaaccagatctacacgccgatggtggttttggcctggtctttcatagatctgatgcatggaggctcagatctactgtacagagatactgtagataatcgatgagaagaacgcagatccagccgcttc

SEQ ID NO: 26262 - DNA, 119 bp, Glycine max
  Clone ID: 700904969H1
atcatacttagaaacagcaactatgtctctcatgcagcttactagctcccctgttggctcactggtccgtttcattgtaatatttgctttatgggacataaccatggctttggccaagt

SEQ ID NO: 26263 - DNA, 247 bp, Glycine max
  Clone ID: 700904970H1
cgataacggaaccaagatggcccttgatgattgcaaggacctcttgcaatccgctatcgagagcctccaactcagcattgacatggttcacaacaacaacttgcaggccgtgcataaccaacaggctgacttcaagaactggctcagcgctgttatctcgtaccaacaggcctgcatggagggttttgacgatggcaaagaaggtgagaagaagatcaaggagcagtttcataccgagaccttggac

SEQ ID NO: 26264 - DNA, 247 bp, Glycine max
  Clone ID: 700904971H1
caacaatggcaccagctgcagccaagactctgacttacctggcccagcagaagaccctagaatcgagcttcgttcgggacgaggaggagcgtcccaaggttgcctacaacgaattcagcgacgagatcccagtgatttctcttgccggaatcgacgaggtggatggacgcagaagagagatttgtgagaagatcgtggaggcttgcgagaattggggtatattccaggtcgttgatcacggtgtgga

SEQ ID NO: 26265 - DNA, 249 bp, Glycine max
  Clone ID: 700904974H1
agctcgtcttcacgatccagcgattccgctctccaacgggactgcgcagggtgaagaatcgagaggccagccgccggtgaagaatcgcgcgattcgtctggaaatcgcgattccagcacgattcatgcccgatacagagatttaaccacgattcaggaacaaaaacgagacaacctccgattcgtattggtagcatctggaatcgtatcgaatcgtgcgatacgtatcctgaatcggttttggtttttc

SEQ ID NO: 26266 - DNA, 246 bp, Glycine max
  Clone ID: 700904975H1
gtcaaaaagaatgaagatgatggcgtcgaaacagtgccaccaactcatacgaaacccgaactcgacgccactgtcaaaatggaggaggccgaagacgaaccagaatcagttcgagacgatcccatagacgaagatatccctgaagaagacacagttgtgcgcgaaattgatgtcttcttctctccttctgtcgatgcccagactcagctatacgtctttcagtatcccttgagaccttcttggcga

SEQ ID NO: 26267 - DNA, 252 bp, Glycine max
  Clone ID: 700904976H1
ttgtaccatcgactttgtctttggagaacagccactgcatcaccaaagacaaagtcgatggtacctgatactgatgcaatcacggtagaattgacgcatggtgtgtgcgtagagtgtgtcctggtagccatccattcgacatttgtaaaagatggacctgtcagcttgaaccctcaaggccactgcttgatgtttttcagcaccagctgagttctccaaaattgcactttcgtggtgcgaaaaccattggaa

SEQ ID NO: 26268 - DNA, 249 bp, Glycine max
  Clone ID: 700904977H1
cgggataatattgtagaagttcagaaatggttcattctacctttttgacctattttgttgtcttttctgctgtgtttgaagggttcccgttttaaaacattgtttttgtggcagggagtgtacataggagccaagtttgattggttgcaattgagttgtaattggttgttaagggtaccaaaacccattaattcttcttccatgtaaagtcagccgaaatgattgaggctgattagaagactagggtgt

SEQ ID NO: 26269 - DNA, 249 bp, Glycine max
  Clone ID: 700904978H1
aggacattgtgcactgtactgaatttgagcttgtacctgcagctgttaatgctgctttacagactattgccaatgtttctatttcctctgaattgcaagatgctttattgaaggctggtgttttatggtaccttttgcctctgctgcttcagtatgactcaactgcagaagaatctgatgcaacagaatctcatggtgtcggtgctagtgttcaaattgccaaaaacatgcatgccataaaagcatcac

SEQ ID NO: 26270 - DNA, 253 bp, Glycine max
  Clone ID: 700904979H1
ataaaaattaaggaagcagaggagaaaactgagggtgggattttgcttccatcaactgctcaaacgaagcctcaagggggtgaggtggttgctgttggagaaggaaagacaattgggaagaacaatgtagagattagtgtgaagactggtgcacaagttgtgtattcgaagtatgcaggtactgaggtggatttcgatggtacaaagcatcttattgtgaaggatgatgacattgttggtatccttgaaactg

SEQ ID NO: 26271 - DNA, 251 bp, Glycine max
  Clone ID: 700904981H1
agctattgaatttcacttcacttcacttgcatgccaaatgaaaacaacctcttcccagaatcttgtcggtatttaactccctcgatttcacaacaccaataacaatgagagtttcaacagagacagagccgtagactaaaaagataaaacgcattcgccgcggcggggactcgagcaagcaccctttgtaccgcggcgtgcggatgcggaactgggggaattgggtgtcggaaatccgcgagccgaggaag

SEQ ID NO: 26272 - DNA, 250 bp, Glycine max
  Clone ID: 700904983H1
caagcaacagatcaaactcctccatattccacgcccaaatctttttaataaattttctccaaataccattcacacaacaacatcgatttgtaataccatgaagtttttttcagcaatagagtttctaagttcatttcttgtgctgatgttcttctaccctttttgccactcactcgacaacaccataaccataaaccaccccattagagacggcgacgttttggtctccaacggtttaggaaactttgcg

SEQ ID NO: 26273 - DNA, 248 bp, Glycine max
  Clone ID: 700904984H1
gcttccccacaccatcctctctcaacaagagccccctgcttaaattgtgcactccttctttatcccattctttcctcagattcgcgccaccattggaaaaaaaaggtttccggtgttggggagcctagggttagggtttctgagagatatgggatgttccatgcattcgtgagccttatcgcacgcggttggaagctgtttgggcacggtgatgacgtcggtaatgtcgccgccgccaccggaagaga

SEQ ID NO: 26274 - DNA, 250 bp, Glycine max
  Clone ID: 700904985H1
attttctggtgaatgaattcaaaagaactgagagtattgaccttgcaaaggacaggcttgcactgcagaggcttcgtgaagctgctgagaaagctaagatcgagctgtcttcaacatctcaaactgagatcaacctgcctttcatcactgctgatgcatctggtgcaaagcatctgaacataacattgacaagatcgaagtttgaggctttggtgaatcacttgattgataggaccaaggcaccatgtat

SEQ ID NO: 26275 - DNA, 248 bp, Glycine max
  Clone ID: 700904990H1
ctcgagccgaagaagtgcagttcccaaatggcaataatctttctttcaagctccgcaattcttcttccaagtcttgctttctttctcacattatttaaccttgcaagttccgaatcattcatcggcgtgaactacggacaagtcgctgacaacctgccgccgccgtcggcgacggcgaagctgctccagtcgacggccatcggaaaggtgcgtttgtacggaaccgacccggccataataaaagctct

SEQ ID NO: 26276 - DNA, 250 bp, Glycine max
  Clone ID: 700904991H1
cttcatattcatcaaactcatcaaaatgaatctgtaccactcctccaccaccaccaccaccaccaccatcttcaccgtcatattcctcctccttgcaatattattcactctcacaccccacaaggccaacggtgccacgtgtcaccctgaggaagaagcgggcctgttgggcttcaaatccggtatccgatccgacccgtccggcctgctcagtaactggatatcgggtacggactgctgcacatggacc

SEQ ID NO: 26277 - DNA, 250 bp, Glycine max
  Clone ID: 700904992H1
ggatttgcctgagactaagcaaattgattctaagtttaatgttgatgaacttaaagacaaagtagagattgaaaagcctattgtgaaggaggaaagtagtactatagctgttggagatagtctatctgcaggaaaagatgatacccaccaagatattgacattagtcctgctgccctgactgagaaacggaaatttaatgttgggaacagtgagcctgccaaaaggcaacgcaggtggaacactgaaaca

SEQ ID NO: 26278 - DNA, 251 bp, Glycine max
  Clone ID: 700904993H1
ccaagagcgagatatctatttagatctctgaaaaacagagtttcatttcaattcagtcttattattagggtttgccgattgagagagaaagagaaatgggagaacgaaaaggaatcccaatggctttggggctcttggcgatgatcctcttcttcattgcttcctcttcctctcacctcgttcgcgcttccgatgacgccgacgacgcgatcttctacgagtcgttcgacgaggattttgatggacggtgg

SEQ ID NO: 26279 - DNA, 253 bp, Glycine max
  Clone ID: 700904994H1
gttttctctttgagaaaatcgtatcttacaccttttggtgaccactttgagtgagagaagagaaattaagagagatactcacattagattcaagagagatggccatcaaccatgaaacttgggctttcattttcggtcttctaggcaacgtgatctcctttatggtgttcctcgctccattaccaactttttaccaaatctacaagaaaaaatctacggatgggttttaatcactaccttatattgttgcact

SEQ ID NO: 26280 - DNA, 241 bp, Glycine max
  Clone ID: 700905002H1
acgatggcgtcttcaatcgaaaagctcctagaaagtggtcgtcccttccttcgcggtgatctggagtccatcgacaagaacttacctcggctggttggcgtcctgcagagtgtgggtgccggggagtgctggcacaaacacggcagcttccttcaccacctcgtcgacgtatttcgcattctcaagctctggaaagcccctcactctgtctgcctctgtggcctcttccactcagcctact

SEQ ID NO: 26281 - DNA, 77 bp, Glycine max
  Clone ID: 700905003H1
gcgcaaaaaccctaaaccctgtgaatgaagaagacgaagaagagtggcgaagaagatgggggcaagctcaagttcaa

SEQ ID NO: 26282 - DNA, 98 bp, Glycine max
  Clone ID: 700905004H1
ggaatcggctcgagcttctttcctttgcaactagttacctagggttttgagtttgtgacgcatgttgcttggatccctgaaaatcaaatcagactcag

SEQ ID NO: 26283 - DNA, 121 bp, Glycine max
  Clone ID: 700905005H1
tgtcaaccaaaacagcacatgggagttatagaagctatgtgctgagttgcgaaccatcatcaatccaatcttttgtgttactataagtatttaacagcatagacattagacacattcttcg

SEQ ID NO: 26284 - DNA, 254 bp, Glycine max
  Clone ID: 700904962H1
gtccttcgtcagttaactatgggctaatcacaattcaggaagcccaaaactattaaagtatgtatatctgctctctcttttttgtttgactgagcatagtattcaactcaaagatgatcactgtttctttctttctctatatctcaaaaaggaaaccgacaacacaaaggatttgcagaaagtgcagctacttagttccattttcatcctctctccattaactttcagtcaaaacaaaacaaaacctctttagg

SEQ ID NO: 26285 - DNA, 142 bp, Glycine max
  Clone ID: 700905006H1
cggattcggctcgaggataaaccctaatagtcacaccgtctcttcaaatatgtgtataaagaaagtctctcaatctcacgaccccgaagaatgtcaagacgtaaagcatctcttgccagtggctactccaaccgatggctcc

SEQ ID NO: 26286 - DNA, 53 bp, Glycine max
  Clone ID: 700905008H1
aaaacaaaaccaaaccattcaaagataggaggcaggcaggtaccgcacaccgg

SEQ ID NO: 26287 - DNA, 254 bp, Glycine max
  Clone ID: 700904918H1
cttcattcgggactcgccatagtgattccttcttcgctcctattcattcgttgcgtgctcgttcggttgttctcgtcgttccagtgaagagttccattttagtcctacacccttgtgtgagaatagatggcgccaatcctgcagagcactcagccatgggtcgagaaataccggccaaagcaagtgaaagatgttgcccaccaagatgaagttgttcgagtactgacaaacacccttgaaactggaagttgtcc

SEQ ID NO: 26288 - DNA, 251 bp, Glycine max
  Clone ID: 700904922H1
gtagtgaagaaaatgaaagtccttgttttctttgttgctatagttctagcagcatggcattgccatggctcagaccatgaccatgaccatggccacacctaccaaattttccctctgagaatgaaaactggccatggtggccactacattccggaggtatcatgccaaagttggaggcttggtgtggaagcacacaacgtcattgactggaaaaccgttcctcaagattgcgagggatatattgggaacta

SEQ ID NO: 26289 - DNA, 251 bp, Glycine max
  Clone ID: 700904923H1
ctcgagccgcgtcgacgacattggcgacgtcaccatcaccaacgacggcgccacgattctcaagatgctggaagtggagcatcctgctgccaaggttttggttgaactcgccgagcttcaggatcgagaagtcggagacggcactacttctgtcgtcattgtagctgctgagcttctcaaaagggcaaatgaccttgtcaggaacaagattcatcctacctcgattatcagtggatctagacttgctatgc

SEQ ID NO: 26290 - DNA, 253 bp, Glycine max
  Clone ID: 700904924H1
tttcagaggaaagaaatttaaacagagcacgaagatgaagggtctcttcaagtccaagcctcgcactcctgcagatgtagtgcgccagaccagagatcttctgctctttgttgatcgcagccccgaaacccgcgaaagcaaacgtgaagagaagatgtccgagctatttaaaaatatcagggagctaaagtcaatcctgtatggaaatagtgaatctgaaccagtgtctgaagcctgtgcgcagttgactcag

SEQ ID NO: 26291 - DNA, 252 bp, Glycine max
  Clone ID: 700904927H1
gatttgttggccgaccttcaaaatgcgctgttggagcaacgtcctaactacgcctctgcttccaaattgaacacaacaagggaaagccgttatcacactcagattcgacaccgcttaacccaactccaaggattgccttcaagcagaggagaggacctacagactatgtgcttgcttgagctttatggactaaagctagctgagttgcagaggaaggtgcagactgacgtgaattctgaatactggctcaat

SEQ ID NO: 26292 - DNA, 253 bp, Glycine max
  Clone ID: 700904928H1
cttaattcttaactacaagagagagagagagagagagagagagagcgagagagagagggagtgagtgagcatcatggattcagagacgagtagaggtgcttctttgacggtgaagtatttgcaaatggggatatggtggctctcagtgatgatctgtgttgggtatttaatggtttagagtgagatgcccaccaacatcttctttacacattggtttccagatattcaagctaaggcagattcaatatacttc

SEQ ID NO: 26293 - DNA, 257 bp, Glycine max
  Clone ID: 700904931H1
gatcagagctgtaattgtacgtacttgtaaagaactcaaacgtagcaacggtataataattcagtatgatgataatgctgcagttgtcattgatcaagaaggaaatccaaaaggaactcgaatcttttgtgcaatcgcccgggaattgagacagttaaatttcactaaaatagtttcattagcacccgaggtattataagacgaaactgtgctatggatacattatttttttgtgaaatagattaattaatctattt

SEQ ID NO: 26294 - DNA, 258 bp, Glycine max
  Clone ID: 700904932H1
atcggcatttccgaggagtgcgcgtgcgtttggtgtggtcaacggaagcgagataaatacacagagagagagagagagagagagagaggtgtgtttgttctctgagtagaagaagatcaagatcaaggaagaggatgtcgaaagaggatgtgtttgttggcgcgatcgaccaaggaacgagcagcagcaggttcataatatacgacgcgaagactggagtagtaggatgccaccacgtggagttcacccagttctacc

SEQ ID NO: 26295 - DNA, 253 bp, Glycine max
  Clone ID: 700904934H1
cttaaccgcaacaatccccaactcgctctctccattttctacgccatgcgcgccatatttcatcaagttggcgagagtggtcctttggctgagagatggaagtggtcgaggccaaatgcaaatgtttatacattgttgattcaaggtttagcggcggtgttaagggtttctgacgctctcagggttattagatatatttgtgaaatcggcgtttctcctggtgaggaggttccgtttgggaagatagtcaaat

SEQ ID NO: 26296 - DNA, 252 bp, Glycine max
  Clone ID: 700904935H1
tcgaaacattgcttgcaaaaacaattcacgatcacagactttgagcgaccttgttcatggcaagttttctgctagaaaagaaaaagactagttagttaggcttttatgcaaagaacagagttctcccaaacacttcaatcaaacatggctttaccagccaatgaaacctccatggcagaaaggtctcagtgggtgctcaatgctcctgctcccccatccacgtggcacaacctcatggcttctgtgaggaac

SEQ ID NO: 26297 - DNA, 251 bp, Glycine max
  Clone ID: 700904936H1
cttattataaaacccagcttgatgaagcggagaaaaggttgcaagattctgaatccaaattggcccgccttcgaggtcaaacagtgtcatctagaagtaccttagatgatggaatcgaaactttgaagacaaagagcagatcaagcagtcccattgatagaaacgaagtttctaccaaaagccaacatcaatctaaaccagaacttcttattccttcactgaatccaaaaatatcacaacctgtattgttg

SEQ ID NO: 26298 - DNA, 247 bp, Glycine max
  Clone ID: 700904939H1
gatgattcgacacgccatgttgtgcgtgctctgttacggaattgtagttatgaagtcactgctgtttccaatggtcttcaagcgtggaaagtcctggaagatccagaaaatggcattgatcttgtcctaacagaggtagctatgcctattttgtctggaataggtcttttgtgcaagatcatgagccacaaaactctgaagaatattcctgtgattatgatgtcatctcatgattctatgggtatag

SEQ ID NO: 26299 - DNA, 251 bp, Glycine max
  Clone ID: 700904942H1
ttcgggctttctggtcttatttgtcttgaagatgaacatgctgctcctcaatctagaagatatatacctccaaatcatacgacagagttcttgaacaggtttcaaagaaatgcaggcctggtggcatctggtgttgccaaaaacttgaacagagtgggtaactatgtgaaagatctcctaaatgacattctaaactaattctacaatgcaccttgcatgggtggtacattcatgctcccttatgttgattt

SEQ ID NO: 26300 - DNA, 250 bp, Glycine max
  Clone ID: 700904943H1
gattccagtatgaaagttgcagttcgtatttgatgaagatagtggagcctatcatgaaaagctatatgaacgaaatccatgtggatagttatgaactctctgtaactgaatccaaacttgcttggttcacacacatagttgctccaattctcagaacaaaacagatttctggttctagtggagaatcgcatgagatacttgatgcggagatttcagcatgtgttctgcagttgattaatatttgtgacag

SEQ ID NO: 26301 - DNA, 255 bp, Glycine max
  Clone ID: 700904947H1
cccaaagtgcttctctcctctgtctttttctctctcttgctatccttttggctagtggcactgctgcaagtgcaactccaagaagcgcagtgccaagccaccatgtttcaacattcaacagaagcctttttccttccacttttctctttggaattggttcttctgcttaccaggcagaaggagcagcaagtgtagatgggagaggaccaagcatatgggacacctacactagacagcatactgaaaagatttggg

SEQ ID NO: 26302 - DNA, 201 bp, Glycine max
  Clone ID: 700904949H1
ttccaatcgttaacagtgtcagccaaatctgttacaatggcaagggcattaaaacgcaagcctcaatgttactgtagccatagatggtagtggagatttcaaaagcatcaatgaggcattgaagcaagtgccggagaaaaaccgaaagccatttgtgatctacatcaaggaaggcgtttaccaagagtatgttgaagttac

SEQ ID NO: 26303 - DNA, 252 bp, Glycine max
  Clone ID: 700904950H1
gcgggagctactccgtcctgtgttttctgtgcgattgccgccaaatccacctctagcaatactcttctttactccgacgataaggttgttgcttttcaggacattaatccatccgctttcaggcattacttggttgttcctgtggcgcacattcctactgttaaatatcttcagaggaaaactgacgactattctttggtgagtcacatgttagaggtggggaagacgttattaaatagagatgcacctcag

SEQ ID NO: 26304 - DNA, 251 bp, Glycine max
  Clone ID: 700904951H1
ggaaatggaagatgatgtggtctgaggcacctcttggtattgtttccccattgatggtgagggtgttggcagcaaagattcccaattctttatgcttgatattcaagtcatatgacatactgaaaggtcaggtcaggggcatgctattattcccattttcagcgaggaactgatgatactggttatagtgctgtaaagaaatattatatctgaaattttgtttctgccgagagtaactaacctgtaaatgt

SEQ ID NO: 26305 - DNA, 251 bp, Glycine max
  Clone ID: 700904952H1
cacgaagatactcttaaagagggagtttgaaggagggatatcagatccctatttgtatttggggttgtctttctgaacaaccccatcatatatcattaagaggggtatcaagatcaatccttgattagcaagatcataaattttcattcatatacacaatttacatatcgtaacaagatcacatttgttttgttttgtgttgtttgtgttgttgttgtgttgttgatctcataataacaacatggagggtg

SEQ ID NO: 26306 - DNA, 249 bp, Glycine max
  Clone ID: 700904953H1
accggagcaaaaaaacttgttacgatggtttcttccgacaaggatccacgagaggaagtccttcaagcatggtacatggatgatagtgatgaagatcaaagactcccccaccacaaagaacccaaggagtttgtctcgttggaccaacttgctgaacttggagtccttagctggaaattagatgctgataaccatgaaaatgatccagagctgaaaaagattcgtgaagagcgtggctacacctacatg

SEQ ID NO: 26307 - DNA, 249 bp, Glycine max
  Clone ID: 700904955H1
gtttattcaagtttatagttcttacaagattggggaaaaagaaaaagaaaaagaaaaagcatacaacgatggctatgaatggatcacctcgacggtgggacgtgagattagttttgacattttctctacttttaatttcagcctctgtttctgctcttgaacatgtaaaccacaaaaagattgatcccaccaccgctgaaactagttttcttggcaaagtcatgaactttttgtggagctcatctgggt

SEQ ID NO: 26308 - DNA, 249 bp, Glycine max
  Clone ID: 700904956H1
gagaggtgttggtgccctaatcgtgagaagaaaggaaagggaaaagaggaaaatggtgtgcataaggaaggcgacggtgaaggaccttctggcgatgcaggcgtgcaacctgttctgcctccctgagaactaccagatgaagtactacctctatcacatcctctcctggccccagctcctctacgtcgccgaagactacaacggccgcatcgtcggctacgtcctcgccaagatggaggaagaaaccac

SEQ ID NO: 26309 - DNA, 249 bp, Glycine max
  Clone ID: 700904957H1
gactcgtacctcgaccaaaatctctgcaacgtggattctaattttctctgtcttttccttcattattggtatgctcgtcacaagcaggatgttggacccaccggaatcaaacgggttgcttactgcgcagcatcagcgggaccaacaacagctacaagtgatctcaggggattgtgcaaccaagaagatgcagcccaaggatgcagtgagcgaattgcagtccacccatgaagccattcaagctttaga

SEQ ID NO: 26310 - DNA, 250 bp, Glycine max
  Clone ID: 700904958H1
agaggatgtcccctgtggtaatacagtggctatggttggtcttgaccagttcatcacaaagaatgcaacattgacaaatgagaaggaagtcgatgcccaccctatccgagctatgaagttttctgtctcacctgttgttcgtgttgctgttcaatgtaaggttgcatcagatcttcccaagcttgttgaaggtcttaagcggttggctaagtcagatcctatggttgtttgtaccattgaggagtctggt

SEQ ID NO: 26311 - DNA, 256 bp, Glycine max
  Clone ID: 700904916H1
ctcaatataagaccttctaacttattcttctcccatctattttataagcaaccttggggctttccaaggtagtagcattctcacacaatggcctcgtgttgctctcttctattgctctccttaatattccttctttcatcatctgtctctcatgcactttccaatgccgaagtctctttcattgctcgtcgccaattgttgcacttacacgagaatgatgaattatctgacaactacgtagataattatgaaacaa

SEQ ID NO: 26312 - DNA, 263 bp, Glycine max
  Clone ID: 700904874H1
cgtcgtcgtcgtcgcgaagaaaatcgagcacgaaggtgaaagcttcaaccgatgcgaacacgaacctgagcatgctcaacgaggaccttctccagaacattctagctaggcttcctgctctgcatttcgcttccgcagcttgcgtcagctaatcatggaactctctctgcaatcgcatcctcactcgccccaaactctcttccgcgatttctctcaacccttcgctccccgatgctgtcaacgaggttgttcacaaggttctt

SEQ ID NO: 26313 - DNA, 262 bp, Glycine max
  Clone ID: 700904875H1
ggaaaatgaagaacaatgccattgtttgcaacattggtcactttgacaatgagatcgacatgcttgggctggagaactaccccggcgtgaagcgcatcaccatcaagccccaaactgacagatgggtcttccctgagaccaacaccggtatcattgtcttggctgagggtcgattgatgaacttgggatgcgccactggacaccccagttttgtgatgtcctgctccttcaccaaccaggtcattgctcagcttgagttgtg

SEQ ID NO: 26314 - DNA, 261 bp, Glycine max
  Clone ID: 700904876H1
gggttttagcgcagttcttctagatttaaggaagatgggtaaggaaaaggttcacatcagtattgtggttattggccatgttgactctgggaagtccactaccactggccacgtgatctacaagcttggaggcattgacaagcgtgttattgagagatttgagaaggaagctgctgagatgaacaagaggtctttcaagtatgcctgggtgcttgataagcttaaggctgagcgtgaaagaggaatcacaattgatattgc

SEQ ID NO: 26315 - DNA, 260 bp, Glycine max
  Clone ID: 700904877H1
aacaacacaaggccatcatcatggcagctgcttctcctatggcaagccaactcaagtccaccttcactaaaactcttgtagctcccaagggcctctctgcctcttcaccactccacctcctgccttctaagaggcaatttagctccactgttagggccatccaatcagaaaagccaacctatcaagtgattcaaccaatcaacggtgatcccttcattggaagccttgaaaccccagttacatccagccccttgattgca

SEQ ID NO: 26316 - DNA, 261 bp, Glycine max
  Clone ID: 700904878H1
gaagagaagaagaaggttcaaaatccaatccatttttcatttcgaaagatcgtgatcgcaatgtccctctccaccgtgaggcagcggcgctcggagccgtctgatccgtcgccatcagaaccgtacacgaagctggacaagcccgagaaagcggaggagaaagacgaagggttggggtgggttttcccgttcgtggctcttgggttattgaggtacatgagtgccacctccaacatcatccacgatagcgacgaggtcttc

SEQ ID NO: 26317 - DNA, 263 bp, Glycine max
  Clone ID: 700904879H1
ctccaacagttcaaattcgaggacagccagtgaaccagaaggctggttgctgctcgacttagagagagacgaagtatttggggtcttagaagttcatgtgtctcagtggcatctaaaactagcttttcacattgctttcatatcaagattgttcgtcatgatttgttcctcttatcgttaagccgttgttaaaacttccattattttctatgtatttgattttaaaagaaaaaacatttgtacaaaattaggaatattggtga

SEQ ID NO: 26318 - DNA, 263 bp, Glycine max
  unsure (1)..(263): unsure at all n locations
  Clone ID: 700904882H1
ctcaaagccaatcggctcgagcttcttttctcttagcttctcttagtgtanaggttttctcgtgctccttggagaagagttatgcctttcaagcagcaagaaaggaggacacagaaagcaacaatcttcatcaatatactcatcttgttcacctcagctcactccttccttcatcttcttgcagctcttctaccaaaggtcgacaaacaaaagcatcattagaagtggtacacaaacatgggccatgctcccaactaaatgat

SEQ ID NO: 26319 - DNA, 263 bp, Glycine max
  Clone ID: 700904883H1
actccttccattccatcatcttctacccacaccaaaaatcctaaatgaaccccaagacaactcctcctcctcctcctcttcttcttcttttctctcttagagcccacaatcactttctccttagacgaaagattcgaagcctgcgtgcccaagacatgtgggaatgggcagaacataagctacccgttttacatccaaggcaagcaaaaacccttttgcgggcagccaggcttcgagctaacgtgcggtcacaacggcttccc

SEQ ID NO: 26320 - DNA, 248 bp, Glycine max
  Clone ID: 700904884H1
atttgagggttaatataatagaggcacaagacttgcagccaagtgataagggtagataccctgaagtttttgtgaaggctactctgggaaatcagaccttgaggactagaatctctcagagcaggaccatcaatccaatgtggaacgaggatttgatgtttgtggctgctgaaccatttgaaggagctcctgatctgaatgtggaagacagatgtgcaactaaccaagaggagtcgctgggggaggtg

SEQ ID NO: 26321 - DNA, 258 bp, Glycine max
  Clone ID: 700904885H1
gattgagtcatgggcaagcaagggccttgctatcactgtggagttacaagcacacactttggcgtaatgggccacctgagaagccagtactatgcaatgcatgtggatctcgatggaggacaaagggaacacttgcaaattatacccctttgcacgcccgggcagaaaatattgattatgaggatcaaaaggtttccagggtaaagagcatatcattaaataagaacacagaagtgaaattggtcaaacgaaagcaaa

SEQ ID NO: 26322 - DNA, 261 bp, Glycine max
  Clone ID: 700904886H1
cttgcagtgagttgcaatctggtacaagacagtatgtaagtaggtacttccgtactgctgttgaggttttgtctggtgatcaagtatcttgttcctaccttggaggctgcaccatcccagcggactgcatcaagttaagccattataggggttggaacagggattcttgatcaaccaacctgagtacagaattcttctggtgaatctgcagaaaataattactctgataaaaaggttaggcactttgaattcttttagctg

SEQ ID NO: 26323 - DNA, 262 bp, Glycine max
  Clone ID: 700904887H1
gagaggaagagggagtgagagagagtgttcttcgtttgctaccttctcccagaaatggttacgttcaggtttcaccagtaccaggtggtcgggagggctctcccaacggaagcagatcagcatccgaagatctaccgaatgaagctctgggccaccaacgaggttcgcgccaagtctaagttctggtattttttgaggaagctgaagaaggtgaagaagagcaatggtcaagttcttgctatcaacgagatttttgagaaga

SEQ ID NO: 26324 - DNA, 259 bp, Glycine max
  Clone ID: 700904889H1
ctcgcaagcaaaaagaaagaatcccaggcgaggagaaagatggaggggaaggagcaggatgtgtcgttgggagcgaacaagttccccgagagacagccgattgggacggcggcgcagagccaagacgacggcaaggactaccaggagccggcgccggcgccgctggttgacccgacggagtttacgtcatggtcgttttacagagcagggatagcagagtttgtggccacttttctgtttctctacatcaccgtcttaa

SEQ ID NO: 26325 - DNA, 256 bp, Glycine max
  Clone ID: 700904890H1
gctggatcatgatgaaagcatcaacatcaccctttaacctaaagtattaaaatgttggtttattattattactcatagctcaaaacccaattttaccctaccaattaaggtctctcatacagtagtattttatttgcactacgtactggctactttatttatttaagcagaagcaggtgagtgagtgagtgagcaagagtgaagagcgaagagaatggctcccaagggtttaatctttttggctgtgttatgcttc

SEQ ID NO: 26326 - DNA, 256 bp, Glycine max
  Clone ID: 700904891H1
gcacaatcatattggtacatacatgtcatgtatttataaaatccatgttacattaatttgttgatacatattgaattttacattttattatatcttcaactgcaaacattgcctcgccagggaataacaagacgattgaagaaagcaagtaaggaaattgaccaattcttggagcaaattatccaagaccacgaacataatcaatatgataattataaagtgcaaaaagctccacacaataacaaggactttgtgg

SEQ ID NO: 26327 - DNA, 258 bp, Glycine max
  Clone ID: 700904892H1
ctatcttcttcaccttgctctcaccttctgggtaatgtttgaaacttggtgttagctgagctgtttgacaaaaatgaatattgcacaagttacagcatggcagcctgggatttgtgtgaaaaatatgtctcagttgcaccggcttcaatctaaaccatgtgttataccaaagagttttggtcctctcacttgtgttctactgagcttaagagcaagacaatcgtttagctcgaaatgttggcccattttacaatctcg

SEQ ID NO: 26328 - DNA, 258 bp, Glycine max
  Clone ID: 700904893H1
cctccctggccgaaacggagccggatcaggccgcggaatccctaagccgtttgcgaaaatccgtttcccagcacggaaaccccactcagcgagtgggcttttacttctggcaggccctctcccgcagagaagaaaagggccataatagcacttgggatgaggagttaacactctcttacaaagccctgaacgacgcctgcccttactccaagttcgctcacttaaccgccaaccaagccatccttgaagccacccaaa

SEQ ID NO: 26329 - DNA, 258 bp, Glycine max
  Clone ID: 700904894H1
acacgctgccacaatatagttccgtgtatgttagtgcaaagtctggtccggtgacgcctcaatcttctgttcgttgggataatccaagcaaagagaaggttaatagtcatatcagaaaccggtccagccccttgcggaggttgttagaccctttattgaagcacaaggcatcagataaacacaattcagctcaaagcagtcaggcactagagggtggaagtgcaaattcaagcttcaggactattggtgtcaatgaat

SEQ ID NO: 26330 - DNA, 244 bp, Glycine max
  Clone ID: 700904895H1
atttagtctctaatttctaaaactcgtcagtgcaatagtataatggacaacttcgaagatgctacagagccagtgagtcctagtggacgattcttcaacaccacggtgctatatgcgtatgtttttggcttcttagaatcagaagttccaattgaattctctcaagccaagtatttgttcgaagatgtctttctacccgtcaatccacacttttcttccataatggtgagagatgaagaaggag

SEQ ID NO: 26331 - DNA, 251 bp, Glycine max
  Clone ID: 700904903H1
gcacaatatcttagaaagcgaatactgattccagataagaaactaggtactcttactagtgatattgctgggcagttgaaagatctaagacaaggccgtgtagagtttaatatggaaagtaaatcaattttgcatgtgggacttggaaaggtaagctacaaagaagaggctttacgggagaatattagtgcatttatgaatgctgtattgcttgtaaagcctgctggcttaaaaaagacttccaaatatgc

SEQ ID NO: 26332 - DNA, 77 bp, Glycine max
  Clone ID: 700904907H1
cgagaatagagaatggtcaaagtaaaaataaaatgaaggaattaaaaatggaaggcgtgcttctccacacaacatac

SEQ ID NO: 26333 - DNA, 253 bp, Glycine max
  Clone ID: 700904910H1
gtgagttacagacacaacacaacgcacttcttctcactgtccccatggcatcgagcacgatccgcaaggcgattggcgtggtcaaggaccaaaccagcatcagcattgccaaagtcgccggcaatttggcccccgacctcgaggtcttaatcgtcaaagccaccagccacgaacaagtccccgccgatgaaaaatacgtccgagaaatcctgacattgacgtcgctttccagaagctacatcaacgcttctct

SEQ ID NO: 26334 - DNA, 253 bp, Glycine max
  Clone ID: 700904911H1
tttcctttcattttccctcactttctcgctccccaaacgcccctctctctcctccaatggccgaccagctcaccgacgaccagatcgccgagttcaaggaggccttcagcctcttcgacaaggacggcgatggttgcattactaccaaggaacttgggactgttatgaggtcacttggtcaaaacccaactgaggcagaactgcaggatatgataaacgaggttgatgctgatggcaacggaaccatcgattt

SEQ ID NO: 26335 - DNA, 253 bp, Glycine max
  Clone ID: 700904913H1
ggaggagagtgtttctcctcgccaaaggagatatggctgattccagaaatcgcttgctgatacatacgcactccagtcttatttggcgaggaggagagtgtttctccaaaaaagcccactactttgcctgaggtggccaagcagcgtgagctaagtggaactttggaaagtgcagactctatattgaaaaagcaactctctgatgcgaagtgcaaggagcttagtggtcatgacatatttgctccaccaccag

SEQ ID NO: 26336 - DNA, 265 bp, Glycine max
  Clone ID: 700904873H1
tttctcacatctctcctctcctcttctcttctcagcacagctaaagcttttaactttcaacctcttctgaatccaaataacctttttctgtttccaaaacacatactatatatctctctctctctctctgtttttcggtttcctctgatcatgggtcgtccacccagtaatgggggcccagcctttcgcttcacccagctgggggtatcagaaatggaagctattcttcaagaacataacaatgctatgccgtcacgtgatgttc

SEQ ID NO: 26337 - DNA, 272 bp, Glycine max
  Clone ID: 700904830H1
gaagaaaaggcgaagatcaaaatgactccagctgctgggttcagaggttatcaaaggcttggagaaaatataactaaaggtgtacctgacatgcatgaagctattgattgctatagagaagtgaccaaggacatgtatggagatcttggcaaagttatggaaggaagcaatcaatggccacaaaatcctccaacattcaaagttcttatggaggagtatgttagtctctgcagagaccttgcaaggaaaattatgcgtggaatcgctttagc

SEQ ID NO: 26338 - DNA, 178 bp, Glycine max
  Clone ID: 700904834H1
gactgaggttgggtttggaaggcaagggcttgtgttgtcacaatccaagagagaagtaatggcgaacatagacatcgaagggatcttgaagcagcagcagccttatgatgggcgcgttccgaagacgaagatagtgtgtactttgggccctgcttctcgatccgtagaaatgaccgag

SEQ ID NO: 26339 - DNA, 275 bp, Glycine max
  Clone ID: 700904836H1
gcgacttcgatctccggcaatctaactaaaacggcggcgtatagcgggatctgcgagcatggagggtgagaacgcgagcaaggtgatcgaattggtgaacgagatagccagcatctccgagtacaggcctccggtgaagaagcagtactgcaacttggcgcggaggctgaagcttctgatcccgatgttcgaggagattagggacatgaacaaagacgcgcttcccgaggacacttccaacgccgtcctcgccttcaaggaagctctccaatccg

SEQ ID NO: 26340 - DNA, 274 bp, Glycine max
  Clone ID: 700904839H1
cagagtttcccgccctttgaggggggaatgtcagcttccttggatacatctgatcatacatcagacgttgagagtgaaagaacaaatggaaaaccaaagaataagcttcctcgtcctcgtaatcctctaattgatgctattgctgctcatgacaaaagcaagcttaggaaggttactgaaagggttatgcctcaaattgcaccgaaggtagatgaaagagattctttactagaacagataagaacaaagtccttcaacttgaagcctgctgtga

SEQ ID NO: 26341 - DNA, 270 bp, Glycine max
  Clone ID: 700904842H1
gagaaagtgtaaagaagaggaattatctgcatcaatcaaccatcatcataatcatgtcttgctgtttatcttgctgcgcgtctttgacctgtggtctctgcacctccactgcatcttgcatagcccaaaaatccgctagaatcggttactgtggtctcttcggtgtctctctcgtcgtttcgtggatcctcagagaagttggagcacccctcttggagaaattcccatggataggtggcacatccgataccaacacaacggggtggtatc

SEQ ID NO: 26342 - DNA, 268 bp, Glycine max
  Clone ID: 700904843H1
accagagcgaatccttttcttctcccttgttttgaacaccgtctgtggatacccttttgttaaagccaattgttttctcagatttgaggacaaggaggtggtgggggaggagataatacagggagaaaaacataatagagagaaaaataaaagcacaaacgtgaggctcttgttgaaaacacacaattagatataccagttgtcaatttgtcatatctgaaatttctcaagttgtgtttgtttgtcgtagaattgtagggtcagctgc

SEQ ID NO: 26343 - DNA, 269 bp, Glycine max
  Clone ID: 700904845H1
aaatcttatcttagcaatagctacccctatcacaacaatactatggtaggcaaaaacaccaaatgggagaggaaaaagagcagcctaagagtgaaaccgagaagaagcccgaggaggccgccgcagcccccaagaaagacgacggacccatccctgtcgtttacaaactcgacttgcattgcgagggatgcgtcaagaagatcaaacgcacatgtcgccacttccaaggtgtggaaaccgttaaggcagatctatcgtcgaacaaagtg

SEQ ID NO: 26344 - DNA, 269 bp, Glycine max
  Clone ID: 700904846H1
ccaaaacactgccttgaagacatggggaggccgcccagagaacgtgaaggcagcacaagatgcactcgcattccgtgccaagtccaactcactcgctcagcttgggaagtacactggtgagggtgaatccgaggaagccaagaaggagttgttcgtcaaaagctactcctactaagatgtttgcagtgaatatgatacttgttaggcagcaacaccagcagttacagtaggtgttgacggacgatgaagtggaagactaatttgtctaa

SEQ ID NO: 26345 - DNA, 271 bp, Glycine max
  Clone ID: 700904847H1
gtgatacttgagaagaaggatacagaagtgatagaagagaagaaggaaagtgttgttcctattagtccagaggaagttgagatacggggaattcccctgcttggggacgagaggagcgatgtgattctgctaaagtttctccgggccagggatttcaaggtgaaggatgccttgagcatgctgagaaacacggtgcgttggagaaaggaattcggaatcgagggtcttgtcgaggaagatcttggaagtgattgggacaagtggtgttcat

SEQ ID NO: 26346 - DNA, 168 bp, Glycine max
  Clone ID: 700904848H1
ctgagatgatgccccctgagcaagaaacaactattgcaacaaacattccagccatcacaacccgacaagcgaccagctcggtccaccatgaatcagagggttcaaacactaacaaaatcaaaccaagtttagaattggatgataatggacttcctccacacaacatac

SEQ ID NO: 26347 - DNA, 257 bp, Glycine max
  Clone ID: 700904851H1
gtcctctgttgctgtcatgttttcaattgctgtttatggtgtccatagggtgcagtagtgtctgggctcatcttggtgctgccctcttgttgggcttgctttggatgcaaagcacttacgtgggtcatgactctggccactatgaggttatgtctagccctggctacaacaaattggcacaaatcctttgtggcaattgcatgactgggataagcattgcatggtggaagtggactcacaatgctcaccacatctca

SEQ ID NO: 26348 - DNA, 268 bp, Glycine max
  Clone ID: 700904855H1
ctcgagccgttctcttaggtttccgcaagatctgcaaactttggcttccaggaaattcgagaaggctcactccggcgacggcgccagtccaggcaaaatcttcattggagggttagccaaagacaccaccctagagacgttcgtgaagtactttgagaagtacggggagataacggactccgttataatgaaagaccgtcacacgggtcggccaaggggattcggcttcatcacctacgccgatccctccgtcgttgaccaagtcatt

SEQ ID NO: 26349 - DNA, 271 bp, Glycine max
  Clone ID: 700904856H1
ctcacgtcgcctcattccctggggtctgaatgaggggatttatttgaatgaagttgatcgagttctacgtcctggtgggtattggattctatcagggccacccataaactgggagaatcactggaatggttggaagaggactcgtgagagtctcaaagaggaacaggatggaattgagaaagtggcaaaaagcttatgctggaaaaagttggtgcaaaagggtgaccttgcaatatggcagaagcccaccaatcatattcactgcaaaatc

SEQ ID NO: 26350 - DNA, 265 bp, Glycine max
  Clone ID: 700904857H1
gttatgcaaatgatgtccaagaccatattgactatggaacttctggaaaagttgctggatttatagctgaaacaatgcagggagttggaggagctgttgaactggcaccagggtatttgaaacttgtttatgacattatacataaggctggtggtgtctgcattgccgatgaagttcaaactgggtttggtcgaacaggaagccattattggggatttgagacacagggtgtcattcctgatatagttaccatggcaaagggtat

SEQ ID NO: 26351 - DNA, 267 bp, Glycine max
  Clone ID: 700904858H1
gatttttcaagctctaccctcccttccctccactttcctccctcttcttcttttgcttctgtttttgaggcgaagaaggatggaattgtaatgctgggaatataattggagaattgggggaggagtaagggaggaaatcatacacaatgcccgagttccccttgagctcgaggttggaaagggtgcaaaatagcttgagagagaatggttctctggtgtatctcaatgtgtatgatcttacacctgccaacaattatctttacgcct

SEQ ID NO: 26352 - DNA, 267 bp, Glycine max
  Clone ID: 700904861H1
gagtaacctctcaatcctagcttcaattatattgattttttcacatttctaaatccatttctaccatatccttctccctctaattaaacctctctatccatatctaaaatttcaaaaagatctcaattaattagatttccctctctcctcctctctctaactatattgcaaacctttccctctgctttcaaaatcagcaaattcatgggtcttagagacattggtgcttcactgcccccagggtttcggttttacccgagtgatgag

SEQ ID NO: 26353 - DNA, 266 bp, Glycine max
  Clone ID: 700904862H1
ctcaggatgaggaagaaggatcagttattgatgaagaggttgctgaaccccctacagatttaagtcagaatgatattgttactgttgatgattcaacttctgctgtcctggatgatgcaccaaggagatcatatgcagccattgtcatgaaaagtcatgtagcatctggtcatgtctatgttcccagccgagctgcaagaatagcatctgctaaatccagtgaacaatggcctactactgccaaatcaacccctgtgcctgaggca

SEQ ID NO: 26354 - DNA, 267 bp, Glycine max
  Clone ID: 700904863H1
gtgagtttggaacttgaaagaaactagaatggccactttagacgaacgcctttctgcgaaaaggtggcttcctctcgaagctaaccctgacgtcatgaaccagttcctttggggtcttggccttccagtctgtgaggcagagtgcggtgatgtgtttggcttagatgaagagcttctggaaatggttcccaagccagttctcgccgtgctttttctttatccaattaccgcgaagtctgaagaagaaaggttgcaacaggaaaacgt

SEQ ID NO: 26355 - DNA, 167 bp, Glycine max
  Clone ID: 700904865H1
ataaaataaacactttggtgaaactttatattttgcatgttgtattcttaaaagaataccttataaacaaaaaaaaaaatctttatgaattatggagaaaaagagaaccaaatctgaaatatcttaaagtgtgggggtgtgtagtaaatgttaatatccctattaat

SEQ ID NO: 26356 - DNA, 264 bp, Glycine max
  Clone ID: 700904866H1
aatttttctctcaaccggcccaatttagcataagcccagcatggccaccgcaacagcagcagccacctcgtccttcatggggacgcgcctcctggaggcccactccggggcggggcgggtgcaggcccggttcgggtttggcaagaagaaagccgccgccccgaagaaagtttccagggggtcgggctctagctccgataggcccctgtggtatccgggcgccaaggcgcccgagtacctggatgggagccttgtcggagacta

SEQ ID NO: 26357 - DNA, 263 bp, Glycine max
  unsure (1)..(263): unsure at all n locations
  Clone ID: 700904867H1
gaaaaagagaagagcttatggtggaaggttgaagaaagagatgagtggaactggaacattcttctacggttcggtaattcagccgttgattcgctaccactatctatcaccaccaatccctattcgtcccttatgctgcatatcccctctcatcacctccattcactccaacgaagccgtctctccgcaaaacggaacgcttcgcttccagacagagcacaaggganacagcgaagaaccgcttcccgttccgtcactctctg

SEQ ID NO: 26358 - DNA, 265 bp, Glycine max
  unsure (1)..(265): unsure at all n locations
  Clone ID: 700904868H1
aatttctggctgcacaaaaggcatgtcctgcccatacagcataacttatgnagatggaagtacgacctctgggtcctatattaaggatgatcttacatttgatcgagttgttggtgatctccgtactgtgcctgataataccagtgtgatttttgggtgtggttctaaacaatctgggacattgagttcaactactgatacatcccttgatggaataattggttttggacaagcaaattcttctgtgctttcacagcttgctgca

SEQ ID NO: 26359 - DNA, 265 bp, Glycine max
  Clone ID: 700904869H1
caaagagcgactacagctacttctggacctgcaactggttttccacgcaacccacaacagaaaactgcaatgtctggcctgctcaatgatccaagtatcaaggacttggctgaacagatagcaaaagatccatcattcaaccagatggctgagcagcttcagaaaacttttcaaggagctccacaggatgctatgccgagctttgataatcaacaatatttttcaaccatgcaacaggttacgcagaatcctaattttatgacca

SEQ ID NO: 26360 - DNA, 264 bp, Glycine max
  Clone ID: 700904870H1
gtctcaaacaactgccagacattccttcaatctcaaagcaagaatgtcattatttcatttttggcagctttatcaataatcattcatgtgtccctctcttggctattcacaatgcaattcaagtatgggattcctggggcaatgatttcaacaattttggcatactggattccgaatattggtcaactaatatttattacatgtggttggtgccctgaaacatggaaaggtttctctgttttagcattcaaagatctttggcct

SEQ ID NO: 26361 - DNA, 275 bp, Glycine max
  Clone ID: 700904828H1
tctgaatggagagcgaggtggtgtccattgcagttttctaatgaaaacaacaaaatagacacctgttaagaaggaggacaacgatggtgctgccgctatttactgctttcattctctttgcttttattccgaatggattgttagcagttccttccaccgtcccggcattcctttggtcatcacattatgaactggcctctgaaaatatattgaaggaatctgtaaattaccaagtcatttctccgaaggatctagcaaaatctattttatctgaa

SEQ ID NO: 26362 - DNA, 249 bp, Glycine max
  Clone ID: 700904787H1
gcctcgctctgtttctgtatctgtgtttgcggctgaggattccgaacgagcgaccttcttcgtttctcgcaaagtttaagtcatcatgggtaaggaaaagactcacatcaacattgtcgtcattggacatgcgactctgggaagtacaactaccactggtcatttgatctacaagcttggaggtattgacaagcgtgtgattgagaggttcgagaaggactacgctgagatgaacaagaggtcattcaa

SEQ ID NO: 26363 - DNA, 142 bp, Glycine max
  Clone ID: 700904789H1
caaagtgcttctgtcctctgtgtttttctctgtcttgctatcattttggctagtggcactgctgcaagtgcaactccaagaagcgcagtgcaaagccaccatgtttcaacattcaacagaagcatttttcatccacacaaca

SEQ ID NO: 26364 - DNA, 247 bp, Glycine max
  Clone ID: 700904790H1
atcaggagagtatggagctttacaacaccaacaaacaagcacatttgcatccttagaatttcatgttaaactgagtaaaaagaaatttgaaataaaatgcaaaacataaggttgaaatgtgcttgtttgtttggcattcaggagagtatggagctttagtgctttacccttttttccagcagatattctcgcttaaccttccagtcttcttcagctaatgaccgatagaaaagcctaaataagaact

SEQ ID NO: 26365 - DNA, 247 bp, Glycine max
  Clone ID: 700904792H1
attgaattggtgatgaagtttttatacgtacaaatacaagcgagtgtcttgtgatgtaatgacactcttatgttgaagccaatgtttataaataactgaattcacaaactcattacccatgtgcagtagcactaagacaagcgacgagtttgtgtgcaacccttttaattaatcaacgtctactgattgataacatgtatttgggactactagtacttgaatgctctggtttgttgcatcaaaggca

SEQ ID NO: 26366 - DNA, 249 bp, Glycine max
  Clone ID: 700904793H1
ttaatatttcatcatttttttttcctttgaaaccagccaagagggttatttttgatccctcaaagctaatttctcattttcttttccgggactgaagaggttgtctatttgaaatctccttcatcctttccttattgttgaaaagtttttgtttttgttttaattaaccagcagttactcagttttagaaagacgcaggttgaatcatcatggcagctatgatggatttttacagcagcagcacagagt

SEQ ID NO: 26367 - DNA, 250 bp, Glycine max
  Clone ID: 700904794H1
atttgggggcgagtgatgtgcgaagtgagggagatgcagtagaatagtaatagtggtaacaaaaggcaacagagaacagaagagaaaggaaaagagagggtttggtgagttacccaagagaaaggatgaagaagagcgccagcagcttggttccaacgcaggaacctcaagctgcggttattcaagcggaaaatcgaatctttgggaggaagaaggaggcatggacgagcttcttgcagtggtgggttaa

SEQ ID NO: 26368 - DNA, 246 bp, Glycine max
  Clone ID: 700904796H1
ccacttgctagattggttgtactgacactactagccaccacgtttgtgctctgctccacttcgcactctccgccatcatcgtcatcatcatgcaagcgcttcattcccccaccctccgcacttctcccttggacctcttcggggccccaacaatgccgccgccaagcgacgcgcctcctctgccaagcgcgtgttcttcgtgtccgccacggtggcgccgaagctgtccgctccgcagcggcacaa

SEQ ID NO: 26369 - DNA, 120 bp, Glycine max
  Clone ID: 700904802H1
atcaactctttcaaaagggagaagaaaaggaaaggaaacaaaacgcacaaaggattattatagcaatggcagaacaaaaccaaaaccagacaactgaagctacaaggcaccaagaggttg

SEQ ID NO: 26370 - DNA, 262 bp, Glycine max
  Clone ID: 700904804H1
atgcaaaacaccccataaaaaaaatgatgcatctaagcttatattttaccgttgttgccatagcgctcctattttcatttacatcttcttcagcagatactcatgaaaactttgttcaatgtctttataattatcccaatagcggaacctcaatctccaaagttgtttacacccagaccaactcctcatacacgtctacactagattcttcaattcaaatttctagggtcttaaacgcaagctcaaaacccttgtcattgtg

SEQ ID NO: 26371 - DNA, 279 bp, Glycine max
  Clone ID: 700904805H1
ctaattctccaagaataagagaatccaaaagtctctcaaaaaataaccatgatgatgcatgtcctttgcttctcagtgttcctagcagcagcaatgcaaggaacactggcggttgaatacagtgtcaccaacaacgccctctcaacccctggtggtgttcgtttccgtgatgcaataggggacgaatacgccaaacaaacacttgactcagccacccaattcatatggggggccttccagcaaaacgctcctgctgatagaaaagatatacaaaaaata

SEQ ID NO: 26372 - DNA, 282 bp, Glycine max
  Clone ID: 700904806H1
agcttgtttctaagaaatttcgtgggtctaagaaaaagaataaacacaatgagggtgagtcaggtagtgaaatttcaagtgctgtgggagaagaaaagttaccaattttagaaattgaagaggaagaggaggaagagaatggggataataagtcaagtaacactaaacctgattgcggaatcacttgttcctatgagaagaaagtgaatagagttgagaattcaggttcttccatggttttagttatgattattgcccttgttgggcttcttttgggtcgtt

SEQ ID NO: 26373 - DNA, 281 bp, Glycine max
  Clone ID: 700904807H1
attttctctcttctctgcttcttcttgttcaaatcttaggagctgaggagaatcaatcgagagaaatatgtctggtatcgctcgtggacgccttgctgaggaacgaaagtcatggcgcaaaaaccatccacacggtttcgtagagaagcccgagactctacctgatggcaccgtaaatttgatggtctggcattgcactattcctggcaagaccgggactgattgggagggtggatatttcccactgacaatgcacttcagtgaagattaccctagcaagc

SEQ ID NO: 26374 - DNA, 277 bp, Glycine max
  Clone ID: 700904808H1
tacaggtttcatctgatgttaacatgcaaaaggaagaagatgaagaacttcgctttcctaatcaccctgtatgttattttttttccttggcaagatattagtgaaaatgtttctttacttttgtgattttcttatgtgcttgatgtaaccgtatatattataatatccttactggaaatatcaaattctcttcagcttatcgtgagagacgggaacagaaggctaatgcaagacataggtaagcaaaacaaagtattttggatgctttattaggtta

SEQ ID NO: 26375 - DNA, 72 bp, Glycine max
  Clone ID: 700904809H1
ctcctgctccttattctcctctttcacgcggcggaagcacggggacagtggcagctcctccacacaacatac

SEQ ID NO: 26376 - DNA, 275 bp, Glycine max
  Clone ID: 700904810H1
taaaatcatgtgattatagaacattggctattggtgatggtgggaatgatgtaaggatgatacaacaagctgatattggtgtgggcatcagcggcagggaaggattgcaggcagcaagagcagctgattatagtattggaaagtttagattcctgaagagattaattctggtccatggccgctactcttacaaccgtacagcatttctttctcaatattcattctataagtccctactgatatgcttcatccaaatccttttttcatttatttca

SEQ ID NO: 26377 - DNA, 272 bp, Glycine max
  Clone ID: 700904811H1
cctttgttcactcttcttctcttgcggctagggttttagcgcagttcttctagatttaaggaagatgggtaaggaaaaggttcacatcagtattgtggtcattggccatgtcgactctgggaaatccactaccactggtcacgtgatttacaagcttggaggcattgacaagcgtgttattgagaggtttgagaaggaagctgctgagatgaacaagaggtctttcaagtatgcctgggtgctggacaaacttaaggctgagcgtgaaagag

SEQ ID NO: 26378 - DNA, 268 bp, Glycine max
  Clone ID: 700904812H1
cccaaaccctcctccattcccagccatctctctctttctctctaaaaccaagtctcgtttctctctcctcttgctgggcctcttcttcgggcttcccggcccatcgccgtctccaacgccacaaccttcttctgctttttcgatttagggttttcgcgcgctctcccttccttctcctggatctgctaggagaagcgctgaatgctctgagcttcaacgctgtttgttagatatggcgtcttcgtatcccggttccgttagtgccgca

SEQ ID NO: 26379 - DNA, 276 bp, Glycine max
  Clone ID: 700904814H1
ctcgagccgaatcggctcgagcggctcgagaagccttgctttctacttcacttcaaactagccaatctcgaagatggcaacagaattggcatctcccaattgggttccaaccgcagccgcatgtttggcagccttggccgccctcctcctcttcctcctccgcggtctccgccgccgtaaatacaatctccccccaggccccaagccctggcccatcataggcaacctaaacttaatcggctccctcccacaccagtcgattctaacgctgagtaa

SEQ ID NO: 26380 - DNA, 280 bp, Glycine max
  Clone ID: 700904815H1
gtgacataactggagctataaagaacagcaatggtcttgacatcccaagcctacttgagcattccaaagtgcacaggggagtaaaaggattcaatggtagtgatccaatagaccctaactcaatattggttgaagattgtgatgttctagtcccagcagctcttgggggtgtcatcaatagggaaaatgcaaatgaaatcaaggccaaatttattgtggaagcagctaatcacccaactgacccagaagctgatgagattttgaagaagaaaggggttgt

SEQ ID NO: 26381 - DNA, 272 bp, Glycine max
  Clone ID: 700904818H1
attaattgcaagaatggcacttcgttgcttggtgatgtccctttctgttctcttcactcttggtcttgcgagagaaagccatgccagagacgaagatttttggcatgctgtttggccaaacactcccattccaagttcattgcgagatcttctaaagcctggccctgcaagtgttgaaatcgatgatcaccctatgcaaattgaagaaacacagtacccgaaaaccttcttctataaagaagaccttcatccaggcaaaacaatgaaagtac

SEQ ID NO: 26382 - DNA, 88 bp, Glycine max
  Clone ID: 700904819H1
gtgatgcccaaaccgagaccacttcgaaagagcgaaacgcagtgttagcattgttcctcaacaaaaaaaaaataaaaggaggaaaaag

SEQ ID NO: 26383 - DNA, 136 bp, Glycine max
  Clone ID: 700904820H1
tttaacgttaactagtaactagtaacctcttagcattgaatttccgttattaatttaatcgatttgaacgtaattagtagctttgaagttttcttttattatatgagtagcttttattaaaacttgagattcactt

SEQ ID NO: 26384 - DNA, 276 bp, Glycine max
  Clone ID: 700904822H1
ccctcaccaccaacgccaaacaagccctaaatctctcttctctttcttcttcttcctttaaccatgagagagatcttgcacgttcagggaggccaatgcggtaaccaaatcggttccaagttctgggaggtgatctgcgacgagcacggcatcgatcccaccggaaagtacaacgaggaaggcaacagcagcatccaactcgaaaggatcaatgtgtattacaacgaggcctctggcggaaggtacgttccccgtgccgtgcttatggatctcgaa

SEQ ID NO: 26385 - DNA, 280 bp, Glycine max
  Clone ID: 700904823H1
aaaacatctaacaaatgaccttaaagatacatttacccttattgagttttgcctatgtcttatgacttacgcacacaacaataaaagtttgaattttcaacgaaggcgtccaaaccccaaacctacgcattttttcttttccccaaccaacagctcctctctttatgttcttgtaaattcttttggctaaagtttcagctttcagaattgaaaaaaaaaatgatcaaacaggttcttcttgttctgctcttcttggcctctggattgaccctctcagtct

SEQ ID NO: 26386 - DNA, 274 bp, Glycine max
  Clone ID: 700904826H1
atcttaaaacgtattgggcactggccgccattttgaattctggttgagggattgaagtgcgattataggtggaggaggatggcttgtaggggatgctgggaatgccttttgaagcttttgaacttcatattgacccttgctggtctggccatggtcggctatgggatttatctgtttgttgaatacaataaaactccggataatactctcactgtcggtgatgatcaaactctagttcaacttggccgacccatgctagtggctgtgtctctgt

SEQ ID NO: 26387 - DNA, 275 bp, Glycine max
  Clone ID: 700904827H1
gtcaaacagtcggtaactctttcttttcttttctttctttctccgatcgcatcgctcgcaaccacaatcatgccttcccgaagaagaactctcttgaaggtcatcattctctgtgacagcggggtggggaagacgtctttgatgaaccagtatgtgaataagaagtttagtaatcagtacaaggcaaccattggagcggattttttaaccaaagaagtgcaatttgaagataggcttttcaccttacagatttgggatacagctggccaagaaag

SEQ ID NO: 26388 - DNA, 250 bp, Glycine max
  Clone ID: 700904786H1
agcaagtggatcgccgaacagacccacgccaatcgccaacgccgcaccgaagaggtttctcgcgagttcgctcaggagcaagagttctttcgccaaaccgctctcatctccaaaaaagagaaggaaaaggtgggctcatgcaagctgttagtttcatgtacgttcgtactccgggctacaacgccgagagtgccaaagctgctgaaatgaacgacgagaagaaaaaagaggacatgagcaaggggcttag

SEQ ID NO: 26389 - DNA, 253 bp, Glycine max
  Clone ID: 700904741H1
accacattcaaatccaaatggccctttacattacactaataattggcctcctagtaaacaccctagtactctataaatagcatttgcatgcaccttagtcttcaccaaaatactcctcttggcatcttgtgttgtgtcctcttttaagctatttccttctcttaacacaattggttgtgccaattgccatagtcaccaaccaattaacaaaggtatatatatcatcatatcatcaccaaatgaaaaatattgg

SEQ ID NO: 26390 - DNA, 250 bp, Glycine max
  Clone ID: 700904743H1
cacaaggcagaaagcaagctcatcctagagttttaaaaatggcagcagcctcctccatggctctctcttccccatccttggctggcaaggccgtgaagctgggcccatcagcccccgaagtcgggagggtcagcatgagaagaccgtcaccaagcaggcctcctccggaagcccatggtacggcccagaccgcgtcaagtacttgggcccattctctggcgagcccccgtcctacctcactggcgagttc

SEQ ID NO: 26391 - DNA, 262 bp, Glycine max
  Clone ID: 700904749H1
caaacatacaatggctgcagtgctctgggctttggctttggtaagcctctgcggccagctaccttccaatgcccaagcacctgcaactgcgccggcaaactcaccacctacaaccccagctccaacatcaccaccttccgcacgccactggcggtaacactacaaccacaagtggtggcatcccctcccaccacaagtacaccaacaactacaccacaaccacctgcaattgtagctcccaaacccgcacctgtgacaccac

SEQ ID NO: 26392 - DNA, 250 bp, Glycine max
  Clone ID: 700904751H1
agcgctccgctccggagcgatgagtgagagtgagaagcagagggtaacggggaaggtgaagtggttcgatgaccagaagggctctgcactcataaccaccgacgacagcggcgaggaattcttcgtccaccagtactcatccgatccgacggcttccgcagcctcgccctcggcgagtccgtcgagttccttactgactctgctcccgaagccgcaccaaggctgtcgacgtcaccggccctgacgaatc

SEQ ID NO: 26393 - DNA, 249 bp, Glycine max
  Clone ID: 700904755H1
aagataactagaaacagtgtgatgaaaatgaaggtccttgttttcttcgttgctacaatttcggtagcatggcaatgccatgcgtacgatatgttccctctccgaatgaacactggctatggtgcccgtactccgaggtgaaatgcgcaagctggaggcttgctgtggaagcacacaacatctttggctttgagaccattcctgaagagtgcgttgaagcaacaaaggaatacatccatggcgaacaat

SEQ ID NO: 26394 - DNA, 248 bp, Glycine max
  Clone ID: 700904757H1
acaaaggttgctgtaggagataagattgcagtagtgctaagtgctaacacctgcagtgaacaatggcctctgcatcagcatctctgctcaagtcttcactagttcttgacaagtctgagtgggtgaagggacaaaccttcgccaaccttctgcatcagttgtgagatgcaaccccaccaccccatcaggcctcaccatcagagctggttcctatgctgatgagctcgttaagaccgcgaaaacagtgg

SEQ ID NO: 26395 - DNA, 253 bp, Glycine max
  Clone ID: 700904759H1
acctagttcgcttgcagtcacacaagaggccaatactattcatagctagagatgggtgaagaagtgaaggtagttgttccagaatcagtgttgaagaagcgccacaacgacgaggaatgggcgttggccaagaagaagaactcgatgctgccaagaagaagagagccgagagccgcaaactcatctacaacagagctaagcagtacgctaaggagtacgatcaccaggagaaggaattgattcggttgaaacg

SEQ ID NO: 26396 - DNA, 220 bp, Glycine max
  Clone ID: 700904761H1
caacgcaagattggcagcgtcatcggccgcggcggcgacatcgtcaagcagctccgcgccgacaccaaggtcaagatccgcatcggcgacgcgctccccggctgcgacgagcgtgttgtcaccatccacagctcctccacatacccaatcacttcgacgagaccggcgatctcgtctcgcccgcgcaggacgcgctttttagggttcaccagcgcgtgat

SEQ ID NO: 26397 - DNA, 247 bp, Glycine max
  Clone ID: 700904762H1
gacaaggacaagctcgctgacaagttggagtctgatgaaaaggagaaaattgagactgctgtgaaagaagcactggaatggctggatgacaaccagagtatggagaaagaagattatgaagagaagctgaaggagttgaagccgtttgcaacccaatcattagtgctgtgtatcagagatctggaggagccccaggcggtggtggtgcatcaggcgaagaagacgaggacgattctcacgatgagct

SEQ ID NO: 26398 - DNA, 123 bp, Glycine max
  Clone ID: 700904763H1
attacgttatctcacgattctttgactgttctcccacaccacacagatgtttctcatcctgctccttattctcctatttcacgcggcggaagccaagggacagtggcagctactccacacaaa

SEQ ID NO: 26399 - DNA, 257 bp, Glycine max
  Clone ID: 700904765H1
tcccaattaggatcgagaaacattggtagcagcgagagcgctggtgcaggtgggaggccgaagcttgtgttgcaacctcggacactgtcagtgagcaatgaaggggacaatgtggggaagcctaaaggggttaatccgttcggagaggcgaggcgagggagcaggttttggcggagaaagggcaggattggaagaagattgatgagcagcttgagagcgtcaagactaaggagacaactggtggtggtggtgatggg

SEQ ID NO: 26400 - DNA, 250 bp, Glycine max
  Clone ID: 700904766H1
agcaagttattagattttttgctgggccatcgacatgaagccctattccgcagagctgagctgaaaacactcgtaaatttgcatggtaatgaggctggaaaagggggggaactgacacatgatgaaacaacgatcatgccggggcacttgaactcagtgagaagacggcgagtgatgccatgactcctatatctgaaacatttactgctgatattaattcaaagcttgatagggaactgatgaatgagat

SEQ ID NO: 26401 - DNA, 249 bp, Glycine max
  Clone ID: 700904767H1
agcttgctcgtttggttatggacaaatccccgcattcctacctcgccttctccggcgccgaagaatttgctaggcaacagggcgcagaggttgtggacaacgagtactttatcacacctgacaacgttggcatgtcaagctggcaaaggaagcaaacacaatcctgtttgattaccgaatcccaacatcggggtacgagacgtgcggatccggtgtggagagtcactgcaaatgaatggactcccaata

SEQ ID NO: 26402 - DNA, 251 bp, Glycine max
  Clone ID: 700904768H1
tacaagctagtttatcgtgaggagaacacgaagttgcttgtactctatgttgctgcagtagttttggtagcatggccacgccatggcgcaggctaccaaaggttccctatccgaatgaaaactggctatggcgacgttcttcggaggtaaaatgcgcaagcttcaggcttgctgtggaagcacacaacatccgagatattaaaaccattcctgaagagcacactgaacaaacaaaggactacattaatggc

SEQ ID NO: 26403 - DNA, 250 bp, Glycine max
  Clone ID: 700904769H1
atggggtcagaggtgtctaaacagatggagcgaagaaagacaatccagacagagaagaagagtctgtacgatctgaaaagcagcggagaagactaccctggctccgactaccgtccccaagacagaaaaaactgatgtcccatctcgaccctcagaaactccgcatcaaccaaatcgtctggcccggcacccacgactccgcaaccaaaaaaattggcatccctctcctcactcgccccttcgcacagtg

SEQ ID NO: 26404 - DNA, 252 bp, Glycine max
  Clone ID: 700904770H1
attcgctgccactgcaacagggtaacctaaagttctctctttatcattcttattccaataccacaataaactcctccacttttcactaacctacgcaactcctatcactatccgtgcacataaatgcaatcaataccctttttctctctcttgaaattaccttcttcctctgtaagagctgattagccaggatcactaatttaacagcaacaaatggccaccttcattttcaaatgcttctgagacattatt

SEQ ID NO: 26405 - DNA, 247 bp, Glycine max
  Clone ID: 700904771H1
agatcaatcagtggagctccccacttgaacatcaatcttgaaatgaactattggcctgctcttccttgcaatcttagcgagtgtcaagaacccttgtttgattacatttctcttctgtctgtgaacggcactcaactgcacatgtgaattaccaagcaaatggttgggtggcacatagtaaatcagatatatgggcgagaacatcagcaggtcaaggtgatgctgtgtgggccttgtggccaatggg

SEQ ID NO: 26406 - DNA, 168 bp, Glycine max
  Clone ID: 700904772H1
gcttattctagaactcgacggcacgccacccaccgctgaggacatagaagatgttacggaggagcaagagaaggtagaagaagaacaagaagatgatgaaacaattgaatccgatgttgagctcgagggtgaaacctgccagtctgatgatgatcctccacacaacat

SEQ ID NO: 26407 - DNA, 245 bp, Glycine max
  Clone ID: 700904773H1
gtcggtccttcgaagcattttataagcctccaatttcctgaactacacccaacatacaatctttcaagtacacctccccagcttccatttaagaacgccactcactagaataggccaatggttaagtcttctgattgtgtactactattactgcagacagaaggggttcctgtgggaatcacttttgttgaaaatgcagtggcaaaaggggctgtttgtttggatgggagtcctccagcttacca

SEQ ID NO: 26408 - DNA, 248 bp, Glycine max
  Clone ID: 700904774H1
atcaggcatgcaaactggaggacatagccagtatccctttctttccaagacatccactgttaactctaggttactacctcaaggtagtggtggtattataagtgggagcagcagtgccctggtgcatggagctgtgctccttctgctgctcggccaccaaaccttggttttagtgctgaacccacacctcaaatcccttcacctgttaaagctgtttctgccatacccgctgagaagcccaacctcca

SEQ ID NO: 26409 - DNA, 250 bp, Glycine max
  Clone ID: 700904775H1
tccagaccttaatttttctctcattcgcttcaaatttcaggaaatcaattatggctcaaccctcaacaagaataggccttgctggactggctgttatgggccaatatctagcactcaatattgctgagaaaggtttcccatttctgtttataaccgaaccacttccaaggttgatgagactgtagaacgagcaaaacaagaaggaaatcttccagtttatggctaccatgaccccgaagcttttgttcat

SEQ ID NO: 26410 - DNA, 247 bp, Glycine max
  Clone ID: 700904776H1
gtcgaggcatcggcacgcacgggattggtatcttacttgacggtctctatggaacagggacaggttccactgtttctgtggaaaatgtaggactccttggcctaacccgagttggaagtcgccgagttgttaaatttctgctggttttatgatattcttctctactttaggaaagtttggagctgtgtttgcatccatacccttcccaatatttgctgcattatactgtgttctctttggccttgtt

SEQ ID NO: 26411 - DNA, 138 bp, Glycine max
  Clone ID: 700904778H1
cacacatatattgctttgtttgctagcttgtagtagtacgaattgcaggaggccaaatacaactctagagtaatatacttgtaggtagatgtagtgccccgtaaccggtcgtaaggccgagaatagtcaacgtttcca

SEQ ID NO: 26412 - DNA, 248 bp, Glycine max
  Clone ID: 700904779H1
gctccaatattccagttgggcacttctcaaaactgcacaagaagaagaagcttcaaccccaggaataagcacggtttctaaaatgttttgcaattttcacattattcttctaattgctcttgcacttttggtacaatatcatctcagcttggctccaaggtagaagtgcttcctggctttgaaggccctcttccttttgaactggaaacagggcacgctggattaggagaaaaagatgatgacatgca

SEQ ID NO: 26413 - DNA, 249 bp, Glycine max
  Clone ID: 700904781H1
aggctcgagaaggggccagattattgagcagtgtaggagatccaaagttgggaagctgttggagtgtgattttggggagagtaagtgtcattcccctagtagtataatgcagatgtttcaagggtcgcttttcttcttcagcctcaaggggattcgtataccagaagatctgcttttgattcaatgctggctgggcgtataccagtgttcttccatccgggttcggcgtacacccagtatacatggcat

SEQ ID NO: 26414 - DNA, 231 bp, Glycine max
  Clone ID: 700904785H1
aatgaatccaaaagcagagaatgcatggcaatatttgagaatttcattgagctgtgcttctaggaatgacatgttggaagcttgtgatagtcgtaatttggaccttctccagaaggagtttccactacagtagggcgcgtttgagtgaacagcttaatcaagcgcttagtgaataagtacttatcatataagcactattgtataagatttttttttttaataattgaagag

SEQ ID NO: 26415 - DNA, 245 bp, Glycine max
  Clone ID: 700904739H1
cgacaaatggtaggaacaaattgctactcaaacccggcaaccctgaatgcatcaagtggtgctggctatgttaccaacattgctggtgttaattcctatgtcactggttcccctctctccgtgctcgtctgttttatgtctccgatacttttgggatcaatgcaacactttttagggacttggcagacaaggttgcaagaaaaaacgggtgttattgtgtctgtcccgacttcttcaatggggac

SEQ ID NO: 26416 - DNA, 256 bp, Glycine max
  Clone ID: 700904707H1
atctaaggaaggaaatgctgccgagacactctacaaatttatgagacctgaagacactcctgttcagtatggaggactgaatcggcccagtgatttgcagaatggtcgctcaaaacctgcatctgagttcacaatcagtggggtcataaagtgtacatacatatagtacgtattgaggctggtgcaactatcacatgggacattgtagctggagtgtgggacttggaatacagtgctgagtttgtgccagatgctg

SEQ ID NO: 26417 - DNA, 222 bp, Glycine max
  Clone ID: 700904708H1
aatcgaaaagctcctagaaagtggtcgtgccttccttagcggtgatctggagtccatcgacaagaacttaactcggctggttggcgtcctgcagagtgtgggtgccggggagtgctggcacaaacacggcagcttccttcacacctcgtcgacccacctcgcattctcaagctctggaaagcccctcactctgtctgcctctgtggcctcttccacacaaca

SEQ ID NO: 26418 - DNA, 260 bp, Glycine max
  Clone ID: 700904709H1
gctttcacttcttcctctctgattcttctcattccttgccctctctcgctattgagcttttctttttaacacggaatacgaccaccacaaaagggttttgaggctttctatcactctaaagctcttagctcattcacctcttggtggtgtggtctattatgtaaactaccatttgtgcaattttttctcagatctatccaacttctcttttccatcctttactctgtttgcaaatcgccatcatcaccacttgatttgca

SEQ ID NO: 26419 - DNA, 261 bp, Glycine max
  Clone ID: 700904710H1
tttcaagaccaattgcactcacatgccatacctgaccataaagcagcagctggtgctatcagaggctatattaagttgaatgattctaacccaaagtctacagcagaggaagatgataatatgtcaaagttgcttccttctcagagaagaaaatgagacaaaagcagagaaaggcagaagcaagagccaaaaaggaggcagaagagaagaatgaagagtcaagtgccagtggggtatcaaagtctgggaagcggcacataa

SEQ ID NO: 26420 - DNA, 259 bp, Glycine max
  Clone ID: 700904711H1
atctcttctctctccacccaaaccccaaccaccgcccctgttccactctcgtatccgtcatgaaaggaggaaagtccaagaccgaatctaagagagccgatcccaaacttgctgtgaacaagaagggagccgccaccaaggcaggaaacccgccggcaaggggaaggcagcgaaagaccctaacaagccaaagaggcctccaagtgctttcttcgctttcatggaggagttcaggaaggcattcaacaaagaacatcct

SEQ ID NO: 26421 - DNA, 258 bp, Glycine max
  Clone ID: 700904712H1
gtcacttctggaatcttcgattacctgcaagagcgcgcaccaggaagcacgttgtatggtttcaaaggtggacctgcgggcattatgaagtgcaaatacgttgagctcacctctgaatatatttatccttatagaaatcaggcggctttgacatgatttgcagtgggagggacaagattgaaactccagagcagtttaagcaagcggaagaaacagctaagaagctagacttggatgggctcgttgttactggtggtg

SEQ ID NO: 26422 - DNA, 246 bp, Glycine max
  Clone ID: 700904713H1
atctcttcttgcttctatatattcttgctcctctctacttttcaattactctctctaccaaggagtgatggctgtgcaactgtgggaaaccctgaaggaagccatcgtggcctacaccggcttctctccttccaccttctcacggtgacggcgcttctttttgccgcctcactacgtcgtcacgggtctttttggttcatccgacgaccaccacgaccgccactgccacgcccacgaggaggagat

SEQ ID NO: 26423 - DNA, 224 bp, Glycine max
  Clone ID: 700904714H1
gttagaagtagtgaagaaaatgaaagtcattgttttcttcgttgctacaacaatttcaggtgcagaatggcaatgcaatgggtcagagcatgagcatgagcatggccacagctaccaaattttccctttgcgaatgaaaacggccccggtggccactacattccggaggtatccgtgcaaaagttggaggcttggtgtggaagcacacacgtcattgactggag

SEQ ID NO: 26424 - DNA, 260 bp, Glycine max
  Clone ID: 700904715H1
aactcatcatcaagggcttcttctgatcacatcaataataataagtcgacgaagcacaatgaaatggttcaacaccacaacatcaaaatgggattcatgggacaatcaaagccgccaacaactgaacacatagttgacaaaataatgaatcggaagcaagcagtgatgtcaacacaactcttggacattctaaatacaatgcttaccgtgctgccaccatggcgcttccagttgttccaatggatgaggtagccttgatg

SEQ ID NO: 26425 - DNA, 267 bp, Glycine max
  Clone ID: 700904717H1
tagagaccattcattgcactgatagcagcgatggggatcgatcttaaggctgggggtaagagcaaaaagaccacaagaacagcaccaaagtccaatgacatctacctcaaattacttgtcaagctttatcgattccttgttcgaaggacgacagcaatttcaatgctgtgatactcaagcgcttgttcatgagcaaggttaacaagcctccaatttctttgtcaaggttaattaagtatacgaaggggaaggaggataaattgctgt

SEQ ID NO: 26426 - DNA, 263 bp, Glycine max
  Clone ID: 700904718H1
aacggatctccccgttatagatctttctccctccctctacggcgagtgggacccacttctctgcgccgaggtcagccgcagcctcagggaaaccggcgcgctcctcgtcaaggaccctcgctgcaccgtcgaggacaacgatgcttcatcgacatgatggagcgctacttctcaaaaccccgcgacttcaaacaccgccatgagagaccccaattgcattaccacgttggggttacaccacagaaagcagaagttccaagaag

SEQ ID NO: 26427 - DNA, 257 bp, Glycine max
  Clone ID: 700904719H1
ttaagccaatcctgctcccggagccgcccagcccgacggcagcgcgtggcactcccgacatcttcgaatcaggtgtccacaccctcgtccgcacagccgttgtcatcggcaacggtttcccatcctccgagaatcacagtacggtttgctccgcgcccttggcctctcccacgaccacctcctattccgcgttacgaggccgagaggtggaatcgacgattggctccattggctttccctctctctgcatcgaaaat

SEQ ID NO: 26428 - DNA, 252 bp, Glycine max
  Clone ID: 700904720H1
attttacttgcctcctcaagagaaaggctactttgttttgaatgatgtttttagacatgttgatgaccaaggaatccaagggcctgctcatgatattggatctcctgcccctccggacactgtttccaatccttctgtgctgagacacaagtttccgagcaaatatctgcgacagctgaggatggtgatgaagaggcagtctatcaatcagaaaatggtcaagacgcaattgaagaagaggaagcacctgta

SEQ ID NO: 26429 - DNA, 256 bp, Glycine max
  Clone ID: 700904721H1
aaaagctgtggatgaggatcctgagaatgacctctatagaaagtccttgcaagcagccattaaggccccagaactacacatggagatccataaaaatgggcttggtctgatgagtaatgcgggatcctctgctacttcaaagaaaaggaatctaaaaggcagaagagcaatgactttaagtatgacatatttggatggactattcttgcagtgggcatagtagcatgggtgggaatggccaaatctaacattcccc

SEQ ID NO: 26430 - DNA, 253 bp, Glycine max
  Clone ID: 700904722H1
tatctctccctcactctcaccatggaggcgcaaccaccaaccccctcgactgcaccgcagcctctgccgccacacctcagctaccccgactccgtggaatcctcgcctcgctcccgcaacaccgactccagggacgagacttcgcgccggcgtccaccaagctccgtctcatgtgcagctacggcgggcacatcgtcccccgcccccacgacaagtccctctgctacgtgggtggcgacacgcgcatcatcgt

SEQ ID NO: 26431 - DNA, 248 bp, Glycine max
  Clone ID: 700904723H1
aatcactctagctgttgcaaatttctactatttttcaatggcttctgcagatgttgagttccgttgctttgttggtaggcttgcttgggtcaccggcaacgatgccctcgagaaagccttttcaatctacggcgacatgttgaatcgaaggttatcaacgaccgtgtgactggaaggtccagaggattcggatttgtgaccttcgcatcagagcagtcaatgaaagatgcgatcgcaggaatgaacgg

SEQ ID NO: 26432 - DNA, 257 bp, Glycine max
  Clone ID: 700904726H1
aatgaactgtcttcagaatctttctcgattctatgttttgcccttcgatacacttgttacgcgccaccgcaagaaccttcccctttccctgggtttcgtcaataattctcatcaaaatctaactatggcactcaaggctgctcaggttctataccgagtgcagacacaagtagtgccgataaggaggaagaaaagtctgagacatatagtcatagcatgacagaagccatgggtgctgttttgacttataggcatga

SEQ ID NO: 26433 - DNA, 105 bp, Glycine max
  Clone ID: 700904727H1
gtgagtgagtgagtagcagctagcaatggaaattactgccatggcttcttcagctactcctccacgaccttgtgttccaactccttccacttctccacacaacat

SEQ ID NO: 26434 - DNA, 256 bp, Glycine max
  Clone ID: 700904729H1
atcctttaccatcccggattctccctgccactacaaattcccccactcgcaaaccataggcagcagcagcagcagcaacaacaacagcaacgaagaattcgaagagaaatcaaatcgaatctcatttgatctgtgcgcgctgaggcggcggcaatggcggagcacttggcatcgatattcgggacggagaaggacagggtgaactgcccgttctacttcaagatcggcgcgtgcaggcacggcgaccggtgctcgc

SEQ ID NO: 26435 - DNA, 109 bp, Glycine max
  Clone ID: 700904730H1
cattgctcacgctctctgattggcctagccagtagtagccaatttgttggagctggttgggaatggcgtcgaaaccgaaatcaaatggaaattccaaatgcaacaaagg

SEQ ID NO: 26436 - DNA, 256 bp, Glycine max
  Clone ID: 700904731H1
aacgaatgaacaaggatttgggcatttgagagagatcatatggagaatactaagatgatgggggtgaagatacaggactatgcttctaatatggagagtaataattatccattctttgatttctctgaagatacacgctcttagggtttatggagctattgggtgcgcaagactatagtcctctccttgatttccctctatcgtcacacgtgtcagggcctcaaacctcttctgttaaggaaccacctgagactaa

SEQ ID NO: 26437 - DNA, 263 bp, Glycine max
  Clone ID: 700904733H1
atctcattaattaattcacaaactaacttagcttccaaattcatatggacctggcgacaaagatggtatcagagaggccagtggtgatattcagcaagagctcgtgctgcatgagccacaccataaagacccacttgtgtgatttggggtgaatccagcggttcatgagctggatgagatcccaagaggcagagacattgagcaagctctttcaaggcttggttgttctccatctgttcctgctgtattcatttctggtgagc

SEQ ID NO: 26438 - DNA, 239 bp, Glycine max
  Clone ID: 700904736H1
aacggttcgctggtccgtgcctaatgtgtttactggtggaaaccacattggtggctgtgactcaacaactgccctgcacactcaggggaagctggttcctctgctgatatctgctggagctgttgccaaatcaactgcttaaaggatctcccatttctaggttatgcagctaaataaaaataaaaacccaagtagttgggtcggctatataattcaggctccagaaactaatgtgtgta

SEQ ID NO: 26439 - DNA, 234 bp, Glycine max
  Clone ID: 700904737H1
attcagaaaccctaatttctcaaaatcttcagaggacacacagcacaaccacaacctccacagcctctcctacccaccggagccatggccgccgccgactcctccgccgctccatcgcaccagttgtcgcagagggagcggacatccagatgatgctcgcagccgacgttcacctcggcaccaaaaactgcgactttcagatggaacgctacgtcttcaagcgcagaaccgatg

SEQ ID NO: 26440 - DNA, 252 bp, Glycine max
  Clone ID: 700904738H1
gggactccctggaacaactggggctacttacatagactacttagtcactgatgagtttgtttcaccactagggtatgcaaatatatattcagagaagattgtacatctcccccattgctactttgtaaatgattacaacagaaaaatcaagatgtgttagatcccaactgcccacacaaccgacagacaaatggtctacctgaggataaattcatatttgcatgcttcaatcaactgtacaagatggatcct

SEQ ID NO: 26441 - DNA, 258 bp, Glycine max
  Clone ID: 700904706H1
caagcagatcaatctctctctctctctcaaccataatagtcatgggtttgaaggaggattttgagcagtacgctgagaaagcaaagactttgccaccgactcaatcaaacgaagacttgcttatcctttatggattgtacaacaggccaccgttggacctgtcaacaccagccgtcctggaatgttcaacatgacggacagagctaaatgggatgcatggtaagctgttgaagggaaatccaaggacgaagcaatggg

SEQ ID NO: 26442 - DNA, 251 bp, Glycine max
  Clone ID: 700904672H1
caaaaagaaagaatcccaggcgaggagatagatggaggggaaggagcaggatgtgtcgttgggagcgaacaagttccccgagagacagccgattgggacggcggcgcagagccaagacgacggcaaggactaccaggagccggcgccggcgccgctggttgacccgacggagtttacgtcatggtcgttttacagagcagggatagcagagtttgtggccacttttctgtgtctctacacaccgtcttaac

SEQ ID NO: 26443 - DNA, 246 bp, Glycine max
  Clone ID: 700904674H1
attggtccttgtctcttgaattgagcatttgctgcgaaattttgaagattcaagtattcaacgttccagaagagttctttgtatacatttatatatagcacctgaaattggctttggagttcttatactgtttgtttgtttggttttgaaattctggattttggattgtgttctgctcagttttgttaaggagaaagtggggtttgagagtgtgggcattatttattattagcggtttggttcaca

SEQ ID NO: 26444 - DNA, 250 bp, Glycine max
  Clone ID: 700904675H1
ctgtctacctaatttgttctgatctaactttggcctaggaagcccaccattgggttttggtgggctttcattgaaccaataaaaaacccatctttaaaaggtgttttgttttgaaggttccaatttgcttcctgtgtttctttccaacaaggaagggagggtgtgtaattaatttgtgtcaagtagtgagtgaggtcatttttggttttgcttttccccttgttagccattggtgttgcacaattggcat

SEQ ID NO: 26445 - DNA, 221 bp, Glycine max
  Clone ID: 700904676H1
gaatcggtgagatgaatcacaacaacaacaatagagcgaggtaccctcccgggatggggcttgggcgcggtggtttcaatccgaacccgagccagaacccgaacttgaaccagaacccgagcctgaaccagaatcatcacgcgttccaggctcggccaccgtaccatcaccagcaacaacgggtgcagtacgtgcagaggcatttgctgagcaacagcagc

SEQ ID NO: 26446 - DNA, 251 bp, Glycine max
  Clone ID: 700904678H1
aacactttccacttgtctccgaattagttatcttgagaaacattattcccattgctatatattatggctagcatgaaggttacatgggtggttgtgatcatgtgcatggccgtggtgggtgcaccgatgatggcgcaagccatgacatgcaatgatgtgacggtgaacatggcacagtgcctatcctacctgatgcagggaggaacaccttcaacactttgctgcagcggagtcaagacattcttggctct

SEQ ID NO: 26447 - DNA, 249 bp, Glycine max
  Clone ID: 700904679H1
ggttgagtagttcttcatcatagtcttaaacattaaaccttagcaaaactcaacaatgctagacatcaaaggctacctcgtactcttcttcctatggttcatatcaaccattctgatacgttccatcttcaagaaaccacagcgtctaagactcccaccgggtcctccaatttcaatacccttgctgggacacgcgccatatctccgttcactgctccaccaagcattgtacaaactatactgcgctat

SEQ ID NO: 26448 - DNA, 250 bp, Glycine max
  Clone ID: 700904680H1
atcaagacaagcaacgtgatgcagagggcgaagacggtaacgatgataaaggggacgatgatgacgatggagatggtggatttggggagggtgaagaggagttgtcatctgaagatggaggtggatatggcaacaattccaacaacaagagcaactcaaagaaggcacccgaaggtggcgcaggtggagcagaagagaatggggaagaggatgaagacgaagatggtgatgatcaagagatgatgaggat

SEQ ID NO: 26449 - DNA, 216 bp, Glycine max
  unsure (1)..(216): unsure at all n locations
  Clone ID: 700904681H1
gtagtagtagttgtagcccctgcctgagattaactatatactagttgttagttacttacttacatacatagagatagagtcaatggcaattgcagctgcaaactcatcacccaccatgagcctcagccatagccagagccaagaggatgccaccaccgcctccacgagcaagaagcctatcgncgtcgacgataatgatgatcacgggcacgacat

SEQ ID NO: 26450 - DNA, 256 bp, Glycine max
  Clone ID: 700904682H1
aagaaatcgaaagaagggaggagaagggtgtcaatggcagagtgtttgggtgtttcagtttcaactcttggctcattctctcttagtaggcccacaatcttttatcgatctcccattaatatctctctctttgcctctcaatctcatttccctgctgctgcatttggttatttgacaccttccaacccacacctgtacgccgctgtctcctccgactccaaggccgctacttcgctagacctactcaacccgatct

SEQ ID NO: 26451 - DNA, 255 bp, Glycine max
  Clone ID: 700904683H1
cattaagcttggttcatcaaaaggcctcatcacttgaagggttactatatactacttctgtgactgaaaagtgagctgaggtgtataactgcaaatgggtgtttggtggtggaagctgtttgttgctgctcttgctgggattctcttctcaacccaatattgtgcttcccaaaaagttccaaactacacatttatttacaatgcaacgacagcaccagacgtatcatactacgactacatcgaattggcggcggc

SEQ ID NO: 26452 - DNA, 80 bp, Glycine max
  Clone ID: 700904684H1
aacacaaggcagaaagcaagctcatcctagagttttaaaaatggcagcagcctcctccatggctctctcttccccatcct

SEQ ID NO: 26453 - DNA, 252 bp, Glycine max
  Clone ID: 700904685H1
tgtcgtccctagaacaaacaaagagaagaaaacccgggaacgcaacctagaacaaaaacgaagcagttgaagatggagcacgacgaagacgaagagccacctcttgctgttcagattcaagggaatgatgaatccgtttctcagcaatcttcttctgttggggtcactctcatcaccggttatcttggttcgggcaagtccactctagtgaatcatattttgaattcgcaacatgggaagagattgctgtca

SEQ ID NO: 26454 - DNA, 251 bp, Glycine max
  Clone ID: 700904686H1
tttcactttccatttccatttccattttttctggttcactttctcgatggcctccgagaaccccaccgccgacgacgccgtcaacggcttcaatcggccggaaatgttctcggaaaacctcgccggcaccgtcgacgcctacgaccgccacgtgttcctctgctacaagagtcacctgtcctggcccccgcgcatcgaggcctccgacgccgatcccttccccaagcgcgtcgccgccacttcaaagcccg

SEQ ID NO: 26455 - DNA, 247 bp, Glycine max
  Clone ID: 700904687H1
tccttctcctggatgtggctcccctcactctcggaattgaaactgttggtggagtcatgacaaagttgattcccagaaacactgttatcccaaccaagaaatctcaggtgttcaccacctatcaggaccagcagactacagtctccattcaggttttcgaaggcgagaggagtctcacaaaggattgccgccttcttgggaaatttgatctgtctggaattcctccagccccaagggtacgcctcaa

SEQ ID NO: 26456 - DNA, 248 bp, Glycine max
  Clone ID: 700904688H1
tttctctttctcttttgcattctctctgaattcgtatgccatggagtcacccggtaacgagcatgtggtgggtggcgcagaacccaacgacgtcgttacgcccttttcccacagagaagaacctcacaattcccaacccctcaccggccacggtgccagtcccggaaagatatttataggtcatttagcgagagaaacgaccattgcccaatttatcaagcactttggtaagtatggtagatcacgga

SEQ ID NO: 26457 - DNA, 245 bp, Glycine max
  Clone ID: 700904689H1
caatcatgtgaaggacgaggcaagaaggaagtgttgtgggaggaaagaggcagagctgcaatcaccagagtggaagcgcgaaacggtcctccccggctttccattttttctcttctgatgaaattttagttcatcccagttgctgattgagattgaatttaaattcgaaaaagcgtacttgtgccactgtacttttacagatctgcggctacgggctagcctatcgtatttttgcgtagatctag

SEQ ID NO: 26458 - DNA, 245 bp, Glycine max
  Clone ID: 700904690H1
ccaatgtgaacccaagtgaagttggggatattgttgtaggtagtgtattggctcctggagctcaaagagctagtgaatgccgaatggctgcattttatgctggttttcccgaaactgtgcctgttaggaccgttaataggcaatgttcatctgggctccaggctgtcgctgatgtagctgctgctataagggctgggttctatgacattggtattggtgccggtttggaatcatgaccactaatc

SEQ ID NO: 26459 - DNA, 231 bp, Glycine max
  Clone ID: 700904691H1
aaagaaatgacctgaagtctctatatattccaggtaacgaagaccttagcaacccaatgaaagcgtaaccatgaacggcacgtgtagcggagtactaggccgccgttacacgctactgctgtccgtcgtcaccgtttgaattacccaccgctactttgtcgtcattcttcttcttcttcccttttcattgaccttttccttccttcgtcctccaatggcgactgttccgca

SEQ ID NO: 26460 - DNA, 245 bp, Glycine max
  Clone ID: 700904692H1
accttatctcacccttctttgactgttctcccacaccacacccatgacactcctcctgctccttattctcctctttcacgcggcggaagccaccggacagtggcagctcctccacaaaaacatcggcactgtcgccatgcacatgcagcttctccacaacgaccgcgtcatcatcttcgaccgcaccgacttcggactctccaacctaaccctccccgacggaagatgccgcaacacccaaacga

SEQ ID NO: 26461 - DNA, 244 bp, Glycine max
  unsure (1)..(244): unsure at all n locations
  Clone ID: 700904693H1
catagctcaaaccgttttacctacatttcaatctgcatttggtttaaatgccgagtttgataggtttgacgacgtgcgtggactctttgaaggtggaattcatctccctacagatgcactcagtaaaattagccccctaccagtgctcaaggaaatcttccgcactgatggtgatacactcctcaagtttccacaanctcatgtctacaaagnnagtaagtctgcatggatgactgatgaagaa

SEQ ID NO: 26462 - DNA, 248 bp, Glycine max
  unsure (1)..(248): unsure at all n locations
  Clone ID: 700904694H1
accaaacaaagtcctaaaagaaaaccagcaataacaaatagtaatagtgaataacagaggatgtaaaaagcctcacactcagagtcacagaatcctcgcgcccacaagcaaaacagagacanaaaaaaaagcagaaatgggatcattcccaaaagcaaaacccaacaacactcacaccgacaccaacaccaacaccagtaacagggttatgggttttctcctagttttctttccggagagaataacaa

SEQ ID NO: 26463 - DNA, 208 bp, Glycine max
  Clone ID: 700904695H1
atcgactcacccaacgctttgtctaccgctccggcagcgggtagtaggaagaacgcgacgctaatttgcgtcccaataatgggagaatcagttgaaaagatggagattgacctggacaaagcgaaagccggaggcacggaccttgttgaaatgcgattggattgcttgaaaacctttgacccctatcgagatctcaacgctttcagtc

SEQ ID NO: 26464 - DNA, 248 bp, Glycine max
  Clone ID: 700904696H1
catttttcttggatttattgctagctcacaaggagtgcaggttgatccatagaaggtcaaagccattcaagattggccaacccccaaaaatataagtgaggtaaggagctttcatggcttagcaagtttctatagaaggtttgttagaattttttgcactttggctacacctctaaatgaaattgttaagaaaaatgttgtttttgaatggggtgatcaacaagagaaggcttttattgctttgaaag

SEQ ID NO: 26465 - DNA, 291 bp, Glycine max
  Clone ID: 700904702H1
cgcatgcacgcgtccgcgagcccagtgccacgcttgaattttgactgaagacaaagttagaacaaaacaacatgtcttgctccgtcgcggtttccaattcgccggtgttctctccttcttcttccctcttctgctcgaagccctccatcatctcttcttcgccggaatcctctccctctctctgtcgcatctcaaaccttcgaactcttctacgtcgtcgtcttgttcttcgccttctgctgctgctgcttcttcttctccttcttctccgtttcgacttcgccttcccaa

SEQ ID NO: 26466 - DNA, 252 bp, Glycine max
  Clone ID: 700904671H1
cgccatccaattgatgggtttcttcttcatgacagtcttcatgtttgctcttgctataccttacaatcattggaagaaccacaacaatattggctttgttgttatgtactcattcacattcttcttctccaactttggtccaaattccaccacatttgttgtgccagcagagattttcccagcaaggctaagatctacttgtcatggaatctcagctgctgcaggaaaggcaggagctatgttggtgcattt

SEQ ID NO: 26467 - DNA, 243 bp, Glycine max
  Clone ID: 700904704H1
ggcacagcacaccgcaggcctccctcaacatctcaactttgccttcgatctcactctcaggtgttgttgaagcttcctgtgttggcttggtatccctgcaagttctgctgtagcagatccccaggtgaaggtgtcatgtcaaatttctttcatgtttgaacaggctatcatccatttgggagcaactgagctgcttggagagtatctctcttcctctaggaaaaattacacaccctcaccaca

SEQ ID NO: 26468 - DNA, 256 bp, Glycine max
  Clone ID: 700904638H1
caaggacctacttgaagccgaaacagtgttcaaggaaatgccacaaagaaacgttgtagccgagtccgcaatgattgatgggaatgccaaagttggtcgcttggatgatgcccgtaatgttttcgacaacatgacccagaggaatgcattttcctggacaagtttgatttctgggtattttagttgtgggaaaattgaggaggctttgcatttgtttgatcaaatgcctgagagaaacgtggtgtctggactatgg

SEQ ID NO: 26469 - DNA, 257 bp, Glycine max
  Clone ID: 700904639H1
aaccgaacaatccgatatttgcttcctattggaatcaagtattaacccttttctctctgaatactctctactcaatacattgcttgctagtctcgtttcaaatattaattttaggttcttcgttacgcgttgtgttgcgttgtgcgtgagaaagtgcgcgtggtgaaaaagcatggcttctcagctcctgagacgaaccgtcggaagtcgtttccttgcaaaccctagggccttctccgccgctgcttccactccga

SEQ ID NO: 26470 - DNA, 211 bp, Glycine max
  Clone ID: 700904640H1
cgaattctgatcgcttttacgcgagaaagggggaccaccctctaagcctaagtattcctcaatgaccgatagcagtcagtaccgtagggaaaggtaaaagaacctatttagggatgcaatagagaactgagatccgtgcgacatcgtcgaagagttacaccttattgaatttataaacgatcactctaacggcgtacctttcatgatgggt

SEQ ID NO: 26471 - DNA, 82 bp, Glycine max
  Clone ID: 700904641H1
attctgcatctcacggcaattgtataggtcctccaagcaagagagacagcgagaggaaaacgaaaccagtggagagaaacaa

SEQ ID NO: 26472 - DNA, 250 bp, Glycine max
  Clone ID: 700904642H1
agagagtgatttcagtgagtgatcggtgttcacttgatctcatcataatcgtcagcgtcaattgaagaagatgccgatcagaaacatcgccgtcggaaggcctgaagaggcgactcaccccgacacgttgaaggcggctttggctgagttcatctcaaccttcatcttcgtgttcgccggctcaggctccggcatcgcctacaacaagctcaccgacaacggcgctgccacccctgccggctcatctccg

SEQ ID NO: 26473 - DNA, 174 bp, Glycine max
  Clone ID: 700904645H1
tcggctctagcagagtctagcgatgagtgcgtttctaaaagccttcgtggccattctctggggtgttctgtgtctgggtcgccatgagggagcggtagaagataagagcagatagattggtagacgtggcgaaatcagagattccgtataggttcgagcagcatgcggtggggt

SEQ ID NO: 26474 - DNA, 162 bp, Glycine max
  Clone ID: 700904646H1
gtaaggagagcacagcaatgaccaatatatattgcagagtggttctagtaatgcagtgctgctagaagatgggaactagtgaatggcaggatcgatcgaagatctagcgtcggctctgaatgccccttagcaagagaggcaggagatgtgcctgaaactggg

SEQ ID NO: 26475 - DNA, 253 bp, Glycine max
  Clone ID: 700904647H1
gaaagctaaagactcgtccaacagggtttaaaccttacaaaagatgttcggtagaggccaatgaaaacaggatcggaacagcctgcaaccaaggtgaagaaaaaggtcctaagagaatacgcttgaatggggaggcttcaacttgatgcttgatatatccatgcaaccacacaaagaaaatctctagttttgcatatattatttcttagtttccttgttcattgtctgtattgcttattttctattctgcagc

SEQ ID NO: 26476 - DNA, 249 bp, Glycine max
  unsure (1)..(249): unsure at all n locations
  Clone ID: 700904648H1
ctcttgacatggctacgcatacgccaaaaaatatcctcattacttgcgatgtgggantcatcgcatctcatggttgcgatcggcttatccggaattacccccagtacagaattgttgttcttgacaagcttgattactggtcaaatctgaagaatctcattccttcaaaatcagcgcctaacttcaaggttgtgaagggggatattgggagtgctgatcttgtcaactaccttctcatcactgggccat

SEQ ID NO: 26477 - DNA, 261 bp, Glycine max
  Clone ID: 700904652H1
gcacaattctctcttatcatctgtgttattacctctttccaaaatccaaattgtctagttccaccaaaccaaagcagcccagtatggcagcagcctcagcctcatccatgatatcaacaccagccttatctccaaccatccaaaagcaccatcatttgaagccatccaacgtgtgcttccaaggtcttagacccctcgcaaggttcaccaaagcctcatcagccaaagtgagcaccaccaccaaaagggtattccaaaggg

SEQ ID NO: 26478 - DNA, 257 bp, Glycine max
  Clone ID: 700904653H1
gttgtgaaaggttaagatcgagaaattagggtgaagtgaaggagaagctctagacaagctgacttgaaagttgaaacagaagatgggagaagcaacagaaagatatgcagttatgacgggtgcaaataaaggaattggattagagatagttagacagttagcttcagctggaatcaaagtgttgctcacagcaagaaatgagaagaagggtctccaagcactggaaacactcaaagactcaggtctacccaccttgt

SEQ ID NO: 26479 - DNA, 252 bp, Glycine max
  Clone ID: 700904654H1
gttgcgtgcttggagaggagtacagatgaagggaaagtggggatttcacttcagaaggatctcatggcgattgcaggtgaggctctcaagtctaagatgactactatgagtgctcttgttcttccggcttccgagcatttggctgttccgtctcagtctcattgggaggaaaatcttcaaccccaaatggaagccttagatgcgtgacttcatacaagcctgggagcacttctgcatccacgctggtggacg

SEQ ID NO: 26480 - DNA, 104 bp, Glycine max
  Clone ID: 700904655H1
cgacgtgcgtggactctttgaaggtggaattcatctccctacagatgcactcagtaaaattagccccctatcagtgctcaaggaaatcttccgcactgatgatg

SEQ ID NO: 26481 - DNA, 246 bp, Glycine max
  unsure (1)..(246): unsure at all n locations
  Clone ID: 700904656H1
tatcagcagcagcaccagtgctaagggtgtcatcggtaccggtattatcatcagtgaaagtgtcatcgacaccgtgactgctttagcgtcccacatatccatccagcttagcaatcatagcaaggctgatgtacatgagaaaggtatacttggacaggctacatgattttcaaggaacatacctcgggcnaccttngcanctnncnaagatncatacgatcttaattttgaatgggacagtacttc

SEQ ID NO: 26482 - DNA, 252 bp, Glycine max
  Clone ID: 700904657H1
gatactttgtgacatccctcccagacttgctagtcctgaatgcatgtgcaatgatgactctcatcatcacacttcctaattttgtgcatttgataccaaagcttttgttccaaagattacacggaagcaatgctagttttggcaatatgattttgatcccttgcgaattgcatgaggtgtcattttccacggaaacaacagctcttaagagcatcatcttttaagatgcacaatgtcaacacgcctatccct

SEQ ID NO: 26483 - DNA, 249 bp, Glycine max
  Clone ID: 700904658H1
ccgacgccttcgacgtcgccgccgaattcaatgcctccccctacgtcttctacccctccacagccaccgtcctctccatcgccctccacctccccaccctcgacaagcaggtccagtgcgagttccgagacctcccggaaccggtcaccatccccggttgcattcctcttcccgtcaaggactttctagacccggttctggagcgcaccaacgaggcctacaagtgggtgctacaccactcaagcgcta

SEQ ID NO: 26484 - DNA, 252 bp, Glycine max
  Clone ID: 700904659H1
caacttctctgtaaatgttagcaacaatggctacattagtgctaatgaccccttgaactggggtgcggcggcggaggctatggctgggagccacctcgacgaggtcaagcgcatgctagaggagtaccggaggcccgtcgtcaagctcggtggagagaccctgaccatctcgcaggtcgcggcgatcgcggcccacgaccagggggtgaaggtggagctggcggagtcctccagggccggtttaaggccagc

SEQ ID NO: 26485 - DNA, 158 bp, Glycine max
  Clone ID: 700904660H1
atttggaccttgagaacaatctcttgtttggtaatttggttgattttcaacagcctttggttttgctcagtcttgcttccaatcagtttgctggttctttgccttgctttgcagcttcagttcagtctctaactgtggtgaatttgtccatcaattct

SEQ ID NO: 26486 - DNA, 252 bp, Glycine max
  Clone ID: 700904661H1
cagaggtgaaacaaaccaactacccacctatggcggcctctgttgtagtgtctacctctctgtctgtgtgtttcaactatggctatcatcgtcgtccatccatttccgctctctcttgtcattcgaattccatcaccaaaacaaacctaaaactcagttcgcaatgtttctccaactcgaattcggtagccccgatttattgccgcaagtttgttgctcgcacttcaattggagaaaacgaagcgagaggag

SEQ ID NO: 26487 - DNA, 208 bp, Glycine max
  Clone ID: 700904662H1
atgaaggtgaagaagggttggctcgcggttcaagtggaagaagaaggtggcggtggagggtctcaaagatttgtgatcccaatttcgtactttataccctctcttcaagcacttttggataggctatgagttatggtacacaccgaggtctctaactgcagtcagtcgtgcttctcactcgtgagatcggagatcctccatacaccac

SEQ ID NO: 26488 - DNA, 233 bp, Glycine max
  Clone ID: 700904663H1
ttcggctcgatagtaatctctgggacttctggtctgtttggtagagacgagaggcatagagtagatggaaataactaggatgagtgaaaataggtgtaaataaagttgatattaaatgtgttttgtggaagagaaataaagtagagacgaagaaagagatattgaataagtggaaattagtgtgaaatagtatactaggtcccgtcatgtttaaaattagttgcacctttgtc

SEQ ID NO: 26489 - DNA, 247 bp, Glycine max
  Clone ID: 700904664H1
cgcattcgctaatttcaccaatgtatgttgtatggtgacgatggtctctgcaggctcttcagctttttgctaatgatattgtgtgtttggagtgaaaggggacaaggctagttgagcttgattgtgttgttcaacagtgaggacaggccagagacagtgtggaaggaggaggagtagaagttgatgtctctggcttcagagaatgcttgtctcggtcctggtgggatcctgaggttcgtcgcttgct

SEQ ID NO: 26490 - DNA, 151 bp, Glycine max
  Clone ID: 700904665H1
gtgtggtgtgtccctcttttaagcgagttccttctcttaagacaattgtttgtgacaattggcatagtcagcagccaattaacagagatatatatatcatcatatcatcaccagatgaaaaatattgggttgtgttgtcttgtggtggtgg

SEQ ID NO: 26491 - DNA, 259 bp, Glycine max
  Clone ID: 700904666H1
tgcacaagctcttgtatcatcatcatctcttaccttctcagccgaggctacaagacaaagtcttggaccaagatcactccaatctccatttggcttctcaagaaaagcctcctttcttgttaaggcagctgctaattccccttgttaaagcaagatcagacagacctttgtgggttggattcaaggcaaagtctttcctacttggatggcagccttccggggaataatgaatttaaccctcgggaactccggaccctga

SEQ ID NO: 26492 - DNA, 275 bp, Glycine max
  Clone ID: 700904668H1
accgaacactcttcttcaatcaagcgaaggtggtctcgattgcaagtgatccacgatacactctacgcttcacaaaaccttcaaacgcaattccacagaatacatctgatgacaccatgccaccaaagcctttacactatgggtcaataaatgatacaacgtgaagaagagtgcaatattgctgtgcagaggtggaattgataccttgcgagctgtcatgaagcttcagaagagaggtgcaaaaagattgatgctttactaatgttgggcaaccc

SEQ ID NO: 26493 - DNA, 259 bp, Glycine max
  Clone ID: 700904637H1
gtcgctactaagagttgctgcttcttcagccactccgcacctcgcagcctctgtgccctcaacaaccatggctgaaatcgaaactaccgttccagatcccacccaaatcgacgtgagactcttcaatcgctggagcttcgaggattttgatgttaagcatatgtctcgggctgattacattggagtgtccccagcaaagcatgctacatatgttcctcacactgctggtaggtactcattgaagaggccaggaaagccc

SEQ ID NO: 26494 - DNA, 254 bp, Glycine max
  unsure (1)..(254): unsure at all n locations
  Clone ID: 700904669H1
catttttgctttaaggagttcagtcctattttgctcctcttccttgtcttccacacaacatacgaggcgacancngtcgnagntcgggtctgagagttcgcaggcatgttaccaagcctttaattaagccgccaattagaagaggcaattttctcaagacagagagagaagaacatcttggtatcagtgttgcatccactctctgatggggggaggtgagggcggtagattggatgaatcaggatcgtgggctg

SEQ ID NO: 26495 - DNA, 255 bp, Glycine max
  Clone ID: 700904670H1
aacccgacacgtgttccaccacactttcctcgtcagtcttgctatgtctctgcaccaaaactcagtgttctgatgctaccccagaacacaagcaccatggacatgattcctgggaagatccgaaaacgaggctgttcctcctccgcctcctcctcttcctccgtgctccacaactaccgcttcaagaggactattctcgtcggaaagcggggcggatctagtacgcccgtgcccacgtggaactcatgagctcga

SEQ ID NO: 26496 - DNA, 262 bp, Glycine max
  Clone ID: 700904604H1
ggcactgagagagatggtgttgaatgggtggaattggaaatcgaagtgaaaagaacggttgaaagttcaagagtaagatgctattgcaattgcgctgctctcattctcaccacaaactgacactagcctgcagttgaagaaagaatagaggatcgtggtcgatggcgtctgctagccttggaagtggtggggtcggcagttcgaggtctgttaatggtggcttcaggggttcttccagttccgtcgattggcttgcagagag

SEQ ID NO: 26497 - DNA, 265 bp, Glycine max
  Clone ID: 700904605H1
accaactgcattggagcgggttatctggggattcggggatggatctaccattccagtgtttgaaactcccgttggaaaaataggtgctgccatttgttgggagaacagaatgccactgttaaggacagcaatgtatgccaaaggtgtggagatatattgtgctccaacagctgattccagggatgtttggcaagcatcaatgacccatattgcacttgaaggtggatgttttgttttgtcagcaaaccagtttgtaggagaaagg

SEQ ID NO: 26498 - DNA, 264 bp, Glycine max
  Clone ID: 700904606H1
ccgagaaactgggtggttcgatccttggcgcttcgtcacgcaatgaagaatagggttctcacactctccttcaaccgaattcttccctcactcccatcaaaatcctctctcttagccaccaccgccgccgccactgcctcctctcagctctccctcctcccctccttccaccactctcgctccctctcctccgcctcagctccttccgacgttgtccttgttaattccgaggaagagttcaacaatatccttacagagtccgag

SEQ ID NO: 26499 - DNA, 262 bp, Glycine max
  Clone ID: 700904607H1
agaaactgcattcgcagacacgctctgagagagagtattggaaggtttcgacgagtgatgatatacacatattgtgacggtagtgacattcaggacgaagcggtagcaatttgcgatttgcaatgagtaacgaaaaggctccttcatcagcgtctgcgagtagctacgagttgagcaaaggcatcactggcctcgacaaagttattcttcgggacgcacgtggtagctccgctggggtgtacttgtacgggctcacgtgact

SEQ ID NO: 26500 - DNA, 261 bp, Glycine max
  Clone ID: 700904609H1
ctctacgctttctcgttcgagatccctcaagggatccactaactgaaggagaaatggggttgacattcaccaagcactttcagccggcttttcgccaagaaggaaatgcgaattctgatggtgggtctcgatgcagctggtaagaccaccatcctgtacaagctcaaacttggagagatcgttaccacaattcccaccattgggttcaatgtggagactgtggaatacaagaacattagtttcactgtctggatgttggtg

SEQ ID NO: 26501 - DNA, 255 bp, Glycine max
  Clone ID: 700904610H1
gccttgaacttgaactatcgtgtcttcttggctttctctgttcaggatcaacatggatattgtatcacgagctttgctatttccgttggctatacttgtgctcatattaagcacaccttgctcaggtgcttttgggaagagtggaactaatgtgaaaacagctatttttctgtcccccaagtttgaacttggaccaggatcggtagccaataaatatgattatgacgctgattttccaagaggtcattagcactt

SEQ ID NO: 26502 - DNA, 192 bp, Glycine max
  Clone ID: 700904611H1
cggctcgagcgtgaagtgaatgacaatgagaaaaatcccatagaaatggtggtaattagaggcaatagcttggtcactgttgaagtgcttcaaattcaagtatttaagtgtaaattaacaattgttaagtgacctgacaaatgtaaatatggagtaatttatattataattgacatgctgtcatatatttat

SEQ ID NO: 26503 - DNA, 87 bp, Glycine max
  Clone ID: 700904612H1
ctcgagccgatccacagtttctggtatttagtatttacagaaagtggaagcaaaacttgacatgataagcaagaaccagttttcggt

SEQ ID NO: 26504 - DNA, 260 bp, Glycine max
  Clone ID: 700904613H1
gttttgaaacggactcgggctggcaccagggctgctgttttggctgatgaaggacctatcatggaggatggagttgaggaggatgaggacaacgaggatgaagagtatgatgatgactacgagagtgagtacagtgaagatgaagaggatgatcagaacacaaaaaataagcaacaagctgccaatggcactgtgaataaacatggtaaagctgcagaaagttcaggctctgaggaggaatgagaagtttttctaacatg

SEQ ID NO: 26505 - DNA, 256 bp, Glycine max
  Clone ID: 700904614H1
gtgcgattctcaaggaacgaagacaaagcgctggatcgagaatcttgattcggtttgatttttacgtttttgacttctgattcacgcgcttttcgacaagctgatacgctcttggatttttgcgggattcgatcgtatcgtatttcattgcaatcatgactcaggcggtggaggtcctgaaccggtatgggacggatctggttggggagccgagagattctgattctgagtgtttggcgggttttgatgtcttctg

SEQ ID NO: 26506 - DNA, 261 bp, Glycine max
  Clone ID: 700904616H1
aacatcatcatgtcggacgaagagcaccatttcgagtccaaggcagacgccggtgcctccaaaacctaccctcagcaagccggtaccattcgcaagaacggctacatcgtcatcaaaggacgcccctgcaaggttgtggaagtttcgacttccaaaactggaaagcacggtcacgccaagtgccactttgttggaattgatattttcactgccaagaaacttgaggatattgtgccctcttctcacaactggatgttcctc

SEQ ID NO: 26507 - DNA, 262 bp, Glycine max
  unsure (1)..(262): unsure at all n locations
  Clone ID: 700904617H1
tattttcctttttagctttgattagagtggcctagttgttgtttttctcaatgagaagggtttccactatgccatgcgtctggtgncgcntcggggtcccctggtgcacttgctagcttcagttaatgctccctttggtttggccactgaaatgtcaggggatgaagtgagcactgatggaaagggtttaaatgaagatttagcaaaacctaatctacaaggacatgaggaagaagcaaagtttaaaggttttttccaaagc

SEQ ID NO: 26508 - DNA, 266 bp, Glycine max
  Clone ID: 700904618H1
ctggaacaaaatttaaatgagggaccaaaattatgttttagcctaaataatatctctaaatatttggtctttaactgatccgtttgatccatgtagccaacctcacctaatgggacaaggctttgttgttgtaaatattagttgtgttttcatcataagtgaattgtgtgtgtctgtcaattctggtggggtatatggtggctgatattcaggtgagatttttgcaggtttgtatttttactgggtcagttcctttgcagaggttt

SEQ ID NO: 26509 - DNA, 266 bp, Glycine max
  Clone ID: 700904619H1
caacaaacaatattattcaatagaaaagaaagaaagatgagtccaacatgggtttttgtgttaggtattattgcagcaatgttggtggttgtgaatggacaatcatcagtgaagccattggtgaagacagtgaaggggaagaaggtgtgtgacaaagggtgggagtgcaagggttggtctgcttattgctgcaatgagactatctccgattactttcagacataccagtttgagaacctcttcgcgaagcaattcgccggtggcac

SEQ ID NO: 26510 - DNA, 91 bp, Glycine max
  Clone ID: 700904620H1
cggaagaagaggttttcgtttggttaagcaagatggatttggaagcagagaaagagcatgaagctcgcatttgcagtggcctcactctccc

SEQ ID NO: 26511 - DNA, 264 bp, Glycine max
  Clone ID: 700904621H1
cgaaaaccctgaacccaaagggttcgtttgtagcttcttcctccctagacataccgcgttcgccacctggaacccacaactgagtcgtgactcggttctttcacactgaaccatgcacgttttctctaacgctcgccgagcctcttggcttctcctctttcctcatctccgaacctcggaagctcctcactccaccgcgctctctctcttctcagggctcgcgcaacgtgattcccggcaagtgaacaccgtccggtacactgt

SEQ ID NO: 26512 - DNA, 258 bp, Glycine max
  Clone ID: 700904622H1
cttggcttctctcaaagattattcttctttctttttgccctgctctgtggggttagtttctgctctcaaatgctcttggcccttccttacttcttggcctttgcttctgtgtttgctgttgcactttctgggtgtaaggattttcagctgctcccgttgttccttttgtcgagcctgtcatgcctacccttgtcaattatagtggtgatgatgagctctatcatgggggttccttctgtcaaaatccattgatttggg

SEQ ID NO: 26513 - DNA, 261 bp, Glycine max
  Clone ID: 700904623H1
ggattcggacactgaagaaacaaaacccaagcatcccaagaaggagaagaaaaagaagaacaagaagagagaggttgaggttgtaccacctcaatctgaacagattgaggttgaggtcgaggttgtccgtgagcaccccaataaaacacctcctgttgttggttatttcccttccggatttgatccggtcaagaatcatggcggcggtccctccaattttcaagtttaccggcacaggagcatgcacagaggctggagctt

SEQ ID NO: 26514 - DNA, 262 bp, Glycine max
  Clone ID: 700904624H1
gccgtatgcgctagacttgggttgctccaatggaggatacccaagaaattgaggagcaagcacacaaagaagtgatttcagacaaaacatctgagaagcagcaggaaactcttgatgaaattctttcacgacacaggaaagagatattgcaactgcagaaaaaagaagttgagatgaaaaaagctgcagctagaggtagcaaggctgagcagaaagctaagaagaagcaagtggaagaagaggtttgtcactttctgctaag

SEQ ID NO: 26515 - DNA, 64 bp, Glycine max
  Clone ID: 700904625H1
attgaaaatgagtatgtacggtagggatccgggtggaggaacgttggagatccacgccacagac

SEQ ID NO: 26516 - DNA, 258 bp, Glycine max
  Clone ID: 700904626H1
agagaatggctcccaagggtttaacctttctggctgtgttaatatgcgtttcagcactgtcactgagtccttctgttgcgggggaagggcaaaataatggccttgttatgaacttctacaaggaatcatgccctcaggctgaagacatcatcacagaacaagtcaagcttctctacaagcgccacaagaacactgctttctcctggctcaggaacatcttccatgactgtgctgttcagagttgtatgcttcactgtt

SEQ ID NO: 26517 - DNA, 234 bp, Glycine max
  Clone ID: 700904627H1
ggaagatggtgttgccggcaccaattgccctatccaaccaggcacaaactacacgtaccacttccaggtgaaggaccaaaacggtagcttcttctactaccctagcctagggttgcagcgtgctgccggaggcttcggcggcctccgcatcaacagccgccaactcatcccagtcccctatgctgatcccgaggatgactacaccgtcctcgccggcgactggttcacaaagag

SEQ ID NO: 26518 - DNA, 258 bp, Glycine max
  Clone ID: 700904628H1
ctatttttcttcctcagtagtgtcatttacgcttctcttctctgcagcaactatgcctaaccctaaggtcttcttcgacatgaccatcggcggtcaatctgctggccgcatcgtgatggagctctacgccgacgtcactccccgcaccgccgagaacttccgcgcgctttgcaccggcgagaagggcgtagggcggagcggcaagcccctccactacaagggctcgtccttccaccgcgtgatcccgagtttcatgtg

SEQ ID NO: 26519 - DNA, 260 bp, Glycine max
  Clone ID: 700904631H1
aaagcattgaattcaaaaacttaagttcattccttgtgttttgctttcttcctcaaaaccaaacatgtcgaacacatgcggcaactgcgactgcgctgacaagactagctgcaccaagggaaacagctatggtgttattgtagagactgagaagagttacatcgagactgttgtcatggatgttccagcagctgagcatgatgggaagtgcaagtgtggcactaactgcacttgcacggactgcaccgtggccattaagg

SEQ ID NO: 26520 - DNA, 103 bp, Glycine max
  Clone ID: 700904633H1
cacagatgaaatagggatgtaagaacaagagtggcaaggttgtggaaaataaggaaactccaactgcctcctgtgcggattctaagctgattgggatttatga

SEQ ID NO: 26521 - DNA, 151 bp, Glycine max
  Clone ID: 700904634H1
ggcgcaaacaaacgagacctcataaacaaaaactcacaaacccatcatctctcgcattcgaaatttcatctcgcaacaaaacccaccgttttctgcgagaatcatacccacactcaccactctccaatctcccattctcccctgctttctc

SEQ ID NO: 26522 - DNA, 260 bp, Glycine max
  Clone ID: 700904636H1
caatttttctctcaaccggcccaatttagcataagcccagcatggccaccgcaacagcagccgtgacctcgtccttcatggggacgcgcctcctggaggcccactccggggcggggcgggtgcaggcccggttcgggtttggcaagaagaaagccgccgccccgaagaaagtttccagggggtcgggctctagctccgataggcccctgtggtatccgggcgccaaggcgccgaggtacctggatgggagcttgtcggag

SEQ ID NO: 26523 - DNA, 191 bp, Glycine max
  Clone ID: 700904601H1
aagagagagagagagagaagaagaagaaggaagcagaggaagaagaaggaggagatcttgagagatcaggtcgcaactgatcatggggagagaagttacaggaatgcaagttgtggacaagaagccaaatggcgtaataccagcttcaaatggtagttctaatgataaagtggacatttctcctaaaagga

SEQ ID NO: 26524 - DNA, 256 bp, Glycine max
  Clone ID: 700904562H1
gacaattcaacttaagagatcaatatggccaccaccactacccagcctccctctaatatctgttttttccttctgttgttgcttctagcacactttcatttgggcataagccaacttgagctgaattactactctaaaagctgcccaaaagctgaagagatcatcaaggaacaagtcacacaactatataaccagcatggaaacactgccgtttcgtgggtcagaaatctcttccacgattgcgtggttaagtcat

SEQ ID NO: 26525 - DNA, 255 bp, Glycine max
  Clone ID: 700904563H1
cttcggcttcgtttttgaggcagttaagtgcaaaaaaggagggatggaaagagagatactataatagtggtagtgcgtggctggggaatgagctttggagggtgtgacgcaagtgtgaaactaatggaagggtttaacatgcaggggaatgtggggaggaagagggtgatggtggtggttgatgacacctcacattccaagcatgcaatgttgtgggcactcactcatgttgccaacaagggtgattccttgact

SEQ ID NO: 26526 - DNA, 207 bp, Glycine max
  Clone ID: 700904564H1
cgcgtacgcaaactccggctccggctcgagcacagggagtggtggcatctggaattgccttcgctgtacaaatatggtgcattgacagaggtggtcctgtgtttgttgacgtctatcaacctgttcagacttttgttgtcgccatcatggcttccattgctttaggagaagagttttacttgggcgggttagtcccttccacacaac

SEQ ID NO: 26527 - DNA, 260 bp, Glycine max
  Clone ID: 700904567H1
caattcttccccctccacccacccagcatatctctctattcctatttattagcacccctcacattaccttgtgtcaccaactactttgactcctttaccataccattacaataattatcaaacctaaccagtaaaaatggtgaccgtggaggaaatccgcaacgctcagcgttcccatggacccgccaccatcttggccttcggcaccgccacgccgtccaactgcgtctcccaagccgattaccctgactactacttcc

SEQ ID NO: 26528 - DNA, 82 bp, Glycine max
  Clone ID: 700904569H1
attgatatatgtgtgtatttcctttgggcttgaaactcaaaactataataatgggttcttcttctcctccggacactagaag

SEQ ID NO: 26529 - DNA, 110 bp, Glycine max
  Clone ID: 700904571H1
ggaaaactttggacaaaaaatggagtgctacacaaggccaaacatgagtgactcgaacctctcagcagaggtagaagccaccatagaagcaaagaccagagagtactttg

SEQ ID NO: 26530 - DNA, 82 bp, Glycine max
  Clone ID: 700904573H1
gagaacttcaactgagggtgagagtgacacaaatctagggagcactactctaaaagttctattagattctacacaacatgcg

SEQ ID NO: 26531 - DNA, 255 bp, Glycine max
  Clone ID: 700904574H1
agatgatcaagtatctgattcttcttctgatgaaagaacacgatcgagcacgcctcaggacaataacactgaagctggaacaggagatggagcgagaaataacaatggtaataaaagcgagttgggtagggaagagagtccagactcagaatcacaaggttggggtcccaataagcttcagaaagtgaacccttccaatcctatggatcaatccactgcagaagccacaatgagaaaagctcgtgtctcagttcg

SEQ ID NO: 26532 - DNA, 255 bp, Glycine max
  Clone ID: 700904575H1
ttccattatgtataaattcataacatagtggttgagcaaacttctaaatcctttgtgtgatatatgataaaatatggaaatttcattatctgattctgttcatctctgttctattgattatgaattagcattttttatgaaaatgattatgcttgttgaggaattatcctttttagattatgcgatctcttatggataggggtgccaatcaaatccagcagcttggttggcccaaaaagagctcagaattgagcc

SEQ ID NO: 26533 - DNA, 256 bp, Glycine max
  Clone ID: 700904576H1
ggcgaccatcaccaccaccaccaccaccatcaagatcacgatcatcatcatcatgatcatgatcaccatcatcatcacgatggagagggagagaccaactcatgggtaggtaaggatgggaaggtgtaccatagccacgatggtctggcgccgcattctcacgaacccatttactcccccggctacttcaccagaagagctccaccgcttctcaacagaaacttcaacgaaagagccttcaacgtcggaatcggtg

SEQ ID NO: 26534 - DNA, 250 bp, Glycine max
  unsure (1)..(250): unsure at all n locations
  Clone ID: 700904577H1
tcctcattaagccgccactttctctctctttccttttcgtcttctttttcttcttcgttgggtttgttgccacttagtaagaaagagggtgtgaagagagtggggagaagatttggtgttgtggccatggcggagtctaagagtactgtgcttgttacgggagcgggtggtcgcacaggacaaatagtttacaaaaaattaagagagaggccanaccaatatgtggctagaggtctggttagaacagatg

SEQ ID NO: 26535 - DNA, 79 bp, Glycine max
  Clone ID: 700904578H1
caaaaaatgcactatcttgctttcaatccaagttcactttggtggcagttgaacgagtttgcaaccccacacaacatac

SEQ ID NO: 26536 - DNA, 256 bp, Glycine max
  Clone ID: 700904579H1
cactttcgttctttggctcttgcgttgagttcttcatcaacctccttgtcctcaacggtggcttcatcatgatcgttattaacttcctcacaggtcacctggtgcgtccccgatcgtaatgcaccaaattatttgtcttgcatcggaaatttggacgcgagagtaaagttggatgccatcacgcgtgatgactgcaggtactatgtttcattagctatgatggcttcaaaggcatcctatgagaatgcagcttacc

SEQ ID NO: 26537 - DNA, 259 bp, Glycine max
  Clone ID: 700904581H1
acttgatcggtggtgtatttggtgtgttgatgttttattaaacttttgtactcttgctttgaaactagttggttaggcaagttttagttttctattttatttcagacttttcaggtgctcatattcttatgatgatcatcaaactgcaaatatagtgagcccattaagctattactgaaatttgttgcagatttgaaattcttctaagatggatacttcttataggactggtggagtcaagtacgagtgcttgcttttt

SEQ ID NO: 26538 - DNA, 256 bp, Glycine max
  Clone ID: 700904582H1
tcgagcttcagcaatggtgtacgtcaaggctcagaaatcaaaagcctacttcaagagatatcaagtcaagttcaagagaagaagagagggaaaaaccgattaccgtgccaggattcggttgattaatcaggacaagaacaaatataacactccgaaataccgatttgtggttcgctttagcaacaaggacattgttgcacaaataatatctgctagcattgccggcgatttagttcttgctacagcatattcacat

SEQ ID NO: 26539 - DNA, 258 bp, Glycine max
  Clone ID: 700904583H1
gtgtaggaggtgattggaagttgttcgaatccagaatccgaaaaaagggcaccaccgtgtcaacaagtagaagcagaagctgtttttgttcttcgccgctgacactaatcgtttcttcaatgccttacgagaaggagttcgccgctgcaaaaaaagcagccatctctcgctgctcgtctctgcaagaaagtacagaaggctcttctgcaatccgatgtgcactcaaagtcagacaaaagtcctgtcacagtggctgat

SEQ ID NO: 26540 - DNA, 255 bp, Glycine max
  Clone ID: 700904584H1
gagtcccttctttgcatgttatccactgcctcagtcccggaccttggctaccggaacggggaggacaactaattccggaagtggcactttccttctcacaatgtgagtgtctcattgtactggtccccttttcttgtgcaaggtgtagctaagtcatactcagggccaaatcataataagttgtatttggatcatgttgatgagaggtgggcctaggatatggatcaaatggccctgattgtgttatcacttggg

SEQ ID NO: 26541 - DNA, 255 bp, Glycine max
  Clone ID: 700904585H1
tagaaacataaaaaactaaattacttttttaaaatataaatgaccaaacttaagttcagctgaaattttatgttgatactgttggagtattagttgatgcctgtagaaaacaaaatctagctctgttgagatcctatgagagaggcataatatatatagccacataggatttccaataattttccaaaggaatgtgcgtgaaacaataaagttttgacttctgcaaataggatatgattattgttgcagtgtggg

SEQ ID NO: 26542 - DNA, 249 bp, Glycine max
  Clone ID: 700904586H1
agaccttaaagtaccaaacttccaactcttctctcttctctcttcactcttcactcttgtcgtcatttcctcacaaaaccagtgttagtaacatctccaccttaacgatgtcggtaaaggagtgtcaccaccacaagggaaagaagcacaaactctggagacgcatcttctggggcatagtgatcttcgccttcatcgtgttgctaacagttcttataatctgggcaatcctaaagccttcaaagccaa

SEQ ID NO: 26543 - DNA, 255 bp, Glycine max
  Clone ID: 700904587H1
tcacactgaacactcttgtagttaatcgaatttctcattccgcagaaaccttcaactctggccgctgaaacgattccctaccagaacggcgtcgttgccagctccaacgattccaccgccacgggcaagcaatcgcgggagaacgaccgccgccgccgccgccggaagcagaagaagaacaacaaggcatctgaggccccggttcctaactcttacgaagagagtgacgatgcgaaagagaacaacgattcaaaa

SEQ ID NO: 26544 - DNA, 246 bp, Glycine max
  Clone ID: 700904588H1
caacaaacaatattattcaatagaaaagaaagaaagatgagtccaacatgggtttttgtgttaggtattattgcagcaatgttggtggttgtgaatggacaatcatcagtgaagccattggtgaagacagtgaaggggaagaaggtgtgtgacaaagggtgggagtgcaagggttggtctgcttattgctgcaatgagactatctccgattactttcagacataccagtttgagaacctcttcgcg

SEQ ID NO: 26545 - DNA, 245 bp, Glycine max
  Clone ID: 700904589H1
gggagaataagaaaaactgttaaaaatattttccataaaagataaaaaataacttgaagtggttattttgtgcataaatatgatagtttaacaatcacttgactcattgttgtttattttggtaaatactttttttaagttttacttttttgttcccatttggtggggtgcattggagccttgcagggaagtaggaggatacatggttatggacttggtttttatagcacacactctcagaaaag

SEQ ID NO: 26546 - DNA, 252 bp, Glycine max
  Clone ID: 700904590H1
aattgtttcaggactaccatcaattggctcccttgaatactgagagaattttaacatgtatttttctctcaggtcctacggttaagaagactattacatatccacatgtttagtacttctgtttgaacactacttttcgaccttgcatatctgaatcaatatatactgtattgtctgtttcactttcaaaaacatcgttattatttcgtagaggattgttgagattttcaggacaaaaaatctatattatat

SEQ ID NO: 26547 - DNA, 251 bp, Glycine max
  Clone ID: 700904592H1
ctcgagccgaatcggctcgagcaaaaatggcggcgaaacttcaaatctttacgggattgcaccccgcgccatttcaatctacttcttcctccactctctgcgtactcaagaagcctctcactacctccttcttcggcaccgcgcgagtggaagttctgaaacttagagtgatgaggattgtgaagcctacgcgtggcggaggtgctctcggtgctcgcatgaacctctttgacaggttcgccagagttgtg

SEQ ID NO: 26548 - DNA, 252 bp, Glycine max
  Clone ID: 700904594H1
aagtaaactaaactgaagaaaatgttgttaggtcacttgcaaaattgaagagatttaagacctctgtcttttctgttgaattagattccataatcttccattagtttccattctgccactttgctacaaagttcttctcctctttggaacacgcaattttaggcctatgcatttcagcaagttctgcaaacaaaattgagagttgttggtttataactacgttatatgtttcattgtctcagttgaaatggt

SEQ ID NO: 26549 - DNA, 252 bp, Glycine max
  Clone ID: 700904595H1
caggaattgacggaggcattcgaaatcggtgaagatggttgctatgaggtttcatcagtaccaggtggtgggaagggctcttcctaccgaatccgatgagcatcctaagatctaccgcatgaaactctgggcaactaacgaggtccgtgccaaatccaagttctggtatgctttcttcttcttcttcttcttttttcaaatgttttttattcgtattcgtactgattcaataatattttttttatgatttgt

SEQ ID NO: 26550 - DNA, 252 bp, Glycine max
  Clone ID: 700904596H1
tcccaatgctagagatttgataccagggatgcttgtggttgaccctatgaggagaatgaccatacctgagatccgtcaacacccatggttccaagctcgacttccgcgttatttagctgtgccaccaccagatacaatgcaacaggccaaaaagattgacgaggagatccttcaggaagtcgtgaaaatgggatttgacaggaatcaattggttgaatctcttgggaacaggatacaaaatgagggtactgt

SEQ ID NO: 26551 - DNA, 256 bp, Glycine max
  Clone ID: 700904559H1
aagagactcacctcctcaacgaagctcaatctataggggtgtcacaaggcatcgatggactggtcgatacgaggctcatttgtgggataagaattgctggaatgaatcacagagcaagaaaggaagacaaggttttcattattttgctctctataatctttagtttaattttctgatttccttcgctttatatgatttattgtcatattaattatcttgggttggttgacaatggcaatggaaaacaactggatgc

SEQ ID NO: 26552 - DNA, 266 bp, Glycine max
  Clone ID: 700904519H1
gaacgaagcagaagaagcatctcagaacagaaccaccgaacccactcagaagcaaatccgaaaacccctcatataatagtactggtattcagctgttcatgacaaaagcctgaaccgatcatgtcagaaggtgcagaaattgatgagcgtgtggaccttgacgaggaaaattatatggaagagatggatgatgatgttgaagaacaaatagatgatgatggagtggatggaggtgaagatgaaaatgctgaaggtagtgttgaaga

SEQ ID NO: 26553 - DNA, 261 bp, Glycine max
  Clone ID: 700904520H1
gaataaatcttatcagaaaaatattcatttgtctgcagttacggtctccatgacctcaaaattagatctctttactagtgattttgacttttggttctattattaccgacagtcctgtgtctccgacaacacaactaagtctttacgactcaatttcattagcattagcgtctcgcaatacgcaggtcgcaaaccggactcgctgcctagtactagcgcactttcattttgccgcttctctgttttcaacaaacgacaaca

SEQ ID NO: 26554 - DNA, 261 bp, Glycine max
  Clone ID: 700904521H1
ttctcttcttcaattcattctagttctggattccgactcgccgcattgactcggtccgggttggggtcgactcagttcggtttttcattctctcgcgaatctaatctataggaaaagctaagggcacatcacaatgaaggcattgattctggttggggggtttggaacaaggctgaggccactgacactcagttttcctaagcctcttgttgattttgctaacaaacctatgattctgcatcagatagaggcccttaaggc

SEQ ID NO: 26555 - DNA, 259 bp, Glycine max
  Clone ID: 700904524H1
ttctttttctctctctttcctctgttctttttttttgccctatctattagggtccccgcggattcaaaccttaattcttctattactctctttctctcatgcgttcttgctctcaacaacaatcacactccgtcatcgaagtcttcgttcttgtctgcttcgttctcctttttgctctcgttcgagggttctttcgtggggaacactgcagatctcaccatccgggtcttattcatccgtgcccatgtccaaagttctc

SEQ ID NO: 26556 - DNA, 262 bp, Glycine max
  Clone ID: 700904526H1
ctgcaagtaaatggcaagagcagcttgcaatcaccttcacttggttcccagtttagttcatcctctaaagtcaaccctcttcacaaatcacactctttccaccacacgcactcgctactatggcattcaccgaagttctcttcttcttcatccaaaataagcatgagcctcaaggctggtattgttggccttcccaacgttggcaagtccactctcttcaatgccgttgtggaaaatggaaaggctcaagctgctaattttc

SEQ ID NO: 26557 - DNA, 259 bp, Glycine max
  Clone ID: 700904527H1
cagccatattctatctctacgccgctaactctctctcactctcgcgctctctctttcacaaccttcactttactctctctgctaaaatgcaaggaggatttcaatcatttttgtcacacgggaatgtcattagaaatgctgttctacaacgggtgcgcatggtgaaccccctgttacagccaattgtctcttcgcggtttgaatctgttacacctgctcgcattgaggagcatggttttgagagcaccacaatttcaga

SEQ ID NO: 26558 - DNA, 260 bp, Glycine max
  Clone ID: 700904528H1
tgctgcattaacctccgcatttgttactgattttccaggtgtgaatggtcttggtgtatctgcggcacggttagacatagccaaaggtggatcaatcccaatgcacacacaccctgctgccactgaacttctaataatggtggaaggtcaaatcactgctggttttatgaccccaactgcactttataccaagacactgaaacctggagatattatggtttttccacaaggacagttgcattttcaggttaattctggaa

SEQ ID NO: 26559 - DNA, 260 bp, Glycine max
  Clone ID: 700904529H1
atttcattgatttctccctcttcgctctctctcagtgaccagagacagatgatgatggagatggcgaacgaaacgctgtcgttgcggcactcgcggcgttggtgctactcgcggcgagtgtggcggtggatgctcaggagaactcggacgtgaagacgctggtgaagtacaagcacgggaagaagtactgcgacaaaggatgggaatgtaagggctggtcaatttactgttgtaacctcaccattaccgattatctccag

SEQ ID NO: 26560 - DNA, 261 bp, Glycine max
  Clone ID: 700904530H1
cggagagagagagacgccggcgggtttggacagtgagtcacgagttaggaatcgtgacactcagacgttgagaaccgcggaatgcctctgaagccgtcgtattcgtcggagaatctgatgcttccggtatcggatcctcctaacgacgacgaccagaagtggcttttgaaagccgacaataacaagaccttccaaacacgaaggattctaactgccatctcttacatgtcatgtgcagtgctctttcgtcttttcacttcc

SEQ ID NO: 26561 - DNA, 264 bp, Glycine max
  Clone ID: 700904532H1
aagacctattcacacatgtgctagtagaaccaataaccaaaccccaacacacacataacacaaacaacacagatcaagtttctcattccctagacagatcccaacaacaacatagacaacacagagaatgcacgcaaagacagactcagaggtaacaagcctcgccgcgtcttcccccacgcgctcccctcgacgccgtcctctctactatgttcagtctccctcacgagactctcacgacggcgagaaaaccgcaacgacgtc

SEQ ID NO: 26562 - DNA, 245 bp, Glycine max
  Clone ID: 700904534H1
ctcgagccgctcgagccgattcggctcgaggacgaattaaagagtgtttctcaagattgagctattgaacgctatgcccacttttgtgtttgtgaaacagggaacgcttctggacaaagtggtgggagcaaagaaggatgagctgcagcagaaaatacagaaacatgtggcttcagctagtgcttaatctagctcaccttcagaaactttatatatgcgctttcttttcataatcttgtactaga

SEQ ID NO: 26563 - DNA, 262 bp, Glycine max
  Clone ID: 700904535H1
ctgccactcattgcttgctgagtgagagagccttttgttctgagttcttggtttctttggttagtgcttctgacaatatattggaacttggtttttggggattggtgcttttttgggggtacccagttgaacatttttttcttcttcttcttcttcttcttctctaacccataaagtcaaagctctcatctttgataagttgtgaacaaggtctatgagttgttccttgtagtgcagagaagggcatggtctttttgttgag

SEQ ID NO: 26564 - DNA, 262 bp, Glycine max
  Clone ID: 700904536H1
gtcgtagtattatttcatcgattctctcccttctctttctctctgcgacaccagatgatggagacgacggcgaagcgaaacgctgtcgttgcgccaatcgcggcgttgttgttggtggtgctactcgcggcgagtgtggtggtcgggggctcaggagaactcggacgtggcgacgctggtgaagcacatgcacgggaagaagtactgcgacaaaggatgggaatgtaagggctggtcaatttactgttgtaacctcactatt

SEQ ID NO: 26565 - DNA, 258 bp, Glycine max
  Clone ID: 700904538H1
caacaatgtgctttgcattgctttcattatcactttaacgtgggcagttgaagctcgaattccggggatttactctggtggtgcatggcaaagtgctcacgccaccttctacggaggatccgacgcttccggcaccatggggggagcgtgtgggtatgggaacctgtacagccaggggtacggtgtgaacacggcggcattgagcacggcactcttcaacagcgggcttagctgcggtgcgtgttttgagataaagtg

SEQ ID NO: 26566 - DNA, 260 bp, Glycine max
  Clone ID: 700904539H1
atttcgttacccttttctcgattcgatcttcagatctgtcgccgacagcaaacatggttgatcaggtccaacaccctacaatcatggacaaggttgctggtcagctccatctccgttctggtctttcatctggtattagaagttatgatggagcctaccgccacccagctatgtaccaaagaccctcttttgggaattactcgaatgctgcattgcagtttcctgtgatgcccacatgcaaagctaccatggatttgtct

SEQ ID NO: 26567 - DNA, 260 bp, Glycine max
  Clone ID: 700904542H1
aaaaaaaacccttagccaacacaaccatcatattaaaatctgctattcagcaatcagcattcactggtcaaactgctctgaagcagctcaatgagttcgtccgcaagaccggtggcgccggcaaaggtcgcactaacatgcgccgcaccgtcaagagtgctcctcagagcatttggtatggccctgaccgtcccaagtacttgggtccattctcggagcagattccatcatacctgaccggagaattccctggtgactac

SEQ ID NO: 26568 - DNA, 259 bp, Glycine max
  Clone ID: 700904543H1
ctgcttcacccgtaatcatcaccatcatcaaggacatctcagcaattaaacaatatacaaaacataatcaaactgctctgaagcagctcaatgagttcgtccgcaagaccggtggcgccggcaaaggtcgcactaacatgcgccgcaccgtcaagagtgctcctcagagcatttggtatggccctgaccgtcccaaatacttgggtccattctcggagcagattccatcatacctgaccggagaattccctggtgacta

SEQ ID NO: 26569 - DNA, 259 bp, Glycine max
  Clone ID: 700904545H1
cggctcgagaattataagcatgggtttgtggaacacaacgaatgcagtgtcttgccgctttcacaagtttggtgatgaccaaaagaatctggtcttccaaggtgatgccacgtcttcttccaggggcatagaactcacaaagttagacggtggaggaaaaccagtgggtggcagtgtggggagagtgttatactcttctccagtgcacctttgggaaagctctacagtggtcgcaagctttgataccgacttcactttt

SEQ ID NO: 26570 - DNA, 260 bp, Glycine max
  Clone ID: 700904548H1
gcgttgcgtggttggttttgcggtatcgaagaagaagagggggaaacaggttgtgccggtgaaatcagtgatctacgcgctttcccctttccagcaaaagattatgccgggtctctggaaggacttgcccacgaagattcaccacaaggtctccgagaattggatcagcgccactcttttgctcggtcccctcgtcggcacctacgcgtatgttcaaaactacctggaaaaggagaagctggctcacaggtactgagctc

SEQ ID NO: 26571 - DNA, 259 bp, Glycine max
  Clone ID: 700904553H1
gtcggtgggacgtgtgttattcgtggttgtgttcccaaaaagattttggtctatggagcatcttttggaggtgatcttgaggatgccaggaattatgggtgggagttgagtgagaaagttgacttcaattggaagaagctcttgcaaaagaagacagatgaaataaacagattaaatggactttacaagcggatgttatccaattggggggttaaattatttgaaggacgaggcaagatagatggtccaaatgaagttg

SEQ ID NO: 26572 - DNA, 258 bp, Glycine max
  Clone ID: 700904555H1
tttgttttgttgttaataaaaattttctcttctttctttctctcttgaagttggaaagaaaggcaaggagagaaagagaaaacaaaaaatggtagtttccagggtggttgtttttcttggtctcattcttgcaacccttgtgtcattggcttgctcccaatccgctgctccggctcctgctcccacaagtgatggcacctcaattgaccaaactgtagcgtatatcctaatgttggttgcattggttctgacttacat

SEQ ID NO: 26573 - DNA, 259 bp, Glycine max
  Clone ID: 700904556H1
gcttgagaatgttcattattcaattcaatgttgcatattattatatatataaaaaaaatggtccccatatacgtgacacgtgtatgcctattacgttgatttactttcttgtataaactaatgtaactaaaactatgattattgttggttggtttgtgctttaatttgttgagcactactccattgtttgtgatcacaaaagatgattatagcctgcaaaattatattcatgcccgtgtatatgtgctgaaattgtaaa

SEQ ID NO: 26574 - DNA, 258 bp, Glycine max
  Clone ID: 700904557H1
caaatctattccatgctcctataagtgagagatgagactgcagtaggtgtgggaactgtggggtcatcggaggcaataatgttggcaggtctagcttttaaaaggaaatggcagacaaagagaaaagcagaaggcaaaccatatgataagcccaacatagtaactggggctaatgtgcaggtttgttgggaaaaatttgcaaggtactttgaggtagagctcaaggaagtgaaactcaaagaaggatactatgtgatg

SEQ ID NO: 26575 - DNA, 267 bp, Glycine max
  Clone ID: 700904518H1
tggatggctatggtacactctaggctaatctgacctgtaccgtccgtaagatctgccattaaaatgaatgaaaggataggattctcggatggaccataaattgaataatgataataaggagtaatgtctaaacagtagattttttttatacatagtatgatgatatgtgaataatagagaattgaagagagagaacaagaacgtggcggaacaatagccatgcccaagaatgtgctgggtaatgctctttcttgtacggacgtataa

SEQ ID NO: 26576 - DNA, 254 bp, Glycine max
  Clone ID: 700904477H1
ccagaacatgggatggagagctgatggtggtctgtggcttcttgttcgtggaggtggtctttatctcagcaagggcaaagggttaactgaagaatttgaggaggttcctgttcaaagccggggttttggcattcttgatgttggatatcgttcaacggatgaggcttgggcagcaggaggaagtggtattctcttgagaactactaatggtggcaagtcatggatccgtgacaaagctgccgacaacattgctg

SEQ ID NO: 26577 - DNA, 260 bp, Glycine max
  Clone ID: 700904479H1
tgtgattccagaccttaatttttctctcattcgcttcaaatttcaggaaatcaattatggctcaaccctcaacaagaataggccttgctggactggctgttatgggccaaaatctagcactcaatattgctgagaaaggctttcccatttctgtttataaccgaaccacttccaaggttgatgagactgtagaacgagcaaaacaagaaggaaatcttccagtttatggctaccatgaccccgaagcttttgttcattcc

SEQ ID NO: 26578 - DNA, 259 bp, Glycine max
  Clone ID: 700904481H1
attaattgcaagaatggcacctcgttgcttggtgatgtccctttctgttctcttcactcttggtcttgcgagagaaagccatgccagagacgaagatttttggcatgctgtttggccaaacactcccattccaagttcattgcgagatcttctaaagcctggccctgcaagtgttgaaatcgatgatcaccctatgcaaattgaagaaacacagtacccgaaaaccttcttctataaagaagaccttcatccaggcaaa

SEQ ID NO: 26579 - DNA, 257 bp, Glycine max
  Clone ID: 700904482H1
gaaggtttctctgttaaaaagcaagccagtacagctataacataccttcattcatggagcaagatacaagttgagattagagctcgccgaatctgtatggtaaccgaagacaagatcaggaggaagaaactggagtctcaattaaaactggaggcaaagcttcatgatctggaggttgaatggtgtggtggttctgaaaccaaggaggaaatccttggaaggatacatgacagggaagaagcagcagttaagcgtga

SEQ ID NO: 26580 - DNA, 254 bp, Glycine max
  Clone ID: 700904483H1
gtagaacccttccactgtggtgactctgcgatgggtactgcctctaccttctttgctattctgcttatgtttttttgttcgtttgtaatttgtttttgttttcattagatctgatgcctgaattgaacgattatttggtttaattgttctgctggagctttcttaagagggtttggggttttaacgccaaagccaaaacaggagaaagaacatcatctcttcgctaacttgaactagcatggatgtttgctact

SEQ ID NO: 26581 - DNA, 254 bp, Glycine max
  Clone ID: 700904484H1
gttttgcactcacaacaaaccaaaaatcagagctagctagcaagactaaaatggcagaaagtgcagtgtccttggcaggtcagcaggcgattccaaaaatattggaagctgtcaaaatgttgagagatctcccaaaagaagttagagacattacagatgaacttgaaagctttcaagatttcatcaatgatgctgataaagtgactgaagccgaagaagatgatggaaggcgtcatagaataaaagaaagggtg

SEQ ID NO: 26582 - DNA, 250 bp, Glycine max
  Clone ID: 700904485H1
ggtttcagaagctaatcgcaggggaaaaagaaagaacaaacattaatatctcgagtattgagtttcggaagcgcttacgacgatcaacttcacgtttattcctaatgcagcattgtccttgaacttcaggtaaaaaatagcagaacattttcatggtacaaggatgtccaatccagcttcaaaagccacttggacacctgggttccatagagtatttgttgatttatgccttggagaaatgctgaagaat

SEQ ID NO: 26583 - DNA, 253 bp, Glycine max
  Clone ID: 700904486H1
ctgaagagcctcctcttctctctcttcctcttcctcttcttagcctcctccgccgtcgccaccgtccccgcccacaacatcacccgcatgctggccgcacaccccggcttctccaccttcaaccactacctctccgtcacccacctggccgaagagatcaaccgccgccagaccatcaccgtcctggccctcgacaatgccgccatgtcctccctcctcgacaagcacctctccctccccaccatcaaaaacg

SEQ ID NO: 26584 - DNA, 251 bp, Glycine max
  Clone ID: 700904487H1
ttcaggaaaagtttagtgatgttgtcaactggctcaaagcaaatgccactaaggcagaaaattcggctgctgatgctagtgctgctttttctgggaaaaagctcttgcctgaagtaataatcaatgaaaataaatcttctggagaaaaaactgggtctactcctgttagtactgctacaaattttactagttcttggagccctggattattttcaaacagtcaaggcatttttggaattggcaatcaaagt

SEQ ID NO: 26585 - DNA, 249 bp, Glycine max
  Clone ID: 700904489H1
atcttgtgttgtgtccctcttttaagctatttccttctcttaacacaattggttgtgccaattgccatagtcaccaaccaattaacaaaggtatatatatcatcatatcatcaccaaatgaaaaatattgggttgttttttcttgtggtggtggctacttttgtggtggcagccacagctggtagcttttaccaagactttgaaataacgtggggtggtgagcgtgccaaaatctatgagaatggaaac

SEQ ID NO: 26586 - DNA, 251 bp, Glycine max
  Clone ID: 700904490H1
cgtgggttgggattgccttatttttcttagctttcacagcctcatgctttgcaacagaggttacttatgatgcacgttctctcattattaatggagaaagacgtgttattttttctggtgcggtccattatcctcgaagcacagtgcagatgtggcccgacatcatacaaaaggcaaaggatggagggcttgatgccattgaaagttatgtattttgggaccgtcatgaacccgttcgacgtgaatatgat

SEQ ID NO: 26587 - DNA, 251 bp, Glycine max
  Clone ID: 700904491H1
ctttttctctattgaggttgtcattgggagcactcaacctaaccattcaagttgtgaaaccacatcgcaagaaaattcacaagcgatggatccgaagctgaaagaggtttctcagctcttcgatcgcttcaaggcttcgtttctccggaacgacttcgataactgttccaatctcctttctcagctaaaggtgttacttacaggtttcagaagcctgccaccgttgtttgcagatacacctaatgcagttc

SEQ ID NO: 26588 - DNA, 254 bp, Glycine max
  Clone ID: 700904492H1
cccaggtttcgtgttttgtgtaggcgtctacgacttgacgctgttttgttgggagttgggattaggtgcatcaattgactgtggcattatagcttattaagagaaagcaacaacatgtggaggctgaagatagcagatggtggaaaagacccatacattttcagcacaaacaattttgtaggcagccagacatgggcgtttgatcctgaggcaggaactccagaggaacgagctcaagttgaagcagctcgtca

SEQ ID NO: 26589 - DNA, 258 bp, Glycine max
  Clone ID: 700904493H1
aaggcagaaagcaagctcatcctagagttttaaaaatggcagcagcctcctccatggctctctcttccccatccttggctggcaaggccgtgaagctgggcccatcagcccccgaagtcgggagggtcagcatgaggaagaccgtcaccaagcaggcctcctccggaagcccatggtacggcccagaccgcgtcaagtacttgggcccattctctggcgagcccccgtcctacctcactggcgagttcccaggtgact

SEQ ID NO: 26590 - DNA, 260 bp, Glycine max
  Clone ID: 700904494H1
gcaagacccgtttggataagggaaaactccagagattgctttgaagcaagatccttgcgttgaccctttcctgaaccagaaccggggggggagaggaaagaaaaggggatccaaatttcccatccatcaataaagtgagggctttccggaccttccccacccctctttccattcttccttcccctctcactccccctttttcaagaaataagccccgctccctaagaaggggcccctctctgataaggaaggaaacgaaa

SEQ ID NO: 26591 - DNA, 260 bp, Glycine max
  Clone ID: 700904495H1
gagaagcactcatcattcttcgtttgtctaagatccgccttctctgaattgtaaaaatgtcgctcggagaaactgcttgttcatacgcagctctcatccttcatgaagatggaatcagtgtaactgccgacaagatcagcaccttgttggaaactgcaaaggttcaagtagatacctattggccaaccttatttgctaaacttgctgagaagaaaaatcttggcgatttgatagccaatgcagcaggcggtggtgcacca

SEQ ID NO: 26592 - DNA, 262 bp, Glycine max
  Clone ID: 700904496H1
catcatcttaagcagcagcaacaacaacctcggaagcaattccaatccctcacaacctccaacatcacccaaaacaccaaacaacaaaagcatgaaaattctaataatagcctccgctgtggccgcatcgttgtttctattattatcattcatcatcggatacttaatcttccgatacgtaagaagaggttccgctgcggaagatagcagcaaccctgaaccttcgagcacgcgctgccgcaacttttctttgacggagata

SEQ ID NO: 26593 - DNA, 270 bp, Glycine max
  Clone ID: 700904501H1
gttcctcttattagcgacggccattctcgccgttgtgtgctccgccgtgagcggttgctcgccatcggatagggcggcgctgctggccttccggaaggcgctgagcgagccctaccttggcctcttcaactcgtggacgggctccaactgctgcctcgactggtacggcatcagctgcgacgccaccaccggccgcgtcaccgacatcaacctccgcggggagtccgaagacccatcttcgagaaagccggtcgctcggctacatgacgg

SEQ ID NO: 26594 - DNA, 266 bp, Glycine max
  Clone ID: 700904502H1
tgccactactaaagacaggtttagacgagagctagatggtgtccattatgaaattcaggctactgaccccacagaaatggatcttgaagtactgagagaccgtgcacattgaaatgtttaagcactgaattcattttcttatcagaatctactaggttttaaagttttacttttaatgaattacctcttcatgctttgtcatcaatagaacccatcttgccacaggaatatacctccactaatatgaatctgaaggctgatgggtt

SEQ ID NO: 26595 - DNA, 268 bp, Glycine max
  Clone ID: 700904503H1
gggattgtttcaggccagaatatgggagaacattgaaacctatttgcctgctacagctgtgccgcattggggtgataatatatgattggttcgacattagctggctgaagaactactacaatttcgggtttgatcactacaacatgtcttggagaaaaatgggcatatggggtcttgttgactgcctattggggaatgcaggtccatttgcttcgggagattggatcctccctgatctcacaattcaaggctctataagactcaacta

SEQ ID NO: 26596 - DNA, 265 bp, Glycine max
  Clone ID: 700904508H1
tgctcttagggaaggaatgggtggtggtggcggtggccatgatccatttgatatgttcagttcattctttggtggaagtccgtttgggtcaggtggtagcagtagaggacggaggcagaggcggggagaagatgtggttcatcccctgaaggtctctctggaggatctttacctcggaacttcaaagaagatctctctttcacgaaacgtgttgtggtcataatgcaatgggaaaggctcaaagtctggggcttcaatgacctgt

SEQ ID NO: 26597 - DNA, 263 bp, Glycine max
  Clone ID: 700904510H1
ggaagctgaataaattaagaattctcagcttttctggatctcgaattgagaatttgccagctgagttagagaacttggataaactacaattactagacatcagcaattgttcagtagtcaagaggattccgcctcagcttatgtcaaggttgacttcgttggaagagttgtatgtaagagattgcttcatggaagtgtcggaggtaggagagagataccagatgtgcaaatttcatctatttctgaactaaagcatttgcatc

SEQ ID NO: 26598 - DNA, 236 bp, Glycine max
  Clone ID: 700904514H1
gctagaccagaccctaaaaagaacatcacaactttggtaaaagcatttggagaatgccgtcctcttcaagagcttgccaaccttacattaattatgggtaaccgagatggaattgatgagatgtcaagcacaaatgcttctgtacttctctcggtacttaagttgattgacaagtatgatctgtatgggcaagtggcatatccgaaacatcacaaacaatatgatgttcctgacat

SEQ ID NO: 26599 - DNA, 263 bp, Glycine max
  Clone ID: 700904515H1
cacgagacgaatctgctttacttacatcaacagatcttaatgattattcagatcatgattgtgattgacgaacttggaactagagtaccgttcagtaactctgatacctttgtcctctgtgtctttcgttcctatggcagttcctattttctcaggagtgcgaggtatgctcacgcgtgtgcgcgcgctctcacccagcaactgcctaactcatcacttcagcccactcaatcgcagatgcactcaaatcaaatcgtagtcct

SEQ ID NO: 26600 - DNA, 253 bp, Glycine max
  Clone ID: 700904476H1
ctttctctctgcgacaccagatgatggagacgacggcgaagcgaaacgctgtcgttgcgccaatcgcggcgttgttgttggtggtgctactcgcggcgagtgtggtggtggaggctcaggagaactcggacgtgaagacgctggtgaagcacatgcacgggaagaagtactgcgacaaaggatgggaatgtaagggctggtcaatttactgttgtaacctcactattactgattatttccagacctaccagtt

SEQ ID NO: 26601 - DNA, 260 bp, Glycine max
  Clone ID: 700904448H1
ctacaatatggaagtttctctatcttacattactggattgattggggtatcattggaagcagaagaggtcactaagttcttaaatcggatgcagttgcatgccaaactgtctacatctgataataagcagtgtaactttgtggtatctgtacctccttctagaagtgatgttcttcacccatgtgatgttatggaggatgtggcaattgcttatggattcaatgctattaaggatcaagcagtagtagataataaaggct

SEQ ID NO: 26602 - DNA, 261 bp, Glycine max
  Clone ID: 700904449H1
aacaacttgctccattccgaaacagttgttcatctttttcacttcccaaaatcctcaccttttctcgcagttttgctcgaaaaaaccctttgtttgttctttcatgggctcattctgggagcgccatgagcaaacgcaacactttctttcacaatctcatcaagcccttcaaattcagccccagcaaagagggacaaagcgaagtagaagaaataaagaacctagctgcacaagagcaaaagatcttcccctacgaaacat

SEQ ID NO: 26603 - DNA, 257 bp, Glycine max
  Clone ID: 700904450H1
tcttcttctcttgcggctagggttttagcgcagttcttctagatttaaggaagatgggtaaggaaaaggttcacatcagtattgtggtcattggccatgtcgactctgggaaatccactaccactggtcacctgatttacaagcttggaggcattgacaagcgtgttattgacaggtttgagaaggaagctgctgagatgaacaagaggtctttcaagtatgcctgggtgctggacaaacttaaggctgagcgtgaa

SEQ ID NO: 26604 - DNA, 258 bp, Glycine max
  Clone ID: 700904451H1
atttcagtgagtgatcggtgttcacttgatctcatcataatcgtcagcgtcaattgaagaagatgccgatcagaaacatcgccgtcggaaggcctgaagaggcgactcaccccgacacgttgaaggcggctttggctgagttcatctcaaccttcatcttcgtgttcgccggctcaggctccggcatcgcctacaacaagctcaccgacaacggcgctgccacccctgccggcctcatctccgcctccatcgcccatg

SEQ ID NO: 26605 - DNA, 256 bp, Glycine max
  Clone ID: 700904452H1
gatggatgttcattttccaacttgataccgcgttcgctcactctcaactcaacttcaattattcaaatcccacactttctctctctttccttcaaatctcaattctattttgcaaaatctgaatcaaacacagttaaagacgcacaagaaaacatctcgctcaacaccaccaacacttcggatctacgtttccactctccgaacatctctaaaggaaagaaaaaccgatttacagcgacaacaacgaacgaacgat

SEQ ID NO: 26606 - DNA, 253 bp, Glycine max
  Clone ID: 700904454H1
agaagagtgaaaacatcgcgaatggggactctctgcttccctctatttgcgaccatggcaatttgggggctattgttaggagcagaatcaaaaacacatgtcggagatgcagaggttctgaaggagctgaagcaaggtttggagcctggttcggtgaagccaggctcgtgcgtgagctcctgggacttcaccttggacccatgcgacaaccttttcggcgacaagttcacgtgtggcttcagatgcgacgtcg

SEQ ID NO: 26607 - DNA, 253 bp, Glycine max
  Clone ID: 700904455H1
ctcgttttttctcagaaccttctgaggttaaagcaaaaaacaaagagagagagagagagaaaatgatgaagccatcgatgctcagatctctccactccgccgccacccgcggcgcctctcatctcttccgccgtgggtacgcctccgagccggtgccggagcgcaaggtagccgttctcggcgccgccggcgggatcgggcagcctctctcccttctcatgaagctcaatcccctcgtttcgagcctctccct

SEQ ID NO: 26608 - DNA, 252 bp, Glycine max
  Clone ID: 700904456H1
ggcttatttaaacagcgaataaccaaagatgggcaggaggaagttgctgatgattggcttgagatgggcaatccctgggagattatttgaaatgatgtttcatatcctgtaaagttctatggcaaggttgtttcagggtcagatggtaaaaaacattggattggaggagaagatataaaagctgttgcacatgatgttcccataccaggatataacactaagactacaatcaacttgagactttggtctaca

SEQ ID NO: 26609 - DNA, 252 bp, Glycine max
  Clone ID: 700904457H1
aaacagactcaagttttactacaatggtgaatacgctggtttcgatgaagatgagccaacatcaaggcagggaggcaagggagatgttattaaaatgttgaagaagactcacagatacaactcaataattctgattggagacggtgcaaccgatcctgaagcctgcccaccagctgatgccttcattggttttggtggaaatgttgtgagagaggaggtgagatcacgtgccaagtggtttgtctccgattt

SEQ ID NO: 26610 - DNA, 252 bp, Glycine max
  Clone ID: 700904459H1
catactcaaactcactctttctaagttttttctatctctttctctctctctctgtctgccatggttctctccaaaaccacctccgaatccgacgtctctgtccactcaaccttcgcttctcgatatgtcagaacttcgcttcccaggtttaagatgccggaggagtcgataccaaaggaggcagcgtatcaaataatacacgatgagttgcatgttggatgggaacccaaggttgaacttggcatcatttgt

SEQ ID NO: 26611 - DNA, 256 bp, Glycine max
  Clone ID: 700904460H1
cgataaaggaactgtcctcatacatacagctgtgcagctagaaaattattcaaaaaccgaagaggctaaagtagaggagctcatcaaggcagtagcagattctggtgccaaagtgattgtcagtggaggagcagtaggagagatggcgttgcatttctgtgagcgttacaagcttatggttctgaaaatcagctcaaagtttgaactacgtcgattttgccggacaactggttctgttgccatgctaaaacttggc

SEQ ID NO: 26612 - DNA, 258 bp, Glycine max
  Clone ID: 700904461H1
tggatcatttggaatcgttttccaggcaaaatgcttggtaactggggaggcagtggcaattaaaaaggttttacaagacagaagatacaagaatcgtgaactgcagttaatgcgtgtgatggatcatccaaatgtgatctctttgcagcattgtttcttttcaactacaagtacagatgaactttttctcaatttggtgatggagtatgttccagagtccatgtatagagtcttaaagcactatagcaatgctaatca

SEQ ID NO: 26613 - DNA, 260 bp, Glycine max
  Clone ID: 700904462H1
gaagcaataagatgaaaatgaaagtgcttgttttgtttgttgctacagttttggtagcatatgaatgccatggctcagactaccagaagttccctctccaaatgaaaactgggtttggtgggcaatacagcaatgaggtggcatgtgccagttggaggcttggcgtggaagcaaacaacgtagtcaagtggcaaactgttcctgcagcttgcggagagtacatagctgactacgttctaggagaccaatatagatcagat

SEQ ID NO: 26614 - DNA, 255 bp, Glycine max
  Clone ID: 700904463H1
atttacaacaacaatggcttctgtgcctcaaccaaaaatctcccttctaaccttattcttcttctcgtccttcaccatcattgcgcatgcaattgttcctcaaaacgaaaccttcaaatttgagaactcaggtggaattgggaccctaattggtgagtaagggggagaattcaggatgattaggatcttcaaatctccattccaagttgggttctacaacaccaccccagatgccttcactctcagcttgcgtgt

SEQ ID NO: 26615 - DNA, 263 bp, Glycine max
  Clone ID: 700904464H1
agcaaggacagaaagaagttctaaggaagagggaatatgcagaatacaaggtgctagttgtctatttgcaataacaacatcagcgatccaaccttagtattcttcaacccagagagatttgcaataataaattacaacaacttaaacgatggcaggaggagcttatgtagattcgggaaatgcaaagcaatttgatgggaaggtcacggcattcgtattggttacatgctttgtggcagccatgggaggcttactcttcggtt

SEQ ID NO: 26616 - DNA, 258 bp, Glycine max
  Clone ID: 700904465H1
gcgaaaacaacgtcaacctcctcgaccgcgtctctgcctggtgggcccgcgtcggctccaacatgctcgaccgctccgacgccgtctccaaggtcgcattcgaatccgtggggcgcctcttccaggaattcagctccacacgcatgagcaagcttgccggcgataagctcgtcgattccgaaaactccctcgcgatccgctccaactgggtctcctccatggtggacttcgtgtggcggaacgccgcgccctcatggc

SEQ ID NO: 26617 - DNA, 253 bp, Glycine max
  Clone ID: 700904466H1
caaagagttgatgagcacatagaaaacaaagctgtgctgaatgaattgaatttgagtgctgtccccagtctatatgaactatttgttaaactgattgaacgtttgttggagaacaaagaggaggacaaggattcaattgtgattttcttgcttgacatgctagagattgtgaccagagacataatggatggagacattgaggggtaaatcatttgcaatttttgtatcccttgctaatttgataaattttgga

SEQ ID NO: 26618 - DNA, 253 bp, Glycine max
  Clone ID: 700904469H1
ggcaagaccatcacccttgaggtggaaagctctgacaccatcgacaacgtcaaggccaagatccaggacaaggaaggaatccccccggaccagcaacgtctcattttcgccggaaagcaacttgaggacggccgtacccttgctgactacaacattcagaaggagagtactcttcacctcgtcctccgtctccgtggtggcatgcagatcttcgttaagacactcaccggcaagaccataaccctagaggttg

SEQ ID NO: 26619 - DNA, 253 bp, Glycine max
  Clone ID: 700904470H1
ctttcttcctttgtaatagatagcacgcgtttctctctctcgctctctcaacgaatatatgtgtacttcctctctttgtgggtacattcaatttaccatgtcgagttcatcggaatactctcaattttccggccagaaaccggcgaggtcgccggagaaatcgagcttctctcagacttgtagcctgttgagtcagtacattcaggagaagggttagcttcggagatcttaccctcggaatgacatcatgtgg

SEQ ID NO: 26620 - DNA, 251 bp, Glycine max
  Clone ID: 700904471H1
tcgaaatcgctgttgttgggaggcgaaggcaaccatgaccatgaacggccaccataccgttaacatcgctaacagtaacaggcaccccaacgacgatgaccaccacgccctccctccctcctccgaccatgatgatgacgaacaagaactcgtggatcccgatgatccttttgacattactcaaaccaagaacgtatcgcacgacacgcttcgccgttggagacaagcagcactcgtgctcaatgcgtcca

SEQ ID NO: 26621 - DNA, 249 bp, Glycine max
  Clone ID: 700904472H1
gagaggacccggttattccattctcaagaaaatattattcggatagatatgaagttggcaaacgaagatgttagtatgcttgcatttacttcagagcagattactgctccattcctacttcccgagatggttgaaagagtggctagcatgctcaattactttctgctgcaattggtgggtcctcaaagaaaatcgcttagtctgaaggatcctgagaaatatgaatttcgtcctaagcatttgctaaaa

SEQ ID NO: 26622 - DNA, 248 bp, Glycine max
  Clone ID: 700904473H1
gaagttgtgccctaattttgacaatgaagatgggttggataccgtccttgaggtgccaattcccgaggagatgttgtccggcatgggcagcaatgggtccaatcgttggaagaacatgcgaactctcatgaatgctcaattcgttgataagtcttctggtctctcaacaccatcaaacaatgaattcatggtgttgcttaagcttgtgggtgctccccttattcctcttcaggttccatcagaccata

SEQ ID NO: 26623 - DNA, 252 bp, Glycine max
  Clone ID: 700904474H1
caaggagagaacaagcacagcctcttagaaaagcttcaccgatctgacagcagctctagctcttcaagtgaggaggaaggagaagatggagagaaaaggaagaagaagaagaaggaaaagaaagggctgaaagagaagatcgaggagaaaatagagggtgatcatcatcatcacaaggatgaggacacaagtgtccctgttgagaaagttgaggttgttgaaacagcacatgctgaggaaaagaaggggttc

SEQ ID NO: 26624 - DNA, 251 bp, Glycine max
  Clone ID: 700904475H1
gtggttttcatcgtcttccttctcttatatttctttttttttttgtcttcgccgcacgccgaaacaatggccggaaaaggagagggtcctgctatcggaatcgatctcggaaccacctactcttgtgtcggtgtgtggcaacatgaccgagttgaaatcatcgccaacgaccaagggaacagaacgacgccgtcttacgtcggcttcactgataccgagcgtctcatcggtgatgcggctaagaaccaagt

SEQ ID NO: 26625 - DNA, 259 bp, Glycine max
  Clone ID: 700904447H1
ggattttcaagtctggccggggcacttcttgagaataacagtatacgtcatatacatctcaatggcaattatggtggggctttgggggctaatgcattagctaaagcacttgagagcaacaagtcaataagggaacttcatttgcatgggaattctattggagatgaaggaatctgttctttgatgacagggttatcttcacataaagggaaacttacacttctagacataggcaacaactcattaacagctaaaggtt

SEQ ID NO: 26626 - DNA, 257 bp, Glycine max
  Clone ID: 700904418H1
tttttattttatgcttttttctccgatgtgactggcgtttgtttggtgtgtttttcgtgtgcgtcgaaccctctgcgttcgttaattttgttttgtgttttcggatcgacttgtttcgcgttcggttgcggggatcttcggtttaggtaaatgagtggtaaatgagtggtttttgagcagaagcagttaaaagagaaagggattcagcgaagatgacatcggttggtgtggcaccaacttcgggtttgagagaagcc

SEQ ID NO: 26627 - DNA, 260 bp, Glycine max
  Clone ID: 700904419H1
atattttacaaattatttaattatcatggatgtcttgtgatgattttgtggttgaactttgtttattgttttcagtcaggaaaagtctatctccaaaagtgcaacaccacaataggctttccaccaatctctgaacacaacaagctgaatgcaaagccagcagggccaaaactccaagacctaaacttcccatcatcatccccctccaatgtgctattgaacctctttgatgaaacaagtttggaccttaaattggtctc

SEQ ID NO: 26628 - DNA, 257 bp, Glycine max
  Clone ID: 700904420H1
gtaactcgttcttcttcttttgttgttctgtgtccgtgtttgttttttctctcacctgaaaatgtcttgctgcggtggtaactgtggttgcggaagctcctgcaagtgcggcaacggctgcggaggctgcaagatgtacccagacttgagctacactgagtcaaccaccaccgagaccttggtcatgggagtggcacctgttaaggctcaatttgagggtgctgaaatgggtgtgcccgctgagaacgatggctgca

SEQ ID NO: 26629 - DNA, 256 bp, Glycine max
  Clone ID: 700904422H1
aaccaacccttttgagcttgcacaactctgatggtagttgcacaactacttcagactctctctctctgagtgcctcaccacacagattctgtgatataccaatggaggccctcaatgctgctggcttgacccctctatctgtgctctctgatagaacaaaaacaagaactaaacacccttctgtttctgcatgcaaagtctcaaacttttccacctccaccaacaagaaacaagcattgctgcaaagttgcatatc

SEQ ID NO: 26630 - DNA, 255 bp, Glycine max
  Clone ID: 700904423H1
tatggcacagaaaaaagcttctcatgtgcttgtatgcaaagagttaaagccacacctgctaatggtcttagtccaggtgggctatacctttttgtatttcatcactgaagcctccttcaatcatggtatgagcccttatgtgtatgtaacctatcgccatattgtggctgcggttgtgatgttcccttttgcatactttttggagagaaatgcaagaccgaagctgacatttgctcttttcatggaaatttttgt

SEQ ID NO: 26631 - DNA, 254 bp, Glycine max
  Clone ID: 700904425H1
gtctggaataatgatgtcaggttcttctgtgttaaggattcttctggtagtccaattgcgtatttttattttgatccttatagtcgtcctgctgaaaaaaggcaaggtgcatggatgaatgaagtctttgctcgtagtcgtgtattatcgcgtgatggcacctcagcaagattgcctgttgctcacatggtgtgcaatcaaactcctccagtaggaaacaagccaagtctaatgacattccgtgaggttgagac

SEQ ID NO: 26632 - DNA, 254 bp, Glycine max
  Clone ID: 700904427H1
agacaacattgacttgtgctggctctggtggagttgaagacatgctagtggggtgcctatggttgaatgattatcttgtcactgtttctcttggtgggacaatatctatatttttagcaactgatcttgataaagccccgacaacattttctggacatatgaaaaatgtttcctccttaactattcttagaagtaaccctagggtgctattgtctagcagttatgatggcttaatagttaagtggattcaaggg

SEQ ID NO: 26633 - DNA, 258 bp, Glycine max
  Clone ID: 700904428H1
agttggatgattgggttctttgccggatttacaagaagtccaaacatgctctaacttcaacagaggcatcaataggggtgggtgaggtagatcaagcagaggagcacttattccaagagacccttttgccaatctcaaaatctccagcacctccacctcaaaacacattgatatctcagaaatctgtgtccttctccaacttgttggatgccatggactactctatcctaagtagtttcttatctgagaatcatacca

SEQ ID NO: 26634 - DNA, 116 bp, Glycine max
  Clone ID: 700904429H1
atgcatgtgagtgaagaaggactgacatcgagagagagtgaaacgctgcctattctgaaagtcgtctccacgttctcctttgcgcatattgtggggtgtgctgtgctgtgtgtgcc

SEQ ID NO: 26635 - DNA, 261 bp, Glycine max
  Clone ID: 700904430H1
gggaagaggaaccctagctagggtttggaagaagctgatccgagaagatggtgcagcgtctcacctaccgcaaacgccacagctatgctaccaaatccaaccagcacagagtcgtcaagactcccggtggcaagcttgtttatcagaccacgaagaagagggccagcggacccaagtgccctgtcactggaaagaggattcaagggattccacatttaaggccagcagagtataatagatcaaggttacacagaaaccgaa

SEQ ID NO: 26636 - DNA, 262 bp, Glycine max
  Clone ID: 700904431H1
gaacaataacttttctggcgttgtgcctgaagggttatggggtttgccccatttgtatttgttggagcttgtttataattctctttctgggtcgatttccaattcgatttccggggcttggaacttgtcaatgttgttaatttccgggaataagttttctgggtcgattcctgagggggttggggaattgggtaatcttgaaaagtttgtagctaataataatagtcttactggtcggattccgaaaagtgtgtttaggttg

SEQ ID NO: 26637 - DNA, 266 bp, Glycine max
  unsure (1)..(266): unsure at all n locations
  Clone ID: 700904432H1
cacgtgtcaaagtctacgacaccgacccggcagtgttacgggcactatccggatccggaatcaaagtgacggttgatcttccgaaccagcaacttttcgcagccgccaaagctccctcctttgcatcctcatgggtcgaaaggaacgtcgccgcgtactaccctcacacgcaaatcgaatccattgcggtcggcaacgaggttttcgtggatccacacaacataaatgcaganctcgtacccgccatgaagaacatccaaaaagcc

SEQ ID NO: 26638 - DNA, 265 bp, Glycine max
  Clone ID: 700904433H1
ctcaaagcccgagctcaaggactaccagatcaacctaaaggagtgcgggcccatggtcctggacgcgctacatcaagatcaagaacgagatcgacccgagcctcacgttccgccgctcgtgccgcgaggggatctgcggctcctgcgccatgaacatcgacggttgcaacggcctcgcgtgcctcaccaagatcccctccgaaggcgccgccaccacgatcacccctctgccacacatgttcgtgatcaaggacctcgtcgtcga

SEQ ID NO: 26639 - DNA, 259 bp, Glycine max
  Clone ID: 700904434H1
acgaaaattagggtttgtagtgtagcaggaagaagcagcaatggcgccgaagataacacgtaaggttagcagaaaccctgaattgataaggggaatcggaaagtactcgaggtcgcagatgtaccacaagaggggcatttgggctatcaaggccaaaaacggtggcgttttacctcgccacgaccctaaacccaagcctgaagctcctgctgaaaaaccacccaaattttaccctgctgatgatatcaagaagcccctt

SEQ ID NO: 26640 - DNA, 257 bp, Glycine max
  Clone ID: 700904435H1
attgaccacaaggcgttgcatgatactttttctacatttgggaatatcctttcgtgcaaggtagctacagattcatctgggcaatcaaagggctatggctttgttcaatttgataatgaggaatctgcccaaaaggccattgagaagctgaatggaatgctgctgaatgataaacaagtgtatgtgggacccttccttcgcaagcaagagagagaaagtactgctgacaaggcaaagttcaacaatgtttttgtgaa

SEQ ID NO: 26641 - DNA, 250 bp, Glycine max
  Clone ID: 700904438H1
gcgtcttcataaacgcctttcttctccgtttccgtttcctcgttcgaattcgctttttgatctgcgaaaatgagagagtgcatctcgatccacattggtcaggctgctatccaggtcggaaatgcttgctgggagctctactgcctcgagcacggcatcgggcccgatgggcaaatgccaagtgacaagacagttggcggtggtgatgatgctttcaatactttcttcagcgagactggtgctggaaagc

SEQ ID NO: 26642 - DNA, 255 bp, Glycine max
  Clone ID: 700904439H1
cgcggatccatccgcgctgggttaggcttcactccgccgccgagacgcggtttccggcgacggtggagaggcaggattccgatcacgatcatgatcacgagcaccaccaccaacaccacggcgagcgccaccaccaccaccaccgccacaaggcgagctggttcgcgaagaagattcggaagttcatgaagctgttctgattttgatgttgcaacgacgaacgacgatgatgcatatatatatatagtagttata

SEQ ID NO: 26643 - DNA, 249 bp, Glycine max
  Clone ID: 700904440H1
ggaaaatgtccatggactcagatgggctatggcaatttggtttttaattggtgcattgattgttatttatttggaataccatgaaaggcagcgaatagggcggcagatatctggaagaggcaattgggtgcttggtaatcttgaggaagatgattcagttgatctcttgaggccaaccagaacaagtgcagataaagagttacagccctctgcgagaatggaagtccagttagaacctttgaacagatg

SEQ ID NO: 26644 - DNA, 252 bp, Glycine max
  Clone ID: 700904441H1
aaacagccaccatagttcttcgtggtggagctgatcagttcatagaggaagcagagcgaagtttgcatgatgcaatcatgattgttaggagggctttgaagaattcaacagtggttgctgggggaggtgcaatagatatggagataagccggtatctgaggcagcatgcacgtacaatagctggaaagtctcagcttttcattaactcctatgcaaaagctcttgaggttatacctagacaattatgtgaca

SEQ ID NO: 26645 - DNA, 250 bp, Glycine max
  Clone ID: 700904442H1
atgggccgcgcccttggaactcctccatctgcgcctgtctcggccaaaacgatcacttctgcagcagcgatctcgaagtttgtcttcttgggagtgtggctccttgtgtgctgtatggaagcaatgttgagagacttggatctgctcgtgggacatttgccaatcactgcttgccttattctggaatgtatataattggaaattcctgctttggttggaattgccttgcaccctggttttcctatcctag

SEQ ID NO: 26646 - DNA, 252 bp, Glycine max
  Clone ID: 700904443H1
ggttatgtgctttaccagcattttgggtagggttattgtacgatgaagtttctctacaaagtgttttggatatgacagctgattggactccagaagaaagacaaatgctaaggaataaggttcctgtaactggtttgaagacaccattccgagacggtgcgctgaagcatgttgctgaagatgttctaaagttggcaaaggatggcttggaaagaagaggcttcaaggaatcaggatttttgaatgaggttg

SEQ ID NO: 26647 - DNA, 255 bp, Glycine max
  Clone ID: 700904444H1
ccaattccaaagcccttgtttcactttttccaatccgatatggccgccgcgaccgccttgctccgctctctcccacgccgcgaccttccctcgtcttctctctccgcctttcgttcgttgacgagtggcacaaagacatcatatgtagggaacaagtgggcaagtttgtctcggccgttcagttcaaagcctgctggtaatgatgtcattggaattgatctgggtactaccaattcatgtgtttctgttatggag

SEQ ID NO: 26648 - DNA, 256 bp, Glycine max
  Clone ID: 700904445H1
ggcaccgttgggttagctcttggtcctcctcaatcatcgacatcagggttccatgctggcagctcttctgctataaatccttttgatgattggtcccacaacagggacaagggggctgatgaattcttttcggaagaagaaatccgcttcagaagtcacgagatgctagagaatgaagatatgcagcagttgcttcgcctcttcagcatgggaggtcatggctccatgagtgctgaggatggcttttcattcccat

SEQ ID NO: 26649 - DNA, 260 bp, Glycine max
  Clone ID: 700904446H1
ttatactctgcgaaataatttttgcgtttcattgtcttataattagcatggcctttgccgcagttaaagtgttcatgatattggggcttttagccaccgcgtgtgtagcacaagcccctggacctgcacccacgcaaccaccatcaacaaccccatcaccgtccacgtcagcacccgccccatcaccaaccgcaaacacccctcctcctgcggctgcacctgcacccgcaacacccacacccacacccgctccttcatct

SEQ ID NO: 26650 - DNA, 263 bp, Glycine max
  Clone ID: 700904417H1
cctacagcccctttggactgattttcataactgggtttgtgtttgtgtttgtttttttttaactgaattatctatgtacttgtgttgatccttttgttgtgattcaaaacagcgatgttgttgttcttttagttttgttgatcatgatcatgatgatgggattctagagtcttcaattattggaagtgaggttgcttcaagtgtttttttttattgtattttttttcttctttttttttatcctaaagtctgaaacttgtggg

SEQ ID NO: 26651 - DNA, 243 bp, Glycine max
  Clone ID: 700904368H1
gtcttctgtccgtacaccactttcttccctcccaaaggagggaaaagattggttcttgagtggtttcaggacttctatttgtggacaagttgtgtgcaatccaagtttttgtgggagacaaataactagaagccatggaaaccgtcttgttgttcactcactgcttggaaggaaggtgaggtccgtgaagagcagagagactgtgattcctgaaccagattacaggattccaattgtgctact

SEQ ID NO: 26652 - DNA, 245 bp, Glycine max
  Clone ID: 700904370H1
gaataataataagcctatattctaaggccggaaaaataaaaaaaggaataacaaaaatgtctggaaaggtaattatctcggctgtttctctcatcctggtggttggagtggccataggtgtggtggtggccgtcaacaagaagggcgaggatcccacacttcaatctcaacaaaaatcagtaggggttatctgccaaaacactgatgaccagaagctctgccacgaaaccctaagctccgtgaag

SEQ ID NO: 26653 - DNA, 244 bp, Glycine max
  Clone ID: 700904371H1
tgagcttttacacggttattcaatcacacattgtttaaaatgatttttaattgattaatagtaccaaattttactgcaacaatgcataaaaattaaactctttagcataattagttcatgacatggttgtttaagcttcatatagttttcaagtaacagcttaagcttttatcatgattggttcatgacaatcattacttccatttaactacaaattcttaacaaggatgatgacaatagaatg

SEQ ID NO: 26654 - DNA, 156 bp, Glycine max
  Clone ID: 700904372H1
caccacaccaatgccaatataccatgtgcaacgaaattcaagcccaagcccaagcccaagcccaagcccaacctgggtttaagctcgtcggtttcaaaaacttcgtccgaaccaatcctaagtcggaccgctttcaagtcaaccgcttccacacaa

SEQ ID NO: 26655 - DNA, 248 bp, Glycine max
  unsure (1)..(248): unsure at all n locations
  Clone ID: 700904373H1
cgagagaagaagggtgagctaaagtcaattttccttcctttcctttccactagtcacataatcctngtagtggacatggccagactcttcgccttgcacgacgtcgacgtcaccatcatcaccaccgcacataacgccaccgttttccaaaagtccatcgatttagatgcgagtcgcggtcgccccatcagaacgcacgttgtcaacttccccgccgcacaagtgggtctccccgttgggatcgaagc

SEQ ID NO: 26656 - DNA, 247 bp, Glycine max
  Clone ID: 700904375H1
cactattcttcttcgcagcaatggcgcgagtggatctggacgggaaccccatgaaggcacttacgatctgcatgatcggcgctggcggcttcataggctcgcatctctgcgagaagctcatgtccgaaacccctcacaccgtcctcgccctcgacgtctacaacgacaagatcaaacacctcctcgaaccctccgattccccctgggccggccgcatcaccttccaccgcctcaacatcaaacacga

SEQ ID NO: 26657 - DNA, 247 bp, Glycine max
  Clone ID: 700904379H1
acaaaatgagattcgtgtacgctcattttcctatcaacgctagcattggcaacaacagcaagtccatcgagatcagaaatttcctcggcgagaagaaggtgaggaaagtggacatgcttgagggcgtgtcggttgttagatctgaaaaggtcaaagatgaattggtcttggatggaaacgacattgaacttgtttctaggtcatgtgctctcattaaccagaaatgtcatgttaagaacaaggatat

SEQ ID NO: 26658 - DNA, 250 bp, Glycine max
  Clone ID: 700904380H1
gattaggtgaagatggatgatgattagctcgcatggtctctgacgcgcttcctttattttttcaagaggatagccgcagggtgcgggcacgtgaagaagaaacggagaaagcaatgcttgaaggtttttagggagtggagatttggtgttcggtttctgaaagggggtgttagtttgttagatagtgatgccgttagtttttaaacgctgttaaaagacggaagggtggggttaagaaatagaaatgttg

SEQ ID NO: 26659 - DNA, 246 bp, Glycine max
  Clone ID: 700904381H1
tggaccctaatcacctcttcttcacgcatttccgcgatggtgctattgcctcacgcattgagggccaacacagaggagctcttccttctgttattgtgattggtgctggaatatctggacttgcagcagcacgaagtctctatgatgcatcttttaaggtgactgtactggagtcacgagataggcttggtggtcgcattcatactgacttctcatttggctgtccagttgacatgggagcctcat

SEQ ID NO: 26660 - DNA, 245 bp, Glycine max
  Clone ID: 700904382H1
aaaacgcattgtgtttctctctttccgcggcgtagatctgagcagtttgggaaaccctaactgctctcaccactctctttgctttttttcctctccgatcaacgacctctttcgtcgccctaagtcatggcaggacttgcacccgagggatcacagtttgatgctcgtcaatatgataccaagatgaatgagttgcttacatctgatggacaggatttttttcacatcttatgatgaggtttatg

SEQ ID NO: 26661 - DNA, 239 bp, Glycine max
  Clone ID: 700904386H1
accaaaactaaaaaagaacatttgcaggaggtataagatggcattagaaaattgaatgttattaatttcttcatccacttccactatttcaaaatcaaaatgattcttatgttcttccttggatgatggcgcttcaactttgctatatgtgaagggagttctgaaaaaaacttgaggaagaagaaaagatttcaataagctatgttgataaagggagatggagaatgatatagagggtg

SEQ ID NO: 26662 - DNA, 247 bp, Glycine max
  unsure (1)..(247): unsure at all n locations
  Clone ID: 700904388H1
gccatgtcactaaagtcagttactgtattgactacatatctcatctatgcatccatagttgctaagtcagctatggatccctacaaggccctcaacatcatcctgganccaaacggaaccctcacacgcttaagcattcctccacaaagccctcctaacacggatnccantctncncanagcggntcnccttgnagatctcagcatcaaccaatccaagcacacctgggcccggatctacctacccc

SEQ ID NO: 26663 - DNA, 56 bp, Glycine max
  Clone ID: 700904390H1
caacaacactctctcttctcgcgcttggcttttcgctcttcactcagtctcattca

SEQ ID NO: 26664 - DNA, 245 bp, Glycine max
  Clone ID: 700904391H1
gcagatcttcgtcaagacccttcaccggaaagaccatcacccttgaggtggaaagctctgacaccatcgacaacgtcaaggccatgatccaggacaaggaaggaattcccccggatcagcaacgtctcatcttcgccggaaagcagctcgaggacggccgtaccctcgccgactacaacatccagaaggagtcaacccttcaccttgtccttcgtctccgtggtggcatgcagatcttcgtcaag

SEQ ID NO: 26665 - DNA, 71 bp, Glycine max
  Clone ID: 700904392H1
ctcgagccggttcattgcactgcaacttagccacttaaaccccattcgttagcctctccacatcttcactg

SEQ ID NO: 26666 - DNA, 121 bp, Glycine max
  Clone ID: 700904393H1
aatcaaacgaggcgctgaactgagccatggcaccgcatgatctccgccgtccgttcaagcgaccagcgatctccgatcaagagcggcgcagggaacagtctctgctccgccaggcacagag

SEQ ID NO: 26667 - DNA, 108 bp, Glycine max
  Clone ID: 700904395H1
caggagctatagactctttagatgatacgatgatggtaattgaagcccctcggcaatcagacttaatgatacagcttataaggacattgaagcctaaagtgatggtga

SEQ ID NO: 26668 - DNA, 72 bp, Glycine max
  Clone ID: 700904396H1
aaatttttaatttttgtgcattatgtcactattgaagaaaaatgattttgacctttttacactggttccaca

SEQ ID NO: 26669 - DNA, 265 bp, Glycine max
  Clone ID: 700904401H1
atttacaacaacaatggcttctgtgcctcaaccaaaaatctcccttctaaccttattcttcttctcgtccttcaccatcattgcgcatgcaattgttcctcaaaacgaaaccttcaaatttgagaactcaggtgaacttggaccctacatcgttgagtacggtgcagattacagaatgataagcatcttcaactctccattccaagttggtttctacaacaccaccccaaatgccttcactctagctttgcgtgtagggctccaa

SEQ ID NO: 26670 - DNA, 255 bp, Glycine max
  Clone ID: 700904403H1
cccaactcaatttttctctcaaccggcccaatttagcataagcccagcatggccaccgcaacagcagcagccacctcgtccttcatggggacgcgcctcctggaggcccactccggggcggggcgggtgcaggcccggttcgggtttggcaagaagaaagccgccgccccgaagaaagtttccagggggtcgggctctatctccgataggcccctgtggtatccgggcgccaaggcgccgagtacctggatggga

SEQ ID NO: 26671 - DNA, 253 bp, Glycine max
  Clone ID: 700904407H1
aattccatgcgcctcttgatagggtctcccattttcaattccttctcagtttccttttctctgaaaaaagatgttgagggttgcagctaggaggctctcttctctctcctcttcttctccgttgcggcccaatcacgccgcttccgcttttctctctcgaaacgacgtcgtcgtcgatgaccacagatctgttccttcctcccatccccttcttcccttccgaggttttgctactgaatccctgatccaccca

SEQ ID NO: 26672 - DNA, 256 bp, Glycine max
  Clone ID: 700904409H1
atctagagcaaagtgattgattccagttccaatggccttcggcaccagcgccttgatcggaaggaaggttcttgtctcacccccaacccccaaaacaaccaaatcatctactccgctacaattccttttcaagagaagcatctttaatgctcacaattcacaagctgctctagctgcccttatcttttcctccgcgagcctctctgtgaccccacaagcccttgccgctgataacgtcacccctccccctgtaatt

SEQ ID NO: 26673 - DNA, 255 bp, Glycine max
  Clone ID: 700904411H1
ctttctttcttttcgaaaatgctgatttttcattttttttgccttttttcttcttcttccgtctgtatttgatttgttcccattaattctgaaatgattcaccttatttatttggaattgcgtggttttgatgtccaaatcttttctcacaactgatgtttcggccttctgtcaaattgaagcagtaaagttaattgatcaataatctaattggagccgatcggacttgttgactttgagcaatggtttattgtt

SEQ ID NO: 26674 - DNA, 257 bp, Glycine max
  Clone ID: 700904412H1
tttatttacaacaacaatggcttctgtgcctcaaccaaaaatctcccttctaaccttattcttcttctcgtccttcaccatcattgcgcatgcaattgttcctcaaaacgaaaccttcaaatttgagaactcaggtgaacttggaccctacatcgttgagtacggtgcagattacagaatgataagcatcttcaactctccattccaagttggtttctacaacaccaccccaaatgccttcactctagctttgcgtg

SEQ ID NO: 26675 - DNA, 257 bp, Glycine max
  Clone ID: 700904413H1
cttataactaggtatttattttctcatatgctcttcttaaacttctctttggtagtgtgttcacatacatatctacttattgttattattattgtcaccacatacaataatgggttccattagtaacaccgagcttcataatcatcacaatgatgatgacgacgatgatcatcgtcatcgggtgaatttctcgatccagagaggatttgggacaaaattgaaggaggcattgaaggaaacattgtttccggatgatc

SEQ ID NO: 26676 - DNA, 260 bp, Glycine max
  Clone ID: 700904414H1
tcttaatccaaccagctattgcaccagcagcttttgctacctttcaaactgctgccaagaccggtggtcctgctgctgcagttggtagaaaactaatccatactgagctcctaagtagtgcttggactggtttcttagctggctgcttgcacaccttatcagggcctgaccacctagctgccttggctccattgtcaatcggtcgaacacgaatggagagtgctgctgttggagccctttggggttgtggccatgatgct

SEQ ID NO: 26677 - DNA, 264 bp, Glycine max
  unsure (1)..(264): unsure at all n locations
  Clone ID: 700904415H1
cttcctcttaattactctatcattctttctcctcctcagaacctcaanaaccgaaaccaagcattacaattcccaatttcatagaaaccccagaatcaataaaaacacataacaacaaaagcagtgaaaaatggcgagctcggtggagaaggagagtggcgcgagcgaggaaactttctctttggagctgcctgctccaccaggttggaagaagcagttcatcccaaagaaagctggtaccccaaagaaaaatgagattgtgtt

SEQ ID NO: 26678 - DNA, 260 bp, Glycine max
  Clone ID: 700904416H1
gaaagagccaggcaggaaatatggagctggaggcccagaaggagacctccgacacagagatgactgagaatccagattccaagtccaatggcagaaggaaccaaaggaagtagagccatgaatctcaaagctaaaggtaccaattcctggataagatacactattggaggggccatttttgcattcttttgagcttctgagtttggataactgccacgtttgacatcaaagacatgggaacaggaacgagttactttggg

SEQ ID NO: 26679 - DNA, 248 bp, Glycine max
  Clone ID: 700904366H1
aaaaaaagaaaaaggaaggagataggaaagggttaattgaatccaaaaaaaagaagagaaaaacaaaatgggcagggtttggacttcgatgatagcattgttgctttgcctgatgacatcatcggttcggggcgaggacccttacatttactacacatggaacgtgacctacggcaccattgccccattgggtgtcccccaacagggtatcctcatcaatggtcagtttcccggccccgaaatcaact

SEQ ID NO: 26680 - DNA, 257 bp, Glycine max
  Clone ID: 700904333H1
gacaaaccctacctctctggtcagagtctccgccgttgcgctccttcccccgccgtctccgtttcatttcgacgccgaatatcatgcgtcgcctcttccgctgtcgctcagaaagttgggctgaaagattttcttcacttggatgattttgataaggatactattttgaagatgttggaccgggcccttgaggtcaaggcattgctgaagtcaggggacaggtcatttcggccttttgaggggaagacaatggcaat

SEQ ID NO: 26681 - DNA, 250 bp, Glycine max
  Clone ID: 700904335H1
caaaaccctgaagaaagacacagccattgtttgtttactttccattgattgagcgaaagctttgttttttctgcgatcattttccattgggtggaagaaagtctcaacctttagtcgaaagagcaaggatctgagtgagtgagcgatcatgtgtggtggtgcgattatctccgacttcattccagcgggtcccgccggcggggcgcacgcgtgaccgccgacatcctgtggccgaatttgaggaagcggt

SEQ ID NO: 26682 - DNA, 94 bp, Glycine max
  Clone ID: 700904336H1
ctttttaaatgtactttctctttcctttttgttatgccaaaggacattgctgcaccccaatacacactgcaaatcctgtaccttgtattacggt

SEQ ID NO: 26683 - DNA, 251 bp, Glycine max
  Clone ID: 700904338H1
aaaaaatgaaatgattttagctttcggagaagtccatttcatgtttttcttctcccagaaatgcttctagaaaagtttgtccaaacagcctaagaaattttcatccttagaattgtgagttgtttgaatgatcctaataggtgataagcattgtagctatgctatgttttcttgcctgtgtttcgtgatggaaatgaaaggaacccgactcagatttgttgctttcatgcaatagtgaaacagcactgttg

SEQ ID NO: 26684 - DNA, 247 bp, Glycine max
  Clone ID: 700904339H1
aacacaacacagcataccgtgtttcattttctctcacacacaaacctccttcgttttcatttacttctcaggaggtataactactatttttcgctttttttttaaaaaaaaaattgattaaatcttttgccatgggaacccagattttgcgacctcaggactgcttggtagaacgaatcagggctcctccggctgacttttcccggcggaggagttccggtaattactgtaattattattactacaa

SEQ ID NO: 26685 - DNA, 249 bp, Glycine max
  Clone ID: 700904340H1
ctcgagccgctcgagccgccaaaataagttgagtctgagatgactagcccaatttttcaagcgttcttttatttaaagtccatattatctataagtgttttaaattgaaactttcacggtctaatacataaaatttggtacataatcatctcagtttgatatggttgtagctataacagataaaaatgacataaatgcttaactgtttgaactgaactgagcgcccaaaattgaagtcttgattagtgt

SEQ ID NO: 26686 - DNA, 251 bp, Glycine max
  Clone ID: 700904341H1
accggacaaaagctattagttggggccaatttcgcttccgcggggataggaatccttaacgacactggcatccaatttgtggggatcttaagaatgttcgagcagtatgcgctgttcgagcagtaccagcaacgattaagtgcattagtgggagcagcgcaggctcagcgaatcgtgaatcgggcactgttcctcatgacacttggtggtaacgatttcgtgaacaactactttctcactcctgtgtctgc

SEQ ID NO: 26687 - DNA, 239 bp, Glycine max
  Clone ID: 700904342H1
tttcccttttcagctttcattggtgtggcctagctgttttctcaatgggagagccttcatcgctgcagagcgcactttttcgctttggggtgcccttgttgcttgttatcagcttctgttatgctacttctagtgctgtcagaataactcaagtttcagggactgcagagctgccatagacatatctagatgggcatgatgagtagccagtattcggattatttcatcataaagcagta

SEQ ID NO: 26688 - DNA, 252 bp, Glycine max
  Clone ID: 700904346H1
gactgctttttgaatgctgtcacccttcatatgatatgtgatgtatggtttatttcattctggctatgtcttgaaattaaaattctcattgccatcacccaaatttgcccttaatagaattgccatattctttttctatttgttatctcgtgtttggattgtttgcatattaagaaagacatttgttatttcctaaaattatgaatagagaatgcgttccggttaaaaaaaaaaaaaaagggcggccgccga

SEQ ID NO: 26689 - DNA, 253 bp, Glycine max
  Clone ID: 700904347H1
gctcttcaaatcaatctcttctcagaaatgggtgtggctcaaaacattcccgatgcggaggagggaaccttggagattggaatggaatacagaactgtgtctggagttgctgggccattggtcattcttgataaagttaagggacctaagtttcaagagattgttaatattcgcttgggagatggaactactcggcgtggacaagtgctataagttgatggtgaaaaggctgttgttcaggtctttgagggta

SEQ ID NO: 26690 - DNA, 255 bp, Glycine max
  Clone ID: 700904348H1
gtagaatagtaatagtggtaacaaaaggcaacagagaacagaagagaaaggaaaagagagggtttggtgagttacccaagagaaaggatgaagagagagcgccagagcttggttccaacgcaggaacctcaagctgcggttattcaagcggaaaatcgaatctttgggaggaagaaggaggcatggacgagcttcttgcagtggtgggttacaaggtgaggtcatcggacatggcggaagtggcgcagaagctgg

SEQ ID NO: 26691 - DNA, 248 bp, Glycine max
  Clone ID: 700904349H1
agaaaagttagggttcacaacttttccttttccttttgcttgcgaatctgaatcaaataatcaatcatccattcattattcatcatatcgtcggcgaagaaaatcacgctgaagagttcggacggcgaggctttcgaggtggaggaggcggtggcgctggagtcgcagacgataaagcacatgatcgaggacgactgcgccgacagcggcatccctctgccgaacgtgacgagcaagatcctggcgaa

SEQ ID NO: 26692 - DNA, 165 bp, Glycine max
  Clone ID: 700904350H1
gccaaggttgtatgtgaaagactctgatgtgaggcatgagaatgagatcattagcatttgttgtgattctgctccttctttcacccaccattgtcaattctctctccctccctcatactccatctccatctccatctccatctccatctcctccttccacatcat

SEQ ID NO: 26693 - DNA, 249 bp, Glycine max
  Clone ID: 700904351H1
cgacgtgcgtggactctttgaaggtggaattcatctccctacagatgcactcagtaaaattagccccctaccagtgctcaaggaaatcttccgcactgatggtgaactagtcctcaagtttccaccacctcatgtcattaaagttagtaagtctgcatggatgactgatgaagaatttggaagagagatgcttgctggtgttaatccatgcctaattgagtgccttcaagtgtactctccaaagagcaa

SEQ ID NO: 26694 - DNA, 248 bp, Glycine max
  Clone ID: 700904352H1
gtgagagcagaggaaagaaagatgttttttaacggatatgggtatcaagggacatcatcatttgagcagacatttcgatgttactctgcttcgtttattgaaaagcccgaaattgaaaatggtgataaaattataatgcctccttcagtccttgaccgtctagcatttctacgtatggattatccaatgatgtttgaactcagaaatggtgcttctgagagggtttctcattgtggggttctggagtt

SEQ ID NO: 26695 - DNA, 247 bp, Glycine max
  Clone ID: 700904353H1
gttaaattgcaagaagcagcccctacgggaataaaaccgacaaatcgttaaacctcggagccagatattcagagcgggtcccaccgatgatggatactggcggaggaggcggacatcgtcaccgacagccaccatgtcgcggtggaagtttgcggcgtggcggcagttccagcacctgctggataaatcgacgccgcacgtgggacgccggtggctggggttcgcggcggttgcccttttgtacgcg

SEQ ID NO: 26696 - DNA, 249 bp, Glycine max
  Clone ID: 700904354H1
caagaacaagagatttaaaaaaagagaaaataaacaagaaaacaagagagagaatagatagaggatgatggtgagcacatcctctgtttccattcccagtttttgcctttcctcttcctcccattgaagcatttttcacaagcccgtgatttttccgccatctccatcatcgaatgattttctggttcgggttttgattgatgctcggaagatccgatgctgctagatcgaatttgacaaaacccactt

SEQ ID NO: 26697 - DNA, 250 bp, Glycine max
  Clone ID: 700904356H1
tggatgtgttgaaggtgcattgggaatacgtgagtggctggaatcacagggtcatcagtacattgtcactgatgacaaagaaggacctgattctgaacttgagatacacattccagatgcacatgtcatcatatctactccattccaccccgcctatgtcaccgcagtaagaattaagaaagccaaaaatttggagctgcttttgactgctggcattggttctgatcatgttgatctcaaagctgcagct

SEQ ID NO: 26698 - DNA, 240 bp, Glycine max
  Clone ID: 700904358H1
gtcttcctcataagatgcttgtcaagttggttgattgcttgccaattggttgaaatgtggtcaggaaactcttcaacaaataggaagtcttcctgctccgcctttggaattgatgcaagtcaaccttgatgagaaggaaaggtttagggatctgagggctcagaagagtcttaacaccataagacctagctcagaggaagtgaggacttattttaggaaggaggaggttctcaggtactc

SEQ ID NO: 26699 - DNA, 252 bp, Glycine max
  Clone ID: 700904359H1
aaaacgcaaagatgcaagttccattgatcgacatcgaccgaatcaacgatccccaagtgggtctgaactctctgcagaacccatccttcccaatcccttctcagatcacaacctccctcgcttacaatttctgcaaatggggcgcactcattctcgcccttgtcgccaccttcggcagcatcatcaacagagtcactatcttcatcatccgcttccgcgccaaagccccttctctcccatccctaaccctaa

SEQ ID NO: 26700 - DNA, 248 bp, Glycine max
  Clone ID: 700904360H1
gaaaacacagggaaagaaagagttgagtgatggcggcttgtctgcaactgtggcaatgcaaactagcgagaccctttgactcattaccggtgcgaaggtcaattcctttgagtctgaggtgttcggccgcgccctcttcttccaagccgacgcgctcctacagcatcactctcatccccggcgacggcatcggccccgaaatcatctcggtggccaaagacgttcttgtcctcgccggttatctcgaa

SEQ ID NO: 26701 - DNA, 253 bp, Glycine max
  Clone ID: 700904361H1
cctaaaataatgattcttaagagcggattcatcttcggtcattttattttgtataataaaagaaagataataaagagaataatcatattaaatattaaatagaaaaaatggcccgatcatttatcaaaggccaatcttcggtagaagagaaggttcctttggaacacttatttctatttcagtataccgggtctctttctttcatttcaaaaaatttatagaatttcgattttgaaatgaaagacaagtgtgg

SEQ ID NO: 26702 - DNA, 248 bp, Glycine max
  Clone ID: 700904362H1
gtaagatcaagtcattgggagtcaaaatggttatctctggagaaggatctgatgaaatctttggagggtatctatatttccacaaggcacccaacaaagaagagtttcaccaagaaacatgccgcaagattaaagcactccacaaatatgattgcttgcgagccaataaatcgacctttgcctggggtctagaagccagagtaccatttttggacaaagagtttatcagagttgcaatgaacattgat

SEQ ID NO: 26703 - DNA, 253 bp, Glycine max
  Clone ID: 700904363H1
gagaaagtggagcgagaaaaatactgaaaccctccctcgccattcttgttctgctccgtccctctcgatctgcgtcagggattctctggcaggtattgttgatctgttcggttctagatcttttcgtgcggcttttgttgacggcaccgtcatgtcttccctcagcagagagcttgtttttctcatacttcagtttctcgatgaagagaaatttaaggagactgttcacaagttggagcaagaatcgggattt

SEQ ID NO: 26704 - DNA, 253 bp, Glycine max
  Clone ID: 700904364H1
ctctgccttactcactctctactttgctcatcatcgtagatgaaccaacacttctagtctctcttactttataaccatgtaaaaatgagtcacctaatgaaaaattagtagcttcttgttgtgctttttattttgtttgtgttgagataaatttgtttgtttgtttggtattgttttgtgttttatgaattatttgatgggtgaagaaggagaagtggtgagaaagcaaggacaaaggggtgttggtggagat

SEQ ID NO: 26705 - DNA, 259 bp, Glycine max
  Clone ID: 700904332H1
gcagtgctgcagggactgtcactgaactcaaaaatgaactgtcttcggaatctttctcgattctctgttttgcccttcgaaacacctgttacgcgccaccgcaagaaccttcccctttccctgggtttcgtcaacaattctcgtcaatatccaactatggccctcaaggctgcctcaggttctataccaagtgcagacacaagtagtgccgataaggaggaagaaaagtctgagacatatagtcataacatgacagaag

SEQ ID NO: 26706 - DNA, 257 bp, Glycine max
  Clone ID: 700904303H1
attttgtgtcgtcagcttctattttacgggcagaaacatttggtatcccaatccctgactgggtgacagatgagaaggccaccagtctctctacagcttctatagatgatgcagcggttattaatgatctagtaatcaagttagagaggtgccgggcaaatcttccaccagtgttcatgatgaaaccaattcaatttgagaaggatgatgacacaaactaccatatggatgtgattgctgggcttgccaacatgagg

SEQ ID NO: 26707 - DNA, 256 bp, Glycine max
  Clone ID: 700904305H1
gttttgtttatttgaaattaacaagtagcaaagatgtttggaatcatcggaggaaacaagggtcacaagataaaggggaacttggtgattatgcgaaagaatgtgttggatatcaacagcattaccagtgttaagggtgtcatcggaaccggcattaacatcattggacgagtcgtcgacaccgttactgctttggcgtcccacatctccatccagctcattagtgccaccaaggctgatggacatgggaaaggaa

SEQ ID NO: 26708 - DNA, 256 bp, Glycine max
  Clone ID: 700904306H1
gccgaagacgtgcacccggagagttggagagtgttcaactctttcgggaagcgttacattgtcacggctagtcctagggtgatggtggagccgtttgttaaggcgtttctcggggctgacaaggtgcttgggactgaacttgaggccaccaaatcggggacgttcactgggtttgttaagaagcctggtgtgcttgttggggagcataagaaagtggctctggtgaaggagtttcagggtaatttacctgacttgg

SEQ ID NO: 26709 - DNA, 250 bp, Glycine max
  Clone ID: 700904308H1
tttttcctgaactttctttttgctgcaatgcttacatggtcattgcctcttcgtataccagcatactcaatgctgggattgtctttactctattacattttagcgttaattgttgcaatgtctggatatagtgttgcatggggtggttcagctaaaatgtcaggcctattgtttgtgtttggagaggccacaagcttaatgctacttcttagcatcataatcatagttgtgctctatgctgcatggtgct

SEQ ID NO: 26710 - DNA, 257 bp, Glycine max
  Clone ID: 700904309H1
ggtgatttgttcactttgtgggactgaacaagaggtgagtttataatttcttcaatgtctttctgtgtggtttgtatagtggtatacgaattataaaggaggatcttgatctttaagcttttgaaggaaaatctttaatattgtcaaataaaaaagagaatcacactgcatgtgaatgcatgtgtgcattcacaggcataaaggagaaaaattggtgcatttgataagggaaatataaagtttattacttctgaagg

SEQ ID NO: 26711 - DNA, 261 bp, Glycine max
  Clone ID: 700904310H1
aaacgaagtgctcaatttgagcagactcttttggtgacagagactggtgttgaagttttaacagggaggttgcagacatcacccaatgtttttccttggttaaattcataattgggtgaatcatggagacagaagctggtagtgtctgaataccatacaattaatagacaacatttctttgatctacatctctggttttctcttttgggtatcatgtttgtaagttatacaaaaaaacagaagcaaaattcaattgagttt

SEQ ID NO: 26712 - DNA, 261 bp, Glycine max
  Clone ID: 700904311H1
ctttcacggaatcgtctctcctccttccttcggtttcaggaaccaacaagaacaagaacaaggttccagaagacaaatggtatttagcctacattgtgtattttaccctgggtctcggttaccttctcccatggaacgctttcatcaccgccgttgattacttctcctttctctaccctgacgccagcgttgaccgcatcttcgccgtggtttacatgatagtcgggctggtggggatctccctcataatcctctacagcc

SEQ ID NO: 26713 - DNA, 261 bp, Glycine max
  unsure (1)..(261): unsure at all n locations
  Clone ID: 700904312H1
tctcaccaccaccttccacttccactctcttccccatacatcncatttccatggcttcctccctcggcgacaacttcaaccttctctcgcctcaacagcaagagctggtgaagatgctattggataacggccaagagcacctgtttcgcgattggcctgctcccggcgttgacgacgaccacaaaaatgcgttcttcgaccagctgactcgactagattcgagttaccctggcggtctggaagcatacatcacaaatgcta

SEQ ID NO: 26714 - DNA, 259 bp, Glycine max
  Clone ID: 700904313H1
gtttgttctgtgaagaactgagggaggttcaggtccatgatattttgaaatctctctgtagtaggaagaccatgggacgagcttcatcattacttataatttttttggtatccggttcttcctttgccacctataatgtggtaacgatgataaggcactacggatcttcagaaggtgtggctgttaatgatggtgcattgttttttgaccctattactgagatgcctgatcatgtaaagaatcggaagacatctaaagt

SEQ ID NO: 26715 - DNA, 274 bp, Glycine max
  Clone ID: 700904314H1
ggtgcacgttggaatttctcaccttgcatctaccttcttctggctcatggtattcaagctcctatcagatatgcagaagaggtatatcctctgatttttcttcaattttggctctgtcgaatggacgcttgtgatgcttgaaattcaatagatatggacctggtgatgcaggattttgttagtgactgcatggtgattctgcattttatactctacgcttgctgatttgtttggtcacatgagttgttcactcagattgctgcatctgtgtaaa

SEQ ID NO: 26716 - DNA, 261 bp, Glycine max
  Clone ID: 700904315H1
aataatagttacactaacacacagtagtgaacaacaactccaacaacaacaatcaacaacaacaacaacgttgtagtgtgttgttttgttttttagtgcagtttatttttttggcatcaaagtggttgaatccatggattctgattatggtattcccagggaactctcagatcttcaaaagattcggtctttgtaccagccagagctccctccttgtctccagggaaccactgtgagggttgaatttggtgacgcaaccac

SEQ ID NO: 26717 - DNA, 263 bp, Glycine max
  Clone ID: 700904316H1
ggatggtcttgatgaattcaagcgatttgttgtttatgttcttgataaagtatgtgcaagtatgccacctgggcaagaaaagtttgtcggtatagcagaacttaagggatggggatactcaaacagtgacgtgcgtggatatcttagtgctctatccattttgcaggattactacccagagagattggggaagttgtttattgtgaacgcaccatacatctttatgaaagtgtggcaaattgtttacccattcattgacaaca

SEQ ID NO: 26718 - DNA, 270 bp, Glycine max
  unsure (1)..(270): unsure at all n locations
  Clone ID: 700904317H1
tacttcagctcgagattagatttcatctcccggggttttttgaactgtgcccatgtctaaagtcttcagctttaccggaaatgatgatttttatcatgggggtcctatttatcctaacccgaaggaaccgtgtctcttcttgtctcttggccgtcaagttgatgtttaccttcctcttcagaagaggtctcgcttcagtgttcccattgatatcagtggtgaatggtntgagcagaagcctaagacatctattgaatctttgccagatga

SEQ ID NO: 26719 - DNA, 255 bp, Glycine max
  Clone ID: 700904318H1
gacaattcaacttaagagatcaatatggccaccaccactacccagcctccctctaatatctgttttttccttctgttgttgcttctagcacactttcatttgggcataagccaacttgagctgaattactactctaaaagctgcccaaaagctgaagagatcatcaaggaacaagtcacacaactatataacaagcatggaaacactgccgtttcgtgggtcagaaatctcttccacgattgcgtggttaagtca

SEQ ID NO: 26720 - DNA, 257 bp, Glycine max
  Clone ID: 700904319H1
gcgccgccctcgccgcctccctccccgccatcatcgcctccgttgattaccgcctctgcccccaacagcgcctccacgccgcctaccacgacgccctcgaagccctccattgggcccaggcccaggcccaagcccaagcccaatcagacccgtggctccgcgactatgtagacttctcaaaaaccttcctcatgggaagcagcgccgggggaaacatcgccttcttcacagccctaaattctctctccctctcactc

SEQ ID NO: 26721 - DNA, 254 bp, Glycine max
  Clone ID: 700904322H1
ctcgggcaagataataatgttgagagggttgaagttgagaaggagcagggtggagaggagcagatgatggatgtgggttttgagcagtctaaggaggaggatatgcctggaatgtggcttttggatcagaagaactgtgtgggggagccatttttgcggccttgtcatggtggtgatgtgaagggtgtggagtttgaacaagtgagagaggacgatggagaagatgtgcaggaacaagaggaggtggaggagga

SEQ ID NO: 26722 - DNA, 257 bp, Glycine max
  Clone ID: 700904323H1
aaggaatcaaaccttaataaaaagtcccccaaaatggctccaacaagaaaccaccttcttcacattgccatgttcccatggtttgcaacaggtcacatgactccattcctccacctttcaaacgacgttagccaaaaggggtcacaaaatcacgttcttgctacctaaaaaagccaaactacaactccaacacctcaacaaccatcctcacctcatcacattccataccctcacaattcctcatgtaaaaggccttc

SEQ ID NO: 26723 - DNA, 108 bp, Glycine max
  Clone ID: 700904324H1
gcaaaaaccatcgatgatgtttctctgagtctgaggattcacgcgttactgttactgttactcaactcttattcccttccttgattccaattctccacacaacatacg

SEQ ID NO: 26724 - DNA, 257 bp, Glycine max
  Clone ID: 700904326H1
cttcaacacctgaaatggcatgaaattaaatacattcatgccatatcaggtgttgaagttgaagtggggattttgaatggtggcaatcgcagcacagcttcctctgtctcaattgagtcggatctcagtataggatcttgagtcatttgctccagcaactggtagagtctttgcagccacagcggcaaagggtgctggtggaagcaaagaagagaagggtcttcttgattggatccttggagggttgcagaaggaag

SEQ ID NO: 26725 - DNA, 255 bp, Glycine max
  Clone ID: 700904327H1
caggcctgcaatatcttggccctgacttggatgctatgaaagctgttgctgatgcacattctaagcggtcccttaatttgtttgaaattgctttgagggactacaaggcacagttggaggaagacccaattgtacacaggcacctttcatccttgtacgatacccttatggagcagaatctctgcaggttgatcgagcctttctcaagggttgagattgcacatattgctgaacttattgaacttcccacggatc

SEQ ID NO: 26726 - DNA, 256 bp, Glycine max
  Clone ID: 700904328H1
attttgaaagtgaaataatgcgtgacttacactaatattttcataaactgtgcacaaacttttgatgtagacttgaattcttttatgtcaaactcgtatgcaatttcatcattactattatgaaggaaaggttgcacaagtattataatttttgtgttattggttgagctagctaaatgaatctggattttattgtttcttcctaaacagattctctctttatgttcctttattagaaggcattcattttgttcag

SEQ ID NO: 26727 - DNA, 257 bp, Glycine max
  Clone ID: 700904329H1
cataaacatctataagttaataattcgggtgtgtaataaattaaaaaatacatatgcttgtgacaaaaaggagatgtcacaagaattatgtgaattcggatttctagtatgaaaatatttgtgtaaaattgaaataaagcgaattatactttgatttgttttataaattctttctgcatttgcttcattatcgtaaatgcagttagaatttataaaacaaataaagcgaattatactttgatttgttttataaattc

SEQ ID NO: 26728 - DNA, 199 bp, Glycine max
  Clone ID: 700904330H1
caacaagcaaagtacatggttgatttggaaatccaggtccccagcgcattcgacccgtttgccgaggcgagagaatcagatgcccccggggcaaaggagtatgtgcacatacgaattcagcagaggaatggaaagaagagtctgacaacagtgcaagggctgaagaaggagttcagctacgagaagatcctcaaggacc

SEQ ID NO: 26729 - DNA, 259 bp, Glycine max
  Clone ID: 700904331H1
caccgacaccggacacgacacgaagacgtaaacacctggccaaatatagaatgcagtatgaattagcgaactactgtgatcaagatataaatcacacctaccagtgatttgtttttgtcactagtctcttccatggaagttgaaactcactccctctcccccacctttgaattaatccaccttctctcccaatccaccaccgacacctacttccctcccaataatgccgccaaccaaccttctctcggccacgccaccg

SEQ ID NO: 26730 - DNA, 263 bp, Glycine max
  Clone ID: 700904302H1
ccttcagtcccaaacaccctccttacgatgagatgatatacacagcaatcggagctctgaaggagagggatggttcgagcaagcgagccataggaaagtacatagaacaagtctacaaggaccttccacccactcaccctgccttgttgactcaccatctcaaccgattgaaatcctctgccctcctcgtcctcgtcaagaaatcctacaagcttcctggatctcatcatctgcctgcgctccagccccaaaagacccgtggt

SEQ ID NO: 26731 - DNA, 267 bp, Glycine max
  Clone ID: 700904266H1
atttgagaaaatatatctgttacaagttgtatcaaggagaagcatagacatgaagaagcgaggatcaggcaggcgtttcctgatgtgggttatggtgatttggctccacgcacatctcagcattgcagctgaactgtccaagtccaatgacacggacactgcttctgagagttctgtgtgcgatggctccgtagaagactgcctcaacaacgtccaccgcttggactcagagcttcttcccaccatctccagctcccacttccgcag

SEQ ID NO: 26732 - DNA, 266 bp, Glycine max
  Clone ID: 700904267H1
gccgtgcctacgtcaccttcctcgccggaaacggtgactatgtgaaaggtgtcgttggcttggccaaaggtctgaggaaggtgaaaagcatgtaccctctggtggttgcagtgttacccgatgttccagaacatcaccgaaacattctcacctcccaaggtggcattgttagagaaattgaacccgtgtaccctcctgagaatcagacgcagttcgccatggcatattacgtcatcaactattccaagctacgtatttgggagttt

SEQ ID NO: 26733 - DNA, 107 bp, Glycine max
  Clone ID: 700904268H1
cattcttatttttatcctctcttcacttgcacgctctgtctctctgtcagccatcatcatgggagcagtgattctcccagatctcggcaccgagattttgattccgg

SEQ ID NO: 26734 - DNA, 263 bp, Glycine max
  Clone ID: 700904270H1
ctttcttcctttgtaatagaaagcacgcgtttctctctctccctctctcaacgaatatttgtgtacttcctcttttgtgggtagattcaatttaccatgtcgagttcatcggaatactctcaattttccggccagaaaccggcgaggtcgccggagaaatcgagcttctctcagacttgtagcctgttgagtcaatacatcaaggagaagggtagcttcggagatcttaccctcggaatgacatcatgtgggtcacctgagac

SEQ ID NO: 26735 - DNA, 265 bp, Glycine max
  Clone ID: 700904271H1
ggcctgcaaccctcgaaacgtgaatagccgtggcggccacctatttctctgtttaacgtcttcactcattctacattttcgcctcaaactacttcttccaccgatcactgttcagcagagaagtgttgccttggactcttgaggtgcaatgagattggagaagtgttggttctgttcttctaccatataccctggacatggaatccagtttgttcgtaatgatgcaaagatttttcggttttgtagatctaaatgccacaaaaac

SEQ ID NO: 26736 - DNA, 261 bp, Glycine max
  Clone ID: 700904272H1
taagatttgagtttgggcatgtgtgagctgtggctttgcagggaagaagagtgtcagtagaaaataaatgtcctcttcccagggacactctctatttcacagatctatatctaagtgtcggtgatcccctttctccttccttctctgagagacaatgacaatgacgtgggcgcgattcgattcgtggaagcagcaatactacaccacaagcggcgtggtggtaggttacgcagtatgctccagcctcctggccatcatcaa

SEQ ID NO: 26737 - DNA, 258 bp, Glycine max
  unsure (1)..(258): unsure at all n locations
  Clone ID: 700904274H1
caacaacactctctcttctcgctcttggcttttcgctcttcactcactctcattcattcatttccaccgttcatggatccagtaagcgtgtggggtaacacgcccttggcgacggtggatcccgagatccatgacctcatcgagaaggagaagcgccgtcaatgccgcggaatcgagctcatcgcctccgagaacattcacctcctcgccgntcatgaggcccacggcagcgcatatacgaacaaactcgtcgagggc

SEQ ID NO: 26738 - DNA, 262 bp, Glycine max
  Clone ID: 700904275H1
tgaacattcccattacctaccatataccatcaaccaatatcttctttgtcgcttttattatctgtttttccggcgatggattccggcgcgtggctcctgttcctggtggtcgtggctgtctcaacgtccggccacattcactctgaagcgatcctgagactcccgtccgagagcgaggagatctcgcgcgactactgcgacagctggatgctggcggtggagacgaacaacgccgggacgtggaaccgcgtgccggcgagtt

SEQ ID NO: 26739 - DNA, 253 bp, Glycine max
  Clone ID: 700904276H1
cttaaaaatgctcctattttgttgttggatgaagctagttcatcacttgaatctgagtcaagccgagtggtgcaagaggctctagacaccctaataatgggaaacaaaaccacgattttaatagcacacagggctgcgatgatgaggcatgtggataacatagtagttctaaacggaggaaggatagtggaggaggggacccaggattcattagtggcaaaaaatggtctgtatgtccgattgatgcaacctc

SEQ ID NO: 26740 - DNA, 259 bp, Glycine max
  Clone ID: 700904277H1
ctcttggcatcttgtgttgtgtccctcttttaagctatttccttctcttaacacaattggttgtgccaattgccatagtcaccaaccaattaacaaaggtatatatatcatcatatcatcaccaaatgaaaaatattgggttgttttttcttgtggtggtggctacttttgtggtggcagccacagctggtagcttttaccaagactttgaaataacgtggggtggtgagcgtgccaaaatctatgagaatggaaacct

SEQ ID NO: 26741 - DNA, 266 bp, Glycine max
  Clone ID: 700904278H1
tggattttcagcggcgagggcattggatgtgctgaatttcactccactcaacaacagacctattaggatcatgtattctcatcgggatcctagtcttaggaagagtggtactgcgaatatttttatcaagaatttggataaggctattgaccacaaggccttacatgatactttttcttcttttggactcattctttcttgcaaaatagcaactgatgcttctggcctgtctaagggctatggttttgttcaattcgacagtgaag

SEQ ID NO: 26742 - DNA, 259 bp, Glycine max
  Clone ID: 700904280H1
aaaaagaaagaaaaagcaataccattaccaatagcatccccaggttttctggaccactttgctgctgaatatagatgtcggctactatactgtgaatcaaacttcagtgtgatcgataatggctttccaaagggaaactacaaccatgattggagtttggcttgtggtgttgatggttctctccaaagggttatcttcaacaggggttgtaccagataatttcactataccttcttttgtaaatattggggttctctat

SEQ ID NO: 26743 - DNA, 264 bp, Glycine max
  Clone ID: 700904281H1
tacagaagctgggattatctgaacattcttctactattcttgttggatgcattttttcagaaggacgagaccttgacagaaaaagggtgaaggaagttatcttgaatgctaagcagtatgatgtccagtttatatttatggggaccagtgaaagattgatcatgaatcaggcgcctgaatcacttcagacggaattcaaggatgataatcttaaatttgtgcctacttatgatgaagctctgttgcatttagtctttgctggat

SEQ ID NO: 26744 - DNA, 263 bp, Glycine max
  Clone ID: 700904282H1
accagattaaaaatgatcttggcatgtccaactatcccatggtcccaggacatgaagtggttggtgaggtactggaggtgggatcaaacgttagcaggttcagagtgggagagttggtgggagttggactcctcgtaggttgctgcaaaaactgccagccatgccaacaagacattgagaattactgcagcaagaagatctggtcttacaatgatgtgtatgtcgatggaaaacccacacagggtggctttgctgaaaccatg

SEQ ID NO: 26745 - DNA, 259 bp, Glycine max
  Clone ID: 700904283H1
catatactcataaatcacatagctagttgtttaaagtaagagagaagaaagaagcaaatggcaaactttccagttgttgacatggggaagcttaacaccgaagagagacctgcagccatggagattataaaagatgcctgtgagaactggggtttctttgagttggtgaaccatgggatatccattgagcttatggacacagtggagaagctcacaaaagagcattacaagaagactatggagcaaaggttcaaagaaa

SEQ ID NO: 26746 - DNA, 261 bp, Glycine max
  Clone ID: 700904284H1
ctcatctttcaatttcaatcaacggttatacccttttctatttgagcatcatcatgtccaccgcagcgcacccaaggccaagaaaacggcgtcgtccaagaagcccctctcccatcctaccttcgccgcggtacttcctaattactctctttcgattcaatttcgaaatcaattgtgtttaattagtttcattgttttgtagatgatagcggaggcgatagccagtctgaaggagagaaccggttcgagccaatacgcgat

SEQ ID NO: 26747 - DNA, 206 bp, Glycine max
  Clone ID: 700904285H1
caaaggtggagtgaacgtaaacacaggaccaaagaagggtaagccagtgcacgttggagtgggcccacattctccatttgattacaattacgcagccagcgaaacccagtggcacgatgaccccaacgtggcactcttcttcttggaaaaggacttgcactacggaacaaagttgaaccttcactgtcactcgctacttcacctaa

SEQ ID NO: 26748 - DNA, 259 bp, Glycine max
  Clone ID: 700904286H1
attttccagaggatgaagaactatactatctatgctgtgtcaatcaccattcgtattgtgtttggtttcttgtttattgcgttgatctggaagtttgattttgcacccttcatggttttgattattgccatactcaatgatggtaccattatgactatatccaaggatagagtgaaaccatcaccacttcctgatagctggaaactgagggagatatttgctactggcgttgtgctaggaagttacatggcactaatga

SEQ ID NO: 26749 - DNA, 113 bp, Glycine max
  Clone ID: 700904288H1
aatggggtctctaatggcctatgctacacttactcttttattggcaataatagtctctctaagcttgccatctcaaacctcagctgatgacaagtacgactattcatctcctc

SEQ ID NO: 26750 - DNA, 202 bp, Glycine max
  Clone ID: 700904290H1
aacgctgactctcgggtttgtactactctttacccaacgctctttcctctgtatcgaacacttatcctttaacactttctctctcttgttggattcgctgttctttcgcggagatctgtgtgcttttcgactctgttcctcttctgggtctcgttactctttcagattggtgctaaatttggcagagataagccacgtgtat

SEQ ID NO: 26751 - DNA, 69 bp, Glycine max
  Clone ID: 700904291H1
cctggtcactactcacaaatgtgaattgtccccagtctctcgagaacttagaatagaatactcgtccca

SEQ ID NO: 26752 - DNA, 260 bp, Glycine max
  Clone ID: 700904292H1
gttgaaacatgatcagctcaagatggagctcacagagggacatgtattccaaggttggcatgaaggagctatagagtttccacctacatacaaataccgtctgacttctgtagactacctaggctgtgatcagcagcatgtgagcagaaagcggcgctccccagcatggtgcgatagaataatatggtttgggaagggaatgaagcaaatccaatacaacaggagcgagtcaaaactttctgatcataggcctgtacgag

SEQ ID NO: 26753 - DNA, 259 bp, Glycine max
  Clone ID: 700904293H1
ccgcggcttcaaccttgtagttattctctttcttcttttttagctatccctctcttgaaaaatctagatctcgttcttccttgatctacgttacgcttttagtgaccggatctgtatggatctgaaccagatctacacgccgatggtggttttggcctggtctttcatagatctgatgcatggaggctcagatctactgtacagaggtgtacgattcatatactgtagataatcgatgagaagaatgcagatccagccg

SEQ ID NO: 26754 - DNA, 261 bp, Glycine max
  Clone ID: 700904294H1
ggcgtcttcataaacgcctttcttctccgtttccgtttcctcgttcgaattcgctttttgatctgcgaaaatgagagagtgcatctcgatccacattggtcaggctgctatccaggtcggaaatgcttgctgggagctctactgcctcgagcacggcatcgggcccgatgggcaaatgccaagtgacaagacagttggcggtggtgatgatgcttgcaatactttctgcagcgagactggtgctggaaagcacgtgccacg

SEQ ID NO: 26755 - DNA, 260 bp, Glycine max
  unsure (1)..(260): unsure at all n locations
  Clone ID: 700904295H1
aattaagatatncggttgtcttgcatcaagcttttgagccggatctttgccaagatcgtgttgcggattgtcatgantgctgcgtatgctactgataaggcgactatcttatacatgctcgaggttgtagacattgatgtgatcagtcgtcttaatgaattcactgcgatgagtagantagatcccagaatctatggtgctcaaatgagtaccataagactagaacaattggagattaacatgggaggggtcacagtaga

SEQ ID NO: 26756 - DNA, 136 bp, Glycine max
  Clone ID: 700904301H1
gcaaagcacaagatgttgttgaatactctgttactattatgggtcaaggccaagttagaccagtccattctggaggttctccaaccagactagtcctctccaacttggtttctttttatacaaccttcccactctc

SEQ ID NO: 26757 - DNA, 270 bp, Glycine max
  Clone ID: 700904265H1
atttgatccagattttatcaacattaggacaaaggctcgtgaagttctgcaaagggaagatgacctgaatgaaattgttcagcttgtgggcaaggatgctttagctgaaggagataagatcaccttagaaactgcaaagcttttgagagaggattatcttgctcaaaatgcctttacaccatatgacaaattctgccccttctacaagtctgtttggatgatgcgcaacattatccatttctacaatttggcaaatcaggcagtagagag

SEQ ID NO: 26758 - DNA, 269 bp, Glycine max
  Clone ID: 700904232H1
cgctcgagcaggacagctttatatggttatgaacctcctcttaaacccaagcataaaaagcctgggttgttatcatcactctgtggtggaactcggaagaagagttcaaaatctagtaagaaaggatcagacaagaaaaaatctagcaagcatgttgacccaactgtgcccattttcaatttagaggatatagaagaaggagtagaaggtactggatttgatgatgagaaatcactacttatgtcacaaatgagtcttgagaaaaggtt

SEQ ID NO: 26759 - DNA, 275 bp, Glycine max
  Clone ID: 700904233H1
gtcaaggcatgcttctgatgaggtctaccttggacagagggacaatccaaattggactgatgacacaaaggcaattcaagcctttaagaagtttggaaacaagctgaaggaaattgaggacaaaatctcagggaggaacaagaattcaagccttaggaaccgtaatggaccggcgcagatgccctacactgtgcttcttcctaccagtggagaaggccttactttcagaggaattcccaacagcatctctatctaatgagagtgtgtggtgtgtg

SEQ ID NO: 26760 - DNA, 269 bp, Glycine max
  Clone ID: 700904235H1
ctttgttatcaaagacttaaatcaacacgttggacgagtttttagctgtctgtagctgtcggaagtttgaaacatacatattcttcttaattttgggtcagtagtatgtggaagttgaagatagcagaaggaggagatgggttaatctctgtgaacaatttcattggacgtcaacactgggagtttgatcctaatgctggaactccacaagaacgtgctcaagttgaaagggtacgagaggaatacaaaaagaaccggttttgcattaa

SEQ ID NO: 26761 - DNA, 270 bp, Glycine max
  Clone ID: 700904237H1
ttctagatcgcgagcggccgacctttttcattttttaattttgtttatatatatatatgggtgtgttcaatttttgcgatccctccctagttgaatgaagctgcgatgggaaactcgcatgctaaaaagcgtgacactcaattttccagaaacgttgttaaagggagagttccctctccaaaagacaaaaccttatcatcattacagtcaccatcatcaccatcacaatcaccatcaccgtcgctagaaccaccgcgagaaccaccacca

SEQ ID NO: 26762 - DNA, 265 bp, Glycine max
  Clone ID: 700904239H1
aaagaagttctaaggaagagggaatatgcagaatacaaggtgctagttgtctatttgcaataacaacatcagcgatccaaccttagtattcttcaacccagagagatttgtaataataaattacaacaacttaaacgatggcaggaggagcttatgtagattcgggaaatgcaaagcaatttgatgggaaggtcacggcattcgtattggttacatgctttgtggcagccatgggaggcttactcttcggttatgatcttggaat

SEQ ID NO: 26763 - DNA, 267 bp, Glycine max
  Clone ID: 700904241H1
ctcactaggagctcctctccactggttcttcatctgcatgcacacagttgcatagttttggaaaccaagaattcctgaagaagggtagcatcaacaagcagttctgaaaatggagatcaccaatgtcagtgagtatgaggctattgcaaagcagaagttgccaaagatggcgtttgactactacgcatctggtgcagaggaccagtggactctgcaagagaacagaaatgccttttccagaattttgttcggccacgtattcttatt

SEQ ID NO: 26764 - DNA, 261 bp, Glycine max
  Clone ID: 700904242H1
gcagttgaaagaactattcaatgtcaatcattttatagttagtcaggccaaccctcatattgcaccactattgagattgaaagaatttgtgcggacttatgggggcaactttgctgccaagcttgctcatcttgtggagatggaggtgaaacataggtgtcatcaaatactggaacttggttttccattaggtggacttgctaaattgtttgctcaagactgggaaggtgatgtgactgtcgttatcccgcaactcttgct

SEQ ID NO: 26765 - DNA, 267 bp, Glycine max
  Clone ID: 700904243H1
gaacacttcagaccagtcccacatacaaccatcccaagctgaagttctggttttaaatcttcaaactaagaagtactcctttccagagtacatggagaaaatgagcgaactaaaagttcttatcatgacaaattatggttttcatccctgtgaacttgaaaattgcaaactacccagctctgtatcaaacctgaaaagaatcagactagagcggatttctgttccccacgtaggggcattgaaaaatcttgaaaagttatccctcta

SEQ ID NO: 26766 - DNA, 268 bp, Glycine max
  Clone ID: 700904244H1
atcaaacaataataaccggtttttctcacttttctttttcttttgggctttcagtttcacataacaaaccgtttctcagaacatcccataaaagcttagcttgtattcagtttctcttctcccaacgtttttgtcgctagtaacagaatattacaaagtaacggctttctcagtggagcgcttgatttgggttggtgggtcaacttcaagtttcaatttttttttcatttttgtctggtcgattgagaaggctcagttgcagagacgg

SEQ ID NO: 26767 - DNA, 267 bp, Glycine max
  unsure (1)..(267): unsure at all n locations
  Clone ID: 700904245H1
gcagaaagcaagctcatcctagagttttaaaaatggcagcagcctcctccatggctctctcttccccatccttggctggcaaggccgtgaagctgggcccatcagcccccgaagtcgggagggtcagcatgaggaagaccgtcaccaagcaggcctcctccggaagcccatggtacggcccagaccgcgtcaagtacttgggcccattctctggcgagcccccgtcctacctcactggcgagtatccaggntgactacggctggaca

SEQ ID NO: 26768 - DNA, 217 bp, Glycine max
  Clone ID: 700904246H1
gtgccctgcacgtgctcgactacgccaccactacatccgacgacgacacggaaaaggaggaggaggagctggtacacgagcaaaacgaatcctccggcggagggcggtggtagtggcggcgtgcggtggcggcacgcggcggacgggggagcgcgttaggcgatcttgaccaaggcgaatgggtcagaatgaacagtgtctctatgtcgcgcgggtg

SEQ ID NO: 26769 - DNA, 271 bp, Glycine max
  Clone ID: 700904247H1
attgaggagaaagaagaagaaggatgtggcacgaggcgaggaggtcggagaagaaggtccacgacatgatggacgcggctcggaagagagcgcaacgacgcgccgtttacctagccaagaggcgcggcgatcctcagcaatctattcagctcgtcggctttcgaagccgaacctatcgcgacgacgctctctaccaagccacgcaggatcagcagggcctgataccttggaatgggaaacaagatgtattgattgacagatttgatgggcg

SEQ ID NO: 26770 - DNA, 270 bp, Glycine max
  Clone ID: 700904248H1
gctagccttcagaggacacaatgttttgcccgaaatacaggggacgctgccttcaaatttcgaacaaacatccaaaagaccaatgcgaagaggagttagcatatcatatgtactcatttccatgtgcatgtttcccctcgcaattgccggattttgggcctatggaaaccagataaatgacgggggattgttaacttcgttcccacaattccacaagaggcaaatcacaaaattctctatgggtgcaatatatgttctagtaataataca

SEQ ID NO: 26771 - DNA, 273 bp, Glycine max
  Clone ID: 700904249H1
gtcacggagcaaagcaaggctctcttcttctccgtcactgccactctcattgtctcttcttctctcttctctagggtttatcgccatttgatctcaagctctcttcccaaaatgccgtctccccctcttccacaatcggaccgctactgcccctgcttttgccggtgtgcaatgtatgttttcttgctgcggttctggaaatgttgaattctgaactgagataaaatgagtaggatagaactatcgagggcgaagtcagcgccggttccattg

SEQ ID NO: 26772 - DNA, 267 bp, Glycine max
  Clone ID: 700904250H1
ctccacttgttagtagcactgatccaggtaatccagaagctgtagcagaccttagtcatcaatcagtttctgatatttagagccctgattcgattcttttttgaaaagacattctaactttttgtcttcagagtggactggtggttatgttaacctttccgcttttgtttaagtttggcttggctttaaatagtgattaccttgtggcaagaggttcattcaggggtattggtgtaagaaatttgagtgaacattctaatatgatat

SEQ ID NO: 26773 - DNA, 267 bp, Glycine max
  Clone ID: 700904251H1
ttaagaatcaaagtagattggtgagaataattggagagttgctagttcatccatgtgatcaacctcgcacggccatgttgatgttaccaatgcaatgtgcttcgctgttcatctctcccatcacgattgacaaaccctaaccctaaccctaatcacccgaccagcatggtgaagactaaggtccccgattggctcaacagctctatatggtcctcatcatcgccgtcgtcccctcgctcctccggcgtcgccagctccttcgaacag

SEQ ID NO: 26774 - DNA, 246 bp, Glycine max
  Clone ID: 700904255H1
taaagttcagttttttgcatcgtttttattaaaatttgttggcgaacaaaacagagaaaaaaaaaccaaaaaattgaaatttcttatccgttttggcgaattgaactgcgtgttcaattgggttgttgaattcgaggcagagggaaccgcgggtgtacaaggaatttcgattctgctgttgttagaaacggtgtagtttggtgtgagagaagctggggacttggggtggtcgtaacgacgtcgttg

SEQ ID NO: 26775 - DNA, 264 bp, Glycine max
  Clone ID: 700904256H1
ggggtacgtccttggcctaagggtatcacctcagcacaggagaaaagggattggctcaagccttgtgagaacactagaagaatggttcacttcaaaagatgtggactatgcatacatggcaacagagaaagacaaccatgcctcagtgagtctcttcatggacaagtttggctacaccaagttcaggactccagctattcttgtcaaccctgtgaaccatcattgctttcaaatatcacccaacattgagatagcaaggttgaa

SEQ ID NO: 26776 - DNA, 258 bp, Glycine max
  Clone ID: 700904257H1
ctgagaattaagtgtatcctccagaatcaaatgtggatcacttgcctggagaagaatcgagtcaatcaacagaccacaaaaatatcaatttgttgcaagagaaaggatttatggaatatggatgtcagcattaccggagaagatgccgtattagggccccctgttgcaatgagatttttgattgccgccattgtcacaatgaggcaaaaaatgatatcaacattgatctgaagcttagacatgatattccacacaaca

SEQ ID NO: 26777 - DNA, 264 bp, Glycine max
  Clone ID: 700904259H1
aaacttctctacaaaacaaaaccaacccccccctccttaaggccttaacttttgagtcaaaatttatcatttcaaagcactctccaatagagataagtttgattcatccatcccagttggttggttgtaacccggctctggcactgttaaaggtttcaatctctcattgttgccagcttttgtgtacatgccagtttatagcaacctttaccacttcttttaaaccaaaacaataagctttttcccttcattgttgtccagaaa

SEQ ID NO: 26778 - DNA, 261 bp, Glycine max
  Clone ID: 700904260H1
cggaaccaaacccgggtccgcgccggagatccccacggtggacctcgccgccgaggagagctcccgcgccgccgtggtggagcaggtccggcgggcggcgagcaccgtgggattcttccaggtggtcaaccacggcgtcccggaggagctgctattgcgaacgctggcggcggtgaaggcgttccacgagcagcccgcagaggagagggcgcgggtgtaccgtaggcagatggggaagggtgtgtcgtatatttccaacgt

SEQ ID NO: 26779 - DNA, 263 bp, Glycine max
  Clone ID: 700904261H1
cgagaataagaccaagtcccctgcttccggcgtgtggtccaccatcaagcctttcgtcaatggcggagctccggcatgctcgccacctgcgttattcaacccatcgatatgatcaaggtgaggattcaacttgggcaaggatcagctgcgcaggtcacttccaccatgcttaagaatgagggtgttgctgccttctataagggtctatctgctggattactcaggcaggctacatacaccactgcccgtcttggatcatttaa

SEQ ID NO: 26780 - DNA, 265 bp, Glycine max
  Clone ID: 700904263H1
ctcataacacaaagcacaaagcaaagctcatccttgagttaaaaaatggcagcagcttcttccatggctctctcatccccatccttggctggcaaggccgtgaagctgggcccatcagccccagaagtgggaagggtgagcatgaggaagaccgtcaccaagcaggtctcctcaggaagcccatggtacggcccagaccgagtcaagtacttgggcccattctctggcgagcccccgtcctacctaaccggtgagttccaggcga

SEQ ID NO: 26781 - DNA, 273 bp, Glycine max
  Clone ID: 700904231H1
caaggccaggtatgatgaaattgtgaaggaagtctcttcctacttgaagaaagtaggatacaaccctgacaagattccttttgttcctatctctggttttgagggagacaacatgattgagaggtccacaaaccttgactggtacaagggtccaactctgcttgatgcacttgaccagattagtgagcccaagaggccctctgacaagcccctcaggcttccccttcaggatgtgtacaagattggaggtattggaactgtgccagtgggacg

SEQ ID NO: 26782 - DNA, 237 bp, Glycine max
  Clone ID: 700904188H1
caaaatcttcatattcatcaaactcatcaaaatgaatctgtaccactcctccagcaccaccaccaccaccaccatcttcaccgtcatattcctcctccttgcaatatcattcactctcacaccccacaaggccaacggtgccacgtgtcaccctgaggaagaagcgggcctgttgggcttcaaatccggtatccgatccgacccgtccggcctgctcagtaactggatatcgggtac

SEQ ID NO: 26783 - DNA, 245 bp, Glycine max
  Clone ID: 700904191H1
ctgaagtgagggaaaggagaataaaccctgtcaaataaattttgaagaaccagtctatcagttgtagataccaagtggctaagaatataaatcatactggtaaagggggatacatgtatattgttttgtcactctctctctaacataactattttgttccacaagaaactgaatccagggtaaattgaagataaattgttgaagctcaatgtgttctaattctcaacttttccccttagcagcag

SEQ ID NO: 26784 - DNA, 196 bp, Glycine max
  Clone ID: 700904192H1
tatgcggtcagcggatcgtgatgtctatccctcgtgtgaacaaatgcttcttcagcgttattatgacgagctctctgaggtatactgcctagcttacgtctcacagtacaggaatcgtaatgtaactattcattcattacctatataatatatatttgtgaggaatgcacaatattgctagctgttatgcttattc

SEQ ID NO: 26785 - DNA, 139 bp, Glycine max
  Clone ID: 700904193H1
tgaccgttgtagaatgcataatattataagacggtcacatgtccgcaatcgtctttgaatgtatggcattctacgactgtcacgtgcaaatgaccgtgttagaatactcaatagtctacgatagtcgcgtgcgaagacc

SEQ ID NO: 26786 - DNA, 90 bp, Glycine max
  Clone ID: 700904194H1
cttaactccgaagacccccgcttatagtagtccaggcctatttgccgggtgcagtcctatcacgggacatgggatcgacctcgtcatcgg

SEQ ID NO: 26787 - DNA, 177 bp, Glycine max
  Clone ID: 700904195H1
tattcacagctgtcacgccgtgaacggaaaatggcaactgcgagactcagtttcccgcctatcaccgaatgcaacggaatcacaccgtgcgaatctgtagacgtcgacctcgacagtacgctacttatctcccgtagctcgttcccgcacggtcatctcggctccgtcgaagccggc

SEQ ID NO: 26788 - DNA, 243 bp, Glycine max
  unsure (1)..(243): unsure at all n locations
  Clone ID: 700904196H1
aatggtggcctcaaattggtctacctaaagatcaaggccctccaccttacaagaaaccacatgacttaaagaaggcgtggaaggttggtgttctcactgcagtcatcaagcatatgtcccctgagtatcgccaaaattcgcaagcgttctaggcagntcaaactccttcaagacaaaattacagcaaaggaaagctcaaccgtgccttccagcagcaaccaagaggaagccattgcgtgagag

SEQ ID NO: 26789 - DNA, 276 bp, Glycine max
  Clone ID: 700904202H1
gagtaagggtgtaaaaatatttgtttcattttattttattgaaggagtagaatttgggaactaggttttgttaagtttgggcttgatcaccccatagggaagttttggagaatttgtgggtgtcaggggaaaatgcagcaagatcacaggaaaaagagttcagctgagatggactttttctccgaatatggtgatgccaaccggtacaaaattcaagaagtcattgggaagggaagttatggtgttgtctgttcagccattgacactcacacaggt

SEQ ID NO: 26790 - DNA, 276 bp, Glycine max
  Clone ID: 700904203H1
gaaaaatattaagagagaaaataatcaatactacaactttgcaattttcgtggtagctagaccaaggtagttcaattgccatggatattggtggtggagtggaagagccagtgagagagttgaggcaatacttcaaaactggaaaaaccaagagtgtaacatggaggaaaaaccagctcacatctctcatagaccttgttcatgagaatgaagatgctatatttaaggccctccataaagatcttgggaagcacctgttgaggcttaccgtgatga

SEQ ID NO: 26791 - DNA, 272 bp, Glycine max
  Clone ID: 700904204H1
tctctctagagttcttatttcctctctctagaattttctatccgttcatccccctcacaaattagggtttttgcgaatcttttattgtctgaaatcgaatccaacgtttcagccatggtttccgattcaatcgccgccgtgccgattccctccgccgcaaacaccaggaacccggggaagaagaagaggaccaacaggtccgcgaaattgaagcagtacaaaatcgatgcgcgccgcgagcaatggttatctcaaggtgcggtgaagagcaa

SEQ ID NO: 26792 - DNA, 138 bp, Glycine max
  Clone ID: 700904205H1
ctttctcctattcgtacttcttctttctcttcatcagctattgttgcattagactgagttactgctacttacagggacctcttcaactaacctctacaagaacttctgttccaagacatagtcccaacgtattcaaca

SEQ ID NO: 26793 - DNA, 271 bp, Glycine max
  Clone ID: 700904207H1
gtaattataattataatatactacccagcaaaacaccaacgttgttttgagttattgaattaatattaaacctagctatcatccatgggaagctgcatatcaacgcaaggcgtgagaacacgcaagaggtcgaggagcaagaattacaagccctccacgccaagagggcacgagccggcgcgaaggtcgagcgtgacggcgcgtccgctgaacgtggtgtcggggccgagtcctgggaacatattcgacaagtaccagttcgggaaggagc

SEQ ID NO: 26794 - DNA, 251 bp, Glycine max
  Clone ID: 700904210H1
agcgaatccagccacagcacagcactctttgcaacacaacaaaaaaagacaacacagagagaagcgtcttaataaacgctcttctctgaaaaacctgatttcttctcttcttctcttctctttcgtttcgatcttcgatctctgaaaatgagagagtgcatttcaatccacatcggtcaggccggtattcaggtcggaaacgcctgctgggagctctactgcctcgaacacgagcatcagcctgatgggca

SEQ ID NO: 26795 - DNA, 265 bp, Glycine max
  Clone ID: 700904211H1
atggctcgtcactccttgctcttagccctcctcctcttcgccgccgtggccaccgccgcgatggcgtggcgcgtccgacgccgacgacatcctgatccgtcagtggtgccagatgttggcaacgaagaggaggacaacctgctgaacgccgatcaccacttcgagtgcttcaaggccaagttcgccaagacctacgccaccaaggaggagcacgatcatcgcttcggcgtcttcaagtccaacctccgcagagccaggctgcacg

SEQ ID NO: 26796 - DNA, 273 bp, Glycine max
  Clone ID: 700904212H1
tagaaacagcaactatgtctctcatgcagcttactagctcccctgttggctcactggtccgtttcattgtaatatttgctttatggtacagaaccatggctttggccaagttgccaccaaacgcttcatcagttccagcagttttagcgtttggtgattccatcgtggacccaggcaacaacaacaacataaaaacattgatcaagtgcaacttcccaccttatggaaaggattttcagggaggaaacccaacgggtcgattttgcaatggaa

SEQ ID NO: 26797 - DNA, 279 bp, Glycine max
  Clone ID: 700904215H1
gtggaaactcgtgcgatatgccgccgcctccaacctcgcccgatcgcggcggttctccgccgcgattcctggtccgtgcattgttcacaagcgcggtgccgacatactccatgacccctggttcaacacggatacagggtttcctttgactgaacagggatcaggttggggcttcggggcctcttacctcctcgtgttatatcctttgagcagcaatatgatcgctttatgaattcattccgatctttggagaataatactcaggggcaaccagataaa

SEQ ID NO: 26798 - DNA, 272 bp, Glycine max
  unsure (1)..(272): unsure at all n locations
  Clone ID: 700904216H1
tagccccttaccagccctcaaggaaatcttccgcactgatggtgaatgggttcttcaatttccaccacctcatgtagctgaagttagtaagtctgggtggatgactgatgaggaatttgctagagaggtgattgccggtgtaaacccaaatgtgatccgacgtcttcaagaattcccaccaaagagcacacttgatcccacactctatggtgatcanaccagtaccataacacaagaacaattggagattaacatgggaggggtcacagtag

SEQ ID NO: 26799 - DNA, 268 bp, Glycine max
  Clone ID: 700904218H1
ggaacataaacgaattgaaacatcaaatggctaaagatatggaggcaaacagtaagcagacttctgttgacaatcaacaagcaatacaggaacagccagttgagctgattgatagtggtggagcacatcaagctgaaccaggaaattccattaattggaattatcctaaagaagcttcggttgactatcaacaaacaatgcaggagcaatcagttgagctgtttgatggtggtggagctgttcaaagtgaaccacaaaactccataaa

SEQ ID NO: 26800 - DNA, 270 bp, Glycine max
  Clone ID: 700904220H1
attctagtggctgatattgcttctgcttcctttgttgtagttgaagtcgctcccctcattcttctttcgttgctacttctactgtttcttcctccgatccctcattgccgcaaatgactcctcctgctagtgttaggtgaattccctcgcttcacatgcatgatcgcaccttcaactctcttcttcttcttcttctccatggctttttttcaaggttttggcgccgtggagttcgttttggtgaggattctgattaaagagttttctttt

SEQ ID NO: 26801 - DNA, 270 bp, Glycine max
  Clone ID: 700904221H1
tcgaaaaccaaatccctaattttctctctcttcaatggcgccgcagaaactcaacgattacgaacggaagcgactcgagaacattcgccgcaacgatgaaatgatggctgccctcaaactccactccaaagccacccaactctccaacttcaagcgtagtcaaagggttggaaccaaatcctacaacatgaaatcggaaaagaaacccaaaaccgaaaccccaattgtgattaggcgctccctccgaacaagaggtattccgccagattc

SEQ ID NO: 26802 - DNA, 270 bp, Glycine max
  Clone ID: 700904222H1
gaaaagaagttaagtgataaggctaagtccaaagaacaagtaatgctcgatgatcattcccttcaagacatagagaaagttgcatccaaagagaacaatgagactgagaatgtggaaatgaatgattgcaatacaagtatatgcaagtctacctctgatactagtagtagtagcagtaacaagagtgtgccaaaagatggaaggaagaagcgacacgttgcttcagcatccacagcattactttttggcacaatccttggtctccttcaa

SEQ ID NO: 26803 - DNA, 269 bp, Glycine max
  Clone ID: 700904224H1
accgagtaagatttttcttgttcctttgttggtgggtttcctttccgcttcaggttcagcttcaacttcaaattctcagtgaaaccaattcagctgagtccaaatcccaaatccgaatcaaaatccgaagtgagatttgcgatggagaggcttcagcgaatgtttgcaggtgcaggtggagcgctagggcaccctcccccagattccccaactctcgattcctccgagcaggtctacatctcctcactcgctctcctcaagatgcttaa

SEQ ID NO: 26804 - DNA, 265 bp, Glycine max
  Clone ID: 700904226H1
cgtcaaactgttgctgtgggagtcatcaagaacgttgagaagaaggatcctaccggagccaaggtcaccaaggctgcccagaagaagaagtgaatcgtgcgggctggttcatcaggggatgttggttacaataaatgttggtttcttttctgtactcttgtgtcttcttttctaggtagcttgtttttcggacaaagtttgaagtctccaccatcatctcgcaactgttgtcccagaactggggttcttgatcgacggtgcaaaa

SEQ ID NO: 26805 - DNA, 269 bp, Glycine max
  Clone ID: 700904228H1
ctagggttatcatttctccatttccattttctctctcacttttcaagaatcgtaagctatgggaaagtcttacccaactgtgagtgctgattaccagaaggccgttgagaaggcgaagaagaagctcagaggcttcatcgctgagaagagatgcgctcctctaatgctccgtttggcatggcactctgctggaacctttgacaagggcacgaagaccggtggacccttcggaaccatcaagcaccctgccgaactggctcacagcgcta

SEQ ID NO: 26806 - DNA, 270 bp, Glycine max
  Clone ID: 700904229H1
gttttgtctctctcggaatacagggcgcaactctatgattatctgaagagtagaatgatcaccattgcacccaatttgactgcaatggttggggagcttgttggtgctcgcctcattgcccatggtggtagcttattaaatcttgcaaagcagcctggtagtactgtgcaaattcttggtgctgagaaggctctctttagggcactgaagactaagcatgctactcccaagtatggtcttatataccatgcttccttgattggtcaggca

SEQ ID NO: 26807 - DNA, 220 bp, Glycine max
  Clone ID: 700904187H1
atttgatgtgtctttactcaccattgaggagggtatctttgacgtgaaagtcactgctggtgacacccatcttggaggtgaagattttgataacaggatggtgaaccactttgttcaagagttcaactgaaacaacaagaaggacattagtggaaaccccagagcacttagaaggttgcggacatcttgtgagagggccaacataacactttcatcgact

SEQ ID NO: 26808 - DNA, 143 bp, Glycine max
  Clone ID: 700904154H1
cagaggtttgatatgcaagagttgctcagagcctctgctgagattttgggtagtggttgcttcagctcttcttacaaggctgccttgttgaatggcccatcaatagtggtgaataggttcaagcagatgaacaatgtcgggaa

SEQ ID NO: 26809 - DNA, 194 bp, Glycine max
  Clone ID: 700904155H1
cttttccgatgtacggaaccgagaataaccgagatgattcggaacgaacggcgttcagaagagcagagaagaagtacaagctctactacgactacaatgcttcttccaagaacaaaaagagaaaacaacctaaacccgtggacttagcggaggtccttgactttagatctatcgagaatgcagcaccaaaacgc

SEQ ID NO: 26810 - DNA, 249 bp, Glycine max
  Clone ID: 700904156H1
accccatctagtaacatggggtgtgttgccagcagtgtcatgtcgacgcagattggattccacaggactaatcatttctcactgggcctatcttcacaacaaacaccatataggtctctctctggggagattcatgctatttctccggcgagccgtggcggtggcggcgatgtatatgaggggcttgcacaacggggatttctagtatgcatagttgttctttgggtttccaattagtttgaaagcaac

SEQ ID NO: 26811 - DNA, 243 bp, Glycine max
  Clone ID: 700904157H1
catgggtttgtggaacacaacgaatgcagtgtcttgccgctttcacaagtttggtgatgaccaaaagaatctggtcttccaaggtgatgccacgtcttcttccaggggcatagaactcaccaaagttagacggtggaggaaaaccagtgggtggcagtgtggggagagtgttatactcttctccagtgcacctttgggaaagctctacagtggtcgcaagctttgaaaccgacttcacctttt

SEQ ID NO: 26812 - DNA, 244 bp, Glycine max
  Clone ID: 700904158H1
gtgatagtgagggtcaacagaggaggaacaatctctataaatagtagtagatacccaggcaacctcagattatactctcaacttggttcgttccgtgtgaatttgtgcaaacacaatagacagatggatcagttcaaaggacagcctcggcttccgggattcgtcgttccgaaacgctatgacattaggctcaagcccgacctcgtcgcgcaccgttatgcaggatccgtcgtcgtcaacctcg

SEQ ID NO: 26813 - DNA, 247 bp, Glycine max
  Clone ID: 700904160H1
tctggtgtttgatcttgaaaagggttccattctttatattgatctggcaaaatcaaactctagatctaaacgcacaaggatagatgacgagaaggctggcgcggataagaaagctagaggccttacaccatcatgggccactcctgattctggtaagatgatgttgttggcttggttttagtgcgttgaggttgtccgtgtatatggcttgcgtgaagtttctttcagtttactattgttgtgctac

SEQ ID NO: 26814 - DNA, 249 bp, Glycine max
  Clone ID: 700904161H1
gaaagctttcactcagacaagttggtggaggatggttagctcaggattcagatgactcaaccccacatgacatcaagttcaacgtagtctctgagaaggctccacaggatgatgagcttcgtgatgcagagtttgcatggttgtgtgtgaagcatgtcaaaagcaatgctattgtgatagctaagaacaattgcatgttaggtatgggaagtgggcaaccaaaccgtgtcgagagtttgagaatagcaa

SEQ ID NO: 26815 - DNA, 251 bp, Glycine max
  Clone ID: 700904163H1
taaagttcagttttttgcatcgtttttattaaaatttgttggcgaacaaaacagagaaaaaaaaaccaaaaaattgaaatttcttatccgttttggcgaattgaactgcgtgttcaattgggttgttgaattcgaggcagagggaaccgcgggtgtacaaggaatttcgattctgctgttgttagaaacggtgtagtttggtgtgagagaagctggggacttggggtggtcgtaacgacgtcgttgacgga

SEQ ID NO: 26816 - DNA, 162 bp, Glycine max
  unsure (1)..(162): unsure at all n locations
  Clone ID: 700904164H1
ccgacatcaacttataataattcctaatcagtgacaagtgttatggaggcagagccagacaagtacaagatgatcaactttgaagaaaccgagttgcgactcggcctgccactcagtggaaacgagacgacgcgcaaaaacacgttcagnatcgtggaagag

SEQ ID NO: 26817 - DNA, 248 bp, Glycine max
  Clone ID: 700904167H1
ggtattcgggtcgagcaatatcatcctgatgcgttaaaatggcagtggctactcgattgctctcccttgtcgatcgttggtccggcagcgagtgaagctgggcgcatcattccggggagttcggagggtccgcatgttgcacattgtcactacgcaggcctcttgcggaagccgatcttgccgttgattcctcgtgaagtgcttaggcctattgttttgccgtgtctcgtactacctcactggtgcat

SEQ ID NO: 26818 - DNA, 238 bp, Glycine max
  Clone ID: 700904168H1
gttgtttcacagagcgtggtcttatcaactatggcggagtaacagaacttggagaattcaggctagaaggcgattctccatgaggtctaggagatgcaatcaaacccttccgagtgactacatgagcctacctcttgaggaaaatatatttgaatcgcaatttgcgaatcagggggcctcgtgatactgaatttgaaggtcgtaatttcagggatcggattagatgccttcagaatat

SEQ ID NO: 26819 - DNA, 243 bp, Glycine max
  Clone ID: 700904169H1
agaaactccgttgttaccgttttgctttgttgaagattttttgaggttattcgcgttttcttcttttgcatgttcatttctccgtcgatcagtgaagtgtgaaacgacgccgtttcgttgctctcggctcgaactgatggagtgggtttctctgtgatctcgagggggagttcggcgatgtgtgagctaattcggtgcctggtgtttgattctgttttcgggtttgcgcatttttttgctcga

SEQ ID NO: 26820 - DNA, 238 bp, Glycine max
  Clone ID: 700904170H1
attgtgagggcattgggaatgcgatcgtgcatctcggctgttggagctggtggacaatgccctcctatacgtcctatttcgcctgaatcggacatggatggtggggagaagacaaggttaaggggttcctcttccgttgatttcagagtgcctgggagggtgttgttgaatgggtcaagcgatgatgcgtccatgcattgcaagcaatgaagaaaagtgatcaaccgagctgctatgc

SEQ ID NO: 26821 - DNA, 214 bp, Glycine max
  Clone ID: 700904171H1
tggcctctgagagatcctttgggaataaacgccagaaaacccaaagttttgttcttcctctctttgcaatctctacacagaagatttatggataaaatttgcaaatttggttcactgcagcactgttccgtcgcaaatttcttccaccgacaagtgtttgacctcgtggtccgtcgcttttcaacccttcgatatgattcattccttggtacgc

SEQ ID NO: 26822 - DNA, 242 bp, Glycine max
  Clone ID: 700904172H1
atcttcttcttctttcatggatgctttgaacttcctcaagttctggagaaacgccagcacgaccacaacctccgaaacccacctcgtggtagaatccgacatcgaatccgacgaagaagactcattcttcgactaggagcttacgccacacgagtttcacaacatagaaaacacgaccacaaccaaaactgacgacgaaccaaaacacacggcaacaacaacatcaacgatctcaaaagcat

SEQ ID NO: 26823 - DNA, 248 bp, Glycine max
  Clone ID: 700904173H1
ctggggatggagattgagtttgggaggtgctatggtccctgcccttataatcacaataggatcactagtccttccggacactcccaattccatgattgaaaggggtgatcgtgaaaaggccaaggctcagcttcggagagttcgcggcatcgacgatgtggaagaagagttcaatgaccttgttgcagctagtgaatcctccagaaaagtggagcacccgtggaggaacttgttgcaaagaaagtaca

SEQ ID NO: 26824 - DNA, 244 bp, Glycine max
  Clone ID: 700904174H1
gcttctgcatgggacttggtgtgattccaaacatcttgtgttcagaaatcttcccaacaagtgttcgcggaatatgcatttctatttgctccctcacattttggatctgcacattgatagtcacttctttatttcccttcttgctccatctccttggtcttactggggtctttggattattcgttgttgggtgcatcattgcatggatatttgtctacttgaaagttcctgaaacaaagggcat

SEQ ID NO: 26825 - DNA, 247 bp, Glycine max
  Clone ID: 700904177H1
ctcgagccggccagtccgagaagcctgacgtcacttataatgacattggaggatttgatatacagaaacaggaaatccgtgaggctgtggagctaccccttacacatcatgaactatacaaacaaataggtattgatcctccccgtggtgttttactgtatggaccccctggcactggcaaaacaatgcttgccaaagctgttgcgaatcataccactgctgctttcatcagggttgtgggatctga

SEQ ID NO: 26826 - DNA, 248 bp, Glycine max
  Clone ID: 700904178H1
gtggagatggctttctagacttatctccttttacttgctatctctcaatctcgctgctgcagcctctgattacccagctccctctacttatccctgtgaggacattagccattacgcttcttctgtgaagcattttagattcagaggtgaagcactcaaaagacaattgaatagcatcgttgccccacatcattccttgtcctacagagaggtgtgggatgccctcaaggttcttgatgctgctgata

SEQ ID NO: 26827 - DNA, 251 bp, Glycine max
  Clone ID: 700904179H1
ctgcttcctcatttgcaccaactattctcctaaagatgcccccaacatcatttggcatggctctcctaatggtctctggcatctcactcctctcatcttttgtgggcttctactcccaactcacacacttctgtttcctcacccacatttctcttctactagcctcattaataggacaagtgctgaccatattagcccttgttaccaaagagaaagctagcatgtcccttctgaagtcaccaagggacccc

SEQ ID NO: 26828 - DNA, 252 bp, Glycine max
  unsure (1)..(252): unsure at all n locations
  Clone ID: 700904180H1
tttttgttcccatttcacccctcgtctttccttgtttccggtgagggccaaccacaacatatgttaaacaaggaacaacctccaggacataacatcctacgccaaacaaaactttgacctccttcagagttagacccgtcgtgcgtgtgcgcgtcgaatttcgaantcttcantatgggcacggagggtcgacggccacaagagtggtttacccaacgcagtgggggttcaccgccntgcgttttccggcga

SEQ ID NO: 26829 - DNA, 186 bp, Glycine max
  Clone ID: 700904181H1
gccgaacttgggtcgtttcactaatccccctgattggcaggaaattcttacctattttcgtggatctgatctgcagagttattgtactcggattctacaggcttgtttgttggctatcatcaagcctctgtatgttgaccatatgccatcagctgtgcaagggtatgtggggcaggtgctagacca

SEQ ID NO: 26830 - DNA, 236 bp, Glycine max
  Clone ID: 700904182H1
gtttttgtgtaccgagcgaaacaaagaaaaagaaaaggacagaaacaaacacacacacacggagcgcggaaccaaatgaaatgattgagaagagagagcgaagaaaaaaaacagagccaaaccaaacctttcccgaaacggttcgttttgcccttcttcggaaccctcccttctgcgccgctgctgctgctccggtcgccgtcgggagtctccggtaaccgaagaccactgccgat

SEQ ID NO: 26831 - DNA, 242 bp, Glycine max
  Clone ID: 700904184H1
tagcatgttgtatggtatttatcttattattgtcgcattgtactaaactagctaaaaattgataccactcaacaaaggatgtattagatgtgaatcgccagcatcaaatatgcatttagcctgacggaagcacaagtatcagagaaatcctttgttgaatggtataagcttttagctagtttattatggtgtatggtatttaacatactagtgtctcactgtagtaatgtgttttggacgtg

SEQ ID NO: 26832 - DNA, 237 bp, Glycine max
  Clone ID: 700904185H1
aaaagaaagatagatcatattcatggcgatggcaagcctggctcgacggaagggttacgccgtcgtaatgtcgtcgaggtcgtcgttttgtctgacaagctggaggggattcgtgtccggatctgacgaaaacgacgtcgtcgtcatcggcggcggtcccggcggctacgtggccgccatcaaagccgcgcagtcggtctgaaaaccacttgcatcgaaaagcgtggcactctcggc

SEQ ID NO: 26833 - DNA, 254 bp, Glycine max
  Clone ID: 700904153H1
actctcttcgctcgtcgtcaaagaattcctatcttcatgctaggctggccttgctcgcaggcctggttcctccgtacttatatcgtcgacgcctccgcttactcttcaacgctttctgggattccttttcggctctgaccatggcgacgtcttcgtcatcggcggtggtcccggctgctatgtggccgtcatcagtcccgcgctgtctgtctatccaccacttgcatcgatgagcgtggcagtctcgggggtac

SEQ ID NO: 26834 - DNA, 233 bp, Glycine max
  Clone ID: 700904186H1
gcacagaacagttgaagtgactggcatagaaactgcatgttgcagagaaaggagagggtccagtggtgttgttcctccacggcttccctgagctctggtactcatggcgccatcagattctctctctcagctccctcggctaccgggccgtcgctcccgatctccgtggctacggtgacaccgaagcaccagcttcaatcagcagctacaactgcttccacatagtgggtgat

SEQ ID NO: 26835 - DNA, 246 bp, Glycine max
  Clone ID: 700904111H1
gaaatggcaacaagcgaagaagtggttgctacgcgcggaggagccgcgccggaggagggttgaagcacaaactggagagaaaatggacgttttggtgcgacaaccaatccaaacccaagcaaggcgctgcttggggaacctctcttcgcaaggtctacaccttcgacaccgttgaagagttctggtgtttgtatgatcaggtattcaagcccagcaagttgcaaatcaatgccgattttcacttgt

SEQ ID NO: 26836 - DNA, 175 bp, Glycine max
  Clone ID: 700904113H1
taagagtgaagacggcagatcgcgaagtctagatctgatctgagagaatgcgtcctcggtctagctgcgaggacgcccaagaccttttccgcgctctttggtctgcttgtgctgcaatccccactaatctcaagatcattgatctctatgtcatctatgccgtgttcagcgcttt

SEQ ID NO: 26837 - DNA, 212 bp, Glycine max
  Clone ID: 700904114H1
ctcgagccgattcggctcgaggtgagctgtggctttgcagggaactagagtgtcagtagaaaataaatgtcctcttcccagggacactctctatttcacagatctatatctaagtgtcggactatccctgttctccttcctcgctgagagacaactacaattacgctggcgcgactcgatttggtgaagcagcaactcgtcaccacaagcgg

SEQ ID NO: 26838 - DNA, 195 bp, Glycine max
  Clone ID: 700904115H1
aagaagttctcgtttaagacatccccagatcctggacagaagtctcggcaacgtgatatcatatgtggtggcatgggaaagaccaactcatcaaggatatggactatgacgacattgtttcccacatcgacgatatgcactatgcaagtggatagacctcacagggagacccactcacagctcaagtgcaagaat

SEQ ID NO: 26839 - DNA, 174 bp, Glycine max
  Clone ID: 700904116H1
gaaagatcatagacagagaattcgtctttcttggcgaacagctaaaaacctctgagggacagtatgcatctaatataggtgttcttcagaggtttcagtgcaccaagtgatgactagactctctgactgacggggcagtagaactaagagcacgtcccaacaagcatcatcatt

SEQ ID NO: 26840 - DNA, 229 bp, Glycine max
  Clone ID: 700904118H1
gtgatttcagtgagtgatcggtgttcacttgatctcatcataatcgtcagcgtcaattgaagaagatgccgatcagaaacatcgccgtcggaaggcctgaagaggcgactcaccccgacacgttgaaggcggctttggctgagttcatctcaactttcatcttcgtgttcgccggctcaggctccggcatcgcctacaacaagctcaccgacaacggcgctgccacccc

SEQ ID NO: 26841 - DNA, 188 bp, Glycine max
  Clone ID: 700904119H1
acttgaagcattgcattctgctatttaattccactacgtacacgctccgtctcgtcagagacaacaatggcaccaacaggcaatactctggcttacctgagccaggagagaaccctaggatacgagctcgctcggggacgacaagaaggtgccaagggtgccgacaatgaattgcgcggaagtggatc

SEQ ID NO: 26842 - DNA, 112 bp, Glycine max
  Clone ID: 700904121H1
tcgaaaaccaaatccctaatattctctctcttcaatggcgccgcagagactcaacgattacgaacggaatcggctcgagaacattcgccgcaacgatgaaatgatggccggc

SEQ ID NO: 26843 - DNA, 91 bp, Glycine max
  Clone ID: 700904122H1
attcatcatcaaatggtattccaatgcagtaaccaccaaaaactcaccccctttcacctgccaagtgttacctctcactcgggctaatctg

SEQ ID NO: 26844 - DNA, 219 bp, Glycine max
  Clone ID: 700904123H1
cgtacgtgaactctgagttctgctctcgttgcaacctgtcataaggtaccgactataaccgtgactagtcggatctatctgagctcagaagacaatcccatctctacaagctctactacgactagaatgcttctgccaggaatcaatagagaacagaacctacacccgtcgagttatcggaggtccttgacattagatcaactctagaatgctatgacc

SEQ ID NO: 26845 - DNA, 248 bp, Glycine max
  Clone ID: 700904124H1
ggaaaaccttattctgataaagattctgaattagttgaatctcctgcttccaaaggttctgtgattgcacatgaaatgacaccaatggaagttctggttcgcaataacaccaaggatatgatcaaaatgagtcttaatattacatgcagagatgtagctggggaaaattgtgtagatggtaccaaagcaactgttctatggactggtgttctgagtgatattactatggaaattcccccacttcaaca

SEQ ID NO: 26846 - DNA, 208 bp, Glycine max
  Clone ID: 700904125H1
gaagtgagaaggctgtgcaatgcaccataagcatctcaactcatgtctgcgttttccgtaaaatgtaatatttgattattagatttcttgtactaaaagtttgaataactaaagctaaattttttttccaagttgtaaaaaaaaaaaatggaagataaaaaaaaagaaagtggtggcctcttctcaagtggtcctttgggcagggtat

SEQ ID NO: 26847 - DNA, 251 bp, Glycine max
  Clone ID: 700904126H1
ctgatatgttgcaaacagatgatgaaggaatatcagcatgatattactaagttatgagcagctttagctgtggacacaatacccatttgtatttgttccctcacattttggatctgtacattgctattgactactatatttcccttcatgctccatctccttggtctcactggggtctttggattattcgttatctggtgcatcattccatggatagttgtctacttgctagttcctgaaatacagggcat

SEQ ID NO: 26848 - DNA, 172 bp, Glycine max
  Clone ID: 700904127H1
atgtcctaatctttctgcaccatcgttctccatttttggctttacaaaaccactgtgtctgattaagggttctttaatatttccaatatttcttgtagtgaaaaagttgttagctaaaagaagaccaagtttttgagtgtctgtagataggaagaggatatgaattaacatg

SEQ ID NO: 26849 - DNA, 247 bp, Glycine max
  Clone ID: 700904128H1
gagaagtgagtctgggaatctcattcagtgtttgagctgtcagagggagttcttctgcatggattgcgtaaaagagcggtattttgacactcaaaatgaaattaagaaggcatgtccagtttcttgtggaacttgcacttgtaaggattgctcagcaagtcaatgtaaagacagtgaaagtaaggaatatttgactggtaagagcaaagttgatagaatattgcattttcattatttgatctgcatg

SEQ ID NO: 26850 - DNA, 257 bp, Glycine max
  Clone ID: 700904130H1
tcgagaacgaggcttccaaaatgttttggtatgcaagatgcattgacaaggttgtttccttttctgctgtgaagtttatatgaatatatgtctccgttatgaatgaaatggtagccgtggaacaataaatataggaagatgttcctgtgtcattattgagcaattatactgtcaggactgtagcacagcctcagcttaagctcttgacatataaacttgattagcatgtgatttgtttgtgtatcagtatcagtttt

SEQ ID NO: 26851 - DNA, 221 bp, Glycine max
  unsure (1)..(221): unsure at all n locations
  Clone ID: 700904131H1
atgatctctgcctttataaaatgggtggaaatctttatcaacgaattgaaaaggagtgtgaagcacatatatctgcagcactgcagtctttggttggccaaagcccggatttggttgtttttctgtctctagttgagagatgttggcaggattctttgtgaccaagatgttgatgatccgtggtatagccttgtttctgacaggacaatgtngaagcaaac

SEQ ID NO: 26852 - DNA, 228 bp, Glycine max
  Clone ID: 700904132H1
tgctagttcagcatgagatgcagcaacaattccgaagccttagctccagggaacttggctccaactctgccactgttgctgctgccgctgccgccgctggttcccctgccaattcttggtcaaatatgggagtctccaactgcacgcgtgacttggcctacaagtcatattaactatggaagcatcgatgatcaacgtcaatttagcacgggtactacaggtagcagc

SEQ ID NO: 26853 - DNA, 94 bp, Glycine max
  Clone ID: 700904133H1
gttctatttgtaaccatcggtgtcagcgaaagttgagctttgttttagcggtgtacaacgtgttctcgctggttgaccttctacacaagatacg

SEQ ID NO: 26854 - DNA, 182 bp, Glycine max
  Clone ID: 700904134H1
atcgtgaggagaatatgaagttgtttgttttctttgttgctgcagtagttgtggtagcatggccatgccatggcgcaggctaccaaaggttccctctccgaatgaaaactggctatggtgagcgttcttcggaggtaaaatgcgcaagttttaggcttgctgtgggagcacacaacatccga

SEQ ID NO: 26855 - DNA, 202 bp, Glycine max
  Clone ID: 700904135H1
aatttctaattagggtttcgcttagagtaaccaataaccatgggagtcttcacctttgtcgtccgcaaatccggcagcgaatggagcgccaagcaacattccggcgacatcgaggcctccgccgagtccaccttcgatgtccaacgggagctcgcgcgaaacgctcttggcgttggaacccccgggggagttcagggcccct

SEQ ID NO: 26856 - DNA, 226 bp, Glycine max
  Clone ID: 700904136H1
cacactgcagcgagaaccaaagaaaaaaaaagcttcttccattttccgaaatcgaagcattagggttagggttttttccgatctgagaaattcgcggcccaatggcggaggaaccggagagcaccgtcaccaccggcgccgccgacgaatcgctgctcgataagatcaccgagaagcttcaggccacgattcttggcctctcatatccgacgtccgactcgagccg

SEQ ID NO: 26857 - DNA, 242 bp, Glycine max
  Clone ID: 700904138H1
atgaattccatagatgtagaggggtcatttagaaatgtctctggcgctgtggagtctcaatgtacagacaaatcccccaagtcttttccattgccaaatcatatgcctcaagagacaaatggtgctggtggagcatctcttgttcagggtataaaccagaaatgtgagggaaaggacatacctactcctgtgtcttaccagcaaggactgcctgttgatgttcctcagatttctgtgaatga

SEQ ID NO: 26858 - DNA, 248 bp, Glycine max
  Clone ID: 700904139H1
tattgatgtaataatatccccaagtaataccatgaatttttgttaatgtaataactctttgtccttgccctctctacacagaagatttatggataaaatttgcaaatttggtatcactgcagcactgttccgtcgcggatttcttccaccgacaagtgtttgacttcgtggttccgtcgctttttcaacccttcgatagattcattccttggttacgctttctggctctcaaataacattcaagctac

SEQ ID NO: 26859 - DNA, 121 bp, Glycine max
  Clone ID: 700904140H1
ataaacgataatattccatcctcgtttgtttgcgattccctctgacttttctcattggagggcgaacatccaatcagagatttcggtcatagaagaatatggcttcgtcttccaccagtga

SEQ ID NO: 26860 - DNA, 192 bp, Glycine max
  Clone ID: 700904142H1
ttctcgtgaacggtacctcactgggatcgccgtcgctgctgatagcggtggtgacggatcctccgacgtgtagttcgcggaatatgcacttctctgtgcgtccctcgcattttggatctgcacattgatagtcacttcggtatttcccttctcgctccatctcggtggtcttaccggggtctttggattatt

SEQ ID NO: 26861 - DNA, 248 bp, Glycine max
  Clone ID: 700904143H1
agctggtaacgaaagccttcagatcattaaatactctccttataaaccctgcaccatgatatcattatcatcaccttggtttgttctaagagtgttttatgtgagagtgtgtggcattcaggttgatgaatccaccccagagtttctctctctcaaccatattcctcttagtcctgatacccttttagaggtgaatggtgttaggagcagcatttactctgatggagaagagtcttcagttctgagaa

SEQ ID NO: 26862 - DNA, 96 bp, Glycine max
  Clone ID: 700904145H1
cgcgtacgagatctgggaattgggctcgtcgcaatcattccggtcggtcgcgaaatcttgacgtgatttgtcatgacattgtaatggtcgacatgg

SEQ ID NO: 26863 - DNA, 142 bp, Glycine max
  Clone ID: 700904110H1
tatcaaacagggcaagggttttgttgtcaaagtggagcaaactatttgcaaggaaccatgtaataaagaagcccaatggtgttaagacttctagtgatggtcataaagagatgatgctttctcggagtattggtcaacttat

SEQ ID NO: 26864 - DNA, 195 bp, Glycine max
  Clone ID: 700904146H1
gtggagatggctctctagacttatctccttttacttgctatctctcaatctcgctactgcagcctctgattacccagctccctctacttatccctgtgaggacattagccattacccttcttctgtgaagcattttagattcagaggtgaagcactcaaaagacgattgaatagcatcgttgccccagatcattc

SEQ ID NO: 26865 - DNA, 148 bp, Glycine max
  Clone ID: 700904149H1
acaaacacaacaattgcccttcgagtgtcgagtgagatcagaatggccgacttgatgagaagaatcctcctaatggaggccgagcaagcaagcaaatggtccaaacatgttacttcatccatcaacagtggctatcgtcacaacatag

SEQ ID NO: 26866 - DNA, 143 bp, Glycine max
  Clone ID: 700904150H1
tatctctttgtctcttcggctggtcttggcatctccgcagcacgaccacgtaacatacagatgataccaggtactatctctctcgacagagagcctggagcggagaaaaaaaaccagcgactaacaaggcggttttagcagcg

SEQ ID NO: 26867 - DNA, 146 bp, Glycine max
  Clone ID: 700904151H1
ggtaggcgtagctgctcacagattcgatgcgcatgcaccttgttttcgacatgcaggtctccggccaggtcccctgtggggatcacgtcagtctccacgtcgctgagtcagttgtgagtgacgctctatctggaggggcacgagcc

SEQ ID NO: 26868 - DNA, 248 bp, Glycine max
  Clone ID: 700904063H1
caaacttgcaacttctccccacctaatctatcattcatccacctccttctcctcttccattcccatgtagctttgattctttctctctaacatgggtctgaactacagaaatttgttcccaggaacaccatcaaactgtctacaagactgttcttatgatgataaatcatcatgttgtgatccttctaatttgctccctccaactcctcctatctactcagataatgatttgagccaaagtcccagca

SEQ ID NO: 26869 - DNA, 249 bp, Glycine max
  Clone ID: 700904065H1
attcgaggcgaatcggctcgtggattataattcatatcaaatccttaactattgtgtcaagtgtcaaaccatattctcatacactatttttgtcatgcttaaatatatccctaagttaataattgtgtcaagagtgacccaatagcatatgctcccagttccttgttgattccttgaacgcccgccaatgtaaaagagaatatccagtgctggagtccccttgcatgtgtcttagattcctctctttgc

SEQ ID NO: 26870 - DNA, 244 bp, Glycine max
  Clone ID: 700904067H1
ggttcctctcaggagtctgtttctaaatcaggtagtgaaaatgaaacatcaacaaccatgcaatgtaacaaatccaacaaaaagctctaagtagtcaatggtcccagctctcacttcggacattcttccagatcagtgcaaatcttgacaatggtaggtctgtagaagtagtcgatgactcatgtactgagtactcagataatcaggcagaaccctctcaaccaagccctcgtttacagggaac

SEQ ID NO: 26871 - DNA, 248 bp, Glycine max
  Clone ID: 700904068H1
tgttgatgctgtcatcaaaagtggtcctcgtgcagatgcaataagaaataccgcacgctcgaattgtaaggaggcaggctgtggatatttcaccccttcggcgtgtgaatcaggtcatatatcttctaacaactggtgcacgcgaagctgctttcagaaatattaagacaattgctgaatgcttggctgatgaacttattaatgcagcaaaagggtcgtccaacagctatgctatcaagataaaggat

SEQ ID NO: 26872 - DNA, 248 bp, Glycine max
  Clone ID: 700904069H1
ctagaaacagtgtgatgcaaatgaaggtccttgttttcttcgttactacaattttggtagcatgtcaatgccatgcgtacgatatgttccctctccgaatgaacactggctatggtgcccgtactccggaggtgaaatgcgcaagttggaggcttgctgtggcagcacacaacatctttggctttgagaccattcctgaagagtgcgttgaagcaacaaaggaatacatccatggcgaacaatataga

SEQ ID NO: 26873 - DNA, 251 bp, Glycine max
  Clone ID: 700904070H1
catgcttggctggggacgcgagaaccatggaagaagctgctggcatggcggtctcatccgcatcctgtggctggcatggccagttaagctgtgcgcattatggccagaagtgtgatcggtgagcatgaggaagactcgtcacagggcacgtgtcatcaggaagcccatggtacggtcgaaaccgagtcaagtacttgggctcattctctggcgaccccgggtactatgtaaccggtgagttcggatgtgac

SEQ ID NO: 26874 - DNA, 247 bp, Glycine max
  Clone ID: 700904071H1
tttcggattataccataattttctgcagactctgatggaagctgttaattttacaggcaatggatgcgatatagaagttgtattcaagtctccccatagatgacatacaaagattggagctagaagtatctaacacatgctaattgcagctgataagataactgtgatccatagcttagggtgtctgatttctgatatgaccttcttacaggatgatgatttgacaaatgtatgtatccagagtgcg

SEQ ID NO: 26875 - DNA, 248 bp, Glycine max
  unsure (1)..(248): unsure at all n locations
  Clone ID: 700904072H1
aataatcactcattctcccaaatcaattccactctcaaccggctttctntagcataagcccagcatggccaccgcaacagcagcagccacctcgtccttcatggggaccctcctcctagaggcccactccggggcagggcgggtgcaggcccggttcgagtttggcaagaagaaagccgccgccccgaacaaagtttccagggggtcgggctctagctccgataggcccctgtggtatccgggcgcca

SEQ ID NO: 26876 - DNA, 234 bp, Glycine max
  unsure (1)..(234): unsure at all n locations
  Clone ID: 700904074H1
acaaccacagtgacaaccgngtacaatgggagcganatagtagatagcactactgacataggtgctgcgcgctggacagaatctgagattgcaaggcttcaacagttgagagctgagatggacacaaggtatatgcaaagtgactcttcagaagaggttaactcggaggaaatagctaccaaaatggcttgttttggctacgaaaggcatgctgtggtcttcaaagagaaatgg

SEQ ID NO: 26877 - DNA, 268 bp, Glycine max
  Clone ID: 700904075H1
tcggtattcggctcgatggcaccttggcagcaggtatttgtactggatacgcggtcatttgtagtgctggagattcatcgactgaaccctatatctgttgacactacttattacttgctcatggatctgctgccatattatacaagacaaaatatcaggttcgtcagaaacggcaaattgggatcactaatccaatacactactttttgccaaaatctcaaagtgctgtcgattacaatgcagtaagcagagctctggacttcttctt

SEQ ID NO: 26878 - DNA, 268 bp, Glycine max
  Clone ID: 700904077H1
gctcggggttcggctcgagcgaaatatggcttcaactcatctgctttccctagcatcgctcttcttacttctctccgcttcttatctccagattcctggggcggaagcacaaccgttgactagtctcaagcttaactctcatattcttcaggagtctactgctaatgagattaatgaaaatcccgaggcaggatgggaggctgctataaatcctcgtttctccaattatacagttgaacaatttaagcgccttcttggagtcaaacca

SEQ ID NO: 26879 - DNA, 268 bp, Glycine max
  Clone ID: 700904078H1
actctgaattcggctcgcgcactactcacaactcacagcacaaaccgtaacagaaccataccatgagaacccaacggcttaacaatctccttcttcccctcttcctcttcgcagccgcattctccagcctccacccgacggccaccgccggagacgaaggcgcaccgtctgcaggcgacggcgaccgcgacgccgatttcatccgcactagctgcaacaccacgctctacccggaagtgtgtttcacctccctctctcgctacgccaa

SEQ ID NO: 26880 - DNA, 249 bp, Glycine max
  Clone ID: 700904081H1
gggaacacatagatgaactaattttctcaaacaaaaataagcctccccttgcatcagataccccaagatttgtgtcactcactttgactttgctagccctcacatactttgtggctgtggccatcccaaatatatggtttttttttcagttcttgggatccacaaccattgtttgcacctcattcatcttccctgccgcaattgttctaaggtatactactaccaatttccctgctttttataatatac

SEQ ID NO: 26881 - DNA, 250 bp, Glycine max
  Clone ID: 700904083H1
gattattatagcaatggcagatcaaaaccagaaccatataactgaagctggaaggcatcaagaggttggctacaagagccttctccagagtgatgctctttaccagtatattctggagaccagtgtctactcaagagaacctgaatccatgatagaactgtgagagttgacagcagaacacccattgaacatcatgacaatctctgaagacgaatggcaattcttgaacatgctccttaagctcatcaat

SEQ ID NO: 26882 - DNA, 253 bp, Glycine max
  unsure (1)..(253): unsure at all n locations
  Clone ID: 700904084H1
agaacatgcttagaaaactgccaagcccacccatattccctcaanactttcaaccatgaactgaacaacaacaaccacaaccacaggccccccccganagacccacctccaacgagatcacttctattaccaattttccgactacacagagcccattctttgtgggcatctcttcaaaaatgtcaagcttccccaacacggtggcggaaggccgcaggtccggcaacgcaccggaaaacatccaccttttctc

SEQ ID NO: 26883 - DNA, 159 bp, Glycine max
  Clone ID: 700904087H1
ggaatattcctagcaaactgccaagcccacccatattgtctcattactctcaagcatgcaatggccaacgccacagcagctgccacctcgtactgcatggggacgtgtctcctgggggcccactccggggcggggcggctgcatgcccggttcgggtct

SEQ ID NO: 26884 - DNA, 247 bp, Glycine max
  Clone ID: 700904089H1
gcctgactctttacctggactcgctgcagaataagtctccttctagaatagccagtggtcctcactttgatagggaatgtcattgggcatgaaactgccactattagcgatggatatctcgttggtcctgttgttacaatcggtactggctgtgttgttgcatcaggtgtcatgctttcacgctgcacaattatgataggttttctgcgtaacaagcatacttgcatatccaacagtatcatatggt

SEQ ID NO: 26885 - DNA, 248 bp, Glycine max
  unsure (1)..(248): unsure at all n locations
  Clone ID: 700904090H1
caacgacctagggaacagaaccacgccgtcttacgtcggattcactgacaccgagcgtctcatcggtgatgcggctaagaatcaagtcttgatgaacctcatcatcaccgtcttctanttctttgggntgattggtcgtagattcagcgattcctctgttcagagtgatatcaggttgtggcctttcaaggtcattcctggtgctgctgacaagccaatgatcgtggttaactacaagggtgaagaga

SEQ ID NO: 26886 - DNA, 248 bp, Glycine max
  Clone ID: 700904091H1
gtggtggggttggcattcttggcattgcatgggcctttggtggcatgatcttcatccttgtctactgcactgctgggatttcaggaggtcacattaacccagcagtgacatttgggctgtttttggctcgcaaggtgtctttgatccgagccatcatgtacatggtggctcagtgcttgggtgctatctgtggagttggtttagttaaggctttccaaaagtcttacttcaacaagtatggtggtggg

SEQ ID NO: 26887 - DNA, 247 bp, Glycine max
  Clone ID: 700904092H1
tgtgccttcattctcgtcgatctctaataatgttgccttatgtttcgcttccttttgtaatggttctgtctgatggatttcgttccctttgttatctgcccttgctttacaattcaaagtaatcaaaggagaaaaatgtttggttgttttatgaagcaactgaacagtatcaaagatgatatattgcgcaataaaacaaccaaacatttttgatactgttcagttgcttcatgtgatcattgcttgt

SEQ ID NO: 26888 - DNA, 249 bp, Glycine max
  Clone ID: 700904093H1
tctgaagcgaaacagattcgcaaaaaaaaattaaaaaatcccaattctcttcgcaaaaatcgaaatcaatgtcgaaaactccgaaggagaaggaaacggaggagcctctgccagaccacctccgctgcgggcgcagcgacgggcggcaatggcgttgccggcggcgagtgaaggagaatctgaagctctgcgagattcactacctccaaggtcgccaccgccagtacaaggagaaggttcccgagtcgc

SEQ ID NO: 26889 - DNA, 242 bp, Glycine max
  Clone ID: 700904103H1
aatgtctaattatggttacgcttacagtaaccaataaccatgggagtcttcacctttgtcgtccgcaaatccggcagcgaatgtagcgccaagcaacattccggcgacatcgaggcctccgccgattccaccttcgatctccaacggaagctcgtgcaagccgctctcgccgttgattcctccggtggagttcagtcctctttctctcccgtgtctcctacctccgctgtgttccaggtgat

SEQ ID NO: 26890 - DNA, 231 bp, Glycine max
  Clone ID: 700904104H1
cacactgcagcgagaaccaaagaaaaaaaaagcttcttccattttccgaaatcgaagcattagggttagggttttttccgatctgagaaattcgcggcccaatggcggaggaaccggagagcaccgtcaccaccggcgccgccgacgaatcgctgctcgataagatcaccgagaagcttcacggccacgattcttcgtcctcttcatctcccgagtccgactccgactccg

SEQ ID NO: 26891 - DNA, 237 bp, Glycine max
  Clone ID: 700904105H1
gtttattatggtgtatggtatttgacatactattgtgtcattgtcagtagactagctaaaagtttataccattcaacaaagggtgtattacatgagaatcgtcaggatcaaatatgcatttggcctgagcggaagcacaagtatcagaaaaatcctttgttgaatggtatacacttttagcgagtgtattatggtgtatggtattaacatgctattgtttcactgtagtaatgggtt

SEQ ID NO: 26892 - DNA, 245 bp, Glycine max
  Clone ID: 700904109H1
gtatggttatagtggaaggctaaagtggctcgagaggttcgcatatgtgaacaccacaatctatccagttacttccattccccttctcatgtattgtaccttacctgctgtacgtctcctgactaacaagttcattattccacagattagtaacattgcaagtatatggtttatctctctctttctttccatctttgccacgggtatccttgagatgaggtggagtggtgttggaattgatgagt

SEQ ID NO: 26893 - DNA, 228 bp, Glycine max
  Clone ID: 700904061H1
gtgaacctccatagcgtggagccagggtacgtgaaccagggttatcctctgcagccacctctaccgtactacatgcacccgcacgcacctccgccacagatgttcagcgatgagaaccccaatgcttgttccatcatgtgataatcagtgattaattttcgttttcggtgtactcttacacacggacggaatacgggatacggaatatgcacgcacgttgtaatttgt

SEQ ID NO: 26894 - DNA, 249 bp, Glycine max
  Clone ID: 700904025H1
aattaattcgcttgaacagaaaacagagatggggcttaccccagaaacctcggactaaagtttttaaggaacttaagctgagtggtcttaaaactgcagttcatgatgttgagttggacatggagaaacatgtcaacagattgggagaatgtagttctgatatcagttcatgcccaatgaatgaagatagttctcctcctgataccaagaagtacagtcggggtagatacatattgcagtttgataaat

SEQ ID NO: 26895 - DNA, 67 bp, Glycine max
  Clone ID: 700904026H1
tgcctttgcataatgatgtccatattcctgctattctccttgctcgactcattctcgcaagtgttgg

SEQ ID NO: 26896 - DNA, 248 bp, Glycine max
  Clone ID: 700904027H1
gtcgcgcttttcagagctgagactgactcagaacaacttgcaatattgggaatagcatttacgatattggatgaactgttaccaaatgctgtgttatcaaggtggatgctgcaaagtgaaagcaaggccaaggaaccaaatagtggagcaacagagaatgtaaccttcaatacaaatgctagtgtagaattgaaggagtggaggaaacatcttcagcattcttttgacaaacttcgggatcacttctg

SEQ ID NO: 26897 - DNA, 131 bp, Glycine max
  Clone ID: 700904029H1
actctcatattcttcaggagtctactgctagctcgattaatgagtatcccgaggcaggatgggaggctgctataaatcctcgtttctccaattatacagttgatcaatttaagcgccttcttggagtcaaa

SEQ ID NO: 26898 - DNA, 243 bp, Glycine max
  Clone ID: 700904030H1
cacagttatactctctctctctttgtcgcttggatcacagatctcatctcaattttcagctatgtcgacatttgataagccagaagtggtggaaatgggtagcaaggatgacaaacacaaggaagatgatcaagaggaggggaagggtggattcatttagaaggtgaaggatttcattcatgacattggtgagaagattgaggaagctattgggtttgggaagccaactgctgacgttactgc

SEQ ID NO: 26899 - DNA, 242 bp, Glycine max
  Clone ID: 700904031H1
caattacaacacaatcagtctgtgattcgccaccgaaaaacctctcaccatggtttctcgccatttggtttcgctcttcctctgtttcctctgtttcgagatctctgtttcatcaattcgattgcccggtttggaccaagacgccaaggccacgcatggatcggtgcttaggttgaacagaggaggctcttcagtgaagtttgatcccacacgggtcactcagctctcgtggagtcccaggg

SEQ ID NO: 26900 - DNA, 252 bp, Glycine max
  Clone ID: 700904033H1
cccttcctttcaatttttttcctacctacctaccaatcaacacctcgctggttcttgcagtggcgttacacatggatcggattccgatctacacgccgatggtgctaatcggaggattcgaagcctggtgccacggatctacctactgtacagaggtgtggcgatcgtgttcgtgttgctcttaaggtcgctttcggaagatcgtttgttcaacgatcggagattgcagcacagatcgagtgaagaaagcgt

SEQ ID NO: 26901 - DNA, 251 bp, Glycine max
  Clone ID: 700904034H1
gattggtgctgatcgtaccgcatctatagaaacagtaatgaaccatttgcaagaaactgcacttaatcatgttaaaagttctgggcttcttggtgatggctttggttccacgccagaaatgtgccacaaagaacttgatatgggtggttactcggatgcaggttgtggtggaacgctatcctacatggggtgacatagttcaagtggacacttgggtttctggatcagggaagaatggtatgcgccgtgat

SEQ ID NO: 26902 - DNA, 254 bp, Glycine max
  Clone ID: 700904035H1
tgcataatgggcaccaccaagagataaaaaaaaaatgattaaaagctaaggcagggagcaaagcacactgcaagattctacttcttcttcgtgtttcgaaagcgaaggggaaaaaaatacatagcatcaatcatataattagaagtcgaagaagtagcaagatcaattaggtatttagggtcaccaaagcacgatcagcgaaattttcaaggtcaactctcttttccttcttcccattttgcccttaatttttc

SEQ ID NO: 26903 - DNA, 236 bp, Glycine max
  unsure (1)..(236): unsure at all n locations
  Clone ID: 700904036H1
ctttctcctaaaacatctccagtgggttcttctgcttccataagacatacgacacgcangancatnancatggacatggccatgatcctgctcctcttcacggtcttcgccgtgtcatcggccctagacacgtagatcatcccgtacgacaacgcccacgtcgtcacgtcgctcagagacggcagcttaactccatgtactatcagtggctagggtagcacagcaacgaggacaac

SEQ ID NO: 26904 - DNA, 252 bp, Glycine max
  Clone ID: 700904038H1
ggcacggtaagatgcagaccattgctaggcgtttagggcagcaatcgctgaggccatcgacgtcgctcaagtccatctatccaatttccgatcaccattatggaatggatcacgagcgttacgtttctaccctcgccaccaagggagttggtcacctcgttcgtaagggcactggtggacgatcctccgtcagtggcattattgctacagtatttggggcaactggattcttaggtcgttatgttgtccaac

SEQ ID NO: 26905 - DNA, 252 bp, Glycine max
  Clone ID: 700904039H1
ctgcaaaaggagggatgaggaggaagcatcatcgtgcatggcgtcttgttgaggtgattaaattggtggaagcggtgtcacggtgtggagcagggaggtggtccgaaatcaaacggctctcctttgcatcatactcatatcgtacctctgttgatcttaaggacaagtggaggaacttgctcaaagctagctttgcactgacacctgcacctgcagatgaggggataaatttgcggaagcatggtacggctc

SEQ ID NO: 26906 - DNA, 81 bp, Glycine max
  Clone ID: 700904040H1
tctcaattcgcctcgagagtaatcactcattctcccaccccaaacactctctcaaccggcccatttacacttaacgcccag

SEQ ID NO: 26907 - DNA, 224 bp, Glycine max
  Clone ID: 700904042H1
ggtaactggaattcagaaccacagtgaaaacccgaatgaagatgggagtgaacgtataaatagcactactgccagaagtgctgaaagctggacagaatctgagattgcaaggcttcaacagttgagagctgagatggagacaaggtatatgcaaagtgggtgttcagaagaggttatgtcggagggaatagctacccaaaatggcttgttttggttacgaaagg

SEQ ID NO: 26908 - DNA, 248 bp, Glycine max
  Clone ID: 700904043H1
gtttcccaaggaaagaaagaattagaataggaccgacgatggttagtgttgtacgtgttcccccgaaacaaaaacacatttgttgtcacatcaaaatacttaaacaagggggtcctcgaccaagagaccccgccaacccggaaattatttccggacgggtacttgggggcataacagcttcccccaaattgagtcgaattaccccttgggctactcatggccatggcggtttccggggtcaagttttc

SEQ ID NO: 26909 - DNA, 249 bp, Glycine max
  unsure (1)..(249): unsure at all n locations
  Clone ID: 700904044H1
ggcggcgtttctgtgaacctcggaggactcaacgagagacacgatntgtgcggttgcttgcgggtcaaggcaaacgcacaagcccctccgaagaccatccagaaggttgagaatgatttgccatggttgccgtcgtcgtcgatttcgcacgccccgaggacttttataaatcagttacctgactggagcatgcttctggccgccatcaccaccgtgttcctcgcggcggagaagcagtggatgatgctg

SEQ ID NO: 26910 - DNA, 249 bp, Glycine max
  unsure (1)..(249): unsure at all n locations
  Clone ID: 700904045H1
cgaaatatggcttcaactcatctgctatacctagcaacgttcttcttacttctctccgcttcttatctccagtccgctggggcgttnaganaaccgttgactagtctcaagcttaactctcatattcttcaggagtctactgctaaagagattaatgaaaatcccgaggcaggatgggaggctgctataaatcctcgtttctccaattatacagttgaacaatttaagcgccttcttggagtcaaacca

SEQ ID NO: 26911 - DNA, 251 bp, Glycine max
  Clone ID: 700904046H1
cactactcacaactcacagcacaaaccgtaacataaccaaactttgagaacccaacggcttaaccatctccttctctccctcttcctcttcgcagccgcattctccagcctccacccgacggccaccgccggagacgcaggggcaccgtctgcaggcgacggcgaccgcgacgccgatttcatccgcactagctgcaacaccacgctctacccggaagtgtgtttcacctccctctctcgctacgccaatg

SEQ ID NO: 26912 - DNA, 246 bp, Glycine max
  Clone ID: 700904047H1
gtttttgaaatgttgtcaccccttcttctatttctatgcctaactcttcctttgtttttgtcgcccttcttcaaataccgtaaaaccttcattaatccaccacttccaccaggtcctagagcccttcccataatagggcatcttcatcaactagatagtccttctcttcatgagcagctatggcatctctcaaaggaatatgggcctttattttcccttcattctggattaaggccagccatagtt

SEQ ID NO: 26913 - DNA, 203 bp, Glycine max
  Clone ID: 700904049H1
gcaagtgcaaggcatagatgcactagttgtcccagacaaaaataagtgtcccatgatatcagatacgccaagatcagtgtcactcacttatactgagcgagccctcatataatcagtggccgcggccatctcaaatatatgggcagaaaatcagatcctgggatccaggaccattgtctgcacgtcattcacagacactgagg

SEQ ID NO: 26914 - DNA, 237 bp, Glycine max
  Clone ID: 700904050H1
gtttctttcttcaacgtttccatcatacacagatcccaatcctctctcaagccctaatttcccctcatttccatcgccatacggagaggtagcccctctggtgcaggctcggctgaatgttgtggtgttggatagttctccagggaactcaatttatcagttggcgatggtgaactatgtgaagagggtgtaccctgagcttgatgtgattggggggaatgttgtgactatgtacca

SEQ ID NO: 26915 - DNA, 251 bp, Glycine max
  Clone ID: 700904051H1
tacagtttgtattattgtagcagagagatggagagtgatggcgttgaggatgtgcaggtacgtgatggttgcttcgttgcttttcctattggagttcactgcgacagttatagatgcgcgcttacgagtcaagttcattgatccctcatttacgccccaattctgacgccaccgagtacgatgttaattcgacatcaatagcgtgctgtcatagctgtccttgctcgtgatcaatctcttcagggtggcgt

SEQ ID NO: 26916 - DNA, 251 bp, Glycine max
  unsure (1)..(251): unsure at all n locations
  Clone ID: 700904054H1
tgttgatcgagataactagaaacagtgtgatgaaaatgaaggtccttgttttcttcgttgctacaaatgtggtagnctggcaatgccatgcgtacgatatgttccctctccgaatgaacactggctatggtgcccgtactccggaggtgaaatgcgcaagttggaggcttgctgtggaagcacacaacatctgtggctttgagaccattcctgaagagtgcgttgaagcaacaaaggaatacatccatggc

SEQ ID NO: 26917 - DNA, 162 bp, Glycine max
  Clone ID: 700904055H1
tatcaggcgagaaaaggtcaccatcgacaggccgtcggcgggggctgcgcagctgacgacggtggtgacttcgaccactctccaaacctggatctatgcgaacttggaaagcgctaattagaaagccgcttcgtctatgagcatgagaagggtcgacccagt

SEQ ID NO: 26918 - DNA, 147 bp, Glycine max
  Clone ID: 700904057H1
tcaaaagtatatattttatgtttcagtaacaacactaccaaaaaaaggcaaaatggatctgcaaaatgtgcaaaaccatagcatgatgcgtttggttctgtccactgatgccaagcctaggctgaaatggactcctgagcttcacca

SEQ ID NO: 26919 - DNA, 255 bp, Glycine max
  Clone ID: 700904023H1
cacagacacacccttccatcaacgttaactccgtcaaaatcaacggcaaaaaggtttctttcgacacccccttgggtgggggtgctcagctgagcacggtggtgccttacaccactctccaaacctcgatctatgcaaacttcgaaagcgcttatttgaaagccgcttcgtctatgagcatgaaaagggtcgatccagtttccacctttgggctctgcttcgaatccaacggcgttggaagctcccaagtggggg

SEQ ID NO: 26920 - DNA, 251 bp, Glycine max
  Clone ID: 700904059H1
cactaagacctgaataggggatcgagaagcaaggaatctattctttaaacaggcatgccttcttttaatcatctccttctgcaccatctatcacctcctccttctctttcaaaaccatggaagatttgaacacgattggcgctgattgtgtggtcatatcatgctgctgccagtgcttgatgcttcaaattcttgtatttgtgttgctgaagcttcccgggaagttgataaggaaaacaagagaatatgct

SEQ ID NO: 26921 - DNA, 244 bp, Glycine max
  unsure (1)..(244): unsure at all n locations
  Clone ID: 700904060H1
ccctccccaaaaaaaacaagctganananaaattaatcaaatactacttcgtgtgggggctagaaaatgggnnantctgaggaaaacagtgatgttgctgccaggcagaaggcaatcgatgattggcttcctgtcactggttcccgaaatgccaaatggtggtcttcagccttccacaatctcacagctctagnaggtgcaggtgtcctcagccttccatttgccatgtcaaatatgggctggg

SEQ ID NO: 26922 - DNA, 245 bp, Glycine max
  Clone ID: 700903962H1
ctatagtaaaaaaaggacattcattcatctatggctacccttattgctcccagcaaccactctccccaagaagatgctgaagctctcagaaaggcttttgaaggatggggaactgatgagaacactgtcatagtaattttgggtcatagaactgtgtatcagaggcagcaaatcagaagagtttatgaggaaatttaccaggaggatcttgtgaagcgcctagagtctgagatcaaaggagactt

SEQ ID NO: 26923 - DNA, 211 bp, Glycine max
  Clone ID: 700903963H1
gagtctgcatctagacgaaaacacaaggatgcatctagagatgggtctggcagttctcgtgaacttgaatacgaagctaaaaggatagagaaggagaagggtccatcctcgtctgatcagaggaaacaggatatgtcatacgcggaagatgctcctgcaagggaagaaggccttgcatctatggcagcagcaaactccatcaccaacaata

SEQ ID NO: 26924 - DNA, 241 bp, Glycine max
  Clone ID: 700903967H1
tgcttccatcctccacaaaagatttaacctgttattaccaatgctcctccgcatttcatgcggaatagaccttccaatctttcttctgaacattgtttccctctatattctgtcagtgattggaagctacttcagctttgtcaatctgctatatattggttttctctgcatgcaaacgctgccaattgtgtatgaacggtatgaggaagaaatcaacaactgggtcggcgatgtcataata

SEQ ID NO: 26925 - DNA, 239 bp, Glycine max
  Clone ID: 700903968H1
aagaggctctccatgccaatgtaaccaacctcaaacatgactgggaaccctgcagcgatgtcataacaaagtgggttgatcaagcttcaacagttcttccacttttacatgaattcctcaacaatagcctcagggtttggattttcagtggtgacacagatggaagggtgcctattacatcaaccaagtattcagttaagaagatgaaccttcccattaaatctgtttggcacccttgg

SEQ ID NO: 26926 - DNA, 238 bp, Glycine max
  Clone ID: 700903969H1
gttgtgggctgctccagcctctgtctgtggttggtcttatcttttgctgaaacttgaaattgaatctctctcaagcttcctttcttaaaaggttaggaatttgaagcagaagtaagaactaggaagagatgggagtggatttgagacaagtggtggcaggtgtcctcaccctcacaatgtttgtaatgcttggaaatatgatcaaaagagaccacttcgataattcacttcaagaaaa

SEQ ID NO: 26927 - DNA, 228 bp, Glycine max
  unsure (1)..(228): unsure at all n locations
  Clone ID: 700903971H1
cggctcgattctgcagcatatatttgtactcctgactgggcggcaactagatgaagcagtgcagctggctgtgtccaaaggagatgtgaggttggcttgtttgttaagtcaggctggtggttctactgtgaatcgctctgatattgcaaggcaacttgatattntgagaaataaaggcctggattttagtttcattgaaaaggacagattgagactctatgaattgct

SEQ ID NO: 26928 - DNA, 74 bp, Glycine max
  Clone ID: 700903972H1
aagcaaccatggcaatggcaacccaagcctctctcttaaccccagccctctccggtctcaaagtcagcgaccgc

SEQ ID NO: 26929 - DNA, 241 bp, Glycine max
  Clone ID: 700903978H1
gagctcctgagccaataaaacaatctctctgtcttcccttgaagaaggagaaatggggggaaattaaaagggaaaaaggcatataaccggaaacaatcgcgtttcgaattcaaaatcactcgtttctcgcttctcctttcgttcgacgcatgaatgcaggggcttcaccgcttcagacttcagtagcagagtgacagaaattagaaactcaaaaaagtaggcgcaccgagtgagaaaccat

SEQ ID NO: 26930 - DNA, 246 bp, Glycine max
  Clone ID: 700903979H1
cctctgtgacatttgtgctgctagttcatatatttgcggctgacaccgagaaggaaagcaggaaaaaaacaaaaaggagcagatgggtagctcaggtttctcatggaaattggcggatcatccaaagcttccaaagggtaagactgtggctgttgtggtattggatggttggggagaggccacacccaatgagtacaactgcatccacaaggctgaaacaccctgcatggattcacttaaaaaggg

SEQ ID NO: 26931 - DNA, 226 bp, Glycine max
  Clone ID: 700903981H1
gatgtcagagagcctgaaagtatagtacattctggaagacattcaagtaaaaggtcttctttcttacgatctataagccaagagtcactgggagtaggaaacagtggccgccattcattctcagcatcatttggtgtgcccacatctgttggcttcatagaacctgcaggtgaagggcctcaagatcctccttcaacagctccttcaccaccagaagtgcctcttt

SEQ ID NO: 26932 - DNA, 243 bp, Glycine max
  Clone ID: 700903983H1
cttaaattggcttccttatcttgggggaatcccgacattcaaagctatattgtgtttaatgatagcttttggtgttacaccaacagtcacatgcaatgttagtaatgtttacaaggttgtgaagggaaagaatggaagcatgccacttgcattggcaatgctttacccatttgttgtacttgtgggaggagtgcttgtgtgggattatttgtcaccatcagacatcatggggaaatatccaca

SEQ ID NO: 26933 - DNA, 234 bp, Glycine max
  Clone ID: 700903986H1
gcagagagtgcggtaggctcatccgagaccggaagcagcaatggggatcgatctcaaggccggaggtacaagcaaaaaaaccaaaagaacagcacccaagtccaatgatatctatcttaagctcttggtcaagctttatcgcttccttgttcggagaactggcagcaaattcaatgccgttatactcaagagattgttcatgagcaaggttaacaagcccccattgtctttgtc

SEQ ID NO: 26934 - DNA, 234 bp, Glycine max
  Clone ID: 700903987H1
ctcgtattcaacttttggattggcaatagagttgtctgagacccgagaagacagcgggaatggattcctcatttaatttggcttttcttatcaatggaagcccatgcatgcacatagatagatgaaaagtgaaaactagtctcctctatatatccttgtcgttggttacacgtttggcctatagagaaaactaattttcaaaaaatgaatggtaaacataaaactggatcacgg

SEQ ID NO: 26935 - DNA, 221 bp, Glycine max
  Clone ID: 700903992H1
agagaatttgccttgaggtcatttaaaagtggtaacacccccatattggttgccaccgatgttgctgcacgtggtcttgatattccccatgttgctcatgtggtcaactttgacctgcaaatgacattgatgattatgtacaccgaattggaagaacagggcgagctggaaagaaaggtcttgcaactgcattctttaatgacaacaattccacactagat

SEQ ID NO: 26936 - DNA, 246 bp, Glycine max
  Clone ID: 700903996H1
cggctcgagcggctcgagtcgtctttcattttcttattcttcaccgaaccgataagcaggtgagactaatccatcatccaaacctttccgatccaatgacctctaaactaattgcttccaatctccgtcaccaaatcacaaaatcagctcaaaaccttcgccgccagcttctttccacggcggcggcggtgccggtgcctgaacacgatgggaacaactccaactcgtcgggaatgacgatgaagg

SEQ ID NO: 26937 - DNA, 239 bp, Glycine max
  Clone ID: 700904001H1
gtgatgcctcactattgtctctctcttgttctgtcttttctctccttctgatttggctatcacacacttctctaagggatagaggtttatgaataattttctagtcatggtgctggaaagaaatcttgttggtgaagccatcatgcactgctttggtgtcctcttcaatgttggccctcactagtgtcatctccatctccttgtcctcaatagtgaaacttccttgggataacctctgg

SEQ ID NO: 26938 - DNA, 254 bp, Glycine max
  Clone ID: 700904003H1
tctcgagccgaatcggctcgagttcaatttcaatttcaatttcttactttctagacgttacattctctctcttccaaagtcacacacacctcattctctctcttcttaaccctctctgatgtttcctcagtttcatcgatgtagagtgaagccttaactcttctgcttcttccgtgttcagatctcgttgttgttgcttccgattctttgattcttcgcttttttcttctcacttcacattccgattcgtcgca

SEQ ID NO: 26939 - DNA, 175 bp, Glycine max
  Clone ID: 700904004H1
caaatttctccatagttatgggcacttccattctcgacgacctgaacgttcgcgtcccaggttccggcgacaagtaccttgtcctggcccacggcttcggcacggaccaatccgcgtggcagcgcgtgctcccttacttcacccggcaactaccagcgtcattctgctgacgacc

SEQ ID NO: 26940 - DNA, 251 bp, Glycine max
  Clone ID: 700904006H1
atcgcgtttgggagaagaagagcaaaatcgctgtgaaaatgagcggaacggtgaagaaagtcagcgatgtagcattcaaggtgggaaggaacatcgattgggatggaatggcgaactactggtctccgatgaggctcgcagggagttctccaatctccgtcgcgctttcgacgaggttaactcccaactccaaaccaagtttagccaggaacctgagcccattgattgggattactatagaaagggaattg

SEQ ID NO: 26941 - DNA, 252 bp, Glycine max
  Clone ID: 700904008H1
aataaccactaattctcccaactcaatttgtctctcaaccggcccaatgtagcataagcccagcatggccaccgcaacagcagcagccaccgggtccttcatggggacgcgcctcctggaggcccactccggggcggggcgggtgcaggcccggttcgggtttggcaagacgaaagccgccgccccgaagacagtttccagggggtcgggctccagctccgataggccctgtcggatccgggcgccaaggcg

SEQ ID NO: 26942 - DNA, 252 bp, Glycine max
  Clone ID: 700904010H1
ggtaactggaattcagaaccacagtgaaaaccagaatgacgatgggagtgaactactaaatagcactactgccagaggtgctgaaagctggacagaatctgagattgcaaggcttcaacagttgagagctgagatggagacaaggtatatgcaaagtgggtgttcagaagaggttatgtgggaggaaatagctaccaaaatggcttgttttggttacgaaaggagtgctgtggtcttcaaagagaaatggga

SEQ ID NO: 26943 - DNA, 246 bp, Glycine max
  Clone ID: 700904012H1
ataagttcaaaaaacaaggcaaataaggcaaaacaccggatacatcatactactgggtcaaaatcctttctagcagtcagctatgatgcacgtgacccagtgactggaaaggagcccgatttgcagactttttggcagttgacacacaaaagggacaacggggaatggattgacgaagcatctaaggaaatcaatgacaaagttgctgaacaaattaatgagaagagatgtcaaatagaagattct

SEQ ID NO: 26944 - DNA, 154 bp, Glycine max
  unsure (1)..(154): unsure at all n locations
  Clone ID: 700904016H1
gttaaaggaggtgaagctccgtgatgattattatgtaatggaccctgaaaaggccgtggaattggtggatgagaacactatttgtgttgctgctatccttggttccacactacatggagcatcannnaagatgtgaaaacgcttaaaatgatct

SEQ ID NO: 26945 - DNA, 253 bp, Glycine max
  Clone ID: 700904017H1
gcacattcagggaatgagctcaactgggaacctagcagagtttaatgcagcaggaaatcgacaccgcccccatcatggactttatcatatgtggaatgggtccaacttgcatcagcaacctccttcaaattccatgctttggcagaaaataccatcctttgttaatggtgcttgttctccaggtcttccacagatacccagcttttctagaacaccgcctcatgtgcttagagcatctcatatagaccatcaa

SEQ ID NO: 26946 - DNA, 255 bp, Glycine max
  Clone ID: 700904018H1
ccaaatatcaggaatgctgaggttttcttgttttctctttgtatgggaggaatcatgtattacttggaacatgagccagagaccatggctccatttcttcggggtctgatccgtcgcttccttgccagcagaatcagcaatccaagcccacctagtcagactgcttcctacacatacctgcaagctcttgatggcataacaaaaccagcattacaggagaagagggatactgaatcttcttcccaaaagtacaac

SEQ ID NO: 26947 - DNA, 240 bp, Glycine max
  Clone ID: 700903961H1
cagttatgtatcactagcctcaatacggtgcctttgttcgtttggtttctcaaacaacacaacagtgaatttggcgtctcagatatggctgcgagagagagtattcattcatttggtgattggaggagaataccaatttgcactttctgtcaggatgccagactagtttttcaagcagacagtcttggtcgggcaattttgtcaattgcattgcctgcagcactggctttgacagctgat

SEQ ID NO: 26948 - DNA, 253 bp, Glycine max
  Clone ID: 700904022H1
agcgcaccgaaagcaaagtgtctctctaacctctgcaaaagtccaaggttgcacggttttaactgcttaggtttttgtcttcaaaattaaaactgtgcaactttggttgcaaagtcataggggttaagttgtgtttgcatgaaagtgggcttgagataattgtgcctcttgtatgatggaatccctttggaagcttttgtatttgctggagcgtgcgcctgtcacacttatcactacagctgtggctgtgaca

SEQ ID NO: 26949 - DNA, 245 bp, Glycine max
  Clone ID: 700903906H1
ctttctcctaaaacatctccagtgggttcttcttcttctattacaacaacgtcgcccaagaccatgaccatggccatggccacgatcctgctcctgttcacggtcttcgcggtttcatcggccctagacatgtcgataatctcgtacgacaacgcccacgccgccacgtcgcgcagcacgaggagctgatgtccatgtacgagcagtggctagtaaagcacggcaaggtgtacaacgcgctcgga

SEQ ID NO: 26950 - DNA, 243 bp, Glycine max
  Clone ID: 700903907H1
aacaaaattgcaacaacaattgagcttccgttgaagaaataattgttattttttttttcttcttcctggattttgatttttttttattatctaattgtacgttcagatgagtttgagtatgagcttgtgcggtaattacagtcttcagcttcaaaatcgcagaatcgtaagctgcaatcttcaccaggatggcaggcatattgttcccatcaatacgcaccaaaaaccttccaaacctgaaaa

SEQ ID NO: 26951 - DNA, 246 bp, Glycine max
  Clone ID: 700903911H1
tccatttccatttcctctctctcagtttccaagaatcttaagctatgggaaagtcttacccaaccgtgagcgctgattaccagaaggccgttgagaaggcgaagaagaagctcagaggcttcatcgctgagaagagatgcgctcctctaatgctccgtttggcatggcactctgctggaacttacgacgtgagctcgaagaccggtggtcccttcggaaccataaagcacccctccgaactcgctc

SEQ ID NO: 26952 - DNA, 246 bp, Glycine max
  Clone ID: 700903912H1
tagtaacccttcttttctctctctctctctcgtgttctgagctgctagaagcaatggggaggcaaagaagccatgcttctttcaccatgtttgcaatgcttgttggattgctctctcagagccttgtcatgcctgtaatatccaccactgttgcagatcagaagaactactacaccccagatccacatgctggaagtccccccacaggctcacacaatagtagtcctccatctcatggccatggga

SEQ ID NO: 26953 - DNA, 247 bp, Glycine max
  Clone ID: 700903913H1
gcagaaagcaagctcatcctagagttttaaaaatggcagcagcctcctccatggctctctcttccccatccttggctggcaaggccgtgaagctgggcccatcagcccccgaagtcgggagggtcagatgaggaagaccgtcaccaagcaggcctcctccggaagcccatggtacggcccagaccgcgtcaagtacttgggcccattctctggcgagcccccgtcctacctcactggcgagttccca

SEQ ID NO: 26954 - DNA, 249 bp, Glycine max
  Clone ID: 700903914H1
gagaagcatcgccgactgtcaaatgctttcattaggcagaatccaggtttgttggagaaatcactttccatgatgctcaaggcaccaaggctgatagacttcgataacaagagagcctatttccgctcaagaataaggcaacaacatgaccaacacttgtctgggccattgcgtataagtgtaaggcgggcttacattttggaggactcttataatcagctaaggatgcgtcctactcaggatctgaag

SEQ ID NO: 26955 - DNA, 242 bp, Glycine max
  unsure (1)..(242): unsure at all n locations
  Clone ID: 700903917H1
ctaagtgtgagagaaagaaaatgccaaagtctcaatttcgaaccccatttcttgtttctttatctctattgttattcatcttcaacctcaccccttcatacgcactctatggagcatccacacccgtgcttcaactcantccctctaacttcaagtccaaggttctgaattcaaatggagttgttcttgttgaattctttgctccatggtgtggacactgtcaggctctgactcctatatgg

SEQ ID NO: 26956 - DNA, 222 bp, Glycine max
  Clone ID: 700903919H1
gaaacaaagaagtgaaaataacagcaaaaagtaggagctgcagcagctcccccgaagcttatctcagcggcagactctgaaagctgtttgagtagcctcaacccggagaatagcaccaatgggagaggaggaaaacaaaccagaggaacccatggcaaaggagaaaaacccagaggaagaagcaacccaagagaaaaaaccggagcaagagttcaaagagga

SEQ ID NO: 26957 - DNA, 244 bp, Glycine max
  Clone ID: 700903920H1
agaggaggcaatgacggtaacaacaacaacagtggaagtggtgctattccaggttcaccgcagcttcctcaatcatgcactactttctccaccaactagctgaattttgagaaactatatacttaatttctctatgtatatacacaaattaaaagagaagattaggcatgctcgcgcttaatttactgtgtttttattttcttatatgtaaaacagattaagagtcacctctgattctgaatgc

SEQ ID NO: 26958 - DNA, 243 bp, Glycine max
  Clone ID: 700903921H1
attcacagctgtcacgccgttaacggaaaatggcaacggcgagacgcagtttcccgcctatcaccgaatgcaacggaacgacaccgtgcgagtctgtggccgccgacctcgacggtacgctcctcatctcccgtagctcgttcccgtacttcatgctcgtcgccgtcgaagccggcagcctcctccgcggcctcatcctcctcctctcccttccgttcgtcatcatcgcctacctcttcatct

SEQ ID NO: 26959 - DNA, 243 bp, Glycine max
  Clone ID: 700903923H1
accgggtggatactttgtttggacatcaccactcacaaatgctcgtaacaaagagaatcagaaaaggtggaagtttatacaggattttacattaacactttgctgggagcttctgtcacagcaagatgaaactgtcgtatggcagaaaactagtaaaaaaagttgctatgcatcaagaaagtctggttctggcccttctttgtgtggtagaggtattgatgtggagactccctattatcagaa

SEQ ID NO: 26960 - DNA, 241 bp, Glycine max
  Clone ID: 700903926H1
caatgtcgaacgggtactacgaagggaggaagagcagcagcgccgtcgcggactacgaatctagcgacgacgagcggcacttcaaacggaggccgtcgaggtacgagccgtcgcccccgccgcagccggcggagtgggaggaggaagggaggcattcgagaggaacgagggagcggaagcataggtgacttgcaattttgatagagttgtgccggcagccattctgccaacgacgaaggga

SEQ ID NO: 26961 - DNA, 244 bp, Glycine max
  Clone ID: 700903927H1
gtgagagtgtgagtgagatagagagagacgcttcgcaaatctcaatcgaatctcagaaaaatgagagaaatcatcagcattcacataggtcaggccgggatccaggtcggaaactcctgctgggaactctactgcctcgaacatggcatccagcccgacggcatgatgccttctgactccaccttcggtgtagcccacgacgccttcaacaccttcttcagcgcaaccggatctggcaagcacg

SEQ ID NO: 26962 - DNA, 245 bp, Glycine max
  Clone ID: 700903930H1
gtttaaacctaattctcatttcttcatcgttcgattcttctcctcctaaagatgcagatcttcgtgaaaactttgaccggtaagaccatcacccttgaggtggagtcctccgacaccatcgataacgcgaaagctaagattcaagacaaggaagggatcccacctgaccagcagagacttatctttgcgggtaaacagcttgaggatggtcgaacccttgccgactacaacatccaaaaggaatc

SEQ ID NO: 26963 - DNA, 246 bp, Glycine max
  Clone ID: 700903934H1
gcttaaaaagcccaagaaatttggcttgtcttggacgattaactggatctgcattattcttggggtaatgttgatgatagtatctccaattggtgctctaaggaatatcatattatcggccaaaaactacgagttcttctcataaactattgatgcaatcattgattccccaaccgattttaaagttgatgagtgaaactaaataacaagaaagcacgcagacatgcgttatacattgaatataga

SEQ ID NO: 26964 - DNA, 241 bp, Glycine max
  Clone ID: 700903938H1
atttttccctcattccttacattagattcattttcaaagtcattgacatagattatgttggtggagagtctagtgaagagatgaagtcatgggaattgtggggtggtaatggcaggcccttttgctccaagggaacttggcatattgctgtgcaacataccaaaaatttatccatagagatgcatgaggccgagtttgttgttctttgcattgggacatatagtggttttccacacattcc

SEQ ID NO: 26965 - DNA, 240 bp, Glycine max
  Clone ID: 700903939H1
aaaaaatggcagcagcttcttccatggctctctcatccccatccttggctggcaaggccgtgaagctgggcccatcagccccagaagtgggaagggtgagcatgaggaagaccgtcaccaagcaggtctcctcaggaagcccatggtacggcccagaccgagtcaagtacttgggcccattctctggcgagcccccgtcctacctaaccggtgagttcccaggcgactacggctgggaca

SEQ ID NO: 26966 - DNA, 219 bp, Glycine max
  Clone ID: 700903941H1
gtgaagttggaaacaatgctagcttcttcgctctccttcctccattcttgcacatccccctcttccccttccttattgtcaatttcacctccaaaccccaaaccctctcacttcctacctttcgtggtcgaagccaaagacaggacccgcaggatagacaggaccggctgccacactcgcagcagaaagaaggacgaagggacgcccgagaggccgagg

SEQ ID NO: 26967 - DNA, 238 bp, Glycine max
  Clone ID: 700903943H1
ggcacggcatgtgggagtgtgtggacttcttccctgtgtccaaggagaatgagaatggattggatacttctattagtggggctgaggtgaagcatgtgatgaaggtgagcctggatgatgatagacatgattactattcaattgggacttatgatgagaagaatgttctgttcacaccagatgatgcgcggaatgatgttggcgttggattgaggtatgactatgggatattctatgc

SEQ ID NO: 26968 - DNA, 244 bp, Glycine max
  Clone ID: 700903945H1
tgaaaaacgaataagaaaaaattggatgagtgatacatttcttggcagacacttgactgaatctgagaattcagagtgtagaatccatttacatcagaagaattcgtcagtgaaagaatcgttttcttcagatctcacaattagagtgcgatggaatatctagggattgatctaagctgcgccgttggatctctccgccacggccagttcccggagaaggattgcttgctccctctcatttcca

SEQ ID NO: 26969 - DNA, 247 bp, Glycine max
  Clone ID: 700903947H1
ctcgagccgaatcggctcgagaggaaatactacgggagtggaaaaacaaaggaagcaccacggagagaatcacagcttaacgggttgcacaattttctcgtggaaaaagaggaagaaattgtgacggccctcaagcatgatttggggaagcattacgtggaggcttttagagacgagcttggaacattaatgaagaccttaaacttggcaaccaagtctttgacaaattggatggcggggaaagagg

SEQ ID NO: 26970 - DNA, 232 bp, Glycine max
  Clone ID: 700903953H1
cagcagcttaaatgcagagttagctttggacaagggtgtggacagttgatcatacaagtaaaaggatggaaaagcattaaagtaggattgaaaatatatcactgaagaaataaaacaaaaagagtttatttaaattgagtgttccatttatttatttttcatatttttacgtgtatcctaacgtttcttggaggcttttgatttggggtgaaaaaattgctttgcttactat

SEQ ID NO: 26971 - DNA, 238 bp, Glycine max
  Clone ID: 700903957H1
gttggttgaagggtcgtgatcatgatcaaggtgacaatactttccatggcttggcaccgctacaagggttgcgagtggaaggggatagtaataataatattggctcaaaagaagtgaaaggtgaaggacaaaacaggtttgagtggagcaataataataacaacaacaacaacaatggtggtggtggtcaaacccacatgcgtcatctggttttgaccaccaccaccattgttgttgt

SEQ ID NO: 26972 - DNA, 239 bp, Glycine max
  Clone ID: 700903958H1
gagttagtgaatctcaacaagtgagttccctcttgcaggctgccgataactggttaaggctagttcaggttcatcacccggattttcagttctttaaatcacatggcacataccatagatgaactgcatgagacgacatgtctttcctgcttttggctaaaactgagccttaatttctgtgttcattgcttggtgcaaacttgataaaagtccatccatctgtagagattgtgatggcg

SEQ ID NO: 26973 - DNA, 237 bp, Glycine max
  Clone ID: 700903959H1
cagagagtggtttcagtgagtgatcggtgttcacttgatccttcataagttctcatcatcatcatcatcatcaccgttgattgaagaagatgccgatcagaaacattgccatcggaaggccgaagaggctactcaccccgacacgttgaaggcggggttggctgagttcatctccaccttgatcttcgtgttcgccggttcaggttccggcatcgcctacaacaagctcaccgacaa

SEQ ID NO: 26974 - DNA, 246 bp, Glycine max
  Clone ID: 700903905H1
gtgaaagtgagacaaaataaaaatcaaagagcataatgtcagggatcattcacaagattggggagacccttcatgtgggagggcacaagaaggaggaggagcataagggtgagcaccatgctggagaatacaaaggggagcaccatggtgaacacagtagtgagtacaaaggagagcatcatggtgaacacaaagctggagagtaccatggtgagcacaagccagagcacaaagaggggttcctag

SEQ ID NO: 26975 - DNA, 256 bp, Glycine max
  Clone ID: 700903863H1
agcagacaagcatccagcgcagcatccaccacgtccgcaaaaatcccacaccgcttgcttcccttgcccctcccctctctcacatcaaatccatttcgccaaatttcacatcactcttcacaaacagaaaaatagtcctccgctgccggcaatcctaggtttccggtgacgatgctcccctacgcttccatcccggaggccgtggcggcgctgggtcgcaacctcaccttcgcggagaccctctggttcactactc

SEQ ID NO: 26976 - DNA, 208 bp, Glycine max
  Clone ID: 700903864H1
ctcgttagtcgtttgtaacgcctttgtttgcgttttttgcacagcagaattaacacgtatatagcaagcatggcagtcacactctacgaccttagctctgcctctgggttgaagaagcttgatgagtaccttctcccacgcagctacatcacccggtaccaagctacaaaggatgatcttactgtctatgcagctttgccaactgctc

SEQ ID NO: 26977 - DNA, 262 bp, Glycine max
  Clone ID: 700903866H1
cacaattcaggcttcattaaatatttatgtgacaaagatgccgctgttcagttatgggagtcgtagtatggcacctcaggtaaaaaatgaggtattgatacctgttgagcaaaatagaagcattgatatcctggatattgccggtgatagaactttggtttctgatgtttcacggtcagctgttagatttaataaccaggtgtcttctctaccattagccgtgcatagtggtagaggcagctttactgcggctaattaacta

SEQ ID NO: 26978 - DNA, 255 bp, Glycine max
  Clone ID: 700903869H1
cttttcttcccccaccttctctccgtggaagcgtttcgctgtaaacgacaacaacaaggagagtgacaacggcgatgttttgactgggttggatgaagttgagaaagaggcgcgtggaaatagcaccatgcccgaacgctttaggtacctcgccaaagaagttccgagtcttcctgttaggtggccatggcttgtggtactggcttttctggtctatgcttggagagctgttctatttgaactgtcaactggaag

SEQ ID NO: 26979 - DNA, 250 bp, Glycine max
  Clone ID: 700903872H1
gtgatgactcattaattaatttgtggattttattccgctatctggttattgggatttatgttggattagctacagttggtatcttcatcatatggtatacacatggttccttctttggtattgaccttagtggggatggacatactcttgtgacttacacccaacttgccaactggggtcaatgctcctcatggcagaacttcactgcttctccattcactgctggtgctaaaacaatcacgttgacaac

SEQ ID NO: 26980 - DNA, 248 bp, Glycine max
  Clone ID: 700903873H1
aaaatatgtttgagttttaacgggaattcctacattttgatggacaaaataagaaaaagaaacttattactttagaagtaaaagtattatttaactctctcaagaagaaacatatatatgaaatttgttattatgcttttgtattgttgggttttattttgcagttttgtacttggtcatggatattgaggtggagatctggtttaatgccctttgtggataattaattgcatttgatttcgggatga

SEQ ID NO: 26981 - DNA, 249 bp, Glycine max
  Clone ID: 700903874H1
aaagattcaacaatggcctctgcttctgctactcttctcaagtcatctcctgttcttgacaagtgcgagtgggtcaaaggccagacccttcgccaacctctcgtgagatgtaacccttcctcagcatcagctctcaccatcaaagctgcttcctatgctgacgagctcgtcaaaaccgccaaaacagtggcctcaccggggcgtggtattttggcgatggatgagtcaaatgcaacctgcggaagcgtt

SEQ ID NO: 26982 - DNA, 248 bp, Glycine max
  Clone ID: 700903876H1
ctaaaacatctccagtgggttcttcttcttctattacaactacgtcatacaataccatgaccatggccatggccacgatcctgctcctgttcacggtcttcgcggtttcatcggccctagacatgtcgataatctcgtacgacaacgcccacgccgccacgtcgcgcagcacagggagctgatgtccatgtacgagcagtggctagtaaagcacggcaaggtgtacaacgcgctcggagagaggagaa

SEQ ID NO: 26983 - DNA, 251 bp, Glycine max
  Clone ID: 700903877H1
tagaagagtacaaacgtcttgcaaagaattggagcaaaatgaaagggcttaaaataccaaagaagggtgaaatgagcgccttatcccgaaatatgaatgctcagcacatgagcaaagtcctccctccacagatgctaaagcaaatcggaggcatgggtgggttacaaagcttgatgaagcagatgggatctgctaaagatatgatgggaatgtttggtggtggtgataattagattgactgtggcatatga

SEQ ID NO: 26984 - DNA, 250 bp, Glycine max
  Clone ID: 700903878H1
gtcggtgatcccctttctccttccttctctgagagacaatgacaatgacgtgggcgcgattcgattcgtggaagcagcaatactacaccacaagcggcgtggtggtaggttacgcagtatgctccagcctcctggccatcatcaacaaatacgccatcaccaaattcaactacccaggcctcttaaccgcgctccagtacctcacctccgcactcggcgtctacgtctttgggaaattagggttctccac

SEQ ID NO: 26985 - DNA, 245 bp, Glycine max
  Clone ID: 700903879H1
aattggctaatgttcctcctaattccactgtgtactacgaagctgagctgctttcctttgtaaaggaaaaggaatcgtgggatctgaatacacaagagaagattgaggcagctgggaagaaaaaggaagaagggaatgccttttttaaggttggcaaatatgaaagggcttcaaagagatatgaaaaggccataaagtttgtcgagtatgattcctcctttagtgatgaggagaacagcatacta

SEQ ID NO: 26986 - DNA, 254 bp, Glycine max
  unsure (1)..(254): unsure at all n locations
  Clone ID: 700903880H1
ctcgtttcacatggcttccccaataccanaagagatcgttgcagagattcctacctatatcagagtcttcagcgacggcaccgtggaaaggccaagagaaacaccctttgtgccaccctcaattgatgaccctcaaaccggagtctcatccaaagacatcgtcatctcacaaaaccccttagtctctgctcgaatttaccttccaaaacttaccacaataaatcaagttcccatcttggtcttctttcacggtg

SEQ ID NO: 26987 - DNA, 261 bp, Glycine max
  Clone ID: 700903882H1
ctctctctagagtaattgcggaatcagctagaattttctaataatggccaaagacgttgagcaggttacagagcaaggtgaatactccgcgaaggattaccatgacccacctccggcgccgttgatcgacccagatgagctcactaagtggtccttgtacagagccgccatagctgagttcatagcaacactccttttcctttacatcaccgtgttgaccattattggctacaagagacagagtgacaccaaatccccggt

SEQ ID NO: 26988 - DNA, 260 bp, Glycine max
  Clone ID: 700903883H1
tgttagaagtagtgaagaaaatgaaagtcattgttttcttcgttgctataataattttaggtgcagaatggcaatgcaatgggtcagagcaggagcatgagcatggccacagctaccaaattttccctttgcgaatgaaaaccggccccggtggccactacattccggaggtatcgtgcaaaagttggaggcttggtgtggaagcacacaacgtcattgactggagaaccattcctcaagattgcgagggatatatagga

SEQ ID NO: 26989 - DNA, 124 bp, Glycine max
  Clone ID: 700903884H1
aacctccaatggtacagcagattcaagttgttctgccagaaatattaaatcacctggcctcattccattattatgactaaatttacacgggattcaaataagaaatgatgagtaaattttctga

SEQ ID NO: 26990 - DNA, 250 bp, Glycine max
  Clone ID: 700903885H1
ggcatcttgtgttgtgtccctgtgttaagctatttccttttcttaacacaattggttgtgccaattgccatagtcaccaaccaattaacaaaggtatatatatcatcatatcatcaccaaatgaaaaatattgggttgttttttcttgtggtggtggctacttttgtggtggcagccacagctggtagcttttaccaagactttgaaataacgtggggtggtgagcgtgccaaaatctatgagaatgaaa

SEQ ID NO: 26991 - DNA, 250 bp, Glycine max
  Clone ID: 700903886H1
ggtgcttctcgagtccgcgatttattcaggaaggccaaagagaatgccccatgcattgtgtttgttgatgaaattgatgctgttggaaggcaaagaggtactggaattggtggagggaatgatgaaagagaacagaccctcaatcaacttttgacagaaatggatggatttgagggtaataccggtatcattgtcattgcagctactaacagggttgacattcttgattctgcattgttaaggcgggacg

SEQ ID NO: 26992 - DNA, 251 bp, Glycine max
  Clone ID: 700903887H1
ctcagcacaacacccctcctaaccctctttttctcttaatttctcatcatatcatatctattaatcttacacatatattaagacatagatataatttttttcgttttatttttccttgcatgggctgttaagataagatgtctcgcacgtgctcacagtgcggcaacaacggccacaactcgcggacatgcaccgacggtggcgccgccgcttcctgcggcgggtctcccagggagaacggcatcatgctg

SEQ ID NO: 26993 - DNA, 243 bp, Glycine max
  Clone ID: 700903888H1
taggtttcctttccgcgcctcctcctccacctgctcatgctcctgtccccaaaaagagtgatgttgctgaaagcgaaagggaaagcgataccgatggcgaaagtgagagcggaagcgtcgcaatatctagaaagggaatccgcagatcgtcgttggataaaagtcaacatgattattgtgatagcagccatcttccaccagtggtttcctcccaagctagccgcaaaagcagcaccagatcag

SEQ ID NO: 26994 - DNA, 73 bp, Glycine max
  Clone ID: 700903889H1
acaaaaaatgtgtgtccatggagaaaaactctgttgattatagtccgttgcaggctcctcgaggtgatgaaac

SEQ ID NO: 26995 - DNA, 247 bp, Glycine max
  Clone ID: 700903890H1
aaaaacctctctcagaggttgctcacccctactcttcttccagtctctatctcaatctccatcaaatttaactattgctactgaagaggttttggttgatgaaatcacttaccctaccaagatcactactaccaagcccctatctttgcttggccatggaatcaccgacatggagattcacttcatccatgtgaaattctattcaatcggggtttatttggagccagaagtagtaggccattggacc

SEQ ID NO: 26996 - DNA, 237 bp, Glycine max
  Clone ID: 700903891H1
gagccttcgaagttagtgggcagcaagagctcaagacatttcgagtagaaacagtaacgatgcctcagttgctgtcactgctgcattggaaacatgctgagccataaaatgagctgatgcacgagtgagcccttatcgattaagcactccagtgggacaaattattttccagtttgaaagtatcatcagttggttcatccccataaaccacattgaggaattcatgcatggttgggg

SEQ ID NO: 26997 - DNA, 251 bp, Glycine max
  Clone ID: 700903894H1
gagccttcgaagttagtgggcagcaagagctcaagacatttcgagtagaaacagtaacgatgcctcagttgctgtcactgctgcattggaaacatgctgagacataaaatgagctgatgcacgagtgagcccttatcgattaagcactccagtgggagaaattattttccagtttgaaagtatcatcagttggttcatccccataaaccacattgaggaattcatgcatggttggggcttgctttgtaaca

SEQ ID NO: 26998 - DNA, 210 bp, Glycine max
  Clone ID: 700903896H1
gtcacggggcaagatggacccgaacgcgaactggaacagtttcatatcatagaaatcaacaaactcctgggtccgtcagttctcatggaagtgcccctttgccggggagaaaagctcagacggtgaatgggaactacttgctgaattttcaatatgacccaatatcccgttctcaaccacggggtcctcctccttctccacacagacata

SEQ ID NO: 26999 - DNA, 172 bp, Glycine max
  Clone ID: 700903901H1
acagagatgaaaaatactcaaaaagatagactaatttccggggtttcggttatagcataaacttcactttatttcttttttataaaaagaaaaccatagattatcgctatcttatatcttattccgggtctcagattcaactgtgaggaagaaaaaggtctccacacaacat

SEQ ID NO: 27000 - DNA, 253 bp, Glycine max
  Clone ID: 700903862H1
cagctatactcaaatctgtcgggatggatgcactcaattttgccaacatatgctgatagaagcatgtgtgaatgccaaaaatgccttttataaatcactttttgaatgatattttgtgtgagtttttctaccatttacgtgcattttcttggcaaaaatcacgtttgaacactagttttgtattgcaagagtataaccgctccattgagtgaaagagttgaaaattacatgattttatgaagatcgaagactt

SEQ ID NO: 27001 - DNA, 247 bp, Glycine max
  Clone ID: 700903903H1
gtaatttccttccttcctttctttctttctttctttctttatcttctcatttttctcaatacaatttttttctttctttctcaagttttgctacttttctcttcttaaccatagttcacatattatatcatcacatatcatagtgatatcatatcacaatgtgtggcatacttgctgtgcttggttgctctgattcatctcaagccaaaagggtccgcgtccttgagctttctcgcagattgaagca

SEQ ID NO: 27002 - DNA, 85 bp, Glycine max
  Clone ID: 700903815H1
attatgtgtctcagtttcatccatctggattcttttgagtgtttctcttctctctccccctaagctctaatttcctctttttccc

SEQ ID NO: 27003 - DNA, 260 bp, Glycine max
  Clone ID: 700903816H1
cgcgtctcctggaggctcactccggagcggggctagtgcacgcccgattcggcttcggcaagaaaaaggctcccgccccaaagaaagcctccaggggatcgggccgagacaccgacagacccctttggtatccgggcgccaaagcgccgcaatacctcgatgggagtgctgtcggagactacgggttcgatccgtttgggctagggaagcccgcggagtacctgcagttcgagctggactcgctggaccagaacctgcga

SEQ ID NO: 27004 - DNA, 267 bp, Glycine max
  Clone ID: 700903818H1
gctttagccatcactaacactcagtctctgaattggggctgagggtttcgagtaacgtttatttttcacgagtttaagatatcatgggtaaagagaaggttcacattaacattgtggtcattggccatgttgactctgggaagtcaaccaccactggccacttgatttacaagcttggaggtattgacaagcgtgttattgagaggtttgagaaagaagctgctgagatgaacaagaggtcattcaaatacgcctgggtgttgacaa

SEQ ID NO: 27005 - DNA, 265 bp, Glycine max
  Clone ID: 700903819H1
taactagaaacagtgtgatgaaaatgaaggtccttgttttcttcgttgctacaattttggtagcatggcaatgccatgcgtacgatatgttccctctccgaatgaacactggctatggtgcccgtactccggaggtgaaatgcgcaagttggaggcttgctgtggaagcacacaacatctttggctttgagaccattcctgaagagtgcgttgaagcaacaaaggaatacatccatggcgaacaatatagatcagactccaaaca

SEQ ID NO: 27006 - DNA, 263 bp, Glycine max
  Clone ID: 700903821H1
atcactagaagtgttggatgcatttctatttctaactaattattgtgcttattattattgttgagaaagaaaagaatggcaaagttaataaaattctttgagttgaacacaggggccaagattccttctgttgggttaggcacttggcaagctgagcctggtgttgtagccaaagctgtcaccacagccattctggttggatacaggcatattgattgtgctcaagcgtataacaatcaagcagagattggttctgctcttaa

SEQ ID NO: 27007 - DNA, 257 bp, Glycine max
  Clone ID: 700903822H1
gttgagagagagaaagcatgaaaatttgtagtgggttttggttttggttttggagttgggtttataatctttaatcttgtttgggagagagagagagagagagagatgtacatagcttccatgggaaggtctttcaaggactccttgaaactgcttgaagctgatattcaccatgccaataccctggcgtcagattttccaagggaatatgatgggacctgccttcagatgagaatgtcatacagtccagcagcaca

SEQ ID NO: 27008 - DNA, 258 bp, Glycine max
  Clone ID: 700903823H1
caaaaagaaggctacaccaacacctccaaaaaaagctgctgctgctgctcctgccaatgatgagcttgccaagtggtatggtcctgacagaaggatcttcttgcctgagggtctcttggaccgatccgaaatcccagagtacttgaccggcagaagtccctggagactatggttatgacccatttggtcttagcaagaagccagaagactttgccaaatatcaggcatttgagttgattcatgccagatgggcaatgc

SEQ ID NO: 27009 - DNA, 256 bp, Glycine max
  Clone ID: 700903824H1
ccttggcccagtatttctgaaagtgctaaaagccttgttaggcaaatgttagaacctgaccctaagcttcgattaactgccaaacaagtgcttgagcatccctggctccaaaatgctaagaaggctcctaatgttccacttggagatgttgtcaagtcaaggcttaagcaattttcgatgatgaacagattcaaaagaaaagcccttagggtcattgctgatttcttatccaatgaagaagttgaagacacaaaga

SEQ ID NO: 27010 - DNA, 256 bp, Glycine max
  Clone ID: 700903826H1
tattttcattgcacagagacacatgagaggtcaactctaactttttctccctcaatttcagttcttctacgttctaaccattcgcaaaacgccttcgttttaatcttacatcctcgttagtcgttagttcttacgcgaaccagctgaatgcacggcaacgtcggtcacgtgaccaatggcttctcatcaattcctcgacaacttcataattcccgatcacattctcgtaccgggctcctccgactccgatgttgaa

SEQ ID NO: 27011 - DNA, 245 bp, Glycine max
  Clone ID: 700903830H1
ctgttaggtgtttcccttttaattaatattacggaactgtgtatgagtgaataagtggatctgggatcttgtattccattgggttgtgattagtctgtgttatatttgggtattgtgctagattactgtgtcttgtgagcatggtgattgagattctccttacagtttttttgtacttgctagataacgtttattgacatggatcactgtttttgtatacatatgtatctggattttgttataaa

SEQ ID NO: 27012 - DNA, 260 bp, Glycine max
  Clone ID: 700903831H1
gtatttccctacctctcccttcaagatgcagatcttcgtcaagaccctcaccggcaagaccatcacccttgaggtggaaagctctgacaccatcgacaacgtcaaggccaagatccaggacaaggaaggaatccccccggaccagcaacgtctcattttcgccggaaagcaacttgaggacggccgtacccttgctgactacaacattcagaaggagagtactcttcacctcgtcctccgtctccgtggtggctgcagat

SEQ ID NO: 27013 - DNA, 267 bp, Glycine max
  Clone ID: 700903834H1
accatatttgctatggctccaatgcttcatatatttaaatgaaggaattgagttcgaaagtggttgtcttctgaagagaatttttttttttttttatcattcatgggtttttttgtagcacatgtagtgcaaggatcagcactagcccttcttggattatggcacaccatccacaccatcagatcttccctggtgaagggccctgccaacttcactgtaagattctggtaccagtttaacactacccctcagtctagacttaacact

SEQ ID NO: 27014 - DNA, 265 bp, Glycine max
  Clone ID: 700903835H1
ctcgcgtgcattgcagccagaccaagcgagaaagggaagagaattcgagagagaaacttcagagagaaagagagagagagagaaactagagagagaaagcaaagcccaaacaccccttttaaccattgcaattctcgttcggtttcagagaaccccttttgaatttttttgaattttctgggaaacagggcgttttgtgaacatcatctgggttctctcgatctccatcttttttttctgggtttccgtgttttctcctcagatc

SEQ ID NO: 27015 - DNA, 278 bp, Glycine max
  Clone ID: 700903836H1
tcggaattcggtcgggtcgagcgattcggctcgagctatactaaggtgaaaaaggagacatggcagctgcaacatctagtgctgtgttaaacggctttggatctcacttcgtgtgtggaggaaagaggagccatgcccttcttgctgctagcattggagggaaagttggtgcttctgttagtcctaaaagagttattgtggcagttgctgctgcaccaaagaagtcatggatccccgctgtaaaaggtggtgggagtttcatagacccagaaggcttg

SEQ ID NO: 27016 - DNA, 254 bp, Glycine max
  Clone ID: 700903839H1
gatttctgagttctgagagactcaaaagttcagagtggtatgggcagtgttgtgatttggtccagaagataacaacacgacactacactcgtgccgttttccttgccttcaaacaaggattggattatattatttatcttgcatcattcatatggcatccgctcccttcattcacgcgcgctgtgattactcgcctagtatttccaatcgcaatagcattcttagttcgcgacaaggcccgttggcgtgtcgtc

SEQ ID NO: 27017 - DNA, 253 bp, Glycine max
  Clone ID: 700903840H1
ttgccttctgcatgttggttctctgtaaacagatactgcaaaagaagaataatattgaatatttggttgggttgaatccctgggttgaagcgttgcagacatcacggctattctaagagtgtctcgctctctcattcatgtcccaactgtacgacggaggacaggttgcgtaactgccaccaacccttcgccgcacggtgggcgtggtgctttgccttctgaaggtggtagcccttcagacttgctcttctta

SEQ ID NO: 27018 - DNA, 66 bp, Glycine max
  Clone ID: 700903841H1
cttagctcaaacctcacctcaataatctatcgtgctagctagcttaatcatattccaattccacac

SEQ ID NO: 27019 - DNA, 80 bp, Glycine max
  Clone ID: 700903842H1
ggaagaagaggttttcgtttggttaagcaagatggatttggaagcagagaaagagcatgaagctgcatttgcagtggcct

SEQ ID NO: 27020 - DNA, 226 bp, Glycine max
  Clone ID: 700903843H1
gtgattctcataaatgcagtgctaacatctattccaatttatttgctatcttttgtcagggtccctaggcaggtgattagcaagataaccagattacaaaggaacttcttatggggtggtgcagctgatcaaaataagatcccttggatcaagtgggaaaaggtgtgtttgccataggaacaaggtgggttgggagtcaaggatatcatctcgttcaacacatcat

SEQ ID NO: 27021 - DNA, 256 bp, Glycine max
  Clone ID: 700903847H1
accgggtgcatactttgtttggacatcaccactcacaaatgctcgtaacaaagagaatcagaaaaggtggaagtttatacaggattttacattaacactacactgggagcttctgtcacagcaagatgaaactgtcgtatggaagaaaactagtaaaaaaagttgctatgcatcaagaaagtctggttctggcccttctttgtgtggtagaggtattgatgtggagactcccgattatcagaattgctaactgcat

SEQ ID NO: 27022 - DNA, 265 bp, Glycine max
  Clone ID: 700903850H1
agcaattcctcttgcattggaaggaaaagatgtgataggacttgcccaaactggttccggtaagactggagcttttgctcttcccatattgcatgccttattagaagcaccacgcccaaaagatttctttgcttgtgtgttgtctcccacaagagaacttgctattcaaattgcggaacagtttgaagctctaggttctgagattggtgtcaagtgtgccgtgcttgttggaggaattgacatggtacaacaatccatcagatag

SEQ ID NO: 27023 - DNA, 63 bp, Glycine max
  Clone ID: 700903854H1
cccgcatcgagcgagcgcgaaggttgagatccaagatccaaaccaaacccccacacaacatac

SEQ ID NO: 27024 - DNA, 249 bp, Glycine max
  Clone ID: 700903856H1
cttggcatattgtgccctccctctttctagctatatccctctctttatacaattaacaaagatatatcatatcatatcaactccaaatgatgaaaaatattgggttgtttcttcttgtggtggtggctacttttgtggtggcagccacagctggtagcttttaccaagactttgaaataacatggtgtggtgagcgtgccaaaatctatgaaactggacatcttctcaccctctccctagacagagctc

SEQ ID NO: 27025 - DNA, 99 bp, Glycine max
  Clone ID: 700903857H1
gctcggatgtcggctctagtagctatgaatgctattatggtgaggaggatactcatatgttgaggaactggggacgtcatggaagtatattgggaaggc

SEQ ID NO: 27026 - DNA, 251 bp, Glycine max
  Clone ID: 700903858H1
tgattagttaacataggaaacatttacttcacaaacacgagcccatccgaagtgtaccaagcataccttgaccagtttagtccatatttcaatctgtttctaaaatcacgcgcggaggaattattgcgtggtggtggcatggttctaagtttcatctctaccaacaaatcttagaaccatgccaccaccacgcaataattctaagatttgttggtagagatgaaacttttgacataataactcctgggggt

SEQ ID NO: 27027 - DNA, 258 bp, Glycine max
  Clone ID: 700903814H1
cacagatacttgattctaccgaaaaggctattgagcatagcttggcaagcaccggtcgtgccaatgtgcgagcaacggcaatatactcggagagttcaaagacttcttgcttaacatggcttgtgatgtttgtgatgacatgtgtgtttgtcatggttattcttctaatccgtgtcacatagtgtagttcacgtttcaccgggtaaaataaataacttccaatataactttttttctcaatctttaacagttttcctt

SEQ ID NO: 27028 - DNA, 241 bp, Glycine max
  unsure (1)..(241): unsure at all n locations
  Clone ID: 700903859H1
gcagagatgacaggtgggatgtgtggacagaaggtgcaagagatagaggtgacagtggtgatgatgccaaagaaggtggtggacttcaacggcgtaacctccgtctgataagtgagttgctatggggancgccaccgagttcgtggggaaatgcttgggcgcattaggtcatgcagttgatgctctcactgccctgcgctcgccatagtatctccttgcagctgtatcagtgctacgcaga

SEQ ID NO: 27029 - DNA, 102 bp, Glycine max
  Clone ID: 700903860H1
aaaattctcttccgtttcaggattaggcgcttcaccgttacagtgaaacatggcaaaaccaaagcgaatctctctgcgtatctttgcgctgctcctcttgat

SEQ ID NO: 27030 - DNA, 241 bp, Glycine max
  Clone ID: 700903777H1
gtgttgaacctcatgttggacaaataattttgcaatttcttctgtattgaaccgtttcttggatgatggatgtaactcaagctttaggtgtcagctaaactaatggtttgaatgttgcctttgccagacattaaaaccaatttgtaatctgccttactttggagcagttcttgctatgtgcttaaaaatagtagtttgattggattgccatttaaaaaaaaaaaaaaaagggcggccgccg

SEQ ID NO: 27031 - DNA, 238 bp, Glycine max
  Clone ID: 700903779H1
ctctttgacacaaggaagaagcctaacaatattaagctttatgtccgccgtgtctttatcatggacaactgtgaggagttgattcctgagtatttgggctttgtcaagggtattgtggattccgaagatcctaacaattcaacatttcaagagaaatgttgcaacagaccaagatcttgaaggtcatcagaaagaacttggttaagaagtgccttgagctcttctttgaaattgcaga

SEQ ID NO: 27032 - DNA, 238 bp, Glycine max
  Clone ID: 700903780H1
tctgaatccgcgcagttaggtttgtgattgattgattgatcaatcaaagagagagagagagagggtatgggagatcaagtggattgaacggtgcagaacgttctggaacaggagactctgaagtgattcttcgttggtggtcacaggcggcgtcggcaaaaggaaatgcagttcaatcctctcaattctcttcgcaacggttggttcttcggtcttcatcatctcaacggacccggcc

SEQ ID NO: 27033 - DNA, 240 bp, Glycine max
  Clone ID: 700903782H1
ttgcgccaccgggtttctatctgctgtttgtggtccatcaagaagttccaagccacggtatttgggtccagatggtgtgaaattgtgaattctcgtctctgcctgctcgacaacttcgttcgtatatgttctttttattcaagttatttattgttgtgaatgtctgggagtgaacagattcttgagtgagtatttaaactgtaagatatgggaagataaaattcaaataaagccatttat

SEQ ID NO: 27034 - DNA, 95 bp, Glycine max
  Clone ID: 700903783H1
cctcttctttctcgcattgttccttatctccatcttcttcttcttctccacaagaacaactatagaaaccgctccctccatccactcagatctct

SEQ ID NO: 27035 - DNA, 240 bp, Glycine max
  Clone ID: 700903785H1
ggaggagctatcatctctgatttcattccggcggcggcgatcgccgggtctcgccgcctgaccgccgattacctgtggccggatttgaagaagcggaagtctgacttggacgttgacttcgaggctgatttcagggattttaaagacgattctgatatcgacgacgacgacgacgatcaccaagtcaagccctttgctttcgccgcctcttctcgtctgtctacggcagcgaaatctgtg

SEQ ID NO: 27036 - DNA, 241 bp, Glycine max
  Clone ID: 700903786H1
tctcgagccgattcggctcgaggccgtgatcataaatccttccttgtgtgcaaaaagaagatgagaacatctcctgagatgctatgctgtttttgccctgctccttttaggcagttccttgagattgtagtgaacatgaagtttgatgaagaacctaactattccaggctaatatctttgtttgatggtatgcttggaccgaatcctgcattgaggccaattaacactgaaggtgctcaaa

SEQ ID NO: 27037 - DNA, 116 bp, Glycine max
  Clone ID: 700903787H1
caaaattctcttccgtttcaggattagggtttcaccgttacagtgaaacatggcaaaaccaaagcgaatctctctgcgtatctttgcgctgctcctcttgatttccacacaacata

SEQ ID NO: 27038 - DNA, 238 bp, Glycine max
  Clone ID: 700903788H1
actcactgtcccacctgagcttgttaccaaactagttaccctcgtcggagccatccactgggtgggcaatcacttattcaaacttcacatctcatctcatctctctcgcatccactgaaccaagatccctattccaaaatggccgcttctgcttcttccagtccgtggctggctccaaaccccagcaaaagatggggcgaactcttcttccttctctacacccctttctggctcaccc

SEQ ID NO: 27039 - DNA, 235 bp, Glycine max
  Clone ID: 700903790H1
agcggagatagcaatctcatctcattcatttcaatggcaactcaaggtcaagtcattacctgcaaagctgcggtggcctgggaacccaacaagcccttaactgtccaagacgttcaggtggctccgcctcaggccggcgaggtccgtgtccaaatcctcttcaccgctctctgccacaccgatgcttacacttggggcggcaaggatcccgaaggtctcttcccctgtattcttg

SEQ ID NO: 27040 - DNA, 237 bp, Glycine max
  Clone ID: 700903791H1
ccaaagccttgaccatgaaagcaacccctttagtgctcttcctcctcttcaccatagccaaagggcttcacaaccccaaatgtgatgcttcccatcaacatgaccatgatggttcaaccctccaagtgttccatgtggttcagcccatgttccccatttaggccctcaaagccaatgtcatgggaagagagtgtcctaaagctacaagccaaggaccaagccaggatgcagtacctt

SEQ ID NO: 27041 - DNA, 235 bp, Glycine max
  Clone ID: 700903792H1
catattgcaccttgagaagaagctgctctaatagccatgctttttggttaccgtttcttggcatatctttctctaaggagaatgaaacttcaatctggagcttaaattcaacttgatcactctttgcatgtgggtgataatattaattaaacaaagaatcacatgtactaagaaggaccaataattgaagtacctagcacattagagatagtggcttttttttattttgtcttgt

SEQ ID NO: 27042 - DNA, 238 bp, Glycine max
  Clone ID: 700903793H1
tgggaatcgaatacggtttagatcgttccccacttatgaacacatcgggaatcgttgatgttagctagtttttcgtgacttcattcattccgtagtgaattattgttttgatattttttttctcgagaaaacttcactttccctgaaaatcattccgctctcctctcgctccgaaatccgaaaaggttaaaatcgcggattgaaaaagcgaaattctttttgaaacaacctgcacgat

SEQ ID NO: 27043 - DNA, 205 bp, Glycine max
  Clone ID: 700903794H1
caaaactggaactctgaccctgaataagctcagtgttgataaaaacctgattgaggtttttgccaagggtgttgagaaggactatgttatccttcttgcagcaagggcttctaggattgagaatcaggatgctatagatgctgcaatagttgggatgcttgctgatccaaaggaggcacaagctggtatcagggaggtccacttt

SEQ ID NO: 27044 - DNA, 241 bp, Glycine max
  Clone ID: 700903796H1
ctctctctctagggtttgatcagactcaagggtttaagccatgggaaaaaggaaggcaaaggcaaagcctcctccaaagaagcgaatggataagctcgataccgtcttcagctgccctttctgcaatcaatggcagcagcgtcgaaatgccgccttgaccatgaagaccttgataggggaagctatttgcgggatatgccaagagagctttagcactaccatcacagctttatcagagcca

SEQ ID NO: 27045 - DNA, 277 bp, Glycine max
  Clone ID: 700903801H1
catgtccttactccttacgatccgttctgcagtcactcactgtagttaatgcctcattgtgtttctcattattatttcctaactaacactcttgaccctgacttcttcacttgtgctttttagatcaacaaattaaagtattaaactttgagcttcagttttttgttcttgactacttgtaatttattatggagttgatggggggtggaaaatttagtaggtgttttgttgttgttgttgttggtgtgttgttcttagtggggtcagtggtgggatt

SEQ ID NO: 27046 - DNA, 270 bp, Glycine max
  unsure (1)..(270): unsure at all n locations
  Clone ID: 700903802H1
gaatgagtcaagggagaaagtgaggcaacagggaagggtttggtgggcattggaggcaaccaaaggggcaaattggtatttgcaaacaaccatagggccangcagtgccctcacatcctcattgaaattctcagcaatggctaatgctataactttgaagaagttgatcaggaaggggatacccccagttcttaggcctaagatttggttttccttgtcaggggcagccaagaaaaagtccaccgtgcctgacagttattatgatgattg

SEQ ID NO: 27047 - DNA, 267 bp, Glycine max
  Clone ID: 700903803H1
gttaacaaaagggtactagagcatgcaccatgctcagttggaatctttgttgatcgtgggcttggtggtacatctcatgtctccgcaagtaatgtttcatatcgtgttacagtgcttttctttggtggtggtgatgatcgtgaagcccttgcttatggagctcgtatggctgagcaccctggcatcagattgctggttattcgctttgtaggggaaccaatgaatgaaggagagattgtaagagttgatgtgggtgactccatggca

SEQ ID NO: 27048 - DNA, 91 bp, Glycine max
  Clone ID: 700903804H1
gcatatggaaaggagggagcaacaattgaagagataagatctgcatctgaacttgctaatgctgctaaattcattgataagcttccacaca

SEQ ID NO: 27049 - DNA, 266 bp, Glycine max
  Clone ID: 700903805H1
gcattctcgaatttaacacgaagttttcctcgtactcattgttacattctataaatcaagttcgatacaaccccatcgctaaatcagtgtgcaagcattccaatcgctcccaaaatcttttctaatttgttcataactcaataattctcatcatgggctccttgattgttccaggtgaacatgatcacaaactaaagcttgtttctcttccctttgtatcaaccagtcacctcattcccgtagtagacatagctaggcctttgcca

SEQ ID NO: 27050 - DNA, 260 bp, Glycine max
  Clone ID: 700903807H1
ggaactgttcctttaactgaagattttgcatatgggcatgtcttctacaagttaagacagacaagtgatttgttttgtatttgagaacgcaaagtaactgtttcgatgatgggaaaagcatatctgcctgtctgcccttagagaacaagtcttgaatagatttcggtaaattaaaaatgctcttgctgatcctcttttggaatgattaataaaacattacattattgtatcttctacttcgaccgccgttgtggacaaaa

SEQ ID NO: 27051 - DNA, 259 bp, Glycine max
  Clone ID: 700903808H1
gcttctatcaactctctacctgtcaaagggagcaaagcgtcttgctatcataggatggatttgccttgttttcaacatcagtgtctttgctgcacctctcttcattattaggcgagtcataaagacgaggagcgtcgaatacatgccatttactttgtccatgtttttaaccatcaatgctgttatgtggttcttctatggccttctcctcagggattattacgttgctcttccaaacacgcttgggtttcgctcggca

SEQ ID NO: 27052 - DNA, 260 bp, Glycine max
  Clone ID: 700903809H1
cggctcgagcccaattcttccccctccacccacccagcatatctctctattcctatttattagaccccctcacattaccttcccgtcaccaactactttgactcctttaccataccattacaataattatcaaacctaaccagtaaaaatggtgaccgtggaggaaatccgcaacgctcagcgttcccatggacccgccaccatcttggccttcggcaccgccacgccgtccaactgcgtctcccaagccgattacctga

SEQ ID NO: 27053 - DNA, 257 bp, Glycine max
  Clone ID: 700903811H1
ccacttcaagggacagaatacatttgtgctttaggcagtttagaagcaacaaaatcaagccctttgacttgagtaaattgcgtggttactatgctcaaccaattctttcttgcttacaccttgattcaatccagcaccctgagttcctagcaagagaagatgaagagttgagtgcaggtgatgatgtgaaagtaggagtcaagaggaggaggggtgataaggggtctcctcagtcttcgataagtcgccaggggtta

SEQ ID NO: 27054 - DNA, 258 bp, Glycine max
  Clone ID: 700903812H1
tcagaatccaaaccctaggaaatttccccttcagacgaaaccctagatttcctctcacaaatctctctcagcttccccattctcgggattcggcgtccagatcacagatcccgttcaattttttttccgcatcccccgatcgggtttggattctgaagaaagttcaattccgcacaaattcgagacaattgctgctgtcgaggctcgcgttgcgcatgggtaagattctgagagaaaccgcgaggccgttctcgaatt

SEQ ID NO: 27055 - DNA, 257 bp, Glycine max
  Clone ID: 700903813H1
gttttctgggaatcaacgtgaaggggaagtacatttgggtgttttgcaacagtggtttgggattcactggtggagttctcgggaatttgctctgttggttgtcttgttcttaattttgcttccattggtcttgtaccgtcgcgtagagtcgttgaagttcagttctgcaatatcaactcttcttgctgtggcatttgttacaatatgtaccgtgttagcaatagttgctattgttgaaggaagaacacagtccccta

SEQ ID NO: 27056 - DNA, 239 bp, Glycine max
  Clone ID: 700903776H1
agtaaagaagccagtgctaggatttgttagtgaagcaatgtctcaaaccatgttgctcatgtctagtgtctctagcagttattccgtggatttgaagaaagacctttcctccaattgaagagtctaagtttaaggcctaagttctctcagttctcattcaacccacttccatcatcaacttctgccccttcttcaccccgtacattcacaactctggccctcttcaaatctaagaccaa

SEQ ID NO: 27057 - DNA, 124 bp, Glycine max
  Clone ID: 700903725H1
cttctcactcttcagcagcatttgagagcatcaacatgcagaacccaaagacgtttgctgcacaattgctaccagactttgtggccctaaataaagacaattgaagaaggggaataagatccat

SEQ ID NO: 27058 - DNA, 245 bp, Glycine max
  Clone ID: 700903726H1
ccaactgtaccctccattcttctcctaaatcctaatcctttttcactttcagttctcagcatgggaatttctggaacaacagactatggatcattcacataccaaaaccttgagaggggaacccaactggccctcagaaaagctcagaatttccatcactggggctggtggtttcattgcctcacacattgctcgccgcctcaagacggagggacattacatcattgcttctgattggaagaaga

SEQ ID NO: 27059 - DNA, 244 bp, Glycine max
  Clone ID: 700903727H1
cattgttgttctctctctctctagagttcttatttcctctctctagaattttctatccgttcatccccctcacaaattagggtttttgcgaatcttttattgtctgaaatcgaatccaacgtttcagccatggtttccgattcaatcgccgccgtgccgattccctccgccgcaaacaccaggaacccggggaagaagaagaggaccaacaggtccgcgaaattgaagcagtacaaaatcgatg

SEQ ID NO: 27060 - DNA, 244 bp, Glycine max
  Clone ID: 700903728H1
tagaactagaactagggtttcatctttgccatcagaaacaacaatgatctacgacgttaactctccccttttccgatccttcctcagccagaagggaggctcctccgataagaggaaaacggatgaacagaagccaaaagagcagaaacccaaagccagcgagaacaaacctataatgacagagtgacaacaaatttgctgcattcagttgtagaatgataataggtggtagatattgcatttg

SEQ ID NO: 27061 - DNA, 243 bp, Glycine max
  Clone ID: 700903729H1
gtgaggtagacagacagaggcggcacaaataagaatggcttcaaatcccaaacctttgacttttgaggaggtggctaatcacaacaacaaaaaggattgctggattattatcaatggaaaggtgtatgatatcacgccatttctggatgagcatcctggaggagatgaagttttggtaacgtcaacagggaaggatgccaccattgattttgaagatgtgggccacagtgattctgccataga

SEQ ID NO: 27062 - DNA, 244 bp, Glycine max
  Clone ID: 700903730H1
cctgaaaatcatggtttcaagccttccaaattgagcagttcaccacatgggggcctttctggtagttcaccacatggggttttttctggtagtccacatggggttttttcttgtagtccacatggggggtttcctggtagtcaacctgtgggttcaatgccaaagtcttttccaccgtttcagcatccaagtcaccaacttttagaagaaaatggtttcaaacaacagaagtacttgaagtatc

SEQ ID NO: 27063 - DNA, 244 bp, Glycine max
  Clone ID: 700903731H1
caaagttctaatctttcgcctattgggttctactcctttctctcttcgtttccgatcgatccaattttcttcccatggctacgatcggacacaacaatctcaatgccaaattggttcttctcggggacatgggtgctgggaaatccagcttcgttttgcgctttgtcaagggtcaatttctcgaatttcaggaatcaacaataggggcagcgttcttttcacagacgctggcagtaaatgacgc

SEQ ID NO: 27064 - DNA, 246 bp, Glycine max
  Clone ID: 700903734H1
gtttgctcgcacacgtcgtttttttctttttgttgcttcggagccaactcaacaacaacgccgtgcttaatccttaagaataacgaattacaacaactaaccatgttgcattgtctcaacacttcctgttcggacatcacactcttggaaagacaacgggaagcaaccatcaagtgccagaaccaccaaccaccctacttaacgtatattaacgccgtcttcccttcttcttcttcttcttcttct

SEQ ID NO: 27065 - DNA, 245 bp, Glycine max
  Clone ID: 700903736H1
aaaaaactattttggcttctgcctttccttttccagggagctcattgacaatggctgaaacaaagtgggtcatgaaggacaaaagatggtctctccatggaatgacagctctagtcacaggaggcacccgaggcatagggcatgccattgttgaagagttagctgagtttggagcaactgttcatatatgtgcacgtaatcaagatgatattgataaatgtttagaagagtggaaaaacaaggga

SEQ ID NO: 27066 - DNA, 245 bp, Glycine max
  Clone ID: 700903737H1
cttctcactcttcagcagcatttgagagcatcaacatgcagaacccaaagaggtttgctgcacaattgctaccagactttgtggcctaaataagacattgaagatgggataagatcatagttggtgacattggttatatgggtctctcatattttcttctaatccatgtgcttgtttcttggggagtagtgataaatcttagtgtaaagaaagaaggaattttactctagtataggtttatacct

SEQ ID NO: 27067 - DNA, 245 bp, Glycine max
  Clone ID: 700903739H1
ggaagatgtgtttgagttcctcgggaacgttcctctgctacagaggcttctgggctcgtctgtaaggaagatatctgagcttgtgattctcaaacactatgagccgggagagtatgttgttcgtgagggagaacgtggggatggtctttacttcatctaggagggagaggctgaggttgttggctctgttaatgctgacgatgataatcatccagagtttcaattgaaaagatttgactattttg

SEQ ID NO: 27068 - DNA, 246 bp, Glycine max
  Clone ID: 700903740H1
cttctgagttctaagctaagtctgcttttattcttttctctcccgttatatatatagtatttgcttatatatatatatactacttattaggaactgtgattgcagttcctaatgcagattttaacgcggcgccaaggagcatttttgtgcttctggttgtctgtgttctttgtggtagtagacttttgctctggtgaccatagtacagtcgaggtagtagggttgggagaatgcgcagattgcaag

SEQ ID NO: 27069 - DNA, 242 bp, Glycine max
  Clone ID: 700903742H1
gtcaaattattcctttccaccaggcttttgatgtgaaaaaatgggagaagtttaatagtgaaaaagtagcctcacttgcctatgcccgaattcaaggaaaagcttctcttattgctcattttcagaactcaagcctgatgaacgaagacaaacgttgccgtcctattctcttccatacagatggcccaactgctggtgatccggagccttttcccatgggtgccaatattagactgagacct

SEQ ID NO: 27070 - DNA, 242 bp, Glycine max
  Clone ID: 700903745H1
gtgaattttgaggagctgctacgtttttcaacattgagtaaggtgtatgtatcagacaagtatttgcatggaatcacattgttaattcgcttctagagatttcattcgttcatcttcggtatttaaaggcgcgccataatttctagttttgcagatacatttttctctggaaaaatctctgaatttcggaactctggactatctgctagattgtgcctgagtttgtacttgtggccatggtt

SEQ ID NO: 27071 - DNA, 245 bp, Glycine max
  Clone ID: 700903750H1
ccagagagggaagacgggggaagatttaggaacagattaccttctggaaggttgccagccactcaccatttgtcacctagagagggaagggtccatgacagaataagaggagggttgcaagatgatgagaggagaaactccaaggatcgattgatggggagagaactaccgggtgataggagtgattttgctgcgccaaaaagtctttctgaacttaaaaatgggaggaacaccgagaataggga

SEQ ID NO: 27072 - DNA, 247 bp, Glycine max
  Clone ID: 700903751H1
ctaacgaccatgtgaccatcctcgtcaacatcgaattcagttggttcattatcggtgtgaccgtttttttggtttctttgtacttggttttggtaaaagtttatggggagaagaaggtggagtatttttcgttggggaatgaggatgaagagtcaaacgacgacgttgagtcacaaaagagcggtgcctttgatcacagcagcaaaagcttcattcaggtgggcaaaatcttttctcaaaatgacat

SEQ ID NO: 27073 - DNA, 111 bp, Glycine max
  Clone ID: 700903753H1
gtgatagttaggagataaagaaagtggtatatattgatatatgtgtgtatttcctttgggcttgaaactcaaaactataataatgggttcttcttctcctccggacacgat

SEQ ID NO: 27074 - DNA, 242 bp, Glycine max
  Clone ID: 700903754H1
atcaaaatggttgctgctggtgctgaacatagtgtagcaatcactaaagatgggaatttgtatggatggggctggggccgatatggaaacttgggattgggtgacagaaacgatcgattgctgcctgagaaagtgactgttgatggtgacaagatggccatggttgcttgtggctggcggcacacaatatgtgtttcatcttctggtggattatacacaaatggatggggcaaatacggcca

SEQ ID NO: 27075 - DNA, 244 bp, Glycine max
  Clone ID: 700903755H1
aacactttccacttgtctccgaattagttatcttgagaaacattattcccattgctatatattatggctagcatgaaggttacatgggtggttgtgatcatgtgcatggccgtggtgggtgcaccgctgatggcgcaagccatgacatgcaatgatgtgacggtgaacatggcacagtgcctatcctacctgatgcagggaggaacaccttcaacactttgctgcagcggagtcaagaacattc

SEQ ID NO: 27076 - DNA, 79 bp, Glycine max
  Clone ID: 700903758H1
cgctaattgtttgattctcctagcacaaggaagagtaggacgggaccctcctcatcatcacaaggacctatgtggtgat

SEQ ID NO: 27077 - DNA, 79 bp, Glycine max
  Clone ID: 700903759H1
gcgccgcaattgtcatgacccaaaattatatttttctatcgagtaacctttacaaccttgtgtcgtcaaccaccctcca

SEQ ID NO: 27078 - DNA, 242 bp, Glycine max
  unsure (1)..(242): unsure at all n locations
  Clone ID: 700903760H1
ctaaaacatctcaatgggttcttcttctattccaccttcgagattaaancatgaccatggctgcgatcgngctcctgttcacggtctttgccgtttcctccgccctagacatgtcgtaaatctcgtacgacagcgcccacgcggacaaggccgccacgttgcgcaccgaggatgagctgatgtccatgtacgagcagtggctcgtgaagcacgggaaggtgtacaacgcgctcggcgagaag

SEQ ID NO: 27079 - DNA, 239 bp, Glycine max
  Clone ID: 700903761H1
gattgctgatgtttccaatgctaacggatggggagatgatgacccaaccatctttgagatgacaatcgttgcaaccttacaaggggaattccaattgacaaatggctatgggccaaataaagctccggaaattatgaaggaacattggaacacttttattgttgaagatgatttcaagttcatgaagagtcatggattagatgctgctagaattcccgttggctggtggatagcaagtg

SEQ ID NO: 27080 - DNA, 239 bp, Glycine max
  Clone ID: 700903764H1
cgggaaggcaggaacgccgtcagtatgccccaccgccacagccagccatgtctgccactgcattgctgcagaaagccgcccaaatgattgcagctgcaacaaatgcctcttttcttcgtgggttaggcattgtaataacttcttgatcaacggcataagttcagcaagttaatttgcattggggcaatcagcaattggaaccagaaattgcttcagttcttgaaggtcttggacttggg

SEQ ID NO: 27081 - DNA, 241 bp, Glycine max
  Clone ID: 700903765H1
ataaaacataagagggtatgtttagtgtggctgtttagtgggtaccttgttgccctcataggaagtgataaacaattgcatggagtcccattggaatttttttttttgtggctgaagaaggtgaaaagggggcaagtttcactcttgaagggttttgaggggtgtcaacttctgtttggagactccgaggttgagtttgaaggctcagtgcttcaaggcagaagcttgaggttactaagca

SEQ ID NO: 27082 - DNA, 244 bp, Glycine max
  Clone ID: 700903766H1
cccggcctctcctgagtctccttcctccaacaatctcgcggcgcctctgtctctctctcggtccctccaagtccaatgagtctgcgcctccgctcgccacctctatgtcgttgtgctacgccatcgaggtcaccctcacaacctcaccttctacctctgcctcagtgagtcttccccgccgctgcgccatcgttcctcagcaacttcgggtcgtccttgcacaacgccgtcgaggttgccctca

SEQ ID NO: 27083 - DNA, 249 bp, Glycine max
  Clone ID: 700903724H1
actagcaaagggaaggaaaagtaccttccccaataacccttctctccgatttggcttctctcatcggagggaaacaatcaataaaagaaaaaaaaaacccacaaaaagattataacaaaaaaagtatgaaaggaaaagtactaggttccgcagtttctctcatactagtagtgggtgtggtaattggcgtggttgctgtagttcaaagcccaaagggcgtgaacaacaacaacaatggaggagaattga

SEQ ID NO: 27084 - DNA, 242 bp, Glycine max
  Clone ID: 700903771H1
gcgttggtgaatccgtttctgtctccccctcgaactcccctctctctgcgagtttcagctccgccaaaccaagcactactacgttggactctctgctcccaatattcattcacaccatcaacgctaagatcgaagcacgccatgtgtggcgccactgccgacatcaaggctgcacctttagctgatggagaagcagatcacgcggttcttgtgggccccgccagcgaggacgagagaaaagg

SEQ ID NO: 27085 - DNA, 101 bp, Glycine max
  Clone ID: 700903775H1
gtggtgccttatcgctgtggttttcatcgtcttccttctcttatatttcttttttttttttgtcttcgccgcacgccgaaacaatggccggaaaaggagag

SEQ ID NO: 27086 - DNA, 219 bp, Glycine max
  Clone ID: 700903675H1
ccaacatcagatcaagatataacaaaggcgaatgaacaatcaataaactcatcaatcaaaaaagttaaagttaagtgggagaaagctggttctgatgctgaactcaaactacaagcagttaattttatccatcacccaaaattcttgatgcaaattattactttctgttcctcatttcaatgggtcaatgttctctttttttggttacacttcttctgc

SEQ ID NO: 27087 - DNA, 225 bp, Glycine max
  Clone ID: 700903677H1
ctgaatatggcctgtataccagtgttgttccacctcttatttatgctatgatggggagctcaagagaaattgcaattggacctgtagctgtagtgtcaatactgttagcctctctggtcccaaaagtggaagatcctgttgccaatcctaatgcctatagaaatcttgtctttaccgtgacttttttcactggaatttttcaaactgcatttggtgttttcagat

SEQ ID NO: 27088 - DNA, 76 bp, Glycine max
  Clone ID: 700903678H1
tgaaagtcaaactgtggcataattcaactttttcctctcaccctaggttcgtcttcaacctctccagacaacatac

SEQ ID NO: 27089 - DNA, 87 bp, Glycine max
  Clone ID: 700903681H1
aaagaaagtgagagagaatttcattgaccgccattgaagctttgcttcttctatctctcactcataacaaaattccccacacacatt

SEQ ID NO: 27090 - DNA, 216 bp, Glycine max
  Clone ID: 700903682H1
catatctccaacataaaggaccacctcaccctccccctccattactcccactgcatcttcttcaaattcctgtcctgaagatgacagcaaagtggtatctcattgtgtgtgttgtagcgatctgggccgttgatctgggttcatcatcacaccatgcccgtgccccagcaccagcaccgtcagtggagtgttcaaacctggtattgaccttatcgg

SEQ ID NO: 27091 - DNA, 206 bp, Glycine max
  Clone ID: 700903685H1
gctagcaatattgtgtctgctatctacattgccactggtcaggatcctgcccagaatgtggagagttctcactgcatcaccatgatggaagctatcaatgatggcaaggaccttcacgtttcggtgaccatgccctccattgaggttggtactgttggaggcggcacacaactcgcatctcagtcagcatgtcttaatttacttgg

SEQ ID NO: 27092 - DNA, 208 bp, Glycine max
  Clone ID: 700903686H1
agggtgttgagaaagagtatgttatccttcttgcagcaagagcttctaggactgaaaatcaagatgccatagatgctgcaattgttggcatgcttgctgacccaaaggaggcacgtagtggtgttagggaggtacatttccttccattcaatcctgtagacaagaggactgcactgacctacattgattctgatggaaattggcatag

SEQ ID NO: 27093 - DNA, 211 bp, Glycine max
  Clone ID: 700903687H1
gaaatattaggtggaagagaaggaagcgaacgaaatggtgggcattgtcactgccactttgatttgattcgtgtgcacatataaggtggggcatggcctacaccctttccaacactctcccactctcactcgccttcttcccagaccgcaccctccttcatccaccctccacacacctcttcctcggtcgccccctcagattcaaaagtct

SEQ ID NO: 27094 - DNA, 111 bp, Glycine max
  Clone ID: 700903688H1
gtcttaactcaacaaccgaacttgatagatactgtgagtgtttttgttcctcaatcaatctaattgtcccatttctcttccaatggcgtcttctctttccacacaacatac

SEQ ID NO: 27095 - DNA, 215 bp, Glycine max
  Clone ID: 700903689H1
aagatttcagcaataaaagatattataccactgttggagaaaaccactcagttgagatctcctttgcttatcattgctgaggatgtcactggtgaggctttggccacccttgttgtgaataagctacgtggtatccttaacgttgctgccatcaaagctcctggctttggtgagcggcgaaaggccctgcttcaagacattgctatattgactgg

SEQ ID NO: 27096 - DNA, 222 bp, Glycine max
  Clone ID: 700903691H1
cagcattcagcatcgcttttttctattcaacgactccgttccgttctctttcttcttcttcgaaaccctaataagcttctgcacttccttctgattccacttttggtaatataggcccctcctcttcttctcagatctgaaactacttgttttaactttttctattcaacgactccgttccgttctctttcttcttcttcgaaaccctaataagcttctgca

SEQ ID NO: 27097 - DNA, 225 bp, Glycine max
  Clone ID: 700903692H1
gccttctttctttttttcaatttccaaatcacgaaactcaagaagatggagaaagcgatcaacagacagaagattttgcttcatcatctcaacccttcatcatccacccaccccaacgaagaatactccctccatgcttcagcatgtgtggcgggggatagcgctgcttatcaaaggacatcgacattcggggacgatgttgtgatcgtggctgcttatcggact

SEQ ID NO: 27098 - DNA, 234 bp, Glycine max
  Clone ID: 700903694H1
gagagcagagctgaggctcttggaacctaaccttctctaagatcctgttttccatctggtaaaaagaaaaagaaaagtggattagcttatcagtctagcatgaatctgactaaactcatcacagattctgtcgtgcatttatctcacgtattagaggatgttttgacatggataactgaatggaacaaaagacctgaagatgagcatttggagaatattcttttacttcttcgg

SEQ ID NO: 27099 - DNA, 237 bp, Glycine max
  Clone ID: 700903695H1
catttgcataacttcgctgatcacgcggatgcaccatctgggtctccccaatttgcgcctcgattcttggcgttggtgctactcgcggcgagtgtggcggtggatgctcaggagaactcggacgtgaagacgctggtgaagtacaagcacgggaagaagtactgcgacaaaggatgggaatgtaagggctggtcaatttactgttgtaacctcaccattaccgattatttccagacc

SEQ ID NO: 27100 - DNA, 254 bp, Glycine max
  Clone ID: 700903701H1
tgccgaagatcattgttggcctcgcttctctctctctgcgatgcattcatttcttcgttcttctccaccatttaatacatattattatactacaaaaacataacctccagaacacatttatatattcccttgttgcatatatactttgttgttgttgttgttgttgttcttcttgtaaatggcgaatgcatctgggttcttcagcccttcggttccccacttcaaagtgagggttaagcctctcaccactgcca

SEQ ID NO: 27101 - DNA, 252 bp, Glycine max
  Clone ID: 700903702H1
ctcgagccgtgtcacaggtgtagcggcgaaactgaggtcgtagaaagaatggcgaaaacgacgtcgttgttgctctttacactgctcctcttcggaaccttagctctcatccaggcgaagatctcgaaggaggatttgaaggaagtgacccacaaggtttactttgatgttgagattaatggaaaagaagcaggtcgtattgtgatgggtctttttggaaaggctgttccaaaaactgcagaaaactttcga

SEQ ID NO: 27102 - DNA, 152 bp, Glycine max
  Clone ID: 700903705H1
cccaaaccgaaaccctaaccctaacggagagatggcggacacttggcatcgatattcgggacggagaaggacagggtgaactgtccggtctacttcaagatcggcgcgtgcaggcacggcgaccggtgctcccggcttcacaccaagccgac

SEQ ID NO: 27103 - DNA, 104 bp, Glycine max
  Clone ID: 700903708H1
ggaataagcaagacagtgacaggtgaaccgatttcgttatcagaacaagaattcgtggattgtgacacacgatatagcgaaggatgcaatggagggacttatgg

SEQ ID NO: 27104 - DNA, 247 bp, Glycine max
  Clone ID: 700903710H1
cgtttatcacactccaacaacgcctttcgctcttaccaccctcgcgggtcattttcttgggaaaactcgtttccaccaagaaaatcgatttcgctggaaacaaacactcgcgaatctccgatgcgactcgtttcactttaattcgatgatgatcgccactatatgccgccctgtgcgttccccgtggacataaccaatggatcgctgcttccgattttttccatgcctcgccgatcctggtcgaagg

SEQ ID NO: 27105 - DNA, 246 bp, Glycine max
  Clone ID: 700903711H1
cttgttctctaggtgatcagcttgccattgccaaagaaactggccgaaggcttgggatgggaacaaacatgtacccatcttcttcattgcttggtcagagcaaggatgctgctgtttcagcagttccagttgatgaattgattgagaaggctgatggatttgctggagtatttcctgaacacaaatatgaaattgtgaagaggctgcaagagaggaagcatatttgtggaatgacaggtgatggtg

SEQ ID NO: 27106 - DNA, 248 bp, Glycine max
  Clone ID: 700903712H1
ggccaggcaagccccactcaaccaccacactactcctcgttcacgctacccctttctgctcttcttctacctttcaagttttaaaagtataaagatggcagagacattcctatttacctcagagtcggtgaacgagggacaccctgacaagctctgcgaccaaatctccgatgctgtcctcgacgcttgcctcgagcaggacccagacagcaaagttgcctgcgaaacatgcaccaaaaccaacttgg

SEQ ID NO: 27107 - DNA, 247 bp, Glycine max
  Clone ID: 700903713H1
ccaactctctctctctctccacttgccaaaggaaaaaggctaaagagaaacccacacacacacacacacacagatatatgtcttccccaagcaagcgccgagagatggacttgatgaaactgatgatgagtgattacaaggtcgagatgattaatgatggaatgcaagaattttatgtgcaattccatggacccaatgacagtccttatcatggtggtgtgtggaaagtaagagttgagttgccgga

SEQ ID NO: 27108 - DNA, 245 bp, Glycine max
  Clone ID: 700903714H1
ccaaaatagaaaatctaaagcgaaacactgaaatcattccatatgatatagcttctctctaaatctgagttctaacttcctcagatttgatcccataccagttattctttgaatcagctatcagtgtatcaatttctacaaactttatgagatgctggatcatgctatctagtttggaatattgagtttgctagttaaagtgttgttttggatggtaaatttggtgcttcatgtctggtgaaaca

SEQ ID NO: 27109 - DNA, 247 bp, Glycine max
  Clone ID: 700903715H1
gaacctcaatctctccgagcagcggtccatttctctcccggaacacccataagatttccggcacggcgatggccgctgttcgcctccttctcctcctcctcttccctttctcctctctcttcctttctgaaaacgaagcccttctcaacttcaagaaatcattctctaaccccgtagctctctcttcctgggttcccaaccagaacccttgctcctccaggtggctcggcgtcatctgcttcaacaa

SEQ ID NO: 27110 - DNA, 243 bp, Glycine max
  Clone ID: 700903716H1
ggcgagagataatggattttcattgagctttctttctttttgtgttagtgagagaaagttctctctctttaactcacaaccctattgcgtgctttgcaatcgaccccgcttatggccaacagtaaccctccctcggagaaatcatcaaggaaaacgcgcggtttgctcagtgagccagggcctggaataagtgcgtccccttcggaggacaatatgcggtatttcaatgtgatgatccttggc

SEQ ID NO: 27111 - DNA, 213 bp, Glycine max
  Clone ID: 700903719H1
caacgctaggggttttgttcagaagccatgtcactattgatgcatgtcatgtgacaaatggcggtcataggtaagagctggtgtccaggcattctgtcacacctgccagggttctttttccatatgggttggttttcaagtgttaaatgtggatgcaattagtgactccatgtattttataggtgagcatatttgtttcatgcgattactttt

SEQ ID NO: 27112 - DNA, 214 bp, Glycine max
  Clone ID: 700903674H1
ctttcgtttccctcccgaaaatcctcggcatcttcatctccttccaagaagggcttcttcaggttgttctcttcaactttgttctccttttttaactctatttcggattttggatggagcatagtgaaaagctcaattgttgaagatgatgagacacccataaggagtggtgaggaaggtgttgagtctctgccttgtgtgatatcaaacatat

SEQ ID NO: 27113 - DNA, 247 bp, Glycine max
  Clone ID: 700903720H1
ctcgagccgtatgattactgctatggggatgtggttgtccgcctctcacctgtgtctgtctgttcagaaacagcttctgttggagagtccactgagaaatcaatgcagaaaactgaagagagtgggattaaaatcgatgtaaatatccaaactggtgaaacttttgtgcaattttctgacctctcttgggttggaaatataactggccttaagaatggtgatattgaagttacttgggctgatggga

SEQ ID NO: 27114 - DNA, 247 bp, Glycine max
  Clone ID: 700903721H1
gaggtagctagctaggcagccacgagccttggcgcattttcttttttctgtgggcgagtataataataattgcagtaaaatggcatttctgaggtcaatagcaactacagcaattgctactatacctgcagccttagcattctcatcatcttcatcatcttctttccctcgctcttcccaatcccccaatccccaaaatagattaggtcttgtcaaaacacttgctactcctccctctgctctccac

SEQ ID NO: 27115 - DNA, 207 bp, Glycine max
  Clone ID: 700903722H1
cgagacagaaaaaggggttagggtttgttcttgtgatcgaagctaagcgaacagaaatgggtggatcagtgagggacgtgaagtcgaagggcgaggtcgacgaggtggtggcgagtggctctccggttatcctccacttctgggcgtcgtagtgcgaacttccaagcacatggaccaactcttctctcacctttccactgatttccc

SEQ ID NO: 27116 - DNA, 238 bp, Glycine max
  Clone ID: 700903630H1
gaaacgcatacgcgcaatttctgttgttcagagctcttcaggaagaaaagaaaaacagagaaaaccaaaccctaattagaaacgatttcggaatccctaattcgcaaatcgcaaccctagttgtgctgtgcgttgttgtagtggtttttggaagaggaggcttgagctaaacgctgcgtttcgacgacgatgatcgtgagccagaacatggtgacggaggcggaaattatttgcaagc

SEQ ID NO: 27117 - DNA, 240 bp, Glycine max
  Clone ID: 700903631H1
gccatttgggagttaggttctgcacgctctgcttccagcgagtgttctttcttcgtttcaacaccttaatttgcatacgctgcttcttcagcttgagaaatggcacaagaaacctttctattcacatctgaatctgtaaacgagggtcaccccgacaagctgtgcgaccagatctctgatgcagtgctcgatgcgtgccttgaacaggaccctgacagcaaggttgcctgtgagacatgc

SEQ ID NO: 27118 - DNA, 238 bp, Glycine max
  Clone ID: 700903632H1
acgcaccagaaaacgtatgggcaaattggcagtggagatcaattaacgatgtgtacatgaatggagcattttttgtgcaatctgggcctgagctggctagcagaccattctcaagagaagacatgatcaccgctaaggtaggaaattatgtaggaaggcttacacgctattctggcaacctgttgaagtgcagagtgggtcgccttgttaattatcctttttcccattaattctcttc

SEQ ID NO: 27119 - DNA, 222 bp, Glycine max
  Clone ID: 700903633H1
caaagtttaagtcatcatgggtaaggaaaagactcacatcaacattgtcgtcattggacatgtcgactctgggaagtcaactaccactggtcatttgatctacaagcttggaggtattgacaaccgttcgattcaaaggtccaaaaaggggccccctaagttgaacaggaggtcatccacgtatccctgggtgcttgaaaacctcaaggctgagcgcgaaag

SEQ ID NO: 27120 - DNA, 224 bp, Glycine max
  Clone ID: 700903634H1
cttggttttaattggtataggcgtgccaaggtcttgttaattttgagcgttaagtgctgcaactaatcagatcccaagaccttggcctaccttgccatacggaaaaaaaaaagccaaaaaaaagccagggtttgggaccaccaaaaattaccccaaggcccaagtcatggaaagaataagggttggaagtgcaacagaggttgctttcaccctcttggccattt

SEQ ID NO: 27121 - DNA, 218 bp, Glycine max
  Clone ID: 700903635H1
cgatctcaacggagcacctctcttcaggtcgccatctagactgcaatcatggctgatggaccacagcatccatcagttgttcagaagctagctggacagtcttacctggtgtccaggctaagccccaactttaactctgggaattattcctcgactggttcttacttcaatggaggactgcactcttctgagttggctgttgtgtcgcctggatctcc

SEQ ID NO: 27122 - DNA, 113 bp, Glycine max
  Clone ID: 700903637H1
caatggcttcactttccctctctctctccacaccaacaacaccaacctcactctccttcacatcatcctccatcttcttctcttcacaccaattccacacaacatacgagcat

SEQ ID NO: 27123 - DNA, 211 bp, Glycine max
  Clone ID: 700903638H1
tgacaatgaagctggttttggtacttgttgttgaagttgcatgcttagtttctgggatcttgtcctttggatctgagacactctctgagctttctttcttagaaaatgatgtcgtctcaacaacaagaccttcctcttcatctcaacttcaacctcaacctcaacctcaacctcttatggtggacctcactctcattcatgaagctgattc

SEQ ID NO: 27124 - DNA, 206 bp, Glycine max
  Clone ID: 700903639H1
tccaattcctaattgtttaaacctaattcttatttcttcatcgttcgattcttcgtctcctaaagatgcagatcttcgtgaaaactttgaccgggtagaccatcacccctgaggtggaatccttccgaaacatcggatactgtgaaagctaaggtttcagacaaaggaggggttccccctgaccagcggaggacttatctttgcgg

SEQ ID NO: 27125 - DNA, 215 bp, Glycine max
  Clone ID: 700903640H1
agcagccataccatctgagctctcagccgctgaagctgcagcgttgccaatcgccgggcttacagatcgtgatgccctcacttaaattgcaggagtcaagcttgatgggactggccagctcaagaacattttagtaactgctgcttcaggtggtgtaggtcactatgctgttcaactagcaaaactaggcaacacccatgtcacagccacttgtg

SEQ ID NO: 27126 - DNA, 216 bp, Glycine max
  Clone ID: 700903641H1
ctctaaaccctaaacaactctttctcttcttccttcgctcgttgttctccctcgcgtagatcgacaatggcggagacagagacgtttgctttccaggctgagatcaacctgctcctcagtctcatcatcaacaccttctactccaacaaggaccttttccttcgtgaactcatcagcaacgcctccgatgctttggacaagattcgatttgagagt

SEQ ID NO: 27127 - DNA, 212 bp, Glycine max
  Clone ID: 700903642H1
gcagcaaaccatgttggcgaaaatttcttagcaatgctaaggaagtctgtcttgatgcctaaatcagcaatggcatttactattgcggcatcggtgttagggcaagtaattggttcaagagctgagaggtacaggctgaaggcagttgctgcaagaaaggtgtctataactgaaacctctggtgttggtcctctccagttaccagtggctac

SEQ ID NO: 27128 - DNA, 231 bp, Glycine max
  Clone ID: 700903645H1
ttcgatttgttgtggattggatgatggaaaaaccagcaagcccctttcattgaaagggcgcagtgaactgtaattgtgaaaaggttggaagatctggccaaagaaggtgatagccctgtagattcgttcccatggttcgatccttcccagtaaaacgcggcgtgttcgaattctgatcgcttttacgcgagaaagggggaccaccctctaagcctaagtattcctcaatga

SEQ ID NO: 27129 - DNA, 238 bp, Glycine max
  Clone ID: 700903647H1
gttcttccttctcaaatattcttgagatccccattttctccgaagcaaagccatggctaagggtcctggtctctactctgacatcggcaagaaagctagggatctgctgttcaaggactaccacagtgaccagaagttcaccatcaccacctactcaccgactggagtggctattacagcatcaggaaccaggaaaagtgaactgtttctggctgatgtcaacaccagttgaagaaca

SEQ ID NO: 27130 - DNA, 126 bp, Glycine max
  Clone ID: 700903648H1
gagagatggatccagacgcgttggcaaacgcattcgtggagcatcactacagcaccttcgacaccaacaggaacctcttagcgaatctctaacaggagggttccatgctcactttcgaacagcaca

SEQ ID NO: 27131 - DNA, 114 bp, Glycine max
  Clone ID: 700903649H1
tagcatttcatatgttctggctcattttaattttggtttgcagattgcatgccgagactatcctcacgcgcgacatctgtgtggtaaatttccagcctcttccacacaacataa

SEQ ID NO: 27132 - DNA, 219 bp, Glycine max
  Clone ID: 700903650H1
cgaagagcagtagaaagaaattagaatggccactttagacgaacgcccttctgcgaaaaggtggcttcctcttgaagctaaccctgaagtcatgaaccagttcctttggggtcttggccttccattggacgaggcagattgctgtgatgtgtttggcttagatgaagagcttctggaaatggttccgaagcccgtcctcgccgtgctttttctttatcc

SEQ ID NO: 27133 - DNA, 215 bp, Glycine max
  Clone ID: 700903651H1
gccagacactgacgatgttcacgtcgtcgctgtatctcgccgcgttgctgtcgtcgttggttgcctccaccgtcacacgtaggttcggccgaaaactctccatgcttttcggaggcttgcttttcctcgtcggtgcccttatcaacggttttgcccaacacgtgtggatgctcatcgtgggtcggatcttgctcgggttcggtatcgggtttgcc

SEQ ID NO: 27134 - DNA, 213 bp, Glycine max
  Clone ID: 700903652H1
aaacacaagccaagtgaaagtgagaaaaaataaaaatcaaagagcataatgtcagggatcattcacaagattggggagacccttcatgtgggagggcacaagaaggaggaggagcataagggtgagcaccatgctggagaatacaaaggggagcaccatggtgaacacagtagtgagtacaaaggagagcatcatggtgaacacaaagctgga

SEQ ID NO: 27135 - DNA, 135 bp, Glycine max
  Clone ID: 700903655H1
tagacatctagattgcacaaggtgcaaaacctggtgaaggtggacaattgcctggaaaaaaagttagcatgtatattgctaggttgagaaattctaaaccaggagttcctcttatatctccacctcctcatcatg

SEQ ID NO: 27136 - DNA, 218 bp, Glycine max
  Clone ID: 700903657H1
actcgctctatttctcagcgtctgtgtttgcggctgaggattccgaacgagtgaccttcttcgtttctcgcaaagttcaagtaatcatgggtaaggaaaaggttcacatcaacattctcgtcattggacatgtcgactctgggaagtcaactaccactggtcacttgatctacaagcttggaggtattgacaagcgtgtgattgagaggttcgagaag

SEQ ID NO: 27137 - DNA, 223 bp, Glycine max
  Clone ID: 700903659H1
cgctcctcacttgcagaattctaagaaggcgtcttcataaacgcctttattctccgtttccgtttccttcccggaattcgatttttcatctctgaaaatgagagagtgcatctcgatccacattggtcaggccggtatccaggtcggaaatgcttgctgggagctctactgtcttgagcacggcatcgggcccgatgggcaaatgccaagtgacaaaacagtt

SEQ ID NO: 27138 - DNA, 173 bp, Glycine max
  Clone ID: 700903661H1
gtagaatccagcttgttcacaggatttgtacaagtgattgttgttgcctacaagaacagaaaacttccattaccaccaaacaactcccctccacattaccattataagaaggagtcagaccttgtcgttccaaccgataaactaagtttcctgaatagagccctgtgttatca

SEQ ID NO: 27139 - DNA, 231 bp, Glycine max
  Clone ID: 700903662H1
ctagcaatggaggcgattaggaagagtaggattcttatatttggaggaactggttacatagggaagtatatggtgaaggcaagcgtcacgttaggccatccaacttttgtctacactcgccctcttgatgcacaaactccttcctctaaggcacagctttgcaaggagttcaactctatgggggtcacacttgtccatggagaacttgagcatgaccagattctggcagtg

SEQ ID NO: 27140 - DNA, 246 bp, Glycine max
  Clone ID: 700903663H1
gctcgatcatttgcataacttcgctgatctctcgttttcaccatctgggcctcctcagttttcgcatcgattcttgttcttctcgatccattggtgatggcatcgatgggttctttaccgtttcttgtggaagccaatgccgactccactttgatgatgatgatgcttcagaacaggaatcacaagttttcttcaccaaagtttaacactgtgaatgcttcatcgttagtaagaggatgggggcgt

SEQ ID NO: 27141 - DNA, 224 bp, Glycine max
  Clone ID: 700903665H1
ggaagacttactcggccttttaaggattcacatcaagcgcggtgtcaacctcgccgttcgtgatgtcaatactagcgatccatacgtcgtcgttaagatgggcaagcagaagctgaagactcgtgtgattaaaaaggatgttaatcctgagtggaaggaagatcttacgctttctgttacagatccaattcatccatttatactgacagtgtatgactatgaca

SEQ ID NO: 27142 - DNA, 220 bp, Glycine max
  Clone ID: 700903666H1
cctcgctctatttctcagtctctgtgtttgcggctgaggattccgaacgagtgaccttcttcgtttctcgcaaagtttaagtaatcatgggtaaggaaaaggttcacatcaacattgtccgctttggacatgtcgactctgggaagtcaactaccactggtcacttgatctacaagcttggaggtattgacaagcgtgtgattgagaggttcgagaagga

SEQ ID NO: 27143 - DNA, 231 bp, Glycine max
  Clone ID: 700903628H1
ccatgttccatgtttccaccgttgcgctgacctctcaacctcacactttcctctttccactccccttttttccctcccgcaacctccaactttcacaaactctacaattccccagaaactggaacctacgctctatctcgccatcgctgcacccaacgccgcaatacgacgattccgaagaccacgtcatcggcgactgcgtcgtgttcgaggacggcgttttcgacgaac

SEQ ID NO: 27144 - DNA, 201 bp, Glycine max
  Clone ID: 700903667H1
gaagaattcgaagagaaatcaaatcgaatctcatttgatctgtgtgtggttgcggcggcggcaatggcggacacttggcatcgatattcgggacggagaaggacagggtgaactgcccgttctacttcaagatcggcgcgtgcaggcacggcgaccggtgctcgcgtctccacacaacatacgagaaaaggtcgccgtgcc

SEQ ID NO: 27145 - DNA, 209 bp, Glycine max
  unsure (1)..(209): unsure at all n locations
  Clone ID: 700903670H1
tccacacaacatacgacacataactgtgagcctttctttcaggttcttaacttgatcagtcagtagtgtccagantctaagggtagttgcaaattgcaatggctaagcatgatgttgagggtggttccttctctgcaaaggactaccatgatcctcctccagcaccgttgattgatgctgaggaactcacacagtggtccttctacagg

SEQ ID NO: 27146 - DNA, 83 bp, Glycine max
  Clone ID: 700903578H1
cttaactcaattctagttttgtagtgagaagaaaaaaaccaaccactctttttctttcatttgcaatttctgtgtcaccaatc

SEQ ID NO: 27147 - DNA, 250 bp, Glycine max
  Clone ID: 700903579H1
gtggtgatgggtgggtgagtccgaattgtgaaagtaagcaaagatggctttcacggaatcgtctctcctccttccttcggtttcaggaaccaacaagaacaagaacaaggttccagaagacaaatggttttagcctacattgtgtattttaccctgggtctcggttaccttctcccatggaacgctttcatcaccgccgttgattacttctcctttctctaccctgacgccagcgttgaccgcatcttcg

SEQ ID NO: 27148 - DNA, 151 bp, Glycine max
  Clone ID: 700903581H1
ataaactcctaccaaggttctctcgttcactcctctctctctcatcgtacgtgcatccatctctcaacaccaaattactacttgcttctcttattactctccccaatattgcctcttgtactttttatgtgattgcccttgaacccttcaa

SEQ ID NO: 27149 - DNA, 249 bp, Glycine max
  Clone ID: 700903582H1
gctaaattagattagtatctcctcaagcaaaacctagagctcccacactcctccactacttagaatattaaaagccccttccttcatcaaggtactactgtttcatcttccctcaaagattggaacaaaacaggaacatgggtactctaacaactgttcctgtgctcccttctaagcttaataagccttcgctttctccgcgtcacaattctctttttccctactacggaagacgcgtcgggaagaaga

SEQ ID NO: 27150 - DNA, 249 bp, Glycine max
  Clone ID: 700903583H1
actcgagctgaattcggctcgagcgagactgcgtgtggtatccttatagattggctgcaatattaccctttttcatttttgaactatcgtttgaaattgaagtacaatggcactttccttcagggatgaagtgatacctttggagccattcaagttccctccgagaaattatggggagcacaaactcaaagatcgttgcagaacttcgatatcggtgggccccgcgaacgcatgcccgaacccatcatt

SEQ ID NO: 27151 - DNA, 248 bp, Glycine max
  Clone ID: 700903585H1
tcagttttctacttgaatcttcgttatccttctttttttctccttgaactcgaatattcactatggcagatgaggtggttctgctagatttctggccaagtccatttgggatgagggtcaggattgacttgctgaaaagggtatcaaatatgagtccaaagaagaggacttgcagaacaagagccctttgctcctcaaaatgaacccggttcacaagaaaatcccggttctcatccacaatggcaaac

SEQ ID NO: 27152 - DNA, 250 bp, Glycine max
  Clone ID: 700903587H1
tcttgctcttgttcaagattggcctatcaaattatgtaccagcgtcttttgttttcggggattccctgctcgatgtagggaacaacaactatattgtttcactggccaaagcaaaccatgacccttaggaattgattttggaatggccactggtcgtttcagcaatggaagaacagttgcagatgttataaatcagaaactgggtcttggcttttctcctccttacttggctcccactactactggatca

SEQ ID NO: 27153 - DNA, 248 bp, Glycine max
  Clone ID: 700903591H1
cttcctcctctctctgcatcgctgcgttttccgaatcgaaaggtgaggttagtaagtaacaatggtggagaaggccaagggtaggaaggaggaggttgtcactcgagagtacaccatcaacctcccaaacgcttgcatggctgcacatttaagaagaaggctcctaaagcaattaaggagataaggaagtttgctcagaaagcgatggggacgaatgatgtaagagtggatgtgaagctcaacaaggc

SEQ ID NO: 27154 - DNA, 65 bp, Glycine max
  Clone ID: 700903593H1
cttacccttactttgcctacagaagcgaccctggcagagctgataaccttggtttgtgccttttc

SEQ ID NO: 27155 - DNA, 247 bp, Glycine max
  Clone ID: 700903594H1
gatattagcaacaattccctcagtggtaaaatccctcctagtttagcaagatcttctaggatattcaggatcaatttgagcttcaactcactttccggatccattcctagtagtctcactatgtcccttctctaaccattcttgcacttcaacacaacaatctctctggttttatcccagattcttggggtggaactggaaagaagaaagcttcccagcttcaagttttgacgcttgatcacaatct

SEQ ID NO: 27156 - DNA, 225 bp, Glycine max
  Clone ID: 700903603H1
gcaggacgatgagtactcctccagttgttgagcgcgtttcagaatgcttcatcaagccgcagcactccaaccatgaatcaaaccaaatctgctacttaacaccttgggatattgctatgttgtctgctcactatatccaaaagggccttctcttcaagaagccctcatcaccacttgttagtcacaataatttcatagagaacctgttgcagaagctcaagcact

SEQ ID NO: 27157 - DNA, 219 bp, Glycine max
  Clone ID: 700903604H1
ggaaattccacagagaagatccagttttggataaaattgatgctgaactattatccagaggtcctggaatgactgttcccggaggttggtgcatagggaaaagggagaatggcaccgatccctgctctgaagtcggtgatactaacgttctgaggcctggcccaggttccaagagacttgaaacattaatcaactcattgttgtcgaatgaaaagttcc

SEQ ID NO: 27158 - DNA, 79 bp, Glycine max
  Clone ID: 700903605H1
ctcaaattgctttcggttttcgttctgattctgcaaaatcatggagatggagcgcatcgttgaattcccccacacatac

SEQ ID NO: 27159 - DNA, 215 bp, Glycine max
  Clone ID: 700903606H1
gtttgatcctggctcagaaggaacgctagctatatgcttaacacatgcaagtcgaacgttgttttcggggagctgggcagaaggaaaagaggctcctagcgtgaaggttgcttgtctcgcccaggaggtgggaacagttgaaaacaaagtggcgaacgggtgcgtaatgcgtgggaatctgccgaacagttcgggccaaatcctgaagaaagcta

SEQ ID NO: 27160 - DNA, 224 bp, Glycine max
  Clone ID: 700903610H1
gtacaacttgaagataagaaaccatcaggtcaaggaccaccaaagtcaacccagacttctacaaaagcctcctctaccaaccccccaacacaaaaacctgctgcatatcgtcctccacatgctaagaatgcatctgctattcaggcagagttgtttggagagactcctgcagaaccactgagcaagaatgcattacgaaacaagaaaaagagggaaaaacagaa

SEQ ID NO: 27161 - DNA, 227 bp, Glycine max
  Clone ID: 700903611H1
agcaagcaaagcgcgggagaaagagaggcagcaaacaaaaacaatggcgacgtcgctctctgtttcgccatctctctctctcaacactctcttcatcgtcaaagcgcttccactatctcgcccctctattctctctctccctctccccaaatccctactctctctctccacgcgccgccgcaccttcatcgtccgcgccgaatcccaaaacggcgccgaccccgttc

SEQ ID NO: 27162 - DNA, 229 bp, Glycine max
  Clone ID: 700903612H1
aatggaaaaagaggaggaggagcagcgcagtggaggctatacgaaggctacaatgagctccacgcgctggcccaggtattgcacacgcccttcgacgcccccgccgtcttggtcgtcggccaccagaccgacggcaagagcgccctagtcgaggccctgatgggcttccagttcaaccacgtcggcggcggcaccaaaacccgccgcgccatcaccctccacacaacat

SEQ ID NO: 27163 - DNA, 229 bp, Glycine max
  Clone ID: 700903613H1
ctttgattgctttatatgaaggagatgccacatcagaaactactcatattgagattgagccttttaccatcttgggagttattgcagggttaattccatatcctcatcataatcagtcacctagaaacacgtatcagtgtgccatgggtaagcaagctatgggaaatatagcatttaaccagctgcgccggatggacagtttgctttacctactggtttatcctcaacg

SEQ ID NO: 27164 - DNA, 236 bp, Glycine max
  Clone ID: 700903614H1
caatatcttctttgtcgcttttattatctgtttttccggcgatggattccggcgcgtggctcctgttcctggtggtcgtggctgtctcaacgtccggccacattcactctgaagcgatcctgagactcccgtccgagagcgaggagatctcgcgcgactactgcgacagtggatgctggcggtggagacgaacaacgccgggacgtggaaccgcgtgccggcgagttgcgtggact

SEQ ID NO: 27165 - DNA, 243 bp, Glycine max
  Clone ID: 700903615H1
ctctctcgctctctttcgctgcgtcctcggttatggcttctcgcaggctctcatcatctctgctccgaccattcctccgtccatctctgccggaatttcaagctccgacccctttccggctattctctgtcccaaacttttccactcgcgtttctccgttcgccattacaaaattacctgggactgaggtattctcacaatttgagtccggtaatggtttagcatcagtgctgagaagctctg

SEQ ID NO: 27166 - DNA, 237 bp, Glycine max
  Clone ID: 700903616H1
ctcagtgaccagagacagatgatgatggagatggcgaacgaacacgctgtcgttgcggcactcgcggcgttggtgctactcgcggcgagggttccatgctcactttcgaagggcagaagatccaaggcgcttccaacatcgttgccaagctcacctccctcccttttcagcagtgccaccactcaatctccaccgtcgactgccagccctccggcgtcaacgcggcatgctcgtctt

SEQ ID NO: 27167 - DNA, 219 bp, Glycine max
  Clone ID: 700903619H1
attcaaagaaggcgtcttcataaacgcctttattctccgtttccgtttccttcccggaattcgatttttcatctctgaaaatgagagagtgcatctcgatccacattggtcaggccggtatccaggtcggaaatgcttgctgggagctctactgtcttgagcacggcatcgggcccgatgggcaaatgccaagtgacaaaacagttggcggaggtgatg

SEQ ID NO: 27168 - DNA, 216 bp, Glycine max
  Clone ID: 700903620H1
cggatctcttcttcagtggtggaagctactagaacactagtttgctcagcactgcgatgaggaagtggacggttgcttccgctctccttcttctctctctcctctttctctttgcagatcaaggtcgaaagtttcaggcgaatgccgagggagattccgacgagcttgtagatcctccgaaggtggaggacaagatcggtgctgtgcctcatggcc

SEQ ID NO: 27169 - DNA, 122 bp, Glycine max
  Clone ID: 700903621H1
caccccttggtaccacttgtatcactccatcaccttgaccaattcagccccttctttcccaaccagactcaattacactcaatgaaaaagctcatcagtgcataccacattgaccctgcccg

SEQ ID NO: 27170 - DNA, 214 bp, Glycine max
  Clone ID: 700903622H1
cctggattccataatctgtgttaggaaaacttccacatccaaggtctaaagaaccactggtgaccaaaattgtgaaaaggggttccttgattttcaccaattcatggcatttcagcactacatttcccgggatttgaaaaccatcccaaatgctgtgactgaggcagaaaaccccaatggttgttttgattgtaacatctgcttagactttgca

SEQ ID NO: 27171 - DNA, 253 bp, Glycine max
  Clone ID: 700903577H1
tgaaaccaattccaccttcttcttttcgagtcacaccatgaaacctcttttcggcttcgcaatcgcgttcctcctcctcctacattcctctcttgcttccgacatcccctaccccaaagcaatttccgattgaaggatacaattgtgaagggatttgggtttacggcggaagatgatgttaagattacggggttcgatccgagagacgccgaggtagggcattccgtggagtaccaattcgacctccaaatcg

SEQ ID NO: 27172 - DNA, 214 bp, Glycine max
  Clone ID: 700903623H1
ctctgttcctcttctgggtctcgttactctttcagattgttgctaaatttggcagaaaaaagccacgtgtatttctgagagattgtgttgtgtataatgaggactttcgttgaggattggaacctggagtgttgggggttaaggaaaactagaaccgaatgatgcgtaaaccagtgtcacaagaaaagacaattgctttacgcatcattcggtt

SEQ ID NO: 27173 - DNA, 221 bp, Glycine max
  Clone ID: 700903625H1
gcaaaagaagccagcaatggccaagtccaagaacaatgccaagaagttgtcctacatctcagttccatctcagatcatcaattccatctcatcttcatctcttcaatctctgcttgaatctcccaagaagtgtgcaaggcactccaaattcttcacctttgtcaagtgcatgaggccaagactcttcttccttttcaccctctttttccttgctttctttg

SEQ ID NO: 27174 - DNA, 222 bp, Glycine max
  Clone ID: 700903626H1
attcattgtcttaatgttagcaatgtcttcctctttctccatccatttcttcctcctcctctcaatagccctttgctcagtttgttgcttagcagcatctcaagctcccaccaccaaatcacacccctatatccttcccattaagaaagaccccgcaacaaatttgtactacacttcagttggcattggaactcctaggcacaactttgatttagtcattga

SEQ ID NO: 27175 - DNA, 223 bp, Glycine max
  Clone ID: 700903627H1
cacctctgtagtgtagccaccaccaatcacaaatagccctcttggccttcaatttcgtccaattccaaatcatggctagcttttcagttttcacgtcttacattgttttgagtctagtgatggcactagcaattagcggtttcaatttcaaaggggcagaggcagcacgtgccttctttgtgtttggtgattctctcgttgacaatggcaacaacaactactt

SEQ ID NO: 27176 - DNA, 257 bp, Glycine max
  Clone ID: 700903531H1
cagtttctcagtttcttattcgttagatctcatcttacactcaccgtcaagttcgtctcgcgccaccgtcgacgcagttccggccactgcctttggttccctcactttctgtctcttcttcttcttctcagaaatatccttctcagaaggttgaaacgggtcatcaagacacagtccatgatgttgcgatggattattatggtaagaggctggccacggcttcatcagatcacacgattaagataattggggtgagc

SEQ ID NO: 27177 - DNA, 257 bp, Glycine max
  Clone ID: 700903535H1
agcgaattaagacagtctctgaggttttgcaggtaagttttattaaattcagcatgataatatattttgagaattagaattttgtatttaggtttgtagctgtgtagagtatctcctcaaaagttatggaagcctggataatcggcctctctctataagattaaagggactggaatgcatgaaaggttctttggcaaaagcccgggttctgtatgctcctgtggaagagattgccagtgagggtcgtcttttacgtg

SEQ ID NO: 27178 - DNA, 255 bp, Glycine max
  Clone ID: 700903538H1
gaaacacacagaagacagagtgagacgcttctcacgatggagggaggagtatactacgcgcgcatgcctcgggtcaaaatccgcgagctgaaggacgactacgccaagttcgagctccgcgacaccgacgcgagatcgccaacgcgctgcggcgcgtgatgatcgcggaggtgccgacggtcgccatcgacctcgtggagatcgaggtcaactcctcggtgctcaatgacgagtttatcgctcacaggctgggcc

SEQ ID NO: 27179 - DNA, 257 bp, Glycine max
  Clone ID: 700903540H1
ccactgaaaccttcacctccttctcaggttccgccccagaaggattcacctgttgctggggatgataataatgtcattacattagagtttcagaggcagaaggctaaggagcttcaggagtatttcaaacagaaaagcttgaagatgcaaatcagggtcctttctttggattcattggcaaaaatgagattagcaatggaagatgggcaatgtttggttttgctgttggattgctaacagagtatgctccgggatca

SEQ ID NO: 27180 - DNA, 254 bp, Glycine max
  Clone ID: 700903541H1
gctatggagtggaaaatatgtggatgtaggagatttcgggatgaatggcctcaaaacgctttgtcgtttgtggttattgagtcctgagtgatcttgtcatccgacctttgccatgacaggtgcgcttgcatgcaggtcaaaaaatgttaataaaaaaagttttattggtttggggagagatcgcacgggggttgcccggggtctcttcctcttgtgtggtgtggtgtttgctgtgctctccttttcgttatgcc

SEQ ID NO: 27181 - DNA, 256 bp, Glycine max
  unsure (1)..(256): unsure at all n locations
  Clone ID: 700903542H1
gcataacagcaccaacaatggtgaagcattacagacccccggggaagaaaaaggagggaaatgctgccaaatttgttattaggtcacaggcactcaagcagcttcaaatcagtttaccccttttcaggaaacttgtattttgaaaggtgtaactccccgggagcccaagaaaaagttcaagggaactcatcagacttattaccatgtcaaggatgtttccttccttcatcacgagcctttgngtgaaatacataga

SEQ ID NO: 27182 - DNA, 253 bp, Glycine max
  Clone ID: 700903544H1
gtgccacactgacacatcagaatggaaccctaaacatttggcctttcaggtgctcaaagttaagccaggaactattcctgtctgccacttccttcctgaggatcatgttgtttgggttcccaagtagatttgcttcaagtcctttttccatatatgtccttgaataactagcttcaatagcatcagctacagaactcgatgcatgtatttgctcgtactatatagttctctagatatgtatacttttttgctg

SEQ ID NO: 27183 - DNA, 256 bp, Glycine max
  Clone ID: 700903545H1
ctagagtcttcagtttctcctcgttgttcttcgctttcctgttttcaatttcgattctttcgttaatttaataagatgtttgggagggcacgaagaagagcgataatacgaggtactacgaaatcctcggctctccaagaacgcttcgcaggatgatctgaagaaggcttacaagaaagccgccattaagaatcaccccgacaagggcggtgatcccgagaagtttaaagagctggcgcaagcttatgaggttctg

SEQ ID NO: 27184 - DNA, 84 bp, Glycine max
  Clone ID: 700903546H1
gtgagagtgaagcgagaagcgagaagcgacatggatccagacgcgttggcaaatgcattcgtggagcactactactccaccttc

SEQ ID NO: 27185 - DNA, 253 bp, Glycine max
  Clone ID: 700903549H1
gccttgctttcttcttcacttcaaacttgctaatctcgaagatggcaatagaattggcatctcccaattgggttccaaccgcagccgcatgtttggcagccttggccgccctcctcctcttcctcctccgcggctccgccgccgtaaatacaatctccccccaggccccaagccctggcccatcataggcaacctaaacttaatcggctccttcccacacaagtcgaaattaacgctgagtaaaacatacggg

SEQ ID NO: 27186 - DNA, 251 bp, Glycine max
  Clone ID: 700903551H1
cgcatgagagatggaggtagtgggcaaggtgggcgaggtgatttctttcctggtaggggcaacaggggtaggggatccggtggccctcgtgggggtcatgttggttggggtaggggtgaacgtggtatggtgatcggtataacatggaggggcgtggacaaggtcgtggacgtggaagatttgacaatagaagagatgtttcttccaaaggtagaggcagaagtcatagtcgtagccctgaaagagtccga

SEQ ID NO: 27187 - DNA, 254 bp, Glycine max
  Clone ID: 700903553H1
ctcttataatccttgctttggtgcctcttctaggactaaatggatatctgcaattcaagttcttaaaaggattcagtgcagatacaatgaaattgtatgaggaagcaagccaagtggcaaatgatgctgtgggagtataagaacagttgcttctttctgtgctgaagagaaggtgatggaattataccaggaaaaatgtgaaggaccaattaagacaggcaaaaggcaagggataataagtggaattagttttg

SEQ ID NO: 27188 - DNA, 140 bp, Glycine max
  Clone ID: 700903554H1
taatggggcaagtggagggtatgattatataatagtggggggtggaacagcagggtgtccattggctgcaaccctgtctcagaagttcaaagttctgctgcttgaaagaggaggagtccctttcaacaacccaatgtgtc

SEQ ID NO: 27189 - DNA, 255 bp, Glycine max
  Clone ID: 700903556H1
cacaagcctagtgaaagtgagaaaaaataaaaatcaaagagcataatgtcagggatcattcacaagattggggagacccttcatctgggagggcacaagaaggaggatgagcataagggtgagcaccatgctgagaatacaaaggggagcaccatggtgaacacagtagtgagtacaaaggagagcatcatggtgaacacaaagctggagagtaccatggtgagcacaagccagagcacaaagaggggttcctag

SEQ ID NO: 27190 - DNA, 248 bp, Glycine max
  Clone ID: 700903558H1
acgacggctccgtcgaacggcgtcggcgcgtatccggcggcgcgagtaccgcaaggaccgggaggagtggagcgacacggcgattgtgtgcctcctcgaggcgtacacggagaagttcacgcagttgaacgggggaacctgaggggaagggattgggaggaggttgcggcggtggtgagcgaacggtgcgagaatcaatcaaagagcgttgaacagtgtaaaaacaaggtcgataacctaaagaagag

SEQ ID NO: 27191 - DNA, 254 bp, Glycine max
  Clone ID: 700903560H1
aaaaaaaggtacatcatttagatggtatgccgcagttgtgtaaggtctttggttgttcaagctggaaccttcgccaacagagtgagaatcaacggatttgggaggagtttgcaggcagttcagagtttttccattggccaattcgtgaatacaagacaaccacaaggatgatggttgatacgggttctatgtcaagggctggaccccttgttgatacgatgccagagaaagatgatgatggtcggtttgccagt

SEQ ID NO: 27192 - DNA, 254 bp, Glycine max
  Clone ID: 700903561H1
ccctatcgcgcaggagaatgtgttggcttcttctccccgacgaactgtggaggcgaattctggagatcggaatcgagagcaacggtttcagttacaaggatctctgctgcgtctcaatctcatgccgccgcttcatcgcctctcctcggaagaacctctttggaaccgtcttctcttctctgactatccccaatcccaatctcacccttcttcttcttcttcttcttcttcttctaaatctctttacagattaa

SEQ ID NO: 27193 - DNA, 254 bp, Glycine max
  Clone ID: 700903562H1
gaggaatcttgagaaatggcaggggacagcaagagcaagattctgttcatcggagggactggttacatcggaaaattcatcgtggaagccagcgccaaagctggccacccaactttccttttggtgagggatccactctctccaaccccgcaaaatcacccctcatcgacaatttcaaaggcctcggtgtcaatcttgttttaggagatctatacgatcaccagagtttggtgagtgctataaagcaggtcgat

SEQ ID NO: 27194 - DNA, 233 bp, Glycine max
  Clone ID: 700903563H1
tgttcctctcttctcctgaaggatatgcagtgcagatgtgtggtgtgaagtggcgaatccccaaaatgggtgacaacagaaagaagcaccgtcgtgtgcaagactcgccgtcttcctcatcctcttcgtgctcgactccgacgactcttcgcggcggcggcggcggaggcgtcgcgagaaggagatgctcagaaagagcgaggaaaaggaggagcgaaggatgaggaagagag

SEQ ID NO: 27195 - DNA, 256 bp, Glycine max
  Clone ID: 700903565H1
aaataaagaaaattttctcttcgagatggggaaccccactatgagcacataatcataatcatgaagaaagcagggagcataagctctggtctcaaactcacagttcctgctgcatctgatcgtgattcatttcaaagttccggtctgagcctgaaagtggaacgtttaaggctggtgacttgcttgtcaataatgaaggagttcgaattgtctctgagaatgaagtggaagctccacccccgatcaggccacaaga

SEQ ID NO: 27196 - DNA, 253 bp, Glycine max
  Clone ID: 700903566H1
ttctgaatgtgctcgttgtttagaaaaccctaatctgattcaattccagcatggctcaaaaacaaaagctgcgcccttctcctctggacgagccacccaccgcttcctcttccgattccgaggaagaagagagcaacaacaacaacaaccatcctctcagcaacacgaagaagaggaagaagaagtttcctccggagaagaagaggaagcttcctccgaagaagaggaagacgaaaagtgccctcaccaccca

SEQ ID NO: 27197 - DNA, 250 bp, Glycine max
  Clone ID: 700903567H1
aaccaggatgagttggatgacatcataagatatggctcaaaggagttatttgcagatgagaatgatgaagcaggcaaatcccgccaaattcattatgatgctgctgctattgatagattgctggatcgtatcaagttggagatgaagaggctactttggatgatgaagatgaagatggatttctgaaggcttttaaggttgcaaattttgaatatgttgatgaggctgaggctgcagcagaggatgacct

SEQ ID NO: 27198 - DNA, 251 bp, Glycine max
  Clone ID: 700903573H1
cagcattcaacaaacctcttcaccttctctatcttccaatcccatttttcattccctgtcgtctttctttgctttctcatccttttccttttcccaagcaattgtactctttaggggcataatacacgtaagcaagttggtttctggagtagttagagttacatgtgttttgcaggcacatggcaatatatgaactggatcccgatgttgttcgctggggtcttcatctcctagatgattgcacactttcc

SEQ ID NO: 27199 - DNA, 250 bp, Glycine max
  Clone ID: 700903574H1
catttgtgtatgtatctactcaaattcaacatttgattgaggttctatctggggatggctctgtggctatgtggtgggatgaacaaagaatttggattctgaagtcagttaccagcatatttgcaatatagatggaatcaagaagtggctggggttgaacaaggtgaaattcaacttgtcaaacaaagccattgacaaagagaagctcaagaaatatgagcaaggtaggttcgatttccaaggtgcagct

SEQ ID NO: 27200 - DNA, 252 bp, Glycine max
  Clone ID: 700903576H1
gcctccggcagatattctgcaggctgccactgagggaaataatgatatgccgctcagtgtcaaaattcttcctgcagctgctctcaacaccttcgttcctccaggtcctctccagctcccatccaccctccagctcctggccctccgcaaccgccaccacaccccttctcacacctctctccccctcttcgaccccgccaccaaatcatggctccacttccccctcgacttcctccccttccactcccctct

SEQ ID NO: 27201 - DNA, 257 bp, Glycine max
  Clone ID: 700903530H1
tagagatgacacccagtgcagatactgaggagtcagaagtattaagtccaaggagaaatcttgaggaggaatatttgacctatgaagccaagattattaccaccttcagtgtagtggataacataaaacagcagtttatgctcaacaggggagaatttccaggaaagatgaagagagagttaaagagctgtttgaagccattgaaaagttacgaactcaatttgagtctatagagagaccaattcttgaaatagaga

SEQ ID NO: 27202 - DNA, 249 bp, Glycine max
  Clone ID: 700903484H1
agttgaagaagcctgaacgttatgtaaaaaaagaagaaaagaaaggtgtggttgagggagtgaggaaatggtgcacagcgcgtacgattgtctggaactggtgcgcgagtgcccagccaagatcgaatccatcgaatcctacgattcgaagcttctcgtgggctgctccgatggatcgctccgaatattcgccccggaaacggaatcttcctcctccaacgggtccaagtcctacgcgttggagaagaa

SEQ ID NO: 27203 - DNA, 250 bp, Glycine max
  Clone ID: 700903485H1
gctcccaactgagtaatcatgatggcaaagcaaagtctaaaacaccacacagtgagattctgaaccaagacaaagaaagggttaagtacattaactcaaggatctcaaagaacttgggccaagatagtagtgtgagtgaattggactcagttacactaccagccaagtctggtagccttattgggtctgggaattactttgtggttgttggtcttggaacacccaagagggacttgtcactcatctttga

SEQ ID NO: 27204 - DNA, 247 bp, Glycine max
  Clone ID: 700903487H1
cgaagtagaaggaaagaagcaatcatttccaatgaaacagatactactaatggagatgagttggtacactagtcctgaagagggtgctggtgaatctagttcttgtgcttcagacgtttatcgattgggggttctcctttttgagctattttgtccgctcagctcaagagaagaaaagagtagaaccatgtctagccttagacacagagttcttcctccacagttacttctaaagtggcctaaagaa

SEQ ID NO: 27205 - DNA, 251 bp, Glycine max
  Clone ID: 700903488H1
gtaactgtcagcatcattctgccgtcgacgaagctgaaacttgtttcttcttttccttgcgcgaaccttttctactaaccccaatcgcttctctcccactccaattccccattcctcatctacataaccccaaccccacactctcacacaccaccaccaacatcatatattacatcgattctcaatcaaatcccaaacgttttgaaaccaccgtcacgatgatgctcagaattcgtagccgcgacggcctg

SEQ ID NO: 27206 - DNA, 247 bp, Glycine max
  Clone ID: 700903489H1
cataacgagaatctgagcgtgaatttgagtagcgaggggagtttggaggactatgattcgatggagagtcagaatcttcaatgggcgcaggggaaagcaggggaggatcgtgttcatgttgtggtgtctgaggaacacggttgggttttcgtggggatctatgatggtttcagtggacctgatgcacctgattaccttctctccaatctctacaccgcggtgcataaggagcttaaagggttgttgt

SEQ ID NO: 27207 - DNA, 248 bp, Glycine max
  Clone ID: 700903490H1
ggaaggtttggaattgctgaaaactgccattgccaaagctggttacacaggcaaagttgtcattggaatggatgttgcagcttctgaattctacaaggaagataaaacatacgatttgaacttcaaggaagataacaatgatggctcacagaagatctctggagatgctttgaaagatctatacaagtcatttgtgacagagtatccaattgtttcaattgaggatccttttgaccaggatgactggg

SEQ ID NO: 27208 - DNA, 268 bp, Glycine max
  Clone ID: 700903501H1
aacagccaccgttgatttgatgcttaacctctcacccaaggaagctgctgctgctgatggtgcagatccacgtgagaagccaaagacttcgccgaaggagaagacccttctgcttcccgatcccgccaagcctcctgccaagcgcaagtggtgggatggccacccgtgaggtctttccggaagaacatgttcgcagcccaaaagagcagcggcggagaggaaagcgaaaagagcagccctaatgcaagctttgtcaaagttagcatgg

SEQ ID NO: 27209 - DNA, 262 bp, Glycine max
  Clone ID: 700903502H1
acaaactcaaaaatcaaaaaccaaaagggcactgactaattttcacaatcaactggattcaagctggttttctcttcctcttcttcatgttcattgattggatcccatctcaccccaattttctaatgctttgtctctcatctcccacgtgcactttcctcttctccgctctaaataattctacattctctctctctctctctctctctcaatacaatattatatgtgtgtgtggaaaaaagaaccgtttttcttttcagcg

SEQ ID NO: 27210 - DNA, 83 bp, Glycine max
  Clone ID: 700903504H1
gtaggtttgtacatcttttggtttggggcgaaagttcagccttgtcagatttgcatcaatttcaacagagaacaacgtcattt

SEQ ID NO: 27211 - DNA, 261 bp, Glycine max
  Clone ID: 700903505H1
gaaaaagttagggtttgtaactttgtcttttgcttgcgaatctgaatcgaataataatcaatcaatcatcatgtcgtcggcgaagaagatcacactgaagagttcggacggcgaggctttcgaggtggacgaggcggtgcgctggagtctcagacgataaagcacatgatcgaggacgactgcgccgacagcggcatccctctgccgaacgtgacgagcaagatcctggcgaaggtgatcgagtactgcaagaagcacgtc

SEQ ID NO: 27212 - DNA, 261 bp, Glycine max
  Clone ID: 700903506H1
cacctttctcctaaaacatctccagtgggttcttcttcttctattacaacaacgtcctacaagaccatgaccatggccatggccacgatcctgctcctgttcacggtcttcgcggtttcatcggccctagacatgtcgaaatctcgtacgacaacgcccacgccgccacgtcgcgcacacagtggagctgatgtccatgtacgagcagtggctagtaaagcacggcaaggtgtacaacgcgctcggagagaaggagaagag

SEQ ID NO: 27213 - DNA, 262 bp, Glycine max
  Clone ID: 700903507H1
agggatgagagagagaaaattccagactcaagtgctgtaaagccagatgactgggatgagaatgcacccttggaaattgttgatgaagaagctgagaaacctgaaggatgggacaatgaacctgaggagatagatgatcagaggcaacaaaaccagaagattgggacgatgaggaggatggtgaatgggaagccccaaagattgagaacccaaaatgtgaagcagcccccggttgtggtgagtggaagaggccaatgaagag

SEQ ID NO: 27214 - DNA, 259 bp, Glycine max
  Clone ID: 700903510H1
gcgcgtgatcattatctatctttcaagtcatgcttaatttgtattctgtgaagtttgcaacaaggagcaaaatatatatgaagaaaagctagtcaaagggtggtatatatagtttgccttttttttgttctcaaatctattaggctgatgtattttccttctcttttttacttgtgtgtagttttccctgcctaaagtacgtacttagtctttttccagtgaaagaaataagcaaaaaaaaaaaggaattaccaaaatt

SEQ ID NO: 27215 - DNA, 259 bp, Glycine max
  Clone ID: 700903511H1
ggtgcagaaagggccattttctgaatgcgctctatctatctcttccgatctggctactaaccctaacccgcttcgaaccgtggcttcctcggcctcgcagaacctctctcgaagaaaatcttcttcttcgtcttcgtttctcaacaaacttccgggtcgacccggatcgtttaccgcgaacctcggatcccatcggaatccaattttccgatctggcagcagaactggttcatcgcattgctcttcctcatggctctcg

SEQ ID NO: 27216 - DNA, 261 bp, Glycine max
  Clone ID: 700903512H1
ctagaaacagtgtgatgaaaatgaaggtccttgttttcttcgttgctacaattttggtagcatggcaatgccatgcgtacgatatgttccctctccgaatgaacactggctatggtgcccgtactccggaggtgaaagcgcaagttggaggcttgctgatggaagcacacaacatctttggctttgagaccattcctgaagagtgcgttgaagcaacaaaggaatacatccatggcgaacaatatagatcagactccaaaa

SEQ ID NO: 27217 - DNA, 262 bp, Glycine max
  Clone ID: 700903513H1
ggcgttctacagcgaggaggcgaagttgaacaatgaatcggacgatttgcagaactctatcagactcactaaggataacatcaaggctatcattatggacgtgatgttcggaggcacggaaacggtagcgtcagcgatcgagtgggccatggcggagctcatgagaagcccagaagatcaaaagcgggtccaacaagagctggcggatgtagtgggcctggaccgtcgggccgaagagtccgatttcgagaaactcacttat

SEQ ID NO: 27218 - DNA, 261 bp, Glycine max
  Clone ID: 700903514H1
acgcggtgagtgagtgagagacggaaagtacaaagccaccgtcttctcttctcagagcttggctttgcttatcgattctctctcctctcatctttctcattcaaggtttgtaaaagatggccgatgctgaggatattaaccccttgtttgtgacaatggaactggaatggtcaaggctggatttgctggtgatgatgctcccagggctgtctttcccagtattgttggccgacctcgacacactggtgttatggttgggat

SEQ ID NO: 27219 - DNA, 264 bp, Glycine max
  Clone ID: 700903517H1
ctgaaccaaatcatcacacacacatactaagaagcaacaattcttctacaatggatctcctccttctggaaaagaccctcataggtctcttcctcgctgcggtggtcgccatcgccgtctccaccctccgcggccggaattcaagctcccaccgggcccactccccgtcccaatcttcggcaactggctccaagtcggcgacgacctcaaccaccgcaacctcaccgatttggccaaaaaattcggtgacatcttcctcctccg

SEQ ID NO: 27220 - DNA, 259 bp, Glycine max
  Clone ID: 700903518H1
gcgcggtgagtgagtgagagacggaaagtgcaaagccaccgtcttctcttctcagagcttggctttgcttatcgattctctctcctctcatctttctcattcaaggtttgtaaaagatggccgatgctgaggatattaaccccttgtttgtgacaatggaactggaatggtcaaggctggatttgctggtgatgatgctcccagggctgtctttcccagtattgttggccgacctcgacacactggtgttatggttggg

SEQ ID NO: 27221 - DNA, 93 bp, Glycine max
  Clone ID: 700903520H1
gaagtaataagttctaaatgttcgtgactgaaatgcatgtacttccattgtattttgacttttatccttgatcacatgtgatgtttgacagac

SEQ ID NO: 27222 - DNA, 87 bp, Glycine max
  Clone ID: 700903521H1
tgaaaatgggttcttctttgtggactttgtgtctaattttggcttcactagcctcttctgcattctgtgcctttccacacaagatac

SEQ ID NO: 27223 - DNA, 259 bp, Glycine max
  Clone ID: 700903522H1
ctcaatacccttttgatttgtgaaaggaaagcaaacatgcttgatcaggtccaacaccctacaatcatggacaaggttgctggccagctccatctccgttctggtgtttctggtattaggagttatgaaggagcctctgctaccccacaatgtaccaaagaccctcttttgggaattactcgaatgctgcattgcagtatcctgtgatgccctcatgcaaagctactatggatttgtctgctgctgcaacaactgcctc

SEQ ID NO: 27224 - DNA, 145 bp, Glycine max
  Clone ID: 700903524H1
ggcgtgcagagaatctcacaggtgcggaatatgaagccatagacaagatactactgaacaaacacgaaatggtcttcaattttgtctctgcactaataacaacagtattgctctccggagccatagttgaagttaaggtcttcca

SEQ ID NO: 27225 - DNA, 260 bp, Glycine max
  Clone ID: 700903525H1
tggagcagaagaaggcaaagatagtggcagagctccaagctgtgaagcacaacagtggcaagtcctacaatcagttagcggaggagactggactcaccaacgtctatgttgctcagcttctcaggagacaggctcactcaatccccaaactgcccctctacttcgggcagcgctgcccgacctgccccaagaccttgtttctgagatgatgagaccccctttgaggtcttatgaccctaatctcatccaagaccccactg

SEQ ID NO: 27226 - DNA, 258 bp, Glycine max
  Clone ID: 700903527H1
cattaatggctgattttggtgactattttgggttgcttttcatttggctagcctccatcttcattttacgtgtaatattattcacaaagtctcgcatcaagtcacgtctacccccaagtcctagagccctccctggttaggacacctctacctcctcaccaagctcccccaccaagcattccacaacatctcaatacgttatggtcctttggtctacctcttgttcggttccaagccttgtgttcttgtttcatcacc

SEQ ID NO: 27227 - DNA, 260 bp, Glycine max
  Clone ID: 700903528H1
cttcccttctccaacatgccaaacgactgcgttcatagtctttacttcttcgttaccctcttcacatgccttctctctgctaattcccacgatgaccatattttcctaccgagtcaactccatgacgatgactcaggagttgcactgctaccgacccaaaccttaactacaagccggtgatcggaatcctgacccaccccggcgacggtgcctctggccggctcagcaacgccaccggggtttcttacatcgccgcctcc

SEQ ID NO: 27228 - DNA, 245 bp, Glycine max
  Clone ID: 700903482H1
aaataatcgctggccctatcacattattgttaatattcttcccttctttacctactactttccgaatccagaaaacaccacaacgccacccagaattgttgggttccattctcaaaacagagaacaagaagaagaagaaagagagagagtgatcacgggaaaagcaaaaagttgtttctgtgattgattctctgcaaccgaatcatcatcagccacttcttcccgtttcatctctcccatttctt

SEQ ID NO: 27229 - DNA, 84 bp, Glycine max
  Clone ID: 700903529H1
atcttttccgggggtacaatacaaattccgaaccccccatattcctccctcgccgatcgctcacgtcagatttgtttttgtttt

SEQ ID NO: 27230 - DNA, 88 bp, Glycine max
  Clone ID: 700903431H1
ctttcaataccattgtactacaatattgccctctaagtttttgcttcttaatccacaccctttcccacagcctttcattgtgctggtt

SEQ ID NO: 27231 - DNA, 264 bp, Glycine max
  Clone ID: 700903432H1
aaaacactcaattctcttctcttctcttctgggtttttgctttttcctcattctctcattctcaaacaccacaaaaaaatgggccttgtttcccaggatgccctcaaccaactccaagctctcatggatcaagtgctacttgaggaggagccactgcagagaacgtttcagaatgttcatcaaggatgtgtcaccgaaaccttaacacggtttctaaaagcaagggagtggaatgctaccaaggcccataaaatgatagtcgat

SEQ ID NO: 27232 - DNA, 261 bp, Glycine max
  Clone ID: 700903434H1
attgaatcgtaagcagcggctaccctaatcctctcctcttcctctctactaatttcagctatggccgacgaagctgtggttgttccagatcccacccagatcgatctcaagctctttaaccgctggagcttcgacgatattgaggtaccaatttccatgtttttagggttcagctgcttattaaattatatcctaaaaatctgtgatgtgtattctgttctgatgttttttcgatgtgttcttatgtgaaatgtgtaatta

SEQ ID NO: 27233 - DNA, 259 bp, Glycine max
  Clone ID: 700903435H1
ggtccacaaaccttgactggtacaagggtcctactctgctagatgcacttgaccagatctctgagcccaagaggccttctgacaagcccctcaggctaccccttcaggatgtgtacaagattggaggaattggaactgtgcctgtgggacgggttgagactggtgtcttgaagcctggaatggtggtgacttttgcaccaactggactgacaaccgaagttaagtctgtggaaatgcaccatgaagctctcacagaggc

SEQ ID NO: 27234 - DNA, 256 bp, Glycine max
  Clone ID: 700903436H1
gggaggtgcatgcgggaaccagatcggagccaagttctgggaggtggtgtgcgcggagacgggatcgattcaacggggaggtaccaaggggacaacgagttgcaactcgagcgagtcaacgtctactacaatgaagcgagttgcggaaggttcgtgcctagggcggtgctcatggatctggaaccagggaccatggacagcgtcagatctggtccctacggtcagattttccggccagataacttcgtctttggac

SEQ ID NO: 27235 - DNA, 255 bp, Glycine max
  Clone ID: 700903437H1
caagactcatactctcaaagcgccgcgccgcgccgcgccgtcgaactcaaatcaccctctgtcaaccggcggcgcgtcgcaggaatcgatgaagttgcctgaagaagcagcgtcgcaatcagttcctcgctcgctagagttttggattcgtgtgtttgaggaggttatttatggccacttgtatggcagcgattcaacgaattattcttgactcgtgaacttggcagaggtagtgtgaatttacgttcgaaaaat

SEQ ID NO: 27236 - DNA, 256 bp, Glycine max
  Clone ID: 700903439H1
aacatcatcatgtcggacgaagagcaccatttcgagtccaaggcagacgccggtgcctccaaaacctaccctcagcaagccggtaccattcgcaagaacggctacatcgtcatcaaaggacgcccctgcaaggttgtggaagtttcgacttccaaaactggaaagcacggtcacgccaagtgccactttgttggaattgatattttcactgccaagaaacttgaggatattgtgccctcttctcacaactgtgatg

SEQ ID NO: 27237 - DNA, 253 bp, Glycine max
  Clone ID: 700903441H1
agagtatccccaccaatggggaaagtgcgcaacaactgtgtttggcttttgctgcaaatatcgtaatatcattgccattcccatttgcagcaaaagggaatggcaatgatattacgatatttgggaatgtgcaacaaaagacactagaggtcgtgtatgatgttgagggtgggaggatagggtttggtgctgctgggtgcaactgaagttagtttgattaatagtggagttaattaaacatgctttgggcttg

SEQ ID NO: 27238 - DNA, 254 bp, Glycine max
  Clone ID: 700903445H1
aacaaacccactaagatggcttcctttgtatccttcctagtgctgcttcttgcagcccttatcctcatgcctcaagggcttgctacttactacaaaccaattaagaagccaccagtgtacaagcctccagtgtacaagccaccagtgtacaaaccaccggtttataagccaaaaccaccggtttacaagccgaaaccaccggtttacaagccaccatataagaagccaccatacaagaaaccaccttatggaaa

SEQ ID NO: 27239 - DNA, 252 bp, Glycine max
  Clone ID: 700903446H1
ctgaggcgcatttgacttctgccgctgcttttgtggagggtggaattcaggatgcttgtgatgatgcttgcagcatatgccttgaagctttctgtgatagtgatccctccacggtgacaagttgctagcatgagtttcatcttcagtgcattctggaatggtgtcaaagaagctcccagtgccccatgtgttggcaacctatcagtctcaaagatccaacaagccaagaattacttgaggcagtggaaagag

SEQ ID NO: 27240 - DNA, 250 bp, Glycine max
  Clone ID: 700903448H1
gttgtgtgtgtgtgcgcgtttgtagataactgttgattgtatgtctttcatgctatagcaggagtgtataatctgagcgatgtcagatcttgaggctcccttgcgccctaagaggaagaaggtttgggtggactatttcgttcagtttcgatggatccttgttatttttgtggtccttcccatctccttcaccatttatttccttacataccttggggttgtaagatctgagtggaagtcctataagacg

SEQ ID NO: 27241 - DNA, 130 bp, Glycine max
  Clone ID: 700903450H1
aatattttcttttatgaaaatggcgcgtggcaagaatctgttcctccaaattctgtggtgtttttccttgatcggtcttagttcccaagcacagaattacgcttttgttgtgagagaggccaagtataca

SEQ ID NO: 27242 - DNA, 119 bp, Glycine max
  Clone ID: 700903451H1
gttttaaccatggaatcagcggcaagaacaacaacaacaacaacaactcatatagcccttgtttctatcccagctttcagccaccaagtctcaatcctcgagttcgcaaaacgtctcct

SEQ ID NO: 27243 - DNA, 253 bp, Glycine max
  Clone ID: 700903453H1
ctttatggaagatgttcccgacacggcggcgaaccggtccgagccggggctcagggcggagatcgacacatcggtggccgttcgaatcggtgagggaagccgtcacgcgattcggtggagttgggtattggaaacccattctcaacggtcttagtaacaagcattttgcggacactgagccgcatcacacagaagagcttgaccctgaaaaactggaggagcaagctactgtattggagaaagagctgatcct

SEQ ID NO: 27244 - DNA, 252 bp, Glycine max
  Clone ID: 700903456H1
gaaaagggtttatggcttaactcttatgcttatggttgtgtgttccgttgcctcagggctctcttttggacacacccccaagggtgtcatggccacactttgtttcttcaggttctggcttggctttgggattggtggtgactaccctctatcagctacaatcatgtctgaatatgccaacaaaaagactcgaggggcattcattgctgcagtgtttgcaatgcagggttttggaatcctggctggtggaat

SEQ ID NO: 27245 - DNA, 248 bp, Glycine max
  Clone ID: 700903458H1
agggactaccataatttttctctcccaaacaaacccaagactagaagaaagatagaaaagagtataaacacacaatatctctttaaactcttgacccttctcttggaggcatggctttcccaattctcttccttctcttcatttcccttcccttctcctccgcaaagctcaacgtctattactacaaaaacacatgcccagacttcgaaaaaatcgttagggaaaacgtcttcaccaaacaaagcgct

SEQ ID NO: 27246 - DNA, 252 bp, Glycine max
  Clone ID: 700903459H1
ggccaccgtaccatcaccagcaacaacgggtccagtacgtgcagaggcatttgctgcagcaacagcagcagcaatggctgagaagggacggcagcgccgccgtcgacgaggtcgagaagaccgtgcagtctgaagccgtggattcgagttctcaagattggaaggcaagactaaagcttccaccagctgatactctcgataaaacagaggatgtaacggcaactaaaggaaatgagtttgaggattactttt

SEQ ID NO: 27247 - DNA, 159 bp, Glycine max
  Clone ID: 700903462H1
ctcgagccgtgcggctgctgattttgacgaggatgaattggaagcagaacttgaagaactaggagggtgctgagtccgaagaacagcttcttcagccagcaactacagctccggcggccccagtgcaggtcccagctgggcagcaacctactcgcccat

SEQ ID NO: 27248 - DNA, 255 bp, Glycine max
  Clone ID: 700903466H1
tgagagttgaaaaacaatggatggcttgttttgtttttatgatgatgagtagtattatataataatttatgggagcagaaagacaagacaaaacaagagagaatgagtggcggatgaggaggagaagaggaagcaactctggagttcactccgacgtgggttgtggccgccgtttgcacagtcatcgtcgccatatctctcgctgctgagcgcctccttcattatggcggaaagtttctcaaagccaaggaccag

SEQ ID NO: 27249 - DNA, 253 bp, Glycine max
  Clone ID: 700903468H1
tgggtttgtggaacacaacgaatgcagtgtcttgccgctttcacaagtttggtgatgaccaagagaatctggtcttccaaggtgatgccacgtcttcttccaggggcatagaactcacaaagttagacggtggaggaaaaccagtgggtggcagtgtggggagagtgttatactcttctccagtgcacctgtgggaaagctctacagtggtcgcaagctttgagaccggacttcaccttttccatctcatcag

SEQ ID NO: 27250 - DNA, 251 bp, Glycine max
  Clone ID: 700903469H1
gtttgtccattgtctctactcttagaacgcgcgcttctaaagagaagagacaatggatcacttgagattcaacgaaaccacccttgtcctcatcggaaccctctcttgcctcctcctgtccatcactgccgtcccctcaactcgcgtcttggaactcgctcccagcgaagcccccaccgcggagcctatagcctccggcatcagcctcttcgacaatcttcttgccaaggaatcaagccccatgattctga

SEQ ID NO: 27251 - DNA, 252 bp, Glycine max
  Clone ID: 700903471H1
gtagctttggtcccttgtttttgttgtgctatggcgcctgatgctgccgccgccaacggcaaaaagagaagacgctatcttcctcataacaaggcagttaagaagaagggttcgtaccctctgcggccaggcgtgcaaggttttttcatcacttgcgatggcggcagagaacaccaagcctctcgtgaagctctcaatattctcgattccttttatgaagagctagttgatggggaacattcaagtgtaaag

SEQ ID NO: 27252 - DNA, 252 bp, Glycine max
  Clone ID: 700903472H1
cggacgtacccttgctgactacaacatccagaaggagtcaactctccacttggtgttgcgtcttcgtggtggtatgcagatcttcgtcaagacccttacgggtaagactattaccctcgaggtggagagctccgacaccattgacaatgtgaaggcgaagatccaggacaaggaaggaatcccaccggaccagcagaggcttatttttgctggcaaacagctagaggatggaaggaccctcgctgactacaa

SEQ ID NO: 27253 - DNA, 250 bp, Glycine max
  Clone ID: 700903474H1
agcaaatggtggtgctgatcacctagagagggaagacaggggaagatttaggaacagattgtcatctggaaggttgccggccactcaccatttgtcacctggagagggaagggtccatgacagaataagaggaagattgcaagatgatgagaggagaaactccaaggatcgattgatggggagagaactaccgggtgataggagtgattttgctgggccaaaaagtctttctgaacttaaaaatgggagg

SEQ ID NO: 27254 - DNA, 249 bp, Glycine max
  Clone ID: 700903475H1
tggtcactgacctatcttggaagagttttgaagtttaaaccttcatgcccttttgcctttagattctgattctgagtctctgctgctatatatggcgccacgcgtatttcttgtgttggggatgttgctgatggtgtgccttgttaaggtttcgtctgatccaaagagagaagaagaaatactggaagaagaactacattttcccgataacgagccacttattgtgagagacgggaacagaaggctaat

SEQ ID NO: 27255 - DNA, 257 bp, Glycine max
  Clone ID: 700903427H1
gacaaaggtagcgtgttgtacaaggggcaattttttcaaaacctttttctctctcgcaacctcacctcttcctccttcaatctctttcggaatttcccaaaatccttagtgggaggaagagatggttctgactcagaagcttcacgaagccttcaaaggcaccgtcgagaggattactggcccccgaaccgtttccgccttcaaagaaaaaggagttctcagtgtctctgagttcgtcaccgctggcgataatctcg

SEQ ID NO: 27256 - DNA, 249 bp, Glycine max
  Clone ID: 700903476H1
ggcgcgtgcttcggtgtcctcgaggcgatgttcacctttcgtgttctcgatttccaaggtttgatttgaggtaaaataagaaccgagaattggagttttcgaccttacctgctggtgaatgtggagttttgtaatgcagtttatcaaatcaatatccggttttttttagctctccagtggtgaatgtacttgctgataattattttttatgatattctattgtgatgaagttgatgttgatgttgagtt

SEQ ID NO: 27257 - DNA, 86 bp, Glycine max
  Clone ID: 700903479H1
cgaaaggccagtgaaagccaagattgggagattgagaatggaaagggcgtggattgttcaagctcacagaggcgtcagtggaagcc

SEQ ID NO: 27258 - DNA, 87 bp, Glycine max
  Clone ID: 700903362H1
tgtgagtatgagaaaaggcttcctgcaccgagcacaccaacttgagacctctgattctttctttgcttagaattccacacaacatac

SEQ ID NO: 27259 - DNA, 182 bp, Glycine max
  Clone ID: 700903363H1
ataaaattcttccaccaagttatgggtttccttgtgttgcttcttttctccctcttaggtctctcttctagttccagcatatcaactcatcgttccatattggaccttgacctaaccaagtttaccacacagaaacaggtgtcttcactgttccaactatggaagagtgagcatggacgtgt

SEQ ID NO: 27260 - DNA, 180 bp, Glycine max
  Clone ID: 700903366H1
ggcatattgtgccctccctctttctagctatttccctctcttaacacaattaacaaagatatatcatatgctatcaactccaaatgatgaaaaatattgggttgtttcttcttgtggtggtggctacttttgtggtggcagccacagctggtagcttttaccaagactttgaaataacat

SEQ ID NO: 27261 - DNA, 180 bp, Glycine max
  Clone ID: 700903367H1
gtttttatcatggaactgattggattgaggttactggaattccttgctttcctggcgtgcccaaatcaccataggcacaaaaagacaatacttaattggcaataaaagtaatgagttgcaaaatcaagcaatataaattaattaaaaagtaatgattgtcgctctgtattctttaattat

SEQ ID NO: 27262 - DNA, 177 bp, Glycine max
  unsure (1)..(177): unsure at all n locations
  Clone ID: 700903368H1
aacaataatggccaccacctcggagagggatatggagaacaagagtgatcaagaagaactgaagcatcttgggtttgtgaagattgcggcgattaaagcctttgtgtgtgttgcnaatctctacgacttcgcaaagcaaaactcgggacctttgagatctgctgttggaaccgtgga

SEQ ID NO: 27263 - DNA, 177 bp, Glycine max
  Clone ID: 700903374H1
cagcttttccctcgttgaaatgaaaatgggttcttctttgtggactttgtgtctaattttggcttcactagcctcttctgcattctgtgcctttccacggaggccagtggatgttccattcggcagaaactacgttcccacttgggcttttgatcacatcaaatacttcaatggagg

SEQ ID NO: 27264 - DNA, 177 bp, Glycine max
  Clone ID: 700903375H1
cttctacaagttcctcaagaaacatgcatcaatcccattcaagctccagaaaccatgctcaacttctgaatccgattccaaggggagctctgatgccaattagagccagagtagtgatgtgaaggacgaattatgaggagttaagtgatatatttttatttatagaaactatgattc

SEQ ID NO: 27265 - DNA, 178 bp, Glycine max
  Clone ID: 700903379H1
gcgggaaacaagataagtgatgttgaggggctacacaggttattaaagctaacagttctggacttgagctttaacaagatttcaacaacaaaagcattgggccagctggtggctaactacaactcacttcaggccctgaatctgcttggaaatccatgtcaaagcaacatcagtgatg

SEQ ID NO: 27266 - DNA, 180 bp, Glycine max
  Clone ID: 700903383H1
tgcgttggatgagaattcaaaaatcgtgaaggtggagttcttttatgatcctgccgaattgcttggaggtctcctgaaaggtcccaagtttgatggcagtgctgaagatgctgttgcaagctgtcctgtactcaggaacaccggctagagcagcacaagttcaaaaagtttaacctttga

SEQ ID NO: 27267 - DNA, 178 bp, Glycine max
  Clone ID: 700903384H1
gagggttgaaaggggttggtgaggaggatgtggagattgtactagacaaaagaggaattcaaggcattctgaaatgtcttgtcgttgttaaatgacatagtaataaccctgtaatatttatccttcaaatccaagagacgttgaacaaaatccacaggatctctcaacctttcaggat

SEQ ID NO: 27268 - DNA, 177 bp, Glycine max
  Clone ID: 700903387H1
gtcgatgtttacattgccaagggtgctggcatcacggtgcagtttgtgaagaacatcatcatccatgggatcaaggtctttgacatcgtgattcgtgagggtgggacaatcagagattctgagacacattatggtttcaggactaagagtgatggtgatggcatttccatctttggt

SEQ ID NO: 27269 - DNA, 178 bp, Glycine max
  Clone ID: 700903388H1
acgaaaagagagataaagttaaagaaattaaataccaccaatttcgcccacgaaagcctctctctcgttcgttgcttcaaacttcaaacttcaaactcctccgcggcttcccttctcgttcttcttcacagaaatggagttttcagtggccaaagcgttgaaaccgagtttaaggagt

SEQ ID NO: 27270 - DNA, 172 bp, Glycine max
  Clone ID: 700903391H1
agattctggtgttcagcaatctgatgaacagaagatggagcaggaggtggaaggggatttgctggatgctggtgaccagcagccacctgatgatcaggatgagcatcatggtggggattcatcagattctggttctcttttgccccgaatgaatcgggacagctcaatcgct

SEQ ID NO: 27271 - DNA, 177 bp, Glycine max
  Clone ID: 700903392H1
tttccatttacaatggtttgttcctatccttttagctgccccattaaattgggggctatcaagacttgttcttttttctcctacatttaatctttacaacaggaaatgctcctgaaaattttggcttcattgatgcacaagcattggtagctgttggatgtgtagaaaaataaatcc

SEQ ID NO: 27272 - DNA, 176 bp, Glycine max
  Clone ID: 700903394H1
gcaaaactgaaagcaaaggctaactcggagtgcaacacaaccaaaatctcatcgttccaatcattatcggcacttgtttggagatgagtaactcgtgcgcggcgcttgccgtatgatcaaagaacaagttgcaagttgtccgcaaacaacagaacaagaatggaaccaccactgcc

SEQ ID NO: 27273 - DNA, 176 bp, Glycine max
  Clone ID: 700903395H1
agatcccattgccataaattactttgtccacaatcttgatttcacgctcagcctcgcgtcacctaacaattttgaagcatttggggttgcaattgaattcttctgagcaaaccttgttcttatcgtcgccacaatagacatggtttatcattctagttttgtgaatgaagatggag

SEQ ID NO: 27274 - DNA, 269 bp, Glycine max
  Clone ID: 700903401H1
catgaagggatgatgtgacgtgttgcccgtctaccacgtggagggttttgattggatgggagagtggattccaaaagaagggcgacctcctgctttggtttcagtggattcctcgaggcggagaatgtcagggcccattttaaatactttatcaagtgccaatgtcttgggtcagtcaagtggatcatctaggcgggctgctgtttctagtagccgtgatgcatttgttggtgctgagtcagatattcggactcgcactgctgaggcta

SEQ ID NO: 27275 - DNA, 83 bp, Glycine max
  Clone ID: 700903402H1
agagaaagagactcaacctcgttcgtgtcgttcctccatgaaataatggcttccgtttctactttctgtttcgttctcttctt

SEQ ID NO: 27276 - DNA, 265 bp, Glycine max
  Clone ID: 700903403H1
ctcatttgtacaaatcagacaacttacgagaacttccgaaatcaatatgataagaaggggaacccattcaataggggatcatgcagaaatctgaaagaaacactttgttccagtattccccattcgaagaataatttccgatcatttgttgtggaggatgaacagatgatggttgggtctctgactccaaatactggggatggaattttgaccccaaaggagaaaattgatcttgaaatgggatctatgcgtgcagaagatggtc

SEQ ID NO: 27277 - DNA, 263 bp, Glycine max
  Clone ID: 700903404H1
ctctcacacactcaaccaacgacgaaggcagaagaagaattacaaagtaccaccaaacaggctgcgacgacgtcgttctttgcaacttccagttcttgttcttgatgaatatgacaccagtttgcccctttgtcaaagctgctcgccccgatgataacaatgcctctaagaaatctggcgaaaactctatgaaacatcaggctgagtctgagagtaaggtgaagaaagaggttaatgactcagctagtacctcaccaaagtgc

SEQ ID NO: 27278 - DNA, 78 bp, Glycine max
  Clone ID: 700903405H1
agatggggtctccaatggcctctcttactctcactattgcattaaccataatctctctcaccttgccatctcaaacat

SEQ ID NO: 27279 - DNA, 259 bp, Glycine max
  Clone ID: 700903411H1
tcccacttggtgttgttcagcttggctctctaaataaagtgattgaagatatggagtttgtaactcatatcagaaatctttttttgtctactcaaaattactcaatcctacgtcctagtcaaatacagggtagtttgaagagctcatctgagctggatacattgaaggaaaatttgtcttcagatattatgcctacttgcttttacgatacacagaaatctatgaaaagtgaaacagcagatgttttaatgccccttca

SEQ ID NO: 27280 - DNA, 258 bp, Glycine max
  Clone ID: 700903412H1
caccaattggccagaatacaggttgccatcatacttaagacctaattaccccgcaattcctgcaagttattaccgttacactccacctgcgaaaacaaccacaatcacatcttccaagccttgatggccacatgcatgcaatttggtatatacatattattgttatgattgttagcatttcaaataaatcggttcatcaatatggccatgcacaagcattcgatctctctccaagtttaattattactttgtggttta

SEQ ID NO: 27281 - DNA, 260 bp, Glycine max
  Clone ID: 700903414H1
ctgctagcacctgttatcatgaagggcaatagcaagacttctttgagccaccaggagaaccgaatactaggagagaccaaggatcaaattgaacagatacttacacttgtttttgagaattataaatcacttgatgagtcttctttctcgggcatcatagaggttttcagaccagcaacgggtcaagcagcaccagccttggaacctgctgttaaactctacaagcttcttcatgatatcttatctcctgaggctcaaat

SEQ ID NO: 27282 - DNA, 266 bp, Glycine max
  Clone ID: 700903415H1
ggagaaagcaacaagagtgaaaatacttgaagtttgccttgtgtcaccaccacaggaaaaaacgacaacacaaacatctttgtctctcacattctttgagttactatggctgaggcttcccccagttgagcgtcttttcttctatgaattccccaaccaaaccatttcattcttcgacaccattcttccaactctcaaacactctctttccctcacactccaacactttctaccttttgctggcaccatcatttggccccttgact

SEQ ID NO: 27283 - DNA, 261 bp, Glycine max
  Clone ID: 700903418H1
agaggacttgacaacacttcattcagatatctacatattgtaatagtgttcacagtataatctgtgacattaatttaaagcttgtgttagtataaatgaatgggtggtcattgttcatggttctgcatattcagagtcggtggctcgaaacagttttttttgtgaatattcaacagagatacataaggaaattacagaagttattatcttggaaatgaagcatacagaaaatgaatacagcattctacaggcattaatctt

SEQ ID NO: 27284 - DNA, 260 bp, Glycine max
  Clone ID: 700903419H1
ctttttcttttgtcttttattattatgctgctgttgttcgttcatgtgaacatggtggatgctgatagaagcagataatatagggtttatatacagattttttattagtacgtcccacacactgcccatgtttcagggataatcattctttggtgccaattttttttttttcataaaatcctctctgattctctctctctcttaattagtttctcttaggaatctcagatcttcatagccattgttccctctagcttcat

SEQ ID NO: 27285 - DNA, 257 bp, Glycine max
  Clone ID: 700903420H1
gtgcaataactcgttgtacagtcctagtgtgtgggagagacatggctaagatgtgtgttttggtgttggttcttgctctggctgtggccacaagtgccagaaacgttcccaaccccaaggatgctggtcttaaggaccagaagaacttcatcagctatggtggagttggtggttattccgggattgggaacaatggactgccttttggaggagctggtgccggaataggtggtggttttggcggaggtggtggactt

SEQ ID NO: 27286 - DNA, 182 bp, Glycine max
  Clone ID: 700903360H1
gcggaatcagctagaattttctaataatggccaaagacgttgagcaggttacagagcaaggtgaatactccgcgaaggattaccatgacccacctccggcgccgttgatcgacccagatgagctcactaagtggtccttgtacagagccgccatagctgagttcatagcaacactccttttc

SEQ ID NO: 27287 - DNA, 122 bp, Glycine max
  Clone ID: 700903422H1
caatctggctccgtcaaccatggcatccttcgctgcccccaacaacattggcagcggcgtgctaccctctcgccagagaaaaccctctcgaccccctcccctcaaatgctcccttctccctt

SEQ ID NO: 27288 - DNA, 257 bp, Glycine max
  Clone ID: 700903426H1
atcgaaactcagaagtagaaagaaacacaaatcacaatcgctatggctaggtacgaccgagcaatcaccgtgttctcccctgacggccatctcttccaggtcgagtacgccctcgaagccgtccgcaagggcaacgccgccgtcggcgtccgcggcaccgacaatgttgtcctcggcgtcgagaagaaatccaccgccaaactccaagactccaggtcggtgaggaagatagtgaatctggacgaccacattgcgct

SEQ ID NO: 27289 - DNA, 203 bp, Glycine max
  unsure (1)..(203): unsure at all n locations
  Clone ID: 700903286H1
cttccattccatcgcattgtatggtccccttttcatacacaacacaacacattccctccacacaacatatgatatacncncacncncancaccancaccaacaccaaccgcttcccctctcccgggttcggatctacgaccaccgccgcacgcggcccgagcttccacactcagaatccagatccctacttccacacaacata

SEQ ID NO: 27290 - DNA, 248 bp, Glycine max
  Clone ID: 700903287H1
agcagatagaaaaaagagctgagttttgagttcaaaagatgactaacttcccagtgatcaacttggagaagctcaatggtgaggagagaaacgacaccatggagaaaataaaggatgcttgtgaaaactggggattctttgagctggtgaatcatggcataccccatgacttattggacactgtggagaggttgaccaaagagcactacaggaaatgcatggaagagaggttcaaggaatttatggca

SEQ ID NO: 27291 - DNA, 220 bp, Glycine max
  unsure (1)..(220): unsure at all n locations
  Clone ID: 700903288H1
catgcgcttatnaagatggaggggaaggagcaggatgtgtcgttgggagcgaacaagttccccgagatacagccgattgggacggcggcgcagatccaagacgacggcaaggactaccaggagccggcgccggcgccgctggttgacccgacggagtttacgtcatggtcgttttacatagcagggatagcagagtttgtggccacttttctgtttctct

SEQ ID NO: 27292 - DNA, 246 bp, Glycine max
  Clone ID: 700903290H1
gttatttttagagctagtataagcttgtaacctattatgactttgatgaagagcaacgcataaccaatggccactgaatttttttccttatcttccagtgctgcctttactcttaggccttggccaaaagaatgagagagatcatcatcaattgacatggaatcatgtgtgcctccaggatttagatttcatcccacagaagatgcgattatcgggtattacctcaagaggaagataaactcgcta

SEQ ID NO: 27293 - DNA, 248 bp, Glycine max
  Clone ID: 700903291H1
cgaagaagaggaagaatcagagctcagcgataagcagaaagtggagatcgcgaaatggttcctcctcaactctcctcccggagaaatccaatacgttgccaaagatgtgaaatcgattctcaacaacgacgatttgtacaaggaagccgcttccgaggcttttccctattacaacaaatcgcacttgatttccattccaatgcccaaccgaagcggagacgtactggttacttcgttcggtgagcttg

SEQ ID NO: 27294 - DNA, 244 bp, Glycine max
  Clone ID: 700903293H1
caatcttctctatcgagaatggcgtgtggttctatgtgatctagatgccactgccattggagttctttctataatcctctgcgtgttgtttgtgtataatcccgtgatatttgcattaggtagaaaagaggctcccaaatttgcaggttcatggcccatacttggtcacctacgactattgagtggtgtagagacacctgatagggtgtgtggtgctttggcttataagtatggagccatattc

SEQ ID NO: 27295 - DNA, 247 bp, Glycine max
  Clone ID: 700903294H1
cttgctttcacttcaccaccaccttctcctatctccttcttcctcctcctttctgcttcttcattctctccttccctcttgagcttttctttttagcacggaacatgtgagtgccacaaagggtttgagactttttgaggctttctctcactctaataagtcctaacctcattcacctcttgggtggtgtggtctataatgtaatttatcatttgtgcaaattttttctcagatctatccaacttct

SEQ ID NO: 27296 - DNA, 246 bp, Glycine max
  Clone ID: 700903295H1
cgcaacaaaaagaaagaatcccaggcgaggagaaagatggaggggaaggagcaggatgtgtcgttgggagcgaacaagttccccgagagacagccgattgggacggcggcgcagagccaagacgacggcaaggactaccaggagccggcgccggcgccgctggttgacccgacggagtttacgtcatggtcgttttacagagcagggatagcagagtttgtggccacttttctgtttctctacatc

SEQ ID NO: 27297 - DNA, 139 bp, Glycine max
  unsure (1)..(139): unsure at all n locations
  Clone ID: 700903296H1
ctgaatttctgaattctctgctgctgaaaaatgaaactgtatccaagggagatcgtgaaactagacctgcataatgcaggctaccttccacacaacatacgagtttacgagatngggatcaactaggacgaaactgagg

SEQ ID NO: 27298 - DNA, 185 bp, Glycine max
  Clone ID: 700903310H1
ttcacaccattctcacaaaacaactttcaaactctgagaaagaatggctgccaacacattgatgagtactgctatctcagccttcccatctctcctttcttcctcaaaatccagatttgccaccgcagttcctctttctagctttggtgtcaccaatgcctcttcttctcgcttttctatgagtg

SEQ ID NO: 27299 - DNA, 186 bp, Glycine max
  Clone ID: 700903311H1
ctagttataaaataattaatttaataaaggatataattaatttaataaaggatccctcttttttgacacgaaatggatatatccataccatatatcttggatttatttttatgaaataattaaatatggcaaaacctatatctaaaaagggttcgcgtaaaaatgtacgtattggttcgcgtaaca

SEQ ID NO: 27300 - DNA, 186 bp, Glycine max
  Clone ID: 700903313H1
ctgattctgagacagaagaaggaagaaccaataacagaggaatccaagttcctttctagggaccgcgattcctcattcattcattcatatgcttcttcaactttctcctctcttctccctctaactctggcgcattatatctagctagcactcttggtccaaggaaatagagcgaatgttccactg

SEQ ID NO: 27301 - DNA, 185 bp, Glycine max
  Clone ID: 700903314H1
agaaaaacaaacacttatctctgtttctccgtcttacggcaattgatggaagcactatctctgcaacttccgtcacattcacatggcagcaacatcagggaagattgtccaatttttttttgtgtcaaactgccaccaacagaatacacagggtcgaagggactattgttttgccccttctcggc

SEQ ID NO: 27302 - DNA, 188 bp, Glycine max
  Clone ID: 700903315H1
cctccttactactatcaaagtcctcctccaccatctcccactcctcatcctccctactactacaaatcccctccaccaccaacgtcgcatcctccaccttaccactatgtgagccctccaccaccttctccatctcctcctccaccataccattacacatcaccatctcctccttccccagctcccgc

SEQ ID NO: 27303 - DNA, 193 bp, Glycine max
  Clone ID: 700903318H1
gctcgaagtcatcatcatcatccaccttcgttagatatccccctcaacatttgtggtggtactctccatcccaattatcgccaactcctctttcttcaaatttcaatctcagaggatgggtggtgaggaattgtgtttgatggagaactcagggaaagggaagaggctgtggaagaaggtgaagtaccaactg

SEQ ID NO: 27304 - DNA, 187 bp, Glycine max
  Clone ID: 700903319H1
aagctatcctagttccaagctgtttattaccttgcatcttccgcaatcaccttctctcttcactcttatctctttctctctaaaaatgtgactttgttgtacgtgtgatagtgagcctaatacagtacggatacttgatcaaaggaacaaatattgaagtgtccaatgcgtaccaacaatacccttt

SEQ ID NO: 27305 - DNA, 186 bp, Glycine max
  Clone ID: 700903320H1
ataaaatcgtgtcttctcctctgtactgagacatggccgaagaagaagaagaagaagaatcagagctcagcgataagcagaaagtggaaatcgcgaaatggttcctccacaattctcctccaagagaaatccaatacgttgccaaagatgtgaaatccattctcaacaacgacgatttgtacaagg

SEQ ID NO: 27306 - DNA, 129 bp, Glycine max
  Clone ID: 700903322H1
gaagagaggtataggaggaagagaaagtggaaggactacttcaggaggctcactaggaaggtcttgttgaagcaagaggagatgcaaaagaagttcttggaagccatggaccaaagggagaggaaaagg

SEQ ID NO: 27307 - DNA, 186 bp, Glycine max
  Clone ID: 700903323H1
tagagagtgagtgccccaagtttattgcttgggccaagaggtgccttcagaaagaaagcgttgccaagtctcttcctgatcagcaaaaggtttatgagttcattatggatctaagaaagaagttaggcattgagtaggttggagcttaatggccattgtgaagtagtggttttccattggtcgttc

SEQ ID NO: 27308 - DNA, 186 bp, Glycine max
  Clone ID: 700903326H1
ctctccttctagaaacttcgcttctttcactccctgcacttcttccttcttcgccacagctcgttccctcctctgctccgttccgcggtggagccaccgcctccattccgcctctccgctcactccccgtcctcggatcagcgccgtcgccaccatggccaattagagaacacacacaaaactcag

SEQ ID NO: 27309 - DNA, 184 bp, Glycine max
  Clone ID: 700903328H1
aaagaacttatctcaggagcaaccaaatcagtttatgcccctgaaccttttgatgttggacgcatattacaagttgatattatttcagaaaacgagcacatcacactttcaattgctggtccaatagatccagctgctggtttgggaacgtaagtagaggcactaatgcgcaaacatgacactg

SEQ ID NO: 27310 - DNA, 186 bp, Glycine max
  Clone ID: 700903329H1
ctccatctttctcacacttttctcccacatcacaatctcatcattatcttgcattaatacaatggaccaaacaaccgccgctgccaacgaggttgtccgcgagttccccggcctcctccgcgtctacaaagacggccgcgtcgagcgcctcctcggcaccgaaaccacccctcccggcaccgaccc

SEQ ID NO: 27311 - DNA, 184 bp, Glycine max
  Clone ID: 700903335H1
tcccaccctattattccatgccttcttctcacgcaaaaaaggccttataaatcccacactacaccctgtctaaagccctcctctacactgttccctttcaccattccattttctaacttttctgactctgctcatggcttttcttttcttagcatcacctattctcttggtatcatagttattt

SEQ ID NO: 27312 - DNA, 181 bp, Glycine max
  Clone ID: 700903338H1
acttcctcagctgcaacagtcgtagcaacaggtccagcagcagcagcttgcgcagtgcaacagcagcagcttccgcaaatccagcaacagcagcagctacctcaacttcaacaactcccacaactacagcaacagcagcagcttccgcagttacagcaactgcagccgcagcagcaacaga

SEQ ID NO: 27313 - DNA, 182 bp, Glycine max
  Clone ID: 700903339H1
ctcactgaaaaaaaatagcttgttctcaccatcctattttttcaactcatatatacaaatatatataacttggcttctaccttctctcgaagcctagcacttgtaagcttttacattgtcgtttgtgctgccggtaacttgaaccaagactttcagcttacgtggggagatggtcgtgctaa

SEQ ID NO: 27314 - DNA, 182 bp, Glycine max
  Clone ID: 700903340H1
gcttctcactgatctccattcccattccatggcttccactgaatcatcccctttcaagaaaattcagattcaaagggatgacactacatttgacgcatatgtggttggaaaagaggatgctcctggaattgttgtgattcaggagtggcggggtgtggattacgaaattaagaaccatgccg

SEQ ID NO: 27315 - DNA, 87 bp, Glycine max
  Clone ID: 700903344H1
ggcatgcaagaagagagaggaatcgtactacacaagtgtcatacttcccctcattttgttactgcatttgggactcttcactctgct

SEQ ID NO: 27316 - DNA, 248 bp, Glycine max
  Clone ID: 700903285H1
aagtcttcttgatccttctttttctccttgaactcaaacatggcagatgaggtggttctgctagatttctggccaagtccatttgggatgagggtcaggattgcacttgctgaaaagggtatcaaatatgagtacaaagaagaggacttgaggaacaagagtcctcttctcctccaaatgaacccggttcacaagaagattccggttctcatccacaatggcaaacccatttgtgaatccctcattgc

SEQ ID NO: 27317 - DNA, 124 bp, Glycine max
  Clone ID: 700903347H1
ggggaagatagaaagaaacaaaaacaccttattgacaccaccttttctatcatccttcaagtcatcatctttgatgatgcccatcctcctggtcattctcttggcgttgtcttctccttcatta

SEQ ID NO: 27318 - DNA, 182 bp, Glycine max
  Clone ID: 700903350H1
gaaaagccttccactattccatatatatcagcccataaagaatgaagaatactgcgttgttcactatctttctactccttgctttcacctcatacctaccttcagccaccgctgctagtgtgtacgatacggatggtaatattcttcaatagggtcgcacatattttgtgttggcagctaca

SEQ ID NO: 27319 - DNA, 101 bp, Glycine max
  Clone ID: 700903352H1
cttcttgtttggtgccttctgttctggagctagcaaaacaacccatcatcgaagttccagaacgatatgttcatgccaatcaagatccacatattctttcc

SEQ ID NO: 27320 - DNA, 181 bp, Glycine max
  Clone ID: 700903353H1
gcggaatcagctagaattttctaataatggccaaagacgttgagcaggttacagagcaaggtgaatactccgcgaaggattaccatgacccacctccggcgccgttgatcgacccagatgagctcactaagtggtccttgtacagagccgccatagctgagttcatagcaacactcctttt

SEQ ID NO: 27321 - DNA, 174 bp, Glycine max
  Clone ID: 700903359H1
ttcctctcgcccagaatccgagatcaaccctgacccctaaggccaggggtttttctcggcttcttcagattcctgaaatggcgtctgtttcagctttagcccagtacaagctcgtcttcttgggtgaccaatccgtgggcaaaaccagcatcatcactcgcttcatgtacgata

SEQ ID NO: 27322 - DNA, 263 bp, Glycine max
  Clone ID: 700903196H1
ttcttctttttcaatcttttttcttttaacatttgttcttgattaatgaaaacatccttggcaaatgctttcgcagttgttcgtctttcataaatccaagaatttcacctctgactatgaaatacgaatgcccccgactgttcctgttaatcattactccgatcccgatatccaacacaataggatcagaatcgtgtggtgatatcccatgctaatgtatacagagcgtaggcttgctttgagcactctaatttcttcaaagt

SEQ ID NO: 27323 - DNA, 187 bp, Glycine max
  Clone ID: 700903201H1
ctgagctaggagctcagcctataaatttcagaactctccagaactcaatgttctttgcacagtgcaatccaagaacagatagatttgaaccatttcataatctgaagccttgtatttttttgacgagtggagttcaaattagaaggcgtaggggggcgcgggaaaggaccgaaggggcccaccagat

SEQ ID NO: 27324 - DNA, 264 bp, Glycine max
  Clone ID: 700903203H1
atttgcaaattgcaatctttgcttggcccttgagaacgcgctaactgctaagttacgcgagggatgcgcagtgcgcaccctctatcgtctcttcttttttcttcttcttcttcttcttcagagtttagccagttgaattgaactagtaactttcttttaaaattaaaattagaatcattatcgtttatcacactccaacaacgcctttcgctcttaccaccctcgcgggtcattttcttgggaaaactcgtttccaccaagaaa

SEQ ID NO: 27325 - DNA, 68 bp, Glycine max
  Clone ID: 700903205H1
aagaactgaaggtaccgtacgagaacgacaggaatcaaggatgccaaatcgcggcagtgccacacagc

SEQ ID NO: 27326 - DNA, 248 bp, Glycine max
  Clone ID: 700903207H1
gccagaagaacaacatggacattgatcttgcgcctcagttgcccaagaaactttacggtgccaattgtggctccgactacgcatggttgccctccgacctgcccatgctccaccaaggcaacattgatgccgcgaagcttgctctcaacaaaaacgcacttgctcttcctcgttactctgactcttccaaagtcgcttatgggcttcaaggtagtggattggctggaatagtgttgccggaagcagaa

SEQ ID NO: 27327 - DNA, 258 bp, Glycine max
  Clone ID: 700903208H1
gctataaggaaatggaaagtgcatattcctagtgacactaaagaactttatgagcttgatttggaagagtatgccaagagagggagagtcagaattgattccactccaaccttgaggatcctcaacaaggcatgtgtcaacaccgattcaagtactagtggatggaagctaagccctgttacccatgtggaggagaccaaacaaatgctaagaatgatcccaatcttggctgctacattgatccctagtgcaatggtt

SEQ ID NO: 27328 - DNA, 262 bp, Glycine max
  Clone ID: 700903210H1
ctcgctcttcccttcctctggtggcgacaatgtcgactcctgctaggaagaggctgatgagagacttcaagaggctgcaacaagacccgcctgcagggatcagtggtgccccccaggataacaacataatgctgtggaatgctgtcatatttggtcctgatgatactccatgggatggaggcacgttcaagttgacactccaatttactgaggactatccaaataaaccaccgactgtacgatttgtgtctcgcatgtttca

SEQ ID NO: 27329 - DNA, 261 bp, Glycine max
  Clone ID: 700903212H1
cacaaacaaatacattgtagaatcacttttgtctcggaatttgttcttttgagttatgccaagcttaaaggttgcatgtgtggttttgatgtgcatggctgtgatgagtgcaccaatgatggtgcaagccgtgtcatgcaatgatgtttctctgaacctagcaccgtgcctatcttacctgatgcagggtggagatgttccagaatcgtgctgtagcggagtgaggaacattctgggttctgccagcaccacctttgacaa

SEQ ID NO: 27330 - DNA, 217 bp, Glycine max
  Clone ID: 700903214H1
ctgcttcaacctggcggaagaagaagacgccgtagccatgatgaagtactccatacagctcgacaatcgcatcaagtcctgcaagcgtaaggcgctgaccttatagtgcatttcaagaacactagggagactgcctttgccatcaggaattgcccctggttaaagctaaagagacctggagattttggccacaaacagtcatccttccgacgcttct

SEQ ID NO: 27331 - DNA, 265 bp, Glycine max
  unsure (1)..(265): unsure at all n locations
  Clone ID: 700903217H1
cagagatcagattctgattccacacaacatacgatataganatcancnacattctaanccgagtcgantccanangcaaaccgtntttaacatncgacgtcgggaaggcaccgcgatgctaatgtctctggcgacgatgcctttgccagactctacgcctccgtcgacgccgacatcgaggtcctacgtcagaaatcaggaagtgcttccaaggagaaaggtaaggcatcagctgtatcgatcaatgcatagattcgtcgtacta

SEQ ID NO: 27332 - DNA, 96 bp, Glycine max
  Clone ID: 700903218H1
cagagtggtgcagcgcaatggcctgtgaagtagtcacagaccatgcacttctgtcgatgatcaggtgggcagacaacacgtgcctgcaatgaaccc

SEQ ID NO: 27333 - DNA, 261 bp, Glycine max
  Clone ID: 700903221H1
cagcaagtattctaaatgtcttagtcttaagaggggggagaaactggaattcgaatgattctgaatttagtacaagccaatctgcaaagtgagcatgatatataacttgttgtggatttctgcctcatcattgtgcatcatgtgagattaaaatggaagggttgtgtggagattgcttcaatatgattttgcacatgttgtgctgcaggaacttggagcatagcgtgtgctcaaagtgcatagggatggatttggatagca

SEQ ID NO: 27334 - DNA, 260 bp, Glycine max
  unsure (1)..(260): unsure at all n locations
  Clone ID: 700903233H1
gctataagctagtttatcgtgaggagaatatgaagttgtttgttttctttgttgctgcagtagttttggtagcatggccatgccatggcgcaggctaccaaaggttccctctccgaatgaaaactggctatggtgagcgttcttcggaggtaaaatgcgcaagttttaggcttgctgtggaagcacacaacatacgagagaananaaccattcctnaacagtgcgttgaaccaacaaaggactacattaatggcgaacaa

SEQ ID NO: 27335 - DNA, 255 bp, Glycine max
  Clone ID: 700903241H1
caacactttccacttgtctccgaatgagttatcttgagaaacattattcccattgctatatattatggctagcatgaaggttacatgggtggttgtgatcatgtgcatggccgtggtgggtgcaccgatgatggcgcaagccatgacatgcaatgatgtgacggtgaacatggcacagtgcctatcctacctgatgcagggaggaacaccttcaacactttgctgcagcggagtcaagaacattcttggctctgc

SEQ ID NO: 27336 - DNA, 75 bp, Glycine max
  Clone ID: 700903245H1
ctcatcctctctgcaccaaagcaactcacagtaatactactctcaagtgcgctctctatctccacacaacatacg

SEQ ID NO: 27337 - DNA, 253 bp, Glycine max
  Clone ID: 700903258H1
aattcaggtactgcgtttcggaagcagacacagatggctcgtacgaagcaaaccgctcgtaagtccacaggatgaaaggctcctaggaagcagcttgcaaccaaggctgcacgtaagtctgcaccaactactggtggtgtgaagaagccccaccgttaacgtcctggtaccgttgctcttcgtgagattaggaaataccagaagagtaccgagcttttgatccggaagctccccttccagaggctggttcgtg

SEQ ID NO: 27338 - DNA, 250 bp, Glycine max
  Clone ID: 700903262H1
cgacaataatacattgatcctattccatggccacttgccaaaacaaaacattaaaaaaaaggttaagtttcaatgcagtgcatggcaccatttgttgaagctgaggactggccacgcatttgttgtggctgaaaagaaagataataatggtggtggggggttttgggttgtaagtgaccaactttggggtccacgtaaaaattgcatgacagggattggatgtcggttctgttggtgttgttgggtaggg

SEQ ID NO: 27339 - DNA, 257 bp, Glycine max
  Clone ID: 700903265H1
cagttggatgcttcagtccttgaggagtgaagacagcgtgatgccatggctgaggctcgttttaagcgtcatgtggctatgctgaagagagatagggctaaaagattgctatataaagtagatgtagccattcacaaggccatggctgctctaatgactgcagaagcaatgaaagcttctgaggactcccttgttgaaatgaaagcttatgaggactaatctggctattcaaatgacttggcttacttggtcaagag

SEQ ID NO: 27340 - DNA, 254 bp, Glycine max
  Clone ID: 700903266H1
aggattctatggtgccgatgcgctaatgcaatttctgtggtagatgcagactggttaatcagcaaagatcaccagtgttttatttgttaataaatgtgatgctaggagactaacattgaggatttgatggttaaatttcacatatattcaataaccagtagatgttttcattttacaatcaaaatcattgtaacgagtttcactgaattttccactttgcccggaatttttctagtcaattatcattgatgcat

SEQ ID NO: 27341 - DNA, 251 bp, Glycine max
  Clone ID: 700903267H1
agcgagcgagccctcactgtcggccgcgacgagtgcctcgccgtggtgaacctcgtccggaggcgccggaactgctgcctgcgcctaggcaaggaggcgagtctggtcaagtttgatgcctctggggatcagttcttcatggcggtgaaggagaaggtctccgtccaccagaccgaggatgcgaggattctgttcgaattggaatgcccaaagcctgttctctgtgctacacctgctaagaatggacttct

SEQ ID NO: 27342 - DNA, 254 bp, Glycine max
  Clone ID: 700903268H1
gaagaaggcagacaagaagaccgtggagacgtacaagatctacatattcaaggtgctgaagcaagtgcaccctgacatcgggatctccagcaaaaccatggggatcatgaacagcttcatcaacgacatcttcgagaagctcgctcaggaatcttccaggctcgcgcgctacaacaagaagcctaccatcacctctcgcgagatccagaccgccgttcgtcttgttctccccggcgagctcgccaagcacgctg

SEQ ID NO: 27343 - DNA, 264 bp, Glycine max
  Clone ID: 700903269H1
aattcggctctatggatgtttagtccgggaggcacccagatgtgagtgtttgacaatacctagcacatagtagcaagtctgtgccttccccgtgacctttgaactcagttttccgttctgacagtgttgaggtatagatcatgctgtattgattcacaggccaatgcgtgtaacatacaacgtgtactagttttgctttccataaattaggagcatgcaaggaaatcaagtcaactgcatgaattaaaatatcttgagtttcat

SEQ ID NO: 27344 - DNA, 250 bp, Glycine max
  Clone ID: 700903277H1
atagtgttaaaagacctatatttggtaaaccaatcaaattggacattaataaaggaattgagagggcataacatattggaggaggcaaatctgtagccacagtcctagccattggcacagcaaatccacccaatttcatcctacaggaggattatcctgacttctactttcgggtcaccaatagcgaccatttgcaccgcttgaagcaaaagttcaagcgcatttgcgagaattcaaagatagaaaagcg

SEQ ID NO: 27345 - DNA, 238 bp, Glycine max
  Clone ID: 700903280H1
caacgggtagatgatatcttgcagtttattgcagatttgactgtagatggtgaaggtgttggtcatgtttgcagttttagtgtcttcaattttcaagagcatggaaacagtaattatggctctccatttaatgcacctcacagccatagatcctcccaggggaagttggagaatccatttgtgagctttcagagtagttaccctgcatgggaaccaaatgctcaagggaggcagtttc

SEQ ID NO: 27346 - DNA, 249 bp, Glycine max
  Clone ID: 700903282H1
gttttagcgcagttcttctagatttaaggaagatgggtaaggaaaaggttcacatcagtattgtggttattggccatgttgactctgggaagtccactaccactggccacatgatctacaagcttggaggcattgacaagcgtgttattgagagatttgagaaggaagctgctgagatgaacaagaggtctttcaagtatgcctgggtgcttgataagcttaaggctgagcgtgaaagaggaatcacaa

SEQ ID NO: 27347 - DNA, 250 bp, Glycine max
  Clone ID: 700903283H1
catctttgtcagctttttcttgcttccgtagttcatatggcgtgtgttcaagtcatcacagtttttctctttgcattggctctagctaaaatttacccctcaacatgtcaagtggtgcagggaaaagtctcctgcgttgactgcactcacaactatgacttatctgatattaaggtttcggtgaggtgtgatggtgtgaaaaaactggctttggctactacagaaaatgatggctccttcaaggttgatc

SEQ ID NO: 27348 - DNA, 257 bp, Glycine max
  Clone ID: 700903195H1
atgggacctgccttcagatgagaatgtcatacagtccagcagcacacctgtttctcttttttgtgcaatggacagactgcaatcttgctggagcccttggactgttaagaatcctaatatacaaagtgtatgtggatgggacaactaccatgtctacccttgaaagaaaagcaagtattagggaattctatgcaatcatatatctctctttagtgcaactgcaagaaagtgtggcagatacagaggataaaaaacag

SEQ ID NO: 27349 - DNA, 260 bp, Glycine max
  Clone ID: 700903127H1
aaagagaccccactttgtatgttcagatacattgcacttgggaacgttcccattcagtgcactcgtatctgtttgcaataaaacgacctctctttcactaccccaagaccttcatttctctttccaccactttctctctgtctctctgttttttttttgccctatctcatagggtttcctccttctctccctctcttccatgcatttttgctctgacgagttcttcttcttcgttgccctcttcttcgctgtctttgaag

SEQ ID NO: 27350 - DNA, 265 bp, Glycine max
  Clone ID: 700903128H1
aaataaatagagagttggttaaaagtaggaaatgaaagtgagggagagagaatggaggaagaggcagggatctaccgtctagcggaggacagcctccggcagatattctgcaggctgccactgagggaaataatgatatgccgctcagtgtcaaaattcttcctgcagctgctctcaacaccttcgttcctccaggtcctctccagctcccatccacccctccagctcctggccctccgcaaccgccaccacaccccttctcaca

SEQ ID NO: 27351 - DNA, 268 bp, Glycine max
  Clone ID: 700903131H1
aaccctttcaaagaaggaactcgatacatcgtctgtggggtatcagcctccactaccagctgaccaggtgaaggctgctacagattttgattatgaaggagagggttcacctaatggtcgtgttcgtggtcgtggtggccgaggcaggggaaggggcagaggtaatggctttatttcagctgattatgaggatggaggttgggatcgcactaggggacatgctaggggcaggggtagaggaagaggacgtggctttcgtggtcgtgga

SEQ ID NO: 27352 - DNA, 182 bp, Glycine max
  Clone ID: 700903134H1
attgacggcgcaccgacctacattccactctatctgagtaagctcaaagggtacacccgacctacaggctgcaaggcagtagcagagtccataagaactgtccatcataaatttcactacactgttcaggatggcctagatgccatccagatgtgatctatcacttgaaccatatgctgtga

SEQ ID NO: 27353 - DNA, 269 bp, Glycine max
  Clone ID: 700903135H1
gaaatgttgaagctcaagttcctggtacctatcttcttgcattcaagaaaagagttagctgaatgttttggtggggctgaattctgtaggtttaaaatctcggtttattttcaaggctgtagattccaatttttattatctttgctggcgccttaagataagttaaccctttgaagatgtttcgttgtttacttggttggcaaagttcagaattgtacatttgtagggctggatgtggaggggactccttactttttgttttattatta

SEQ ID NO: 27354 - DNA, 216 bp, Glycine max
  Clone ID: 700903142H1
tgcggagattaatattttatctaggtccatcgtcgatagaagatacgacttcccaaaggcaatgtttcagtgggactagagctatgggcattctaacttcgctcgggctgtggcagaaggcggccaagatcttattcttgggcctcaataacgctggcacaactacactgcttcacatgaccaaagatgagagattagtccagcatcagcctaccc

SEQ ID NO: 27355 - DNA, 266 bp, Glycine max
  Clone ID: 700903149H1
tgtcaaatctgtatgagtacgcaaagcagaattctgggcctttgagatccgtcgtaggaacggttgagaacactgtaaccaccattctcggtcctgtctgcaacaaattcaaggacgtcccatatgatgtccttgtttttgttgacaaaaaggtggatgaagcttcccacaagttcgatgagcatgctcctccttttgctaaacacattgcggatcaagccaagggtgtgattcagaaagtgacttgtgaggcagggaaagtagca

SEQ ID NO: 27356 - DNA, 62 bp, Glycine max
  Clone ID: 700903150H1
ggagatcgtgtgtagatcaacagctttggtttgatggttaaggaacctattgattctgctga

SEQ ID NO: 27357 - DNA, 260 bp, Glycine max
  Clone ID: 700903157H1
gtacttttaaaattataagtaaatgtatcacaggtaaaggtttttcagggacaaaacggtactttggtgatttagggaaaactttgagatcagctggctccaatatagcttttgcagttgtagctgaaatatcggattctgttctgaaaggtgcagaggcgaatggtttcaatggattggtgagtggctttcaccaaggaattctaaaattggctatggagccatcagttctgggaactgcattgatggaaggtggtcca

SEQ ID NO: 27358 - DNA, 58 bp, Glycine max
  Clone ID: 700903158H1
ttctctctcatcggtcgcggttccttcgcacataatcgctggacttccgctatttcca

SEQ ID NO: 27359 - DNA, 262 bp, Glycine max
  Clone ID: 700903162H1
cttactgataaattgggattagggtccaaattctacataataggtttctttttgggtggccaggttgtttggaggtgccttaagtatatccctcacaggctggcaggtgcagtgctcatagccccagttctcaattactggtgggctggtcttcctgcaaacttaactaatgaagttttctaccaacaaaaactacaagaccagtggacagttcgtgtggctcactacataccatggctaacttactggtggaacactcaaa

SEQ ID NO: 27360 - DNA, 266 bp, Glycine max
  Clone ID: 700903165H1
aacacaaacacatacattgtagtatcacttttgtctcggaatttgttcttttgagttatggcaagcttaaaggttgcatgtgtggttttgatgtgcatggctgtgatgagtgcaccaatgatggtgcaagccgtgtcatgcaatgatgtttctgtgaacctagcaccgtgcctatcttacctgatgcagggtggagatgttccagaatcgtgctgtaacggagtgaggaacattctgggttctgccagcaccacctttgacaaaca

SEQ ID NO: 27361 - DNA, 262 bp, Glycine max
  Clone ID: 700903169H1
aaacaaaaacccttgcacaatatggccctaaacttggagtgtgtcgtgtggtgtgagacagtgtaactcggaagcgcacagcaatggcaagagcgactctccttcacttgctgcggtcacagagcctccgccacgtgtccaaaaacgctccttcagcatatcgttgttttgggtcctctacctgtcaacgacccattagccccaatccatcattcaaaacttcctcccatcttgctattttccaaagaagatgggcatcaca

SEQ ID NO: 27362 - DNA, 261 bp, Glycine max
  Clone ID: 700903170H1
ctattgctaacttaactctcaagcttagtactgaatgaagtttattctttctctaatgagtatcatactttataccctctttatctcttctcttgtagtttccatagcagccgacaaacaatccaattcacagtttcagtccctcagtcatgaagaaaccatagtttccccaaatggagtctttgaacttggttttttccctctgggaaattccaacaaaagctacctcgcaattcggtacaagaactattcggatgaaac

SEQ ID NO: 27363 - DNA, 258 bp, Glycine max
  Clone ID: 700903172H1
attcgaggtcagaagttcgatgagaaggaaaacattgtgttcatcacagtggtgtgttgtagccccgagaagataagagacaagctttgctacaaaggtggaggctctatcaagagcattgagatactggaactgcccaagctcaaggccgagaagcctaaagcagaccctcccaaagctgagaagtccaaggccgcgcccgagaaaaagaaggacggtggcggcgagaagtcccaggccgagcccgagaaaaagaag

SEQ ID NO: 27364 - DNA, 256 bp, Glycine max
  Clone ID: 700903173H1
aacaggttgtagaattctaaagctaacctctcgcattttgattcatggtggctgtgagtggtttggcataatggcgaaatggattttcttccccatcatcttctttgttgtatttgttgcaagcaccttcctcctggaaattaacctttccagaataacaagaacttcaattttcaagacaattataatattcaataagcaacaacctcaattcccacttaactgcacggatggaaacttagcaaaaacttgttca

SEQ ID NO: 27365 - DNA, 256 bp, Glycine max
  Clone ID: 700903175H1
aaaagtactgccactgacttgggatcccattgttgtgacaaagactcatcaatggtagcacagatgctggtttcctctaattcatgctcgaaattagaaggtggaatgtttgacaactctatggtatcagaatttgtgctgtatgatcttacacactcaagcaaaagtgtttctcctgaaaaaaagcgttacagcgaccaacactgttctaaaactctaaaagcttctcgtgtaggaatgaagggcgaaactttca

SEQ ID NO: 27366 - DNA, 79 bp, Glycine max
  Clone ID: 700903177H1
ccgaccaaacacagtgttgattcccaaatccccattagttttcaaaataaagactttgcgtggcacccacaagaaggcc

SEQ ID NO: 27367 - DNA, 265 bp, Glycine max
  Clone ID: 700903181H1
ataaaattctgagataagtgattctctgccttttcaattttcattttaaaaaaaagaaagaaaaaaaaaagaaagaaagaaaattgtgcatgctggttcttgaatgatcttcgtcctggattcagaattttcggtgacagatctctgctcggacttccataaatgcatatctgtggatgtgttccaccttggctctgtcagattctcgcttgcatgggggaaaattgatggggctttacagtttgctactctttccttgaattct

SEQ ID NO: 27368 - DNA, 262 bp, Glycine max
  Clone ID: 700903182H1
gtggtgtgacatgttgtcttcgattccctggtcaactcaactcagatcttcgcaaactcgccgtgaatctcattcccttccctcgtctgcacttcttcatggtgggatttgccccactcacttcccgcggttcccaacagtacagggctctcactgtccctgaattgacccaacaaatgtgggatgctaagaacatgatgtgtgcagctgatcctcgccacggtcgttacttgacagcttctgcgatgttccgtggaaagat

SEQ ID NO: 27369 - DNA, 256 bp, Glycine max
  Clone ID: 700903183H1
agaagaagctgcatttgcagagacgcattcgcgtttgtctgagagagagaattggaaggtagcaacgagtgatgatatacatattgtggcggtagtgaaatcgaggaaaaagaggtagcaatcgtgagttgcaatgagtagcgaaaagtctccttcatcagcttctgcttcagcttcttcttcgagtagctacgagttgagcaaaggcatcaatggcctcgacaaggttattcttcgcgacccagtggtagctccg

SEQ ID NO: 27370 - DNA, 131 bp, Glycine max
  Clone ID: 700903185H1
attttacgtgtaatattattcacaaagtctcgcatcaagtcacgtctacccccaagtcctagagccctccctgtgttaggacacctctacctcctcaccaagctcccccaccaagcattccacacaatata

SEQ ID NO: 27371 - DNA, 253 bp, Glycine max
  Clone ID: 700903187H1
ttctaaccactgaactcatctcactacattaatattcccttgggtttcattaattgtgacatttagctttttttattgaaccgtgtcaatggccgctactatgaaggctttagcttttgttgctttgcttgttaccattaatgcaatagtgtgtgaaagtagagtggcgagaaaggaccttggattggaccttggtggggtgggaattggggtgggtgctggggttggactaggccttgctggtgggggtggt

SEQ ID NO: 27372 - DNA, 254 bp, Glycine max
  Clone ID: 700903190H1
tttgttttgttgttaataaaaattttctcttctttctttctctcttgaagttggaaagaaaggcaagtagagaaagagaaaacaaaaaatggtagtttccagggtggttgtttttcttggtctcattcttgcaacccttgtgtcattggcttgctcccaatccgctgctccggctgctgctcccacaagtgatggcacctcaattgaccaaactgtagcgtatatcctaatgttggttgcattggttctgactt

SEQ ID NO: 27373 - DNA, 256 bp, Glycine max
  Clone ID: 700903193H1
tcaagatgaagatgattcgcattcttttcatctttgctcttctatccttcacttcccatgcttctaatgtcaatgacttctgtgtggcagacctgaagggtccagatagccctactggctatcactgcaagccacctaaaacagtaacatcacatgactttgtgttccatttaggccctggaaacacttcaaacgtgttcaagtccgcaataacctctgcatttgtcaaagattttcctgctgtcaacggtcttag

SEQ ID NO: 27374 - DNA, 257 bp, Glycine max
  Clone ID: 700903194H1
cttgtcttctctagctaccttatcatcataaaaacactaaacgcccctctatactctctctaccttctttcttgtatccgtcttaatttctgtcgctatggcttcggatcacaccatgagctttcattcttcttccttacacgaagaggacttcgatgatgatgatgatgatcacctacacccccacccccacaacttgtcgaggctctccgtctgcactagcagcacctttggcgacaacgaccatgttgacaatc

SEQ ID NO: 27375 - DNA, 262 bp, Glycine max
  Clone ID: 700903125H1
aaccctttcaaagaaggaactcgatacatcgtctgtggggtatcagcctccactaccagctgaccaggtgaaggctgctacagattttgattatgaaggagagggttcacctaatggtcgtgttcgtggtcgtggtggccgaggcaggggaaggggcagaggtaatggctttatttcagctgcttatgaggatggaggttgggatcgcaataggggaaatgctacgggcaggggtagaggaagaggacgtggctttcgtggt

SEQ ID NO: 27376 - DNA, 233 bp, Glycine max
  unsure (1)..(233): unsure at all n locations
  Clone ID: 700903012H1
gtccgtttcagacgcgtgggcacccgaacaggtgtttcccatttcctcaattcaccgtttggacgaaaagccttcggtgaggggtattctctcggacttgacttgtgacagcgacgggaagattgacaagttcatcaacggagagtccctngtggcgcttcatgagatggaatgaggaagaacttactatctgggaatgtttttgggtggggcttacgaggagcgctcggtgg

SEQ ID NO: 27377 - DNA, 209 bp, Glycine max
  Clone ID: 700903022H1
tgtagctcctgagctttgaatttggttgtttagttagcaattgctacatgggtaataaatgccagaatatgcatggaccatataattaacttgcatactggggttgtgtttatccatttcatttgctgaatgtataatgatcaattgagtgtgaaactgaacgcccgttgattatacttatgatattctatttgattcacaattaagaa

SEQ ID NO: 27378 - DNA, 123 bp, Glycine max
  Clone ID: 700903024H1
atagaatctccttatggttggtagctatggtgtcagtggtcatttgggaacaatgtcaaagacatgggacccattgccattgtcactataatgatatagtgattttggtgtccacacaacata

SEQ ID NO: 27379 - DNA, 192 bp, Glycine max
  Clone ID: 700903027H1
cgaagatggcaatagaattggcatctcccaattgggttccaaccgcagtcgcatgtgtggcagccttggccgccctcctcctcttcctcctccgcggtctccgccgccgtaaatacaatctccccccaggccccaagccctggcccatcataggcaacctaaacttaatcggctcccttccacacaacatac

SEQ ID NO: 27380 - DNA, 86 bp, Glycine max
  Clone ID: 700903032H1
ctccaattacctccagaaaattgactccctggctttgacttgcctattctgcgacaaatggcaagagtcactaattgggtgtgtgt

SEQ ID NO: 27381 - DNA, 245 bp, Glycine max
  Clone ID: 700903037H1
ggcatattgatgatgttagagactgcttagaagagactggggtcgacggggttctttccgctgagaccctgctagaaaatccagctctctttgctggatttcgaactgctgagtgggtgtctgaaagtgaaggtaccaatgtggatggaaagctggaccaggcagatctgctaatagagtatttgaagctttgtgaaaaataccctgttccgtggagaatgattcgttccatgttcataaattgt

SEQ ID NO: 27382 - DNA, 239 bp, Glycine max
  Clone ID: 700903039H1
gcatattccaattcccaattcccaattctaaacccttattcctttcaaagaaccaaattgagtgatcgtgatggcaccaaaggcagataagaagccagcggagtagaagcccgcggaggagaagaagtcgacggtgggagacaaggctccggcggagaagaagccaaaggccggaaagaagcttccgaaggagggaggcgccggcggagaagggaagaagaagaaagatacaagaatag

SEQ ID NO: 27383 - DNA, 228 bp, Glycine max
  Clone ID: 700903040H1
aattctgctcgaggtgctgtttatttgaaattaacaagtagcacagatgtttggaatcatcggaggaaacaagggtcacaagataaatgggaacttggtgattatgcgaaagaatgtgtttgatatcaacagcattatcagtgttaagggtgtcatcggaaccggcattaacatcattggatgagtcgtctgtaccgtttctgcgttggcgtcccacatctccatcca

SEQ ID NO: 27384 - DNA, 71 bp, Glycine max
  Clone ID: 700903056H1
tcctcattgaccaggcagacccaaacttgacccaaaaacaccaaccccgcctacaccacaaacctacaaca

SEQ ID NO: 27385 - DNA, 269 bp, Glycine max
  Clone ID: 700903064H1
cggaattcggatcgaggtgatacagcacaagaggaccctcgagaggtgactgctgcaaaggcagacttaaattatattgggttagatggagaaataggctgcatggtgaatggagcagggttagcaatggccacaatggatataattcaattgcatgggggtactcctgtcaattttttggatgtaggtggcaatgcctctgaaggccaggtggttgaggcatttaaaatattgactgctgatgacaaagtgaaggaattgtggttaac

SEQ ID NO: 27386 - DNA, 238 bp, Glycine max
  Clone ID: 700903072H1
agacgggccccattaccattttactgagaagagtataatggagaaagaaatcaaagagggaaagcttcttgagtttgcttccgtccatggtaatctgtatggaacaagtgttgaggctgtcgaactggtatcagatgcagggaaaagatgtattcttgatattgacgttcaaggtgcaagatctgtgagggccagttctcttgaagccatattcatctttatctgtctccatcaatgg

SEQ ID NO: 27387 - DNA, 171 bp, Glycine max
  Clone ID: 700903079H1
cgtggaattctgctcgagacgcatgatatcattcgcctctttgagaagggcaatatagtgtctccattttctatgcatcaacagcagcttggcatgctaggacacacacagtctcttctaattgttgctgcagctagatctactggcggggatcccaggtatcctggtagc

SEQ ID NO: 27388 - DNA, 260 bp, Glycine max
  Clone ID: 700903082H1
gaaattgtcagtatgacgactcaaatcagaacctggagactatgatcagtacagtcattggtcagtatggactcttacctgtttcaggagttatctccaagcttaagtctgagggacatggtcatgtttttacttctgttttctatgcacaatctggcattcaccccatgttgagtccaataccagtctgccagaatgagagttctccctttcgcacaagtagctctttctagtccaatcctgaaatcactgctcagatc

SEQ ID NO: 27389 - DNA, 250 bp, Glycine max
  Clone ID: 700903084H1
tgcaaggcatcaccatttatgctcctgtcacatctccaaacactgatggcattagcccagattcttgcacaaatgtaagaattgaagattgctatatagttgctggggatgactgtgtggcggttaagagtggatgggatgagtatggcataaaatttgggtggcccaccaaacagctagtgataagaaggctaacatggatctcaccatacagtgcaagcattgccttgggaagtgagagtcaggtgga

SEQ ID NO: 27390 - DNA, 174 bp, Glycine max
  Clone ID: 700903086H1
cagagaaaagagcctggtatgtgctttcgtctcgcttccttctcctctatctaccgatgtcctcctcctaggcctggggtactgctctctctctctcttcaccccaatgaatgatcgcgtctctatctcttgctcttgtgcctgcttacttggcataattcgagcaccaacata

SEQ ID NO: 27391 - DNA, 253 bp, Glycine max
  Clone ID: 700903096H1
gtgatacaacacaagaggacgctcgagaggtgactgctgcaaaggcagacttaaattatattgggttagatggagacataggctgcatggtgaatggagcagggttagcaatggccacaatggatataatttaattgcatgggggtactcctgccaattttttggatgtaggtggcaatgcctctgaaggccaggtggttgaggcatttaaaatattgactgctgatgacaaagtgaagcaattttggttaac

SEQ ID NO: 27392 - DNA, 275 bp, Glycine max
  Clone ID: 700903103H1
ctctatactcgtattgcattgggaaaggctaagaggatggatgttgtgtggggggaaacagctggtgtggatggccaactgtggttattgtgtcccatacttttcacgttgcagggatttgaggcatatgttggactgttgttgctcaggactgcagttgttggggttgtttctgagtggcaggtaatattttgcggtgtcctgttggtcttaatggctgttgggaactttgcaaatacagtacagactctgatggcaaaatcaagatttaaggc

SEQ ID NO: 27393 - DNA, 70 bp, Glycine max
  Clone ID: 700903104H1
ttcccttttcctcgtttccataaccctcccgaatgcttgagacgcttcccgaatccttccacacaacata

SEQ ID NO: 27394 - DNA, 269 bp, Glycine max
  Clone ID: 700903106H1
ctgagcttggcgaatgtgaaacttggaagcagaaaccttagggtttgtgcctcaactgtgcctctctcaggggtgattttcgaaccattcgaggaggttaagaagggtgaacttgctgttccaacggctccccaagtctcgcttgctcgtcagaactacgctgacgagtgtgaatctgccattaatgagcagataaatgtggaatacaatgcttcctatgcgtaccactccttgtctgcatactttgacagggacaacgtggctctcaa

SEQ ID NO: 27395 - DNA, 269 bp, Glycine max
  Clone ID: 700903108H1
ctgattttgaaaactggaacgcgtaaaatgaacggtacccctccctcataaataaaatctactactaaacgctcttctcttctgcaatcaatttgcaaaccaaacacaacacaaggagaagaaccagatctctctttctcaaatcaccaagaatagttgaaaatggggctgtctttcacgaagctgttcagccggctctttgcgaagaaggagatgcgtattcttatggtgggtctcgacgccgccggtaaaaccaccattctctacaa

SEQ ID NO: 27396 - DNA, 265 bp, Glycine max
  Clone ID: 700903110H1
gaaaaaagtagaagaagaagaaaagaaagaagaagagaaaaaatcagatgagaagaaattcaaggagaaatctgcgccgccagaaatcgtgcttaaagtgttcatgcattgtgaaggttgtgctcgcaaggttcgtcgctccctcaaaggattcccaggggtcgaagatatactcacagattgtaagtctcacaaggtggtcgtgaaaggagaaaaagcggatccgctgaaggttctagagagagtacagaggaaaagccataga

SEQ ID NO: 27397 - DNA, 265 bp, Glycine max
  Clone ID: 700903111H1
ggaattcagctcgagtttgctttgactatatttcataggctcctttgtgattaagaaaatgtggacgagaacgggttttgaagaagcagcagtttcattgatcaactcagatttcagggacctaagtctagctgctaatcgactcgcccatcatgacatcaaacgtggtggcattggctttggagcctctttattcggattgtttgctgccattgctgctatttatctgttgctattggctcgtacaaactggaaaacagtcttc

SEQ ID NO: 27398 - DNA, 265 bp, Glycine max
  Clone ID: 700903112H1
catcccacgtttcctctgtcacgagagactgcgcagaacctaaccctcacgaaaacccctttcgattccgataactctcgttgttccgaaaccctaaccttaaccgggttttctcgttggttgggattgaattggcatcggagggaggcgatcgattggaaaattggtagtagtagtttagcgttgaagaacgatgtctgctgctgtgtgcggaagcgagagatctttcttcgaagagcttcctccttctccgccactctccaag

SEQ ID NO: 27399 - DNA, 266 bp, Glycine max
  Clone ID: 700903114H1
ggcgaaggcgatagagaggtttggtgaagtgtatgagagaatggaggcgcagaagctgaggcagatggtggatttggagaaacagaggatgcagtttgctaaagatcttgaagtgcagaggatggagatgtttatggacacacaggttcagctcgagagaatcaagcgcgggaaaagatctggctctaacgatatgtatagctagccaagtgggcgatggttcgttgacggtgcttgaaatgctgtcttgctttggtgagaaagta

SEQ ID NO: 27400 - DNA, 123 bp, Glycine max
  Clone ID: 700903115H1
ttgcagctggctatcaggggagatgaggagctggacactcttatcaaagggaccattgctggtggtggtgtcattcctcacattcacaagtccttagatcaacaaataccgccaaggggattg

SEQ ID NO: 27401 - DNA, 228 bp, Glycine max
  unsure (1)..(228): unsure at all n locations
  Clone ID: 700903117H1
ggcaacccaacatttgaagatttgaacctgccattattgtaagtaagaattgggaaaggaaggaaggagatgaatctccctatcatagatctgtcctcacctgatcctctttccactgccatttccatgtatcangcgngctttgagtatggantcgtttaccttgtgaaccatggcgtggagaatgacttggtcaaagcctttgatgagagtaagaggttcttctca

SEQ ID NO: 27402 - DNA, 136 bp, Glycine max
  Clone ID: 700903121H1
caacacactatgaagtttgtgttgatctctttcatttgataaggctgtttcaatattgtgtagctccatgttcaattcagagatcaacacactatgaagtttgtgacatacaaaaaacaaaaagaaaaaaaaaaga

SEQ ID NO: 27403 - DNA, 267 bp, Glycine max
  unsure (1)..(267): unsure at all n locations
  Clone ID: 700903123H1
aaagttccgacttgacccaaactcaagttccgagttccctccgctatctgcgatcctagtcctacactctccgctctagntcgaaccttggcgtcgtcaccgacgcgaggacttctagaaggaagaaatttgaagacagatgggagagaggaaggtgttgaacaagtattacccaccggactttgatccctccaagcttcccagagcaagaaggccaaagaaccagcagatcaaggtccgcatgatgcttccgatgagcattcgatg

SEQ ID NO: 27404 - DNA, 235 bp, Glycine max
  Clone ID: 700903011H1
ctctcactcacaaacacacactgtactaaacctaatcagcagagacatggttgagcaaaccttcatcatgatcaagcctgatggcgtccaaagaggccttattggcgagatcattagcagatttgagaagaaaggtttctacttgaaaggtttgaaacttgttactgtggaccgtccttttgctgagaagcactatgctgatttgtctgccaagcctttcttagtggtttggtgg

SEQ ID NO: 27405 - DNA, 246 bp, Glycine max
  Clone ID: 700902931H1
acgagatcgagagccccaagaagctaggctacgtcaagattcctgccaccgagaccaccgctgctgtctccaccgctccggcgccggccaagggctcggtatgagaatgtgtcctccgtaaccgtatggttttctatgttgattgttaataattattataggtgaattgaatagtgaaaagatcaaatggtgcaaactttggccctgtatctgcgtttatgtttactttttaatttgatgtatttg

SEQ ID NO: 27406 - DNA, 247 bp, Glycine max
  Clone ID: 700902932H1
gttgaagaacaatctgatagcaaaagccttataagtgaagagagtggctcattccttggcctggatgatgttagcatgtctgagatttattcttgttctctttcaattcctgcaagttacctcatcgagatatttagcgggggtgagttggaccgtcgggtcatggaaaagcttggttatcttaattattcttatactccttgggtatctgagaaccatgatatctctgagagagcagtatattaca

SEQ ID NO: 27407 - DNA, 239 bp, Glycine max
  Clone ID: 700902936H1
aaaagtttatttcctctgatcgtgtggtttctgagttctaagcactcacctctttcatacacgtttgttcgcttgttgagaagccatgggcgaggatttcgagttcccaagtgctagcaacatggaaatgcctgaggaggaagagtttgagagtccgatcctgaaggttggggaggagaaggagattgggaaaatggggctgaagaagaaattgctcaaggaaggtgaaggttgggaca

SEQ ID NO: 27408 - DNA, 230 bp, Glycine max
  Clone ID: 700902941H1
caacctaggaatggaaattcttgcttcctatgtttcagtagacggtcggtcatctgtgatgtgtatacacatctaaactaggaatgtaggtcatccatatgccatgcatagtagtgttaatctccaagagagtttctacctagaagtgggtacaccagcttacaatgtaacactatacggtcggtcatatatgattggagtatttatttaaatttgaatgtgattcgatc

SEQ ID NO: 27409 - DNA, 229 bp, Glycine max
  unsure (1)..(229): unsure at all n locations
  Clone ID: 700902943H1
gtcgatctgagctcaaaacaatggcgaaaccaaggtactctcgtcttccacctcgcacgtcatcctcgtcttccacgctgaatacgacacacgaannnggtcttnancttcctcgnnntaattctcctggctctcggcatcctctccattcctagctcctcgcgtggaaatttgcccaaactaggcgatctcgcatccattgctcgcaacacaatccacacttcatacg

SEQ ID NO: 27410 - DNA, 227 bp, Glycine max
  Clone ID: 700902950H1
gaagaaacttcaaatgtgacttgtattttcaaagcaattaatgattatgaaattaaaagtgtaatttttttttttgataaaatcttattaatatacgctcatcattagattagatagtgtaaaaaaaaaaaaaaaaaaaaaaaaaaaaaaaaaaaaggggggcccccgtaaaggaacccgttccaccgggaatttattccgggacgggaacggagggggtgacggtt

SEQ ID NO: 27411 - DNA, 237 bp, Glycine max
  Clone ID: 700902953H1
agagagaacttgctctgctctctctttgctttgctgcttctccctataatctctctgcaaacttgttcagcaagaaaccactttagaaatagcataaagttgggttatttcaagcttctgattccaggacgacaacaacaacaacaacaacaaaaagaagtgattgatttgtgatggaagataaatatagtctaggcaggcagcatagtgggatatggaagtccttgagagatggag

SEQ ID NO: 27412 - DNA, 236 bp, Glycine max
  Clone ID: 700902958H1
tcttcttggaaatgaagctgatattgtttcaaatgggataacacgaattgaccacagcagtcttagtggtgttgggaactctactagaaatctgcctgctactgagatgccagaacaaggtaaacaggctcaggttattcatggtttgccagattttgctgatgtttacagcttcattggaagtgtttatgatccagacacagtaggagtcttccagaagctgaaggatattgatc

SEQ ID NO: 27413 - DNA, 229 bp, Glycine max
  Clone ID: 700902959H1
ctgatgatctgcacaaacataaatgctgagcccatgcaaccgatggtggaacttcactcactgcaatagcaaaatgtatatttttgtattatccacgtatgaatatgtactaacattttcctttgttaacatgttttcttatttacccctccccctccaacccataagtgggcttctctttctacatgtgtaacttttagtggttaaagaaaatatttcttttcctttt

SEQ ID NO: 27414 - DNA, 119 bp, Glycine max
  Clone ID: 700902964H1
cagaagcttgtgatcaatcatcaacacagagctgagtgtgttgctctgtgaatccaccttcttcttccattggaggaccattttctcctggaatagaaatactaccacacaacatacga

SEQ ID NO: 27415 - DNA, 235 bp, Glycine max
  Clone ID: 700902966H1
aattgctgcagtccctaaacaacgacaaactcttatgtctagtaaatgatcagcttcatcaagcaccaagaccttcacacccatcagcctagttgcaaaaccagcagtattctcagtatgatctcttagccttccaggagtagcaacaaggatctggcaagggtttgcctgcatccgtttctgctctaaagcaagtcttgtccctccaatcacgacttgtacaccaatggttggt

SEQ ID NO: 27416 - DNA, 237 bp, Glycine max
  Clone ID: 700902974H1
agtaaacataggatccacactacattcgatattaatacttttgtttctatttctctggaggcagctagctagggtcaatctcatggggatcttgaaaggagacagtggacatgccaatggcgaaaatcttaccgaagctcttttgccaacacgagatgcacaacaacaacatcaaacagacgtcgtggaacaaagatttggtgacaagctctggcttgaaaccaggaagttatggct

SEQ ID NO: 27417 - DNA, 235 bp, Glycine max
  Clone ID: 700902977H1
gtggtttcagtgagtgatcggtgttcacttgatccttcataagtcgtcatcatcatcatcatcatcaccgttgattgaagaagatgccgatcagaaacatcgccatcggaaggcctgaagaggctactcaccccgacacgttgaaggcggggttggctgagttcatctccaccttgatcttcgtgttcgccggttcaggttccggcatcgcctacaacaagctcaccgacaacgg

SEQ ID NO: 27418 - DNA, 238 bp, Glycine max
  Clone ID: 700902981H1
cgcaacaaaaagaaagaatcccaggcgaggagaaacatggaggggaaggagcaggatgtgtcgttgggagcgaacaagttccccgagagacagccgattgggacggcggcgcagagccaagacgacggcaaggactaccaggagccggcgccggcgccgctggttgacccgacggagtttacgtcatggtcgttttacgcagcagggatagcagagtttgtggccacttttctgtttc

SEQ ID NO: 27419 - DNA, 233 bp, Glycine max
  Clone ID: 700902982H1
tagcagactctgctgcagtgagtcgtcgatgcagagtacctcaaggaggtcgacaaggctcgccgcgatctccgcgcactcatcgctaccaggaactgcgctcctctcatgctccgattagcctggcacgatgccggaacttacgatgctaagaccaagaccggtggacctaacggttcgatccggaacgaggaagagtattctcacggagccaataatggcttgaagaaagc

SEQ ID NO: 27420 - DNA, 233 bp, Glycine max
  Clone ID: 700902986H1
gatctatatatgcatgaacactaataatagaagtctaactataatttttattatttggccaaatgaacatgaccaaagaattagctaaaacaatgccccagctagattagattggttatatcctgtattatataattcaattaaacagatttattattcaagagaaaatcagcatttcttctacagtactgagatttcctccaagagtattttatatataaatcaacattttg

SEQ ID NO: 27421 - DNA, 223 bp, Glycine max
  Clone ID: 700902987H1
taaagccactaccttcattgaaaaaatacaagcttcagatggatcatggtatggttcttggggagtttgcttcacttacggtgcttggtttggggtaagaggtctgattgctgctggaaggagtttcagtaattgctcaagcatccgtaaagcttgtgaatttctgctgtccaagcagcttccttctggtggctggggagcgagttatctgtcctgtcaaaac

SEQ ID NO: 27422 - DNA, 231 bp, Glycine max
  unsure (1)..(231): unsure at all n locations
  Clone ID: 700902990H1
cgaaggnaacgctgtcgttgcgccaatcgcggcgttgttgttggtggtgctactcgcggcgagtgtggtggtggaggctcaggagaactcggacgtgaagacgctggtgaagcacatgcacgggaagaagtactgcgacaaaggatgggaatgtaagggctggtcaattactgttgtaacctcactattactgaatatttccagacctaccagttcgagaatctcttctcc

SEQ ID NO: 27423 - DNA, 237 bp, Glycine max
  Clone ID: 700902991H1
tggaaaaccctagttcgcttgcagtcacacaagaggccaatcctattcatagctcgagatgggtgaagaagtgaaggtagttgttccagaatcagtgttgaagaagcgcaagagggaggaggaatgggcgttggccaagaagcaagaactcgatgctgccaagaagaagagagccgagagccgcaaactcatctacaacagagctaagcagtacgctaaggagtacgatcaccagga

SEQ ID NO: 27424 - DNA, 235 bp, Glycine max
  Clone ID: 700902993H1
cacaacaaaaaaagacaacacagagagaagcgtcttaataaacgctcttctctgaaaaacctgatttcttctcttcttctcttctctttcgtttcgatcttcgatctctgaaaatgagagagtgcatttcaatccacatcggtcattttgttattcaggtcggaaacgcctgctgggagctctactgcctcgaacacggcattcagcctgatgggcagatgccaagtgataagac

SEQ ID NO: 27425 - DNA, 237 bp, Glycine max
  Clone ID: 700902994H1
attctatgccctttccccctttttcgtctctagggttactgcaactgctacaagaagaagcttccgcaatggagcgagaccgcgtcgtttcacagccagttgcggttatcgcttgcatcgcaatggccgtgttctacgtggccatcctctacgctcccaccgtgctccttcgtctcccacctcctccttccttcaaaacctacatgcttcgtcgcttcctatgcgccgtcgtttcgt

SEQ ID NO: 27426 - DNA, 238 bp, Glycine max
  Clone ID: 700902995H1
ctctcacacacactttctctctctctctctctcacccagatcttgtagcaatggcgagcgctcccactccacgcgaagagttcgtgtacatggcgaactggcggacaggccgagcgctacgaggagatggtggagttcatggagaaggtctccgcctccgccgagagcgaggagctgaccgtggaggagcgtaacctcctctccgtcgcctacaagaacgtgatcggcgctcgccgcg

SEQ ID NO: 27427 - DNA, 241 bp, Glycine max
  Clone ID: 700902996H1
ccggaccagcagaggctgatttttgctggcaagcagctcgaggatggaaggaccctcgctgactacaacatccagaaggaatcaacccttcaccttgtcctccgtctccgtggggggctttaagctcgttgtgtaatgttggatgtgttcccaaaacatttgaagaactttgatgtttaatgggtctgtaataatgtcccttgaaaataagttcggtttgtgttgaactcaattgtgtccc

SEQ ID NO: 27428 - DNA, 265 bp, Glycine max
  Clone ID: 700903001H1
agcatgtccatcaccaccttccttctcctcctcctcctctcgccggcgatcaccgccaccccgacggcgtacgagatgctggagagctttcactttccggcgggtattctccccaagggagtgaccggttacgagctggatccgtccagcggcaaattcagcgccgatctgaacggttcgtgcagtttctccctcgaaggttcgtaccagttgagctaccagaaaaccatcaccggctacgtatccgaagaaggctcaccgaact

SEQ ID NO: 27429 - DNA, 230 bp, Glycine max
  Clone ID: 700902930H1
gaatagattcataaaatgtttcaaagggatccttactagctgcacttggtgaatgctcaaaggatgatgatgaagtaattactagtagaaatttttggaatggagctaaggtgccaataaggagtattagtgatcgttatgggtttattagcctttatgcctcttgcaagagaacttgttctgattctgtatcataagttgaccttccaatttttttaagaagcacctgt

SEQ ID NO: 27430 - DNA, 240 bp, Glycine max
  Clone ID: 700903009H1
aaacaataaaataaaataaaacagaagagaaggaaacagaagtagaaaaaaaataaaatgggttacacaagatcttctactctgtccgtggctcttgtcttggcattctgttcaagcattcagggtttggacatcaccaaattgttgggcgaatatcccgaatatgcacagttcaacaaatacctaactgaaaccaagctggcggaccaaatcaacagccgtaacgccttacagtccttg

SEQ ID NO: 27431 - DNA, 234 bp, Glycine max
  Clone ID: 700903010H1
gtgatttcagtgagtgatcggtgttcacttgatctcatcataatcgtcagcgtcaattgaagaagatgccgatcagaaacatcgccgtcggaaggcctgaagaggcgactcaccccgacacgttgaaggcggctttggctgagttcatctcaaccttcatcttcgtgttcgccggctcaggctccggcatcgcctacaacaagctcaccgacaacggcgctgcacccctgccgg

SEQ ID NO: 27432 - DNA, 249 bp, Glycine max
  Clone ID: 700902901H1
caaaagctcatggtggtttctctgtgtttgctggtgttggagaacgaacccgagagggtaatgacttgtacagagaaatgattgagagtggtgtcattaagcttgatgataagcagagtgaaagcaagtgtgctcttgtgtatggtcaaatgaatgagccccctggtgcccgtgcccgtgttggtcttactgggcttactgtggctgaacacttccgtgatgctgaagggcaagatgtgcttcttttcg

SEQ ID NO: 27433 - DNA, 242 bp, Glycine max
  Clone ID: 700902906H1
gcgacgctctctacacgctgaaacggatcctctcggaccctgacaacgtcctccagagctgggatcccactctcgttagtccctgtacttggttccacgtcacctgcaacctggacaaccgagtcactcgagtggatcttggtaactctaacctatctggacatttggtacctgaacttgggaagctggagcatctacagtatcttgagttgtacaaaaacaacattcaaggaactattcct

SEQ ID NO: 27434 - DNA, 241 bp, Glycine max
  Clone ID: 700902907H1
tagatggcaatttcttaccaaattagaaattctggtgtcttctttttcctttgtgttcttctctttggtgtgtctgatctgggtcgaccagccacttttctgcaagactttcatgtcacgtggtctgactcccacatcaagcaacttctgcaaggcagggcaagccaactcagacttgaccagagctctggatgtggatatgcttccaaggtgaagtacatgtttcgggcgtgttagcatg

SEQ ID NO: 27435 - DNA, 230 bp, Glycine max
  Clone ID: 700902908H1
ttcggacaggaacaggatcaacatagctgccagtgctcagaaagtcgatgtcgataaccgaatctccctccgattctactaccgcatcgctgccaacatcctccgacaggctgatatctttcgtgcagagaagaatattattgacctatatgtcatgcttttaagattttctagtttggtgtctgagacaataccacgccaccgagacttcagatcatctccacacagga

SEQ ID NO: 27436 - DNA, 243 bp, Glycine max
  unsure (1)..(243): unsure at all n locations
  Clone ID: 700902910H1
gtacacccctgaccccttgatttctctcagttccgttctgcatcatagagtaaggccanccacgatcttcgattcttcnanttgaacacaagcgctaagataccttccgttggtttgggaacgtggctcgctgaatctggcgttgttgctcgcgccttggtcactgcaataaacgttggatatcggcatatagattgtgcgcaaatttatggcaatgaaaaggagattggtgctgccttgaag

SEQ ID NO: 27437 - DNA, 254 bp, Glycine max
  Clone ID: 700902917H1
tctgaattctgctcgagggaaacgtgcacttgttagccgcatgcttcagtatgttcttgaccatgttgtgttgcaaatcccatttcctgacattgtcataaaacgaactttggaaggcaaaccctatttggattattatgataaatttgatcttagattcccaaattttaatttcaatgtatctcatcatggtgactatgtggccatagcatctgaacctgtatgtcttgtgggggtagacattgtctcctatg

SEQ ID NO: 27438 - DNA, 206 bp, Glycine max
  Clone ID: 700902922H1
cttcccaaaagtttaatcctgaaacctaaggtctggtcataaatctatacattgttgtaagaacatgtgcatttcaaatgtcacatgagtttgttcctttcgagatttgttgcttggttgaagattggagactggaagatagcatgccacatgttctttcttggtgtgttaaatggttatagtaaatgaattaaattattcttgtt

SEQ ID NO: 27439 - DNA, 240 bp, Glycine max
  Clone ID: 700902923H1
cagcgttcatctcaatctagatttgtgtgcggtgcgtctccggtgaagagaagaagattgcgaccgtaccaggacagctcatatgggaggtcgtaaagaagaacaactctttcttggtgaaagagttcggaaggggcactcagagcgtgcagttcagcagagagcccaacaatctctacaacctcaacactttcaagtactccggtttggcgaacaagaaaactgtcactgttcaacctg

SEQ ID NO: 27440 - DNA, 243 bp, Glycine max
  Clone ID: 700902925H1
ctcgaagtcttgagcactaagtggttgaggaaatgggaacccttgggagagcgatctacagcgttggtaactggattcgagggactggacaggccattgagtgtctcggttccctcctccagggcggttactacggccaagagcagctgtctaggcatcgaactctgatggacatatttgataaggctcctgttgttgatgaggatgtatttgttgcgcctagtgcctccgtcattggagacg

SEQ ID NO: 27441 - DNA, 240 bp, Glycine max
  unsure (1)..(240): unsure at all n locations
  Clone ID: 700902929H1
ctaaaatacgtaaccaggcgtctcacagtcgccgtcctgtcaagagcgctaatgaacgttctcattaccacgcangagtaccgggagccctgaaccgcccgctgctcggcggatcccagctgcggtggcgacggcgggaaggcgctttccgctgttcctcagcgggccgggcccttgaccagcgcggcccgcaggtcttccttctcgccgtcttgcagttgaagagctacatacgtagtc

SEQ ID NO: 27442 - DNA, 1044 bp, Glycine max
  Clone ID: fC-gmfl700905635
agagaaaagcgcgctatatacaagaacttgagcgcaaggttcagactcttcagacggaagccacaactctttctgcccaattgacattataccagagggacacatctggccttagtactgaaaatacagagcttaagctccgtctgcaagccatggagcaacaagcacagcttcgcgatgctcttaatgaagcattgaagaaggaagttgagagacttaaggttgctaccggtgaggggatgagccacactgaatcctttaatctgggaatgcaccagatgccattttccggatcaaatttcattccaatcccgccacaatcaggtccttctggtcaccagaacatgcagatgccaccatttggtcactccccatccacaatgccaactcatcaactgcatcaaacaagttctcatccatattcagaaatattgcaaaatgaacagcttggtcgtttccaagggcttgacattagtagcaaaggatcaactctcgtgaagtctgaaggcccctcgctctctgcaagtgagagtagcagtacattttgaatttgacagaaaatgcttgacctgctgacttatccatgctattcattgctcatagggttgacatttagtcaactagtgaaggtacctcatttcatgattcagatttgaggattaattcttaactatttattctaagggttgctcgccaaaaaggggaagcacccttggggttttgttgcaaagttcacagtaatcatgtttcagcatggcatttggtgtttctgggcgctggaatattgggaatgaaaggtcattcccattgtatctttgtatttgtatcatcgtttacgtgatagcatgtaaactgtgtgatttattgttgtgttttacttcattcatagtccaagatggactcttttttttttttctttgtataattagttttagatttattcatagtcgttgtacaatccaagagttttgggtacttgttgtattaaacttcttctgagataagaccttttttttgaaaaaaaaaaaaaaaaaaaaaaaaaaa

SEQ ID NO: 27443 - DNA, 281 bp, Glycine max
  unsure (1)..(281): unsure at all n locations
  Clone ID: 700889033H1
agttgcanncacgcgtacgtaagctcgggttttcgcagaaacgtggctggcctggttcaccacgcgggananggncctgataananacaccggcatactctncnacatcgtataacgttactggtttcacattcaccaccctnaaattgactctcttccgggcgctatcatgccntaccgcgaaangttttgcgccattcgatggtgtcaacgtaaatgccgcttcnccttcgcgngccaattgcaagctctgcattaatgaatcggccaacgcgcgggga

SEQ ID NO: 27444 - DNA, 77 bp, Glycine max
  unsure (1)..(77): unsure at all n locations
  Clone ID: 700889127H1
agactaaagcacgcgtacgtaagcncggaattaggctcgagaggcncgagnacngcncttnanaaaannnnaaaagn

SEQ ID NO: 27445 - DNA, 71 bp, Glycine max
  unsure (1)..(71): unsure at all n locations
  Clone ID: 700889330H1
tngcatgcacgcgtacgtaagncggaattcggcncgagcnagtnctagancgcgagcggccgccccttttn

SEQ ID NO: 27446 - DNA, 121 bp, Glycine max
  unsure (1)..(121): unsure at all n locations
  Clone ID: 700889718H1
gtcagngtacgtgagctacggaatcaggggatagcgcaggaaagaacatgtgagcnaaaggccagcaaaaggccaggaaccgtaaaaaggccgcgttgctggncgtttttaccaacaacaa

SEQ ID NO: 27447 - DNA, 276 bp, Glycine max
  unsure (1)..(276): unsure at all n locations
  Clone ID: 700890054H1
gtcgcatgcacgcgtacgtaagctcggaatgaatcggccaacgcgcggggagaggcggtttgcgtattgggcgctcttccgcttcctcgctcactgactcntcngcgctcggtcgttcggctncggcgagcggtatcagctcactcaaaggcggtaatacggttatccacagaatcaggggatnnacgcaggaaagaacatgtgagcanaangcnagcaaaaggccaggaaccgtaaaaaggccgcgttgctggcgtttttccacacaanananan

SEQ ID NO: 27448 - DNA, 134 bp, Glycine max
  unsure (1)..(134): unsure at all n locations
  Clone ID: 700890268H1
gncgtcgcatgcacgcgtacgtaagctcggaattccggaccggtacctgcaggcgtaccagctttccctatagtgagtcgtcattagagcttggcgtcaatcatggtcatcagctgtttcctgtgtgaaattgt

SEQ ID NO: 27449 - DNA, 73 bp, Glycine max
  unsure (1)..(73): unsure at all n locations
  Clone ID: 700890285H1
aagtcgcangcacgcgtacgtaagctcggaattcggctcgagntctttatatgggttgtgacaatgtaatctt

SEQ ID NO: 27450 - DNA, 72 bp, Glycine max
  unsure (1)..(72): unsure at all n locations
  Clone ID: 700890622H1
ngcacgcgtacgtnagctcggaattcggctcgaggttctagatcgcgagcngccgcccttttttttttttgn

SEQ ID NO: 27451 - DNA, 74 bp, Glycine max
  unsure (1)..(74): unsure at all n locations
  Clone ID: 700890665H1
gtcncangcacgcgtacgtaagctcggaattcggctcgagtgacaagttggagtctgatgaaaaaaaaaaaang

SEQ ID NO: 27452 - DNA, 64 bp, Glycine max
  unsure (1)..(64): unsure at all n locations
  Clone ID: 700890678H1
gtcgcangcacgcgtacgtaagctcggaattcgggctcgagaanaaaaaaaaaaaaaaaaaaan

SEQ ID NO: 27453 - DNA, 286 bp, Glycine max
  unsure (1)..(286): unsure at all n locations
  Clone ID: 700890696H1
tngcangcacgcgtacgtaanctcggcccactgacccgttncgcgagaagnttgtgcaccgccgctttacaggcatcgacgccgcttcgttctaccatcgncaccaccncgctggnacccagttgatcggcgcgagatttantcgccgcgacaatttgcgacggcgcgtgcagggccagactggaggtggcaacgccaatcagcaacgactgtttgcccgccagttgttgtgccacgcggttgggaatgtaattcagctccgccatcgccgcttccacnttntnnn

SEQ ID NO: 27454 - DNA, 167 bp, Glycine max
  unsure (1)..(167): unsure at all n locations
  Clone ID: 700890931H1
atacagtacgtaagctcggaattccgagcttgngatcctctagagcggccgccgactagtgagctcgtcgacccgggaattaattccggaccggtacctgcaggcgtaccagctttccctatagtgagtcgtattagagcttggcgtaatcatggtcatagctgttt

SEQ ID NO: 27455 - DNA, 305 bp, Glycine max
  unsure (1)..(305): unsure at all n locations
  Clone ID: 700891220H1
atncacgcgtacgtaanctcggnatatttatgccaaccagccagacgcagacgcgccgagacagaacttaatgggcccgctaacagcgcgatttgctggtgacccaatgcgaccagatgctccacgcccannagcgtaccgtcttcatgggagaaaataatactgttgatgggtgtctggtcagagacatcaagaaataacgccggaacattagtgcaggcagcttccacacaacataattttttnaaaaaaanaananannnnnnnnnnnnnnnccactnannnnnnnnnnnnnnnnnnnnanc

SEQ ID NO: 27456 - DNA, 103 bp, Glycine max
  unsure (1)..(103): unsure at all n locations
  Clone ID: 700891549H1
ncgtcgcangcacgcgtacgtaagcncggaattcggctcgagngagtnacacatagtnatatcnacntnaanattgggtncncaaaananaaaaaaaaaaaag

SEQ ID NO: 27457 - DNA, 204 bp, Glycine max
  unsure (1)..(204): unsure at all n locations
  Clone ID: 700891780H1
gtcgcangcacgcgtacgtaagctcggaattcggctcgaggactagttctagatcgcgggcggccgccgactagtgagctcgtcgacccgggaattaattccggaccggtacctgcaggcgtaccagctttccctatagtgagtcgtattagagcttggcgtaatcatggtcatagctgtttcctgtgtgaaattgttatccgc

SEQ ID NO: 27458 - DNA, 153 bp, Glycine max
  Clone ID: 700891832H1
cacgcacgcgtacgtaagctcggaattaattccggaccggtacctgcaggcgtacagctttccctatagtgagtcgtattagagcttggcgtaatcatggtcatagctgtttcctgtgtgaaattgttatccgctcacaattccacacaacat

SEQ ID NO: 27459 - DNA, 232 bp, Glycine max
  unsure (1)..(232): unsure at all n locations
  Clone ID: 700891833H1
gncgcangcacgcgtacgtnaagctcggaattcggctcgagctcgaccgctagttctagatcgcgagcggccgcccnttnntgnnttcgtcgnctcgggtnttaattccggaccggtacctgnaggngtacnagcnttccctatagtgagtcgtattanagcttggcgtaatcatggtcatagctgtttccngtgtgaaattntnatncgctcacaattccacacaacatac

SEQ ID NO: 27460 - DNA, 283 bp, Glycine max
  unsure (1)..(283): unsure at all n locations
  Clone ID: 700892052H1
gtcgcangcacgcgtacgtaagctcggaattgactctcttccgggcgctatcatgccntaccgcgaaaggttttgcgccattcgatggtgtcaacgtaaatgnccgcttcgccttncgcgcgcgaattgcaagctctgcattaatgaatcggccaacgcgcggggagaggcggnttgcgtattgggcgctcttccgcttcctcgctcactgactnnctgngctcggtcgttcggctgcggngagcggtatcagctcactnaaaggnggnaannngtttacccc

SEQ ID NO: 27461 - DNA, 330 bp, Glycine max
  unsure (1)..(330): unsure at all n locations
  Clone ID: 700892110H1
gataantcgaatcgtcgaggnacctcaatcggacaangagncttatggaagcnnannnanggattgaanatcccgggtggnttnaagaaggggaanaccaggcaggnaaacngtgttttccgntnaaaggcngaaggngnttaaacnaacgatngccttgcaagacttcccganagcgggnaaaaccggttggnaacncaaangttaggngtttggancccnaacttttntggnaaacccntggnagacntttaattcccnagntttccgggttccttccggaaggggggncccactttggaattatccggantggttttccaaacaacc

SEQ ID NO: 27462 - DNA, 63 bp, Glycine max
  unsure (1)..(63): unsure at all n locations
  Clone ID: 700892554H1
tcgcangcacgcgtacgtaagctcgggaattcggctcgagnnaaaaaaaaaaaaaaaaaaaan

SEQ ID NO: 27463 - DNA, 167 bp, Glycine max
  unsure (1)..(167): unsure at all n locations
  Clone ID: 700893209H1
cgcngcacgcgtacgtaagctcggaattcggctcgaggttctagatcgcgggcggccgccgactagtgagctcgtcgacccgggaattaattccggaccggtacctgcaggcgtaccagctttccctatagtgagtcgtattagagcttggcgtaatcatggtcata

SEQ ID NO: 27464 - DNA, 273 bp, Glycine max
  unsure (1)..(273): unsure at all n locations
  Clone ID: 700893240H1
gcangcacgcgtacgtaagctcggagcgccatctgatcgttggcaaccagcatcgcagtgggaacgatgccctcattcagcatttgcatggtttgttgaaaaccggacatggcactccagtcgccttcccgttccgctatcggctgaatttgattgcgagtgagatatttatgccagccagccagacgcagacgcgccgagacagaacttaatgggcccgctaacagcgcgatttgctggtgacccaatgcgaccagatgctccacgcccagt

SEQ ID NO: 27465 - DNA, 148 bp, Glycine max
  unsure (1)..(148): unsure at all n locations
  Clone ID: 700893725H1
ntncgnncgnaanctcggaattccggaccggnacctgcaggcgtaccagctttccctatagtggnnacgtattagagcttggcgtaatcatggtcatagctgtttcctgtgtgaaatngttatccgctgncaattccacacaacatan

SEQ ID NO: 27466 - DNA, 162 bp, Glycine max
  unsure (1)..(162): unsure at all n locations
  Clone ID: 700893750H1
ngtcgcatgcacgcgtacgtaagctcggaattaattctggaccggtacctgcaggcgtaccagctttccctatagtgaggtcgtattagagcttggcgtaatcatggtcatagctgtttcctgtgtgaaattgttatccgctcacaattccacacaacatac

SEQ ID NO: 27467 - DNA, 220 bp, Glycine max
  unsure (1)..(220): unsure at all n locations
  Clone ID: 700893842H1
cgcangcacgcgtacgtnagctcggaattccgagcttggntcctctagagcggccgccgactngtgagctcgtcgacccgggaattnattccggaccggtacctgcaggcgtaccagctttccctatagtgagtcgnattagagcttggcgtaatcatggtcatagctgtttcctgtgtgaaatngttatccgctcacaattccacacaaannnnccncn

SEQ ID NO: 27468 - DNA, 260 bp, Glycine max
  unsure (1)..(260): unsure at all n locations
  Clone ID: 700893951H1
acgtcgcangcacgcgtacgtaagctcggaattcggctcgaggtttttactgactttaaaaaaaaaaaaaangggcggccgccgactagtgagcncgtcgncccggganttanttccggncnggnncctgcnggngtaccagcttnccctanagtgagncgtnttanagcttggngtaatcanggncanancngtttccngtgnnaaattgttanccgcncanaattccacacacacnnnnnngccacngnnnngcnagn

SEQ ID NO: 27469 - DNA, 76 bp, Glycine max
  unsure (1)..(76): unsure at all n locations
  Clone ID: 700893983H1
gggcgantcgangcncgcgtacgtnagctcggnattcggctcgagnnanaaaaaaanannnaaaaaaaaaaaaaaa

SEQ ID NO: 27470 - DNA, 292 bp, Glycine max
  unsure (1)..(292): unsure at all n locations
  Clone ID: 700894050H1
nngnaaganncgnatgcacgcgtacgtaagctcggaattngntntggnatggtanntgcaggngtactagntttaantatagtgagtngnantngaggttggcgtnntaatgataatagctgnttnatgtgtgaaattgttatccgttcacanttcgacagatangtangatnnnngcgtngcacncatgangaagttattgtnatncaaanaaggnanantnncnatgtgngtaangnaagcngcatangantccaatngttnanntttcgnannnatgagagnatntatc

SEQ ID NO: 27471 - DNA, 79 bp, Glycine max
  unsure (1)..(79): unsure at all n locations
  Clone ID: 700894125H1
cgcgtccgtcanctcggaattcggctcgagngtggttacantggaaatgtgaaaagtattttccaaaaaaaaaaaaang

SEQ ID NO: 27472 - DNA, 68 bp, Glycine max
  unsure (1)..(68): unsure at all n locations
  Clone ID: 700894321H1
gtcgcatgcacgcgtacgtaagctcggaattcggctcgagttttttttttttttttttttnccttccc

SEQ ID NO: 27473 - DNA, 62 bp, Glycine max
  unsure (1)..(62): unsure at all n locations
  Clone ID: 700894354H1
tcgcangcacgcgtacgtaagctcggaattcggctcgagaaaaaaaaaaaaaaaaaaaaaaa

SEQ ID NO: 27474 - DNA, 65 bp, Glycine max
  unsure (1)..(65): unsure at all n locations
  Clone ID: 700894476H1
gtcgcangcncgcgtacgtnagctcggnattcggctcganctaaaannaaaanaaaaaanaaaaa

SEQ ID NO: 27475 - DNA, 79 bp, Glycine max
  unsure (1)..(79): unsure at all n locations
  Clone ID: 700894878H1
gtcgcangcacgcgtacgtaagctcggaattcggctcgagattctagatcgcgagcngccgcccttttttttttttttt

SEQ ID NO: 27476 - DNA, 59 bp, Glycine max
  unsure (1)..(59): unsure at all n locations
  Clone ID: 700894940H1
gnagcatgcacgcgtacgtaagctcggaattcggctcgagccagatcttgcaaaaaaaa

SEQ ID NO: 27477 - DNA, 106 bp, Glycine max
  unsure (1)..(106): unsure at all n locations
  Clone ID: 700895067H1
nccacnngacgtcgcangcacgcgtacgtaagctcggaattcggctcgagccaaattctggatacgggattggatttctctttaaaaaaaaaaaaaaaangggngg

SEQ ID NO: 27478 - DNA, 202 bp, Glycine max
  Clone ID: 700895120H1
gtcgcatgcacgcgtacgtaagctcggaattcggctcgagactagttctagatcgcgagcggccgccgactagtgagctcgtcgacccgggaattaattccggaccggtacctgcaggcgtaccagctttccctatagtgagtcgtattagagcttggcgtaatcatggtcatagctgtttcctgtgtgaaattgttatccg

SEQ ID NO: 27479 - DNA, 96 bp, Glycine max
  unsure (1)..(96): unsure at all n locations
  Clone ID: 700895277H1
gacgtcgcangcacgcgtacgtaagctcgngaattcggctcgagnttctagatcgcnagcngccncccttttttntttnttntnttttntttnntn

SEQ ID NO: 27480 - DNA, 190 bp, Glycine max
  unsure (1)..(190): unsure at all n locations
  Clone ID: 700808309H1
cgcnngcacgcgtacgtaagctcgggccgactagtgagntcgtcgacccgggaattaattccggaccggtacctgcaggcgtaccagctttccctatagtgagtccgtattagagcttggcgtaatcatggtcatagctgtttcctgtgtgaaattgttatccgctcacaattccacacaacatacannn

SEQ ID NO: 27481 - DNA, 224 bp, Glycine max
  unsure (1)..(224): unsure at all n locations
  Clone ID: 700808406H1
gtcgtnagcacgcgtacgtaagctcggaattcggctcgagnactagttctagatcgcgagcggccgccgactagtgagctcgtcgacccgggaattaattccggaccggtacctgcaggcgtaccagctttccctatagtgagtcgtattagagcttggcgtaatcatggtcatagctgtttcctgtgtgaaattgttatccgctcacaattccacacaacata

SEQ ID NO: 27482 - DNA, 264 bp, Glycine max
  Clone ID: 700944453H1
ggcgaagaacagaatgaagaggaagaacaagaggatgacaaggatgaagagaatgaacaacagcaagaacaattacctgaagagtttatctttgatgctgaaggtggcttggtagatgaaaaactcctcttctttgcccaacaagcacagagacgccgtgggagggctggaagggcaaaaaatgttatattttccgaggatagaggccgatacatcaagcccatgcttccaaagggccctgtaaagagattagctgtagatgca

SEQ ID NO: 27483 - DNA, 257 bp, Glycine max
  Clone ID: 700941050H1
tgctgcttctggaaattttcattggaattttgaagatgttgctaaatcaattgtgtgcatgatgatgtctggcccattcttgacaggatatacccagactatgaatgattggtacgaccgagaaattgatgcaataaatgaaccttatagaccaattccttctggggcaatatctgagaatgaggtaatcactcaaatatgggtgttgctgcttggtggtctttctctggctggtatattggacatatgggcagggc

SEQ ID NO: 27484 - DNA, 268 bp, Glycine max
  Clone ID: 700943660H1
ctttctctttctcttcactctaaagtctaagcatccatggccatggcgtctgcaaagctcaacaccttgtcttcccagtggatcgcccacaattccttctctcctcgccgtggatcctcttctcgccgagtctctcttccgatccgcgcttcttcttaccaacacgaactcgtccaaaccgccaaatctattgcatctcccggtcgtggaattcttgcaattgatgaatcaaatgccacatgtgggaagcgtttagcatccattggat

SEQ ID NO: 27485 - DNA, 264 bp, Glycine max
  Clone ID: 700944323H1
ctcaggacaatggtcttgtgccaatcgtagagcctgaaattcttcttgatggagaccacccaattgagaggacgctggaagtggccgagaaggtctggtcagaagtcttcttctatttggctgaaaacaatgtcctttttgagggaattttgctcaaacccagcatggttacacctggggctgaacacaaggaaaaggcttctccagaaaccattgccaaatatactctaaccatgcttagaagaagagttcctcctgctgtcc

SEQ ID NO: 27486 - DNA, 250 bp, Glycine max
  Clone ID: 700946357H1
tgaagatgcggttggtgaagatgtggtgggagaactaaccaagtccatggaaaaaattggcctggatatgcgcgttgctgctctagtcagtctcactctcctctcttttggatttctttattttttatagccggatttgagcatgatggtttccagtttgtgtctgacagaaatttggagttataaggttaatgataccattggaacattagctggaggcagattctacaatcaggatgtcattgctgct

SEQ ID NO: 27487 - DNA, 262 bp, Glycine max
  Clone ID: 700946288H1
gcaatgtatggtttggagctggtgttatcctcaagggaaaaatcagtatcgtggccaatcctggtgttaagctggaagttcccgatggtgctgtcatttcggataaggaaattaatggcccagaggacctcctgtgaggaagcccgctgagtttagaagtatcagactgtatactatctttatggtctcatgttttttccaattattactactcccaagtttgatgggcaaagaaaataagtccctttttgtttgtcttctg

SEQ ID NO: 27488 - DNA, 273 bp, Glycine max
  Clone ID: 700943619H1
tgttagctgctcctattatcttggacttggtccttcttgctgagcttagcactcgaatcgagtttaaagctgaaaatgagggaaagttccactcattccacccagttgcgaccatcctcagttacctgaccaaggcccctctggttccaccgagtacgccagtggttaatgcactgtcaaagcagcgagctatgctggaaaacatcctaagggcttgtgttggattagctcctgagaacaacatgatcctggagtacaagtgaagttcaaagt

SEQ ID NO: 27489 - DNA, 256 bp, Glycine max
  Clone ID: 700942984H1
aatagtttgattggaggagatgactttaagagtggtcagaccaaaatgaaatcggtgttggtggatttcctagtaggggccggcatcaagccaacatctatagtgagttacaaccatttgggaaacaatgatggcatgaatctctcagcccctcaaaccttccgctcgaaggaaatttccaagagcaatgttgttgacgatatggtcaacagcaacgccatcctctatgagcctggtgaacatccggaccatgtgg

SEQ ID NO: 27490 - DNA, 247 bp, Glycine max
  Clone ID: 700943129H1
ctagtaggggccggcatcaagccaacatctatagtgagttacaaccatttgggaaacaatgatggcatgaatctctcagcccctcaaaccttccgctcgaaggaaatttccaagagcaatgttgttgacgatatggtcaacagcaacgccatcctctatgagcctggtgaacatccggaccatgtggttgtcattaagtatgtaccttacgttggggacagcaagagggccatggatgagtactctt

SEQ ID NO: 27491 - DNA, 250 bp, Glycine max
  Clone ID: 700943110H1
ttggacttggtccttcttgctgagcttagcactcgaatcgagtttaaagctgaaaatgagggaaagttccactcattccacccagttgcgaccatcctcagttacctgaccaaggcccctctggttccaccgagtacgccagtggttaatgcactgtcaaagcagcgagctatgctggaaaacatctaagggcttgtgttggattagctcctgagaacaacatgatcctggagtacaagtgaagttcaaa

SEQ ID NO: 27492 - DNA, 257 bp, Glycine max
  Clone ID: 700942857H1
gttccactcattccacccagttgcgaccatcctcagttacctgaccaaggcccctctggttccaccgagtacgccagtggttaatgcactgtcaaagcagcgagctatgctggaaaacatcctaagggcttgtgttggattagctcctgagaacaacatgatcctggagtacaagtgaagttcaaagtcttaagagtaatggtttgggatactgtagttgaatgagatcaaaacttaactcatatcccataccctct

SEQ ID NO: 27493 - DNA, 254 bp, Glycine max
  Clone ID: 700944212H1
gaggcaggagtggctcttgtctgaactcagtggaaagcgccctctctttggccatgaccttcccaaaacagaagaaatcaccgatgttttggaaacattccgtgtcatttcagagcttccctcagacaacttcggtgcctacatcatatcaatggcaacatccccatctgatgtgcttgctgttgagcttttacaacgtgaatgccatgtgaagcagccactaagggtggtgccactgtttgaaaagcttgctg

SEQ ID NO: 27494 - DNA, 266 bp, Glycine max
  Clone ID: 700944850H1
ctcaccttgaagattcaagtgcatggaattcgagtatacctcaccctaagctcaatgaaagaattctgtcttctctgtcacggagaactgttgctgctcacccctggcacgatttagagattgggccaggagctccagctgttttcaactgtgtggttgaaattggcaaaggcagtaaggttaagtatgagctggacaagacaagtggacttataaaggttgatcgtattctttactcatcagttgtctacccacacaactatggt

SEQ ID NO: 27495 - DNA, 240 bp, Glycine max
  Clone ID: 700942540H1
ggaaacatgttgctgctcacccgtggcatgatcttgagataggacctgaagctccaaagatcttcaactgtgtggttgaaattgggaaaggaagtaaggtgaaatatgaacttgacaaaagaactggtcttattatggttgatcgtatcctttactcatcggttgtgtatcctcacaactatgggtttatcccacgtactatttgtgaggacggtgatcccatggatgtcttggttatca

SEQ ID NO: 27496 - DNA, 237 bp, Glycine max
  Clone ID: 700943367H1
ctcaacgccatctccagctgcttccttatcagaagcgcttcgccccagagattctcgcttcctctccttcaatccttcttccaacgctattaattacaaaattaacctctccgcttccctccgatccattcactccctccctcttaaaacctccttgcggatcaaatgctcccaaacagatgggaatggaagtcctgcaaagaggacagtgcttcatgatctttatgagaaagaagg

SEQ ID NO: 27497 - DNA, 259 bp, Glycine max
  Clone ID: 700941130H1
gtcaggatggccctccaaaggtgactcatctgaatctgatgcaactgttgataatgctaacacttacaacagtaacttgatcagacacgtcctgaacaatacggggactcctaaacatcctggaattgcagttagtacatatatttatgagctttataatgaagacttaagatcaggtccagtctcagaaaagaactgggggctattttatgctaatggagaaccagtgtataccttacacttgactggtgctggtatt

SEQ ID NO: 27498 - DNA, 262 bp, Glycine max
  Clone ID: 700943566H1
gtcgtctcttggggtaaacgtatatcgattttctatttcatggacaaggattctaccaagagggatatatggggacataaatccaaatgggataatgttctacaacaagattatagacaatctgctgcttagaggtgaagtaacaatgtcaatgtccacttggttctctataatgctactttgtcttgaccatagtcacatatataattcgctcaacttagtggagaaccgtgaattaatttgcgtgtaccaattcacggtt

SEQ ID NO: 27499 - DNA, 251 bp, Glycine max
  Clone ID: 700941195H1
gggagtttgtcattcttccacttcccatgccaccctagagaagaaatgtataggaaagccaagatgcacggtcactgtatcaaacagtaactttgggcaagacccttgtcctaatgtgttgaagcggttatcagttgaagctgtttgcgctcccaactaattggagaggctgaatgattaaggaagcacccttttacgtgtagtgtgaagtgacttaacaagcacacgaaagaacaataatagtataggta

SEQ ID NO: 27500 - DNA, 172 bp, Glycine max
  Clone ID: 700943819H1
ggtgcagcaaatcatgcaacgcacactatagtcttttcacagctctatataaatggaagcaatcaaggggtgcatgcatttattgcccaaatcagggattcagatggaaacatatgtccaaacatccgaatagctgattgtggtcacaaaattggtttaaatggagttgata

SEQ ID NO: 27501 - DNA, 266 bp, Glycine max
  Clone ID: 700943683H1
ctataacacagctaacagggatggctatgaaccagttgcacagatgtttgctcggaactcgtgcaaaattatattacccggcatggacctttcggatgcaaaccaaccagaggaaaaccattcaagccctgagttgctacttgcacaagttatggcagcttgcaaaaagtatgaggtgaaggtttcaggtcaaaattcttctgagtctggtgttccaggtggttttgaacaaataaagaagaatctatctggagataatgtattgg

SEQ ID NO: 27502 - DNA, 265 bp, Glycine max
  Clone ID: 700943811H1
cgcaattttcatttttctctctcccttagtcaaagggattcatcgttcttcttcccaggttatttagaaaagcaaaatggtgaagatttgctgcattggtgctggatatgtggggggtcctactatggcagtcattgcacttaagtgcccatccattgaagtcgctgttgttgatatctctaaatcccgcattgcagcctggaacagcgaccagcttcctatctatgaacctggccttgatggtgttgtgaagcaatgccgtggc

SEQ ID NO: 27503 - DNA, 265 bp, Glycine max
  Clone ID: 700943550H1
taggcattggctcagagtcggcatcattccttatcagtgctttcacaaccttcttgatgcttccctgtataggcgtagccatgaagctcatggatgtttcaggcagaaggcagttgttacttactacaatccccgtgctgattgggtcactcattattttggtcattggaagcctggtaaattttggcaatgtcgcccatgcagcaatctcaacagtatgcgttgtggtttatttctgctgctttgtgatgggttatggaccaat

SEQ ID NO: 27504 - DNA, 278 bp, Glycine max
  Clone ID: 700942657H1
ctcttggcagcctacgtcaattgtcaaaaggttggggctccgcctgaagtggtgggaaggttagaagaagcatgtgcatctgctgcagtgataatggcaggtggaacagccagcataggcgaggatccagcgctggatcagttcatggaggcttactgtgagatgctgatcaagtacgagcaagagctctccaaacccttcaaggaagccatgctctttcttcagaggatcgagtgccagttcaaatctctcactatttcttcttctttggacactac

SEQ ID NO: 27505 - DNA, 262 bp, Glycine max
  Clone ID: 700943842H1
ctcaaccccaaacagaagcaagctttagccaggcagttaaatctccggcctcgacaagttgaagtgtggttccagaatcggagagccagaacaaagctgaagcaaacggaggtggactgtgagttcttaaagaaatgctgtgaaacattgacggacgaaaacaggaggctaaagaaggagctgcaagagctgaaggcactgaaactagctcaacccttgtacatgcctatgcctgctgccacactcaccatgtgcccttctt

SEQ ID NO: 27506 - DNA, 259 bp, Glycine max
  Clone ID: 700944041H1
gttccagaaccgtagagctcggtggaagaacaaacagctggagaaggattacgagactctgcatgcaagttttgagagtctcaagtccaactatgactgtctcctcaaggagaaagacaagttaaaagctgaggtggcgagcctcactgagaaggtgcttgcaagagggaaacaagaggggcacatgaagcaggctgaaagtgaaagtgaagaaacaaaaggattattgcatttgcaggaacaggaaccaccccagagg

SEQ ID NO: 27507 - DNA, 257 bp, Glycine max
  Clone ID: 700941253H1
cgcatatgcagaacttgcacctgctttgtctgatctgaatgttcttgttgagacctactttgctgacatccctgctgaggcgtacaagaccctcacatctctgaatggcgtcactgcatatgggtttgatttggtccgtggaacccatactcttgatttgatcaagggtggatttcccagtggaaaatacctctttgctggagtggttgatggaaggaacatctgggccaatgaccttgctgcttctctcactacat

SEQ ID NO: 27508 - DNA, 121 bp, Glycine max
  Clone ID: 700940955H1
tgtggcaagtggactagccagaaggtgcattgtgcaagtgtcttatgccattggtgtgcccgagcctttgtctgtctttgttgacacctatggcaccgggaagatccatgataaggagatt

SEQ ID NO: 27509 - DNA, 234 bp, Glycine max
  Clone ID: 700891361H1
cgaggctgttcagaaggctgctgctgcattgaagggttcagatcatcgccgtgcaacaaatgtcagtgccagactggattctcaacaaaagaagctcaaccttccaatcctgccaaccaccactattggatccttccctcagactgtagaactgaggagggtacgccgtgaattcaaggctaacaagatctccgaggaagagtatgtaaagtcaattaaggaggaaattcgcaa

SEQ ID NO: 27510 - DNA, 233 bp, Glycine max
  Clone ID: 700893420H1
tggagaaccagagagaaatgatatggttgagtacttcggtgagcaattgtcaggctttgccttcactgttaatgggtgggtgcaatcctatggttcccgttgtgtgaagccaccaatcatctatggtgatgtagccgcccaaagccaatgactgtcttctggtcatctctggctcagagctttaccaagcgcccaatgaagggaatgcttaccggtcctgttaccattctcaa

SEQ ID NO: 27511 - DNA, 235 bp, Glycine max
  Clone ID: 700890955H1
aaacaacaggataatgcacagaagattgctgagttccttgcctcccatcctcgagtgaagaaagtgaattatgctggcttgcctggtcatcctggtcgtgatttacactattctcaggcaaagggtgcaggatctgtgcttagcttcttgactggttcattggaactttcaaagcatattgttgaaactaccaaatacttcagtataaccgtcagctttgggagtgtgaagtccc

SEQ ID NO: 27512 - DNA, 234 bp, Glycine max
  Clone ID: 700889805H1
gccatttgggagttaggttctgcacgctctgcttccagcgagtgttctttcttcgtttcaacaccttaatttgcacacgctgcttcttcagcttgagaaatggcacaagaaacctttctattcacactgaatctgtaaacgagggtcaccccgacaagctgtgcgaccagatctctgatgcagtgctcgatgcgtgccttgaacaggaccctgacagcaaggttgcctgtgaga

SEQ ID NO: 27513 - DNA, 235 bp, Glycine max
  Clone ID: 700890067H1
ccaagccccactcaaccaccacaccactctctctgctcttcttctacctttcaagtttttaaagtattaagatggcagagacattcctatttacctcagagtcagtgaacgagggacaccctgacaagctctgcgaccaaatctccgatgctgtcctcgacgcttgccttgaacaggacccagacagcaaggttgcctgcgaaacatgcaccaagaccaacttggtcatggtctt

SEQ ID NO: 27514 - DNA, 257 bp, Glycine max
  Clone ID: 700808455H1
ccaagccccactcaaccaccacaccactctctctgctcttcttctacctttcaagtttttaaagtattaagatggcagagacattcctatttacctcagagtcagtgaacgagggacaccctgacaagctctgcgaccaaatctccgatgctgtcctcgacgcttgccttgaacaggacccagacagcaaggttgcctgcgaaacatgcaccaagaccaacttggtcatggtcttcggagagatcaccaccaaggcc

SEQ ID NO: 27515 - DNA, 248 bp, Glycine max
  Clone ID: 700894462H1
tctctctgttctcttctacctctcaagtttttgaagtatagagatggcagagacattcctatttacctcagagtcagtgaacgagggacaccctgacaagctctgtgaccaaatctctgatgctgtcctcgacgcttgcctcgaacaggacccagacagcaaggttgcctgcgaaacatgcaccaaaaccaacttggtcatggtcttcggagaaatcacgaccaaggccaatgttgactacgagaaga

SEQ ID NO: 27516 - DNA, 232 bp, Glycine max
  Clone ID: 700891612H1
agtggacttgccagaaggtgcattgtgcaagtgtcttatgccattggtgtgcctgagcctttgtctgtgtttgttgacacctatggcactgggaagatccatgataaggagattctcaacattgtgaaggaaaactttgatttcaggcctggtatgatctccatcaaccttgatctcaagaggggtggaaataacaggtttttgaagactgctgcctatggacactttggaa

SEQ ID NO: 27517 - DNA, 232 bp, Glycine max
  Clone ID: 700943788H1
aaaaaagaacagagagagaagaatgaaatctatctatcttcttatccgaagtctgggaggccaataggaagcacgccagctgctacgaatggtgaataaaagacaaaagaaacaaactgctacatagcatacagtctgtcttctcttctcttctccggttatggcgtccgccttgggcacttcttcaattgcggttctgccttcgcgctacttctcttcttcttcttccaag

SEQ ID NO: 27518 - DNA, 254 bp, Glycine max
  Clone ID: 700945376H1
ggcgaaactcgagagtgtaaggttttgcatttcatttgacgaagagtgagagagtcttatctgtcgtctctgatctctgatcgcatcttcattccgaaaatggctgtttcggctatcactggagcgaggctaactctagggatgtctctttcctcttccacgcgatcacgaacccatgcaatggccgtatctatcgaccccaagaccgataacaaactcactcttaccaagtccgaggaagctttcgctgcggc

SEQ ID NO: 27519 - DNA, 248 bp, Glycine max
  Clone ID: 700893754H1
tcggaattcagcgcgagggatagcaatcctgctaaagtaagcaatgaatttgtggacaaccttattaaagatggtgatacattgggtatcaaatatgaacaaatgacatatacgtcagagtacttccctgagttgatggagatggctgaaaaattaattcgccagggtaaagcatatgttgatgacacaccacgtgaacaaatgcaaaaagagagattggatggcatagattctaaatgcagaaataa

SEQ ID NO: 27520 - DNA, 247 bp, Glycine max
  Clone ID: 700892403H1
gcaagctagatcccacagtgtatggtgatcaaactagtacaataaccaaagaacacttagagatcaaccttggtggactctctgtggaacaggcactgagtggtaacagattgttcatattagatcaccatgatgcattcatcgcatatctgaggaagatcaatgaccttcccactgcaaagtcttatgccacaaggaccatccttttcttgaaagatgatggcaccttaaagccattggccatcga

SEQ ID NO: 27521 - DNA, 238 bp, Glycine max
  Clone ID: 700894874H1
cttcggcgggatgaagctgttcttcccgaacgtgctgaagtggatcggacgcgccggggtgaagctccacgcgcgcctggcggaggagattcgctccgccgtgagaggcgccggcggggagatcaccatggcggcgatggagaacatgccgctgatgaagtcggtggtgtacgaggcgttccgcatcgacccgccggtgccgttgcagttcgggagggcgaagagggacttgatcatc

SEQ ID NO: 27522 - DNA, 258 bp, Glycine max
  Clone ID: 700890131H1
caaatgataagaatgattccgatcttggttgctacatttgtgcctagtacaatgatggctcagataaataccctttttgtgaagcaaggtactactcttgacagacacctcggaagcttcaaaattcccccagcaagtttggctgcatttgttactgtgtccttgcttgtttgcattgtgctctatgatcgcttctttgtgaagatcatgcaaaggtttaccaagaaccccagaggcattacccttcttcagaggatg

SEQ ID NO: 27523 - DNA, 232 bp, Glycine max
  Clone ID: 700889069H1
gttgagtagccttttactcctagagaaattttgtagctatagagaggaagccaaagagaccttgattatctttattataataataatggaccaggcgaccacgttcaacaaatatgcctttgcttgtgctgcagttgcttcaatggtatccatcatatctggctatgacacgggtgttatgagtggagcaatgatattcatcaaggatgacattggaatcagtgacacccaa

SEQ ID NO: 27524 - DNA, 255 bp, Glycine max
  Clone ID: 700892523H1
ggagagctctgctagagccaggagtcaagcgtgcattaattgttggagtaggacttcaaatacttcaacaggctgctggtataaatgggtttctctactatgctccccagattcttgagaaagcaggagtaggggatcttttatcaaatttgggccttagttcagcatctgcttcttttcttgtaaatatcattacaacattctgtatgcttccttgtatagctattgcgataagactcatggatatttctggca

SEQ ID NO: 27525 - DNA, 257 bp, Glycine max
  Clone ID: 700893019H1
ttctcttgttcctgcttctttctcggttcttaaagagggaaagagtggtgtgtctctcaaggactccaccttgttcggtctttcattttcagaacctatcaaagctaacttcagctcttctgcattgaggttcaagagggaattcgaacaaaagctctgtgctgtgagggccgaaacagtggctacagcctctccagcagttaccaagtctacaccagaagggaagataacattgaggaagggcagtgttgtgataa

SEQ ID NO: 27526 - DNA, 243 bp, Glycine max
  Clone ID: 700888819H1
ggctgcttctcttgttcctgcttctttctcggttcttaaagagggaaagagtggtgtgtctctcaaggactccaccttgttcggtctttcattttcagaacctatcaaagctaacttcagctcttctgcattgaggtgcaagagggaattcgaacaaaagctctgtgctgtgagggccgaaacagtggctacagcctctccagcagttaccaagtctacaccagaagggaagaaaacattgag

SEQ ID NO: 27527 - DNA, 252 bp, Glycine max
  Clone ID: 700892106H1
ctagtacatacattcccctaaccaagttttaagtttttctcaacagaatggaagcaaccaacagaagctcttcctccacttcctcttcctctgattgctgctcttccgagtccaaccccaacaagcccgacagaatcaaaggcccatggagcgccgaagaggatcggatcctgaccggactcgtcgaacgatacggcccacgaaattggtccctcatcagccgctacattaagggaaggtccggcaagtcat

SEQ ID NO: 27528 - DNA, 262 bp, Glycine max
  Clone ID: 700943237H1
ctatcttctttcgggttcacttgaccgagagtaagagactaatccctcgagatactgatactgaaacctatcgttcttcacatcataaccatgcgttccagcaacggtgcatcaagcagcagagcctccaatgctaacacagggcgccaccctgtgtaccgtggagtgaggcgtaggagtagtggcaaattggtttctgaaatccgaggacccaataaacctaacaggatttggttagggaatttgccacacctgaaatggc

SEQ ID NO: 27529 - DNA, 248 bp, Glycine max
  Clone ID: 700944604H1
cctctgtctcctcctcaatcttcattgtcctgatctttcccttggtgacaaaccaagactaacacacacagaacatagcttgtgttggtgaggtgagaagataaagaaagaatggcatttgcaggaacaacacagaagtgtatggcctgtgacaaaaccgtttatctggttgataagttgaccgcggataaccgagttttccacaaagcttgcttcagatgccatcactgcaaaggacccctcaagct

SEQ ID NO: 27530 - DNA, 244 bp, Glycine max
  Clone ID: 700944587H1
gaaaaagtgttggaagagagaaggaaggccttccaagcactcaagactgaagagagaaaggtggacactaaagagtttgaatccatgcaggccttatcaagcaagaaagataatcatgacatattcattaaactgggatctgataaagataagcgaaaagaggcttttgagaaggaagaaaaatccaagaagtccgtgagcatcactgagtttctgaagcctgctgagggggaagcatactata

SEQ ID NO: 27531 - DNA, 247 bp, Glycine max
  Clone ID: 700893088H1
aagatatccatggctgagtccgacaacgagtcaggaggtcacacggggaacgcgagcgggagcaacgagttgtccggttgcagggagcaagacaggttcctcccaatagcaaacgtgagcaggatcatgaagaaggcgttgccggcgaacgcgaagatatcgaaggaggcgaaggagacggtgcaggagtgcgtgtcggagttcatcagcttcataacaggagaggcttccgataagtgccagaagg

SEQ ID NO: 27532 - DNA, 241 bp, Glycine max
  Clone ID: 700890768H1
tgcgttctggtcgtttggatcgtaaaattgagtttccacacccaagtgaagaagcaagagctcaaattctacagattcattcaaggaagatgaatgttcacccagatgtcaactttgaagaacttgcccggtccacagatgatttcaatggcgcacaactgaaggctgtctgtgttgaggctggcatgttggctctacgccgtgatgcaactgaggtgaaccacgaggattttaatgaagg

SEQ ID NO: 27533 - DNA, 231 bp, Glycine max
  Clone ID: 700943357H1
attacctccaccccgatctcaaacgagggaagctcacaccccaagaagaacacctcgtcatggaccttcattccaaatggggaaataggtttgagaaccatgcagaaataattaaactataagctacctaccttccaatcatcatcactcataattttaattaattttttcctaccatacagtactattagtattaattagttctttgtcttatgtttttgttttttaata

SEQ ID NO: 27534 - DNA, 284 bp, Glycine max
  Clone ID: 700942619H1
gttgttaccatttgctcccagtacagagcttaaccgagcttcacaaagatgaatcgggaaaagttgatgaagatggccggttcggttagaactgggggaaagggtaccatgagaagaaagaagaaggctgtccacaagacaacaaccacagatgacaaaaggcttcagagcaccctgaagagaataggggtgaatgccatcccggctattgaggaggtcaatatctttaaggatgacgtagttatccagtttctaaatcccaaagttcaagcatccattgctgc

SEQ ID NO: 27535 - DNA, 274 bp, Glycine max
  Clone ID: 700945055H1
gctgcaagcaatcctaattcctattctcctatccttttacataactctaaagttagagaaaatagagcaatttcacaacacaactcttataattgtgagttaagtatgggaaggtccccttgctgtgagaaagctcacacaacaaaggtgtctggactaaagaagaagatgacagactcatatcttatattcgagctcacggagaaggctgctggcgttcactccccaaagccgccggccttctccggtgcggcaagagctgccgtctccggtg

SEQ ID NO: 27536 - DNA, 265 bp, Glycine max
  Clone ID: 700944006H1
gggaagtccttatcttatagtatcggttagctcttccatttcgcaatccgttccaaaccacataagcttcaacaaagatggatgtagaaaagttgaagaagatggccagttctgttcgaactggtgggaagggtactatgagaaggaagaagaaagctgtccacaagactactactacagatgacaaaaggcttcaaagcaccctgaagaggataggagtgaatgctatccctgcaattgaagaagtcaacatctttaaggatga

SEQ ID NO: 27537 - DNA, 268 bp, Glycine max
  Clone ID: 700942949H1
gaaagaattgggggaatggagaacaaccagcaacaaggcgctcaagcccaatcgggaccgtaccccggcggcgcggtggaagtgcaggtgcaggtgcaggtgcaggcgcggccccgttccagcacctgctccagcagcagcagcagcagctgcagatgttctggtcgtaccagcggcaagagatcgagcacgtgaacgacttcaagaaccaccagctccctttggcccgcatcaagaagatcatgaaggccgacgaggacgtccgcat

SEQ ID NO: 27538 - DNA, 251 bp, Glycine max
  Clone ID: 700944946H1
ctctgctctcctcttgcttttgatagagaagaaagaagcgagaagatgtcagacgctgtctgcagcgactgcaagaggcagacggaggtggtgtttgaccactctgccggcgacacggtgtgctcggagtgcggcctcgtactggagtcccactctatcgacgagacctctgagtggcgtaccttcgccaacgagtccggtgacaacgatcccaatcgtgtcggcgggccctccaaccccctcttcaccga

SEQ ID NO: 27539 - DNA, 252 bp, Glycine max
  Clone ID: 700941440H1
atttgggggaggtgagtgattctgtttgggaggacttgctgaaccaagacttggttgctggggaccctgaagaggaagttgtgattggtgatttttcacaagttgatgttcctgtggaggatttgattgcggatgctgatgagtggagtgaggatttgcagaaccttgtggatcacatgggttatcttgggtccaaaccgtagtgggaaggaaggattttcattatctagggggttcagataaaactttccc

SEQ ID NO: 27540 - DNA, 134 bp, Glycine max
  Clone ID: 700942877H1
gaaagaacacaccaacaaaggagcttggaccaaagaagaagacgaacgcctcatcaactacatcaagctccatggtgaaggctgttggagatccctccccaaagctgctggcttgctcagatgtggcagagttg

SEQ ID NO: 27541 - DNA, 189 bp, Glycine max
  Clone ID: 700944108H1
ctcaacacttacggattcaggaaagttgtgcctgatcggtgggagttctcgaacgattatttccgccgaggcgagaagcggcttctttgcgaaattcagcggcggaagatctcatcgccggcgccgtctccgactgcgccgacgacggttacggtgccgatgccgttgaccgcgataccgatcatatcg

SEQ ID NO: 27542 - DNA, 272 bp, Glycine max
  Clone ID: 700944823H1
gtgaaacgtggaacatgagccaccatcaagtccatgctcttcctcctcaactagcagcaacttttacagcaacaaacgttattgatactacgaattatctgccaccattgatagagaacgttgaaaacatggtgccaaatatggaagtacagtcttgtagtatagacgaggaaggagaaatggcactagagtgtttgcggagacaagatttgaatgagtgggtggagaatcaacaacaatgtcccagctttcttttctgggacaatattaat

SEQ ID NO: 27543 - DNA, 243 bp, Glycine max
  unsure (1)..(243): unsure at all n locations
  Clone ID: 700944875H1
gtggtaccgttgggagcccagtgtctgctaacaaaccaaacgtgagagataatcaagtaaaaggggtcgccaccactacaagtggttcctcacgtgagccatctgatgaggatgatgaagcaggtccttgtgaacaaagcacaaacgctattgatatgaagcgccttagaaggaaggtttctaatagagagtctgcaaggaggtccaggagaaganaacaagcccatttggctgacctggagt

SEQ ID NO: 27544 - DNA, 250 bp, Glycine max
  Clone ID: 700944913H1
ctcgagccgaatcggctcgagatcctgaactatatgaagacatcggtatcaagcctcctaagggggtcattttatatggacgaacctggtactgggaagaccttgcttgcgaaggccgtggcaaactcaacatcagcaacattcttgcgcgttgttggtagtgaattgataacaaagtacttgggagatggcccaaaacttgtgagagaactttcagagttgccgatgatctttctccttctattgtatt

SEQ ID NO: 27545 - DNA, 245 bp, Glycine max
  Clone ID: 700894554H1
agaaaacagaagaagagaaaggacccaaatgcacccaagagggcaatgtctggtttcatgttcttttctaaattggaaagagagaatctaaagaaaactaatcctggaatttcatttacggatgtgtcaagagtacttggagagaaatggaaaaagttgtcagtggaagagaaggaaccatacgaggcaaaggcacgtgaagataaaaaacgttacaaggatgagattagtggtacaagaatccg

SEQ ID NO: 27546 - DNA, 277 bp, Glycine max
  Clone ID: 700942660H1
gttcaccagaagcaaccacaacaagcacttctcttatttcctatcacaccctattacagattcacaagcgcagacacttcaaatgggtctggaagctcttcaatcacccagaactgccactccatcgtttagtccctttgaagaaaccaacctcagttacttggagacaccgtggaccaaaggaaagcgttctaagcgtagccgcatggagcagcaactgcaacactcttcatgcaccgaggaagagtacctcgctctctgtctcatcatgctcgct

SEQ ID NO: 27547 - DNA, 249 bp, Glycine max
  Clone ID: 700945128H1
gggacacctaaaattgctaaaccagaaaaaaccggggaagagaaacctgcagcaaccaaagtctcaagtatgtttggtggaactagagataaatgtgcgggttgtcagaaaacagtgtatcccactgaaaaggttaccgtgaatggaactccttatcacaagagttgtttcaaatgcactcatggagggtgtgttattagtccctccaactacattgcacacgaaggcaaactctactgcaagcaccac

SEQ ID NO: 27548 - DNA, 238 bp, Glycine max
  Clone ID: 700891618H1
ctaaagagcagctgcagacaaacaagcctcttttggggttggattagctggtgagatccatggaagatataggtccgaattcatgcacaaggccagtgacagagaagaaagcaagaccccaagaacaattgaattgtccaaggtgcagttcaaccaacacaaagttctgttattacaacaactacagcctcacacagccaagatacttctgcaagacttgtagaaggtattggacaga

SEQ ID NO: 27549 - DNA, 259 bp, Glycine max
  Clone ID: 700944619H1
ataccactgctgttgtaatccttctcaaagtggtattggagtggttaaacaaccgatggaaggttcaaagcctcctcctcctccgcctcctcctatgttggagagaagggcaaggcctcaaaaggatcaagctttgaactgcccaaggtgcaattcaacaaacaccaaattctgctactacaacaactatagcctctctcagccaaggtacttttgcaagacatgtagaaggtattggactgagggtggttctctcaga

SEQ ID NO: 27550 - DNA, 260 bp, Glycine max
  Clone ID: 700944719H1
tgcttgtttcaggtgcactcatggaggatgtgtaattagcccatcaaattatgttgcccatgaacatcgtctttattgcaggcaccatcatactcagttgttcaagcagaaaggtaacttcagccaacttgacagcaagaaaacgatgaaggggtgacggagaacagaataactgagtaatggctagcattcaactttcaagttacattggcaatacaagttcagttggtgactcattttcaggcatcaaattcccttgt

SEQ ID NO: 27551 - DNA, 251 bp, Glycine max
  Clone ID: 700888570H1
cgaggagaagtccaagttatacaaagaagtctccttgcagcacttgttcttaatgaacaacctgcattatatggctgaaaaggttaaggggtctgaactcaggctcatacatggagatgaatggattcgaaagtgcaattggaagtttcagcagcatgcaatgaaatatgagagagctagttggagtcccattctcaacttgcttaaggatgagggaattcatgttccgggtacaaattcggtctcaaaaa

SEQ ID NO: 27552 - DNA, 240 bp, Glycine max
  Clone ID: 700888837H1
ctcgagtggagggtgatgaagatgaagatgactctgatgatatcgagaatgagttcaattatgcccaaggaaaagccaaggccaggcgccagtgggaagatgacgctgacctgtcgtcgtcttctagacgcgaatctcaacagccaattcccctcctcaccaatggccaaacgatgtctggtgagattccgtgtgccacacctgatactcaatctgtgcgaactacttcaggtcctttgg

SEQ ID NO: 27553 - DNA, 248 bp, Glycine max
  Clone ID: 700944678H1
gagtttcagtccatgctggaaggactcgacgaagaagggtgcgtggaagaaccagggcaccactctgagaagaaacgacgactaagcgtggatcaggtgaaggctttggagaagaacttcgaagtagagaacaaactcgaacctgaccgaaagttgaagctggcacaagaacttggcttgcaaccaagacaagttgcggtttggttccaaaaccgtcgtgccagatggaagacaaagcaattggaaag

SEQ ID NO: 27554 - DNA, 230 bp, Glycine max
  Clone ID: 700891680H1
cgagaacagagacatgcagcagaggctcccacctccgacatggctcaacaacgttaacgcgcgtcaacagaatttcctcgacaccgagaagagcgtggatcggaacaaccgaagcgagagcaattgcgaatccgaggatttgagggaatacaaagcggacattctaggtcaccctctctacgatcaactgttgtcggcgcacgtctcgtgcctcagaatcgccacgccgg

SEQ ID NO: 27555 - DNA, 275 bp, Glycine max
  Clone ID: 700943207H1
tggacctactgaagctgataagccaatcataatagagcttgctgttgcagccatggaggagctcattggaatggcgcaaatgggtgagcctctttggttgactaccctggatggcaccactggctcaacgatgatgagtacatcaggtcttttcctcgagggattggtcctagacccgttggtctcaagtgtgaagcttctagggagactgctggtttgatcatgaaccatggtaaccttgttgagatcctcatggacgtgaatcaatggtccac

SEQ ID NO: 27556 - DNA, 230 bp, Glycine max
  Clone ID: 700943363H1
tcgagccgaatcggctcgagtggagaaaacagtggtgggctatcccaatgacgatgaaccctttggtaacttcccatcatgcaacaaatcctagtaatcctagtaataatactaataataatgaaaacacaaactgtctcttcattcccaactgcagtaacagttctggaactccttctatcatgctccacaacaacaacactgatgatgataacaacaaaaccagcact

SEQ ID NO: 27557 - DNA, 227 bp, Glycine max
  Clone ID: 700945149H1
ccgtctcttggcagcttacgtcaattgtcagaaggttggggccccgcctgaagtggtggcaaggttagaagaagcatgtgcttctgcagcgacaatggctggtggtgatgcagcagctggatcaactgcataggtgaagttccacctttggaccagtcattgaggcttactgtgagatgctcacaaagtatgagcaagaactctccaaacccctaaaggaagccatg

SEQ ID NO: 27558 - DNA, 220 bp, Glycine max
  Clone ID: 700893970H1
gcaaatacagcggccattttagcggtttgagaaaggaatttctaaaacgaagaaaaaagggtaagctaccaaaggatgcaaggatagcactcatggactggtggaacacccatcatagatggccttatcctacggaagaggagaaagtgaagttgtcagaaattactggactggatcaaaagcagatcaataattggttcatcaatcagagaaaacgtca

SEQ ID NO: 27559 - DNA, 249 bp, Glycine max
  unsure (1)..(249): unsure at all n locations
  Clone ID: 700888137H1
gnaattgtttggnagtntgctttagtctccgcaattttctgnttgnttcttcactnttttttcctttgtctcctcctcaatcttcattgtcctgttcttcccctaggtgacacacacacgcagagatcatagcttgtgttagtgaggttagaagataaagaaagaatggcatttgcaggaacaacccagaagtgtatggcctgcgacaaaacggtttatctggttgataagttgaccgcggataaccga

SEQ ID NO: 27560 - DNA, 249 bp, Glycine max
  unsure (1)..(249): unsure at all n locations
  Clone ID: 700888138H1
gtgatgaaattgcttctcaatataaggctggtggatatatacctcagcnagatggagntggagatgctgattctcaaatttttgaaattgaagtntatggagggggaatctccattgatgcannctacncgacttctaatggaaaaatgccagcacattcagacaggccagcttctcagattcctcaatttgatggaccaattccttacgatgatgatgtggtttnnactccaaatatgtacaatatgg

SEQ ID NO: 27561 - DNA, 245 bp, Glycine max
  unsure (1)..(245): unsure at all n locations
  Clone ID: 700888167H1
ctgaggaagatcagggaaaanctgtaggttgagatggttcaatcaattggacccaagaataaacagaagtcctttcacggaggaagaagaagagcgtcttctagcttctcaccggattcatggcaatagatgggcagtaattgcaagacacttcccaggacgaactgataacgctgtcaagaatcattggcatgtgatgatggcaaggattcggagagaaaggtctaaaaattatagtccaaaac

SEQ ID NO: 27562 - DNA, 245 bp, Glycine max
  unsure (1)..(245): unsure at all n locations
  Clone ID: 700888183H1
cnaaagctctttgttgggacccgaatttgttgaattttcggaacccccatctttcccaaattttgagttggctgcaatagctacagacattagtaaccttgcttggcttaaaagtggattggagagtagtagtgccaaaatgatgggcaacacctctggaagggtagtatctaatggatctcaagtacatattggccattaaaatgccaaatagatcatcatcctattctgagtgaggactggat

SEQ ID NO: 27563 - DNA, 256 bp, Glycine max
  Clone ID: 700888203H1
gtccgaattgtgaaagtaagcaaagatggctttcacggaatcgtctctcctccttccttcggtttcaggaaccaacaagaacaagaacaaggttccagaagacaaatggtatttagcctacattgtgtattttacctgggtctcggttaccttctcccatggaacgctttcatcaccgccgttgattacttctcctttctctaccctgacgccagcgttgaccgcatcttcgccgtggtttacatgatagtcgggc

SEQ ID NO: 27564 - DNA, 200 bp, Glycine max
  Clone ID: 700888204H1
cttcaaaactgggttcttgatcggcggtaacattttcgttgctgtttgtttttgatgagtactgttttttgttttgatggtaaaagtctgagattttcaaattcacaagcagccatagggttttagtccatttccttgctgctgaggagggatgtcttaaatttgcatttaatttataaggaagttttgttaactgtaac

SEQ ID NO: 27565 - DNA, 256 bp, Glycine max
  Clone ID: 700888225H1
cttgctactgagtttccacactgcataccttaggtcttccgaattcgaagttaatttgcaagatggctaaggaaaaggctcagatcaacattgtggtggttggtcatgtggaccctgaggaggcaaccaccattacgagctgaagaagcctgttgtggagaaagaagctccagggcatgccatatgagggcatgcacgtacggcctcggaggggaaccagaaaattatgttaacaaaataatctggaaccctaatg

SEQ ID NO: 27566 - DNA, 256 bp, Glycine max
  Clone ID: 700888309H1
cattgagcaatcaaaaagaatcttgggagatcagggaggtcatcgtcgtcatttctgcgctcaagattaacataacgacctcgcgcacccaggaacagggtattgtgttgtgtagctgaaggacatggagagaagcaatccggtgaggaagccacacacttcaactgcagatctgcttacgtggcctgaaactcccatttctgattccccagctcctccttcctccgccgttcgttctcaccagccgtcggatggg

SEQ ID NO: 27567 - DNA, 253 bp, Glycine max
  Clone ID: 700888324H1
gatagatttgatttttgtttgataccatttccttgaagtgaagcaattgataaatttattgcgattgagaatcggagaagagaagcaaaataaaagggatgcgagtggcgcgagaagaagcaatgggtggtggaaagcggaacacggtggagacattcttcttagccactctaattctctggttcgcttccctttgtttccagattttgttgaacaagcgctgggagcttctctctgtcatcgcgggttctat

SEQ ID NO: 27568 - DNA, 247 bp, Glycine max
  Clone ID: 700888355H1
ctttacgatggtaactctttgcaatattggatatgtagatatcgttcctgactccacgtttaccaagatatttacatgtgctttcattttggtgggttttggatttcttggttttctgctcaatggattggttgcatacatttgtgatatacaagaggccttcttgttgagcatggtggatgagaatagatataagaaaattctcaggacttatatggttgatgaagagaaaggaagaatgaggata

SEQ ID NO: 27569 - DNA, 248 bp, Glycine max
  Clone ID: 700888380H1
gcttcagctcccagttcagccttctttgggaccagcttgaagaaggttattgcctcaagggtccccaacagcaaggtttccggtggaagcttcaagattgttgctgtagaagagaagaaagagattgaagagacccagcagaccgacaaggacagatggaagggtcttgcctatgatatctcagacgaccaacaagacatcacaagaggaaagggtttggttgactcccttttccaagctccacagga

SEQ ID NO: 27570 - DNA, 146 bp, Glycine max
  Clone ID: 700888381H1
catatacaagttctaattcctgtcttttatctaaattattatagagcatatttaatttcagtatatatattaaattgtaagcattatttggacatgatttgttttatgatggcattttagagaaactgttcaatctttctttttgt

SEQ ID NO: 27571 - DNA, 255 bp, Glycine max
  Clone ID: 700888408H1
ctccgctccaacacaggggaaaatgagggagatccttcacgtgcagggagggcaatgcgggaaccagatcggttccaagttctgggaagtggtgtgcgacgagcacggcatagatccgacggggaagtacgtcggaaactcagatctgcaactcgagcgcgtgaacgtctactacaatgaagcctcgtgcgggcgcttcgtgccacgcgcggtgctgatggacctggagcccggaaccatggacagcgtgcggac

SEQ ID NO: 27572 - DNA, 245 bp, Glycine max
  Clone ID: 700888436H1
aatggattcacttgcaaagaagcatccaaggtaaatgcctcagatttcttctcaaacatactagccaaaccaggagccaccaacaacacatttggctccttggtgactggagccaacgttcagaaagtcccaggactcaacacacttggtgtctctctgtcaagaattgactatgccccaggtggcatcaacccccctcacacccacccacgtgccacagagcttgtgtttgtccttgaaggcca

SEQ ID NO: 27573 - DNA, 249 bp, Glycine max
  Clone ID: 700888440H1
ttggaaaccaaaaagttcgtagcttttcatagagctttcaagtaattagccccgtgaaatatttttctttttacgcaagatgacaccacgggccttctaactgaaacaagcaataataataacaggccaaggaaaaactcagcagcattctgttagaaggaaaacacttatctctattagcatatttgtctccattaatctcttacttcagtcctctatcaggaaattcctaccaaacaaaattcattt

SEQ ID NO: 27574 - DNA, 147 bp, Glycine max
  Clone ID: 700888449H1
gccgatcagaaacatcgccgtcggaaggcctgaagaggcgactcaccccgacacgttgaaggcggctttggctgagttcatctcaaccttcatcttcgtgttcgccggctcaggctccggcatcgcctacaacaagctcaccgacaa

SEQ ID NO: 27575 - DNA, 238 bp, Glycine max
  Clone ID: 700888484H1
ccatatcttccaaagcaccggttctgaaagttctcttgcctcataagtttttatagagatgtcaagtaaatttcacagcatatcgtcattgggagaatatgcaaatttggttggaggagtagtctgttgtaatgaaaaatataaggccacatgagctgacatggctgtaagcttgcagtgttccattccttctttaaggcttgagctacaaatgcaattcagaatctcatgcattaat

SEQ ID NO: 27576 - DNA, 243 bp, Glycine max
  Clone ID: 700888489H1
ctcaacaatggatcatggcagagaaaactcaaaggtaccctttggagaacaagaacaatacacttttccatatttttcctacccttctttcagcctcttcactccaaataatcacacccttttaagcacattctgccccatgttttctaccatggaattcaatgatctgaacaattccaattgcttcacaccaaatgaagactcatctggctattgtgatgttcttggggagcattctagtgc

SEQ ID NO: 27577 - DNA, 259 bp, Glycine max
  Clone ID: 700888502H1
ccacaactcccggctattcaaagaactgctccagggcgaacttcaccttctttgcaagcccctgctccacaggttggtaatcgacctggtagtgggtctcaagcttcatctccccccaaaacatccagcgcgattagttcattggattctggagaaattgatgcagcttcagattccgataaattgaagggtgcattggttgggaagggaaggggagctccacagggtagtggaaggggctcttttgtttatggtggag

SEQ ID NO: 27578 - DNA, 261 bp, Glycine max
  Clone ID: 700888506H1
tttcattctaagcaggtatctcttagagttccagcatgtaactatgttgtaagcaccattgcctatgagttgaatgttctccgtgcaagagggccaaggagaatgcactgcaccatgaactccatatctgtctcagctgttcaggaagggggcaatgctccaactcctacatcttttcctcaaatcattgacgagcctttttctccctcaccagcactgaaaggaaaaggtccaattagagatctagacaatgcaagcctc

SEQ ID NO: 27579 - DNA, 261 bp, Glycine max
  Clone ID: 700888508H1
ctccgctccaacacaggggaaaatgagggagatccttcacgtgcagggagggcaatgcgggaaccagatcggttccaagttctgggaagtggtgtgcgacgagcacggcatagatccgacggggaagtacgtcggaaactcagatctgcaactcgagcgcgtgaacgtctactacaatgaagcctcgtgcgggcgcttcgtgccacgcgcggtgctgatggacctggagcccggaaccatggacagcgtgcggaccgggcc

SEQ ID NO: 27580 - DNA, 258 bp, Glycine max
  Clone ID: 700888517H1
cccaacacaaatcttagccgccattgatttttcctcttccatttctcttactttctcagcctttttcgattacccatttggttatttcgccctaatggctcttgctccatccaaagtttccaccttttctggtttttctcccaaacccagtgttgggggtgctcagaaaaacccaacttgctctgtttctctgagctttttgaatgagaaacttggaagcagaaaccttagggtttgtgcctcaacggtgcctctcac

SEQ ID NO: 27581 - DNA, 258 bp, Glycine max
  Clone ID: 700888521H1
cagggttcctccgtcggtggtgatttcggggagtacaagcctcttcattccgctgttgacgccaagcttcaggccatttgcgaaggcctggctgagctgcagaaacaggggaagaccgagaagcctccgaggaagtcgcgttccaaactcgcggagaaggttgtttccgacaaggagaacaacaactcttgtaaggtggaagctgcgtcctggtcgtcggaaggttcttcgccgctttcggatctgacgtttgctgac

SEQ ID NO: 27582 - DNA, 124 bp, Glycine max
  Clone ID: 700888535H1
ttattttacttaattcgtgtgtgcttctcactttctcttcctcctctccattctattttgtttcttctatcctcatatgtaatttttttacatgatcaattaaacgtgatacaaaattattctt

SEQ ID NO: 27583 - DNA, 256 bp, Glycine max
  Clone ID: 700888538H1
cgaatacgatgaatgcaagtccgttagttgccaagaagcatacttcaaacggcgagattaggcaggcgcggcttcaagaatttcttagatcaagtgacacagtaagactaatgttaaaagcttcaactgtgaagctatcttcgtatcgagcatggccaaatatgcatgacagtcggtttgcgctttacaagttgccattgcgggttcccaaagatgaccaagaatatgctggtttatggggaggaacttttggttg

SEQ ID NO: 27584 - DNA, 256 bp, Glycine max
  Clone ID: 700888546H1
ggaatctttccaaactaaaaatgctgaacatgtatttaacacagttatgacatatttgcctcaagattttcgaggaacactaattagacaacaacgggaacgctcagagaggaataagcaagcagaggttgacactttggtaaattctggtggtagcatacacgaccggtatgctttgctgtggaaacagcaaatggacaggagaaggcaattagctcagcttggttctgcaacaggagtctataaaacacttgtg

SEQ ID NO: 27585 - DNA, 253 bp, Glycine max
  Clone ID: 700888549H1
gggacagattatatcagaatggaccgccctgcatctgctcgggcccctcgatacttacatggacatacaaaaaactttccaacattaccaccacatatttttaagaaaggtgccattttgaagcatgcaaagccaaaactagatagtaggtttattttggatgttaatgtgatagatggtacaatgatggctccatctactgcatttacaaagatctggcggatgcgcaataatggcactatagtctggcaca

SEQ ID NO: 27586 - DNA, 254 bp, Glycine max; identical to SEQ ID NO: 22480
  Clone ID: 700888558H1

SEQ ID NO: 27587 - DNA, 250 bp, Glycine max
  Clone ID: 700888568H1
caatggcctccattttcaagctctcaacgccatctccagctgcttccttatcagaagcgcttcgccccagagattctcgcttcctctccttcaatccttcttccaacgctattaattacaaaattaacctctccgcttccctccgatccattcactccctccctcttaaaacctccttgcggatcaaatgctcccaaacagatgggaatggaagtcctgcaaagaggacagtgcttcatgatctttatga

SEQ ID NO: 27588 - DNA, 249 bp, Glycine max
  Clone ID: 700888575H1
gactcatgcttggtactattttcttttgacctttcgtctcgaggatgagatgtttggtgaggttatgctgcctgggagcttggctcatgtatcctcggttgcagttgtggttaaggttgtcggaggtgggaacgggaagactctcactgtgtaccatgtgagcgcctgttatccatgctcttgtgaaatctgggtgatgaaagagtatggtgtggtggagtcttggaataaggtcttttcttttagtat

SEQ ID NO: 27589 - DNA, 246 bp, Glycine max
  Clone ID: 700888582H1
cactcttggtcgtaaattgggacagggccaatttggcaccacttatttatgcaccgagaattctacctccattgaatatgcctgcaaatccatctccaaaaggaagttgatttccaaggaggacgtcgaggacgttaggagggaaattcagataatgcatcatttagctggtcacaagaacattgtcaccatcaagggtgcttatgaggatcctctctatgttcatattgtcatggagctttgttc

SEQ ID NO: 27590 - DNA, 249 bp, Glycine max
  Clone ID: 700888584H1
gtggaatgttcaccaaacaagagattgatgaaattgtggagattggctatctgaatggcctctttgtgctggcacgctccattggtctgattgggcacacctttgaccaaaagcgattgaagcaaccactttaccgtcacccatgggaggatgttctctacacaaagtgagaaagttttgtgcgactgtaagaactttggcatgcttcaaattagcaatcttttgggaaatcatgcacatctgaaatat

SEQ ID NO: 27591 - DNA, 248 bp, Glycine max
  Clone ID: 700888587H1
cggcaacgaaaggctcttggtgtacgagtatatgcctcaagggacattaacgcaacacctgtttgattggggtgaaaatggctgtgctcctttgacttggaaacaaagagtagcaatagctttggatgtagctcggggagtggaatacttgcacagcttggctcagcaaagcttcattcacagggacttaaagccctcaaacatattgttgggtgatgacatgagagccaaggttgcagattttggtt

SEQ ID NO: 27592 - DNA, 248 bp, Glycine max
  Clone ID: 700888590H1
ggatcctttgaatgattcagttgttcctgatggctttaaagagtatattcaaccgatgcttaagcagcaactacgtaatgctaggctgtagttaattttgtggcaatgatgcttttggcatctaagaaatttacccagactattctgatttacaactcttaataaagttgtgtttgccagctagtaattaccatcgcaattaggtgtatctggaactggaactggaacaaactcatttatttattaca

SEQ ID NO: 27593 - DNA, 248 bp, Glycine max
  Clone ID: 700888591H1
gttggaggtgacatgttcgtgtccattcctagtgctgatgctatttacatgaagtggattctgcatgactggagcgacgagcactgcatcaagatcttgaagaactgcaggaaggcaataccagagaagacaggaaaagtcataatcgtggatcacgttcttcgacccgaaggcaacgaactcttcacagacgttggcatcgcattcgacatgatgcttctcgctcacaacgccggtggcaaagagag

SEQ ID NO: 27594 - DNA, 179 bp, Glycine max
  Clone ID: 700888638H1
ctctgtaatttcgattcagtaccttaaagatttcgtcaattctcaaatctacgacgatgagaagtgggccttcaatgcgaaattgctgcgtgctgctggagtgtttgcaggatcaatattacttatgcgaaactatggtgaccttatggcaatttgaaagtagaacagcaaattgtctg

SEQ ID NO: 27595 - DNA, 168 bp, Glycine max
  unsure (1)..(168): unsure at all n locations
  Clone ID: 700888658H1
ggcattacacacactgcacagcanttgnacntcactttcnnttgctcgcttaattncgtcaaatgtgcatttggacattncantanatgggcagcgagttcngaaggcttccccncnaangcaatttgggtttcaagccccnannganancngngtcaatgccggctc

SEQ ID NO: 27596 - DNA, 235 bp, Glycine max
  unsure (1)..(235): unsure at all n locations
  Clone ID: 700888743H1
gttaccatttgctcccagcactgagcttaaccgagcttcacaaagatgaatcgggaaaaattgatgaagatggccnttcggttagaactgggggaaagggcacctnagaagaaagaagaaggctgttcacaagacaacaaccacnnatgacaaaaggcttcagagcaccctgaannaataggggtgaatnccatcccggctnctgaggaggtcaatntctttaaggatnncgtag

SEQ ID NO: 27597 - DNA, 240 bp, Glycine max
  Clone ID: 700888822H1
cagtaccatgtttcttgttcggccttgtactcctgcttctggtgatgattctgctgaaaaggggcattttttgtttatccaaggtgctagtgtggccatgggtttatatattcttgctacaactctacttgacaactttatccacataagggacagtgtttcatatgctttgttggctgtgatgattcttcttctcttggctccacttgttatccctataaagatgacactgtgtcccag

SEQ ID NO: 27598 - DNA, 237 bp, Glycine max
  Clone ID: 700888826H1
agaagcttgcaaattttgatagggaacgtatcccagaacgtgttgtccatgccaggggcgctagtgcaaagggtttctttgaggtcacccatgacatttctcacctgacatgtgcagatttccttcgagcccctggagttcagacgcctgtaattgttcgtttctcaactgtcattcatgagcgtggtagccctgaaaccttgagggaccctcgaggttttgccgtgaagttttaca

SEQ ID NO: 27599 - DNA, 240 bp, Glycine max
  Clone ID: 700888828H1
gcagaagtcgcaacccaaccaaccatggcagcttctgatcccgacaagttgatggtcaaagctgataaactaacaagactcagtctcacgaggtggagtgcggattggaaaagtgctactgttctttatgagcaggcagctaatgggtttagagttgccaaggactatgagaatgctaaaatagcatatgagaaagcttcgaaaggacaagaaatgctttcttcaccttgggatgcggct

SEQ ID NO: 27600 - DNA, 240 bp, Glycine max
  Clone ID: 700888838H1
cctttttgcttttttcttcttctcactaactcagacaactaccatggcctcaaaatccagacccaatctatctgaaaattccaacaaaggatcaattgcaactcctagagtcagtaaaactagcaaactagcatccaagccagaatctgagtcaccatcacctttgcaaaattcacggctttctgtggaacgatcaccacgatctgtgaattcaaagcccactgttgagcggaaatcacc

SEQ ID NO: 27601 - DNA, 238 bp, Glycine max
  Clone ID: 700888839H1
caagttcaaacttgaatttgattcatctgatctaaccaatgaaatcaaaatcgggattcgattgcagttgcaggtctctctatttggtgcttattacttattattaaggtttctttcttctgttgaaatggtctttagtaattatagttctgccaatgaatctcattgtttaattctgattatacctttcccgaaatgcaattagcgtcaaatggtgacaaggaagaatgttcagaaa

SEQ ID NO: 27602 - DNA, 238 bp, Glycine max
  Clone ID: 700888840H1
ggaatcgggtttccctcagaagcaattgctggttattgatcaaacgggtgatcaaacaactcttgtttatagttcaaggtttgggggtcccgttgattgtcatgtgtcctgggattcaaagctgcatggttctatcaatttgaacaatgggaatgaattgcttaatttaaggagagatgtgaatcatgtggttggacttggacctactttggatgataaagttcatgaaaatacagga

SEQ ID NO: 27603 - DNA, 237 bp, Glycine max
  Clone ID: 700888841H1
attcttccttccaagaaaccacttcaaatcatcaacttccttagacttgcacaccctttgtgctgttactagtaatctcatcctcttgctatcattcagattgatttctctcctagcacctcgatcaaagggctaaaagtttaaactttgctgcttaaacttttctttcacggtttgatacatcttattgattttagtgctatttcaaaggggcgaaatttgagacatgggcttgag

SEQ ID NO: 27604 - DNA, 235 bp, Glycine max
  Clone ID: 700888843H1
gatctctctgattgaggtggtgggcatcaccacttttggcacctacattgaagctgccagtggtgaaaactttgccggtggttccccaaaagactacggaatgttctcccccaagattgggcaactctcaacggtgcctccgaagcaaagaactccggaggccctagccaaggcaatagaagtgatggaaactctggaccaagcagcattcagaggtggattcatcctggaaaaa

SEQ ID NO: 27605 - DNA, 242 bp, Glycine max
  Clone ID: 700888846H1
tctgattccaggaatatgctgaacttatgcacgaatttatgacagcagtcaagcaaacttatggggaaaaagttctaattcagtttgaagactttgcaaaccacaatgcttttgatctgcttgagaaatatagatctacacatctggtctttaatgatgatattcagggaacagcatccgtggttcttgctggacttgttgcagctctgaagttggttgggggtaacttagctgatcacaga

SEQ ID NO: 27606 - DNA, 248 bp, Glycine max
  Clone ID: 700888848H1
gaactggggcagtaactattcgggtggctggagttttgaaagactggttacttatcactctttcaactgtcttatttcctgaatcaaagattaccgggcttaatgttattggctatgctattgctttaagtggtgttgttttttacaactaccttaaggtcagggatgttcgcacatctcaacttcaaagtatccaagatgaatcagcaaaggagctgcagacggagaagaaagcagatgatgccatg

SEQ ID NO: 27607 - DNA, 239 bp, Glycine max
  Clone ID: 700888852H1
gacacaattgacaatgtgaaggcaaagatccaagacaaggagggtatcccaccagaccaacagaggctcatttttgctggcaaacagcttgaagatggccgaaccttggctgattacaacatccaaaaagaatctaccctccacttggtgctccgtctgcgcggtggtatgcaaatctttgtgaagacccttactgggaagaccattactttggaggtagagagctcagacacaattga

SEQ ID NO: 27608 - DNA, 238 bp, Glycine max
  Clone ID: 700888853H1
tgctcatttacacacctctccaacctttcactttcagctttatttgaatccctctctctcctttccaaatggccagcgttgaggttgcacatcaaacaccaacaacagttccagaaaatgaaacaaccgaggtaatcaagacccaggaaacaaccccggaaccagtaccagccactgaggctcctgcaacagaacaagcagcagctgaggttcctgctcaagaagaacaacaagcaac

SEQ ID NO: 27609 - DNA, 236 bp, Glycine max
  Clone ID: 700888855H1
ggaaggttggaccataggactcacgatttttgcaaaaactgcaataactaatggaatgagtccatttgtgttcattgtttataccaatgctctggccactataatactgttcccttgtttctttttaccacaccaagaggacagaaaggagaggccatcttttactttctctttgttcatgcggttcttgttcctcggttttatagggatgacgatgactcaggcctttttattcc

SEQ ID NO: 27610 - DNA, 234 bp, Glycine max
  Clone ID: 700888858H1
agataaagaagcatcttcatctgtttcaaatggttcttcagctttagactccctcccaagacagtctattaaaggcagcagatctttcaatgaccggcagacgcaattgtccaagcctaagcacccttcaaagtctgatgcagcatcttctgaagtatcagtggagaagacaaaaccaaaatcattgagaaaaggacccattgataaagttcaaggagaaggagaatcttcctt

SEQ ID NO: 27611 - DNA, 236 bp, Glycine max
  Clone ID: 700888860H1
gccgcatccgcctcaagctcatcggcgccggaaatcccttcccggcagagatcgaggccccgcttctgcgacggaagcttgccggaaaccgcgccaaggtgggcgtgaaggtagccggagcgtttctgttcgggctgagctcggcgatcgggtacttgctgatgttgtcggtgatgtccttcaacggtggggtgtttgtggccgtcgtcgtgggtcttgctgttggttacttcttc

SEQ ID NO: 27612 - DNA, 242 bp, Glycine max
  Clone ID: 700888862H1
caaggacatcagaagtacgacaaattaagacagggcctaagagaaagtgttgtagataggatacagagagaaagagaaatggattctcattgggttcgaatggtgcttctcattgcttgcattcttccagctttggttgaatgcagagtgaggcactacaaatttcatgtggtgtctaaacaaaccaatagattgtgttcaagcaaatctattgtcaccattaatgggaagttcccaggacc

SEQ ID NO: 27613 - DNA, 238 bp, Glycine max
  Clone ID: 700888867H1
agttattacgcacatcgattctagctctcgttctctccaatttcctcaaaccctaatttcctcaatcctggttttggaattcgacgatggagcagaagaggagcagtagcaagatgtacaacctgtttgtgaagcacttggacgggaaaaccctaaccctcctattcccctctccgatcctctacgcgagttccatcagggatcgcctcttccaactcaccggaatccccgcccacca

SEQ ID NO: 27614 - DNA, 236 bp, Glycine max
  Clone ID: 700888868H1
attcctcatcaaagcctgctgttttgggtaacaaaagagggttctcagatgtcatgagtggattcgccgaggagaaattgcttgttagttctgaggtcaacacaatattgtcaccaaggccttcttctaatgtggcattgaaaccaagctctatgcttgagaatgttggggctcagcaatccaaagccaaagaactcgcaacagcgaaggttggtcttgagaggtctcatgttttc

SEQ ID NO: 27615 - DNA, 236 bp, Glycine max
  Clone ID: 700888869H1
ctccgggaaatcgaggattgcccttcgtaggagagacacttcagttcatggctgccatcaacagcagcaaaggagtctatgagtttgtccatgctcgccgcctccggtatggaaaatgcttcaaggcgaagttgtttggggagacgcacgtttttatatcgagcagggagtcagcaaaagtgattgtaaacaaggagaacgagggagggaaattctcaaagagctacataaaatca

SEQ ID NO: 27616 - DNA, 235 bp, Glycine max
  Clone ID: 700888870H1
ttttcagtgaccaagcctcatttgttgttggacaaagcctatttgtgtgagcatttggcagcaccagaaagaggaaaatggtggctagtgaagagatatatggtggggaagaactttctcttgtccaaccagaccctatggggttgcagattgatcgtttgcacaaccaactcacagaaaaggtcaaggaactagcaaattgccagagtgaaatcaaggccttaagggcaactga

SEQ ID NO: 27617 - DNA, 232 bp, Glycine max
  Clone ID: 700888873H1
ctggacgagtaagtaggttgtaagctagaaactcggcgtctcggtactccaacgaagccaaggataagtatgtagtttgcgcgggataaaaagaagaatgaaaacctacagatatcaatggcggagtccaatcctcacttctccgacgacacgccctcacctgcttcttccgtcgactccccatccccgccgccgactttcaacggcatcgtcatggtgtcgcagccggaca

SEQ ID NO: 27618 - DNA, 245 bp, Glycine max
  Clone ID: 700888880H1
attcattctcatctttctctcttctctctccacccaaaccctaactcccgaccctgttcccctctcgtatccgtcatgaaaggaggaaagtccaagaccgaatctaagagagccgatcccaaacttgctgtgaataagaagggagccgccaccaaggctaggaaacccgccggcaaggggaaggcagcgaaagaccctaacaagccaaagaggcctccaagtgctttcttcgttttcatggagga

SEQ ID NO: 27619 - DNA, 233 bp, Glycine max
  Clone ID: 700888888H1
agaagattgcacttagtcgtcgtgttgagaagcattggcgtcttattgggtggggacaaatccaagctggaatcactcttgatgtccctcccgccccccaactgagttgaacactgataagagacagatcacaagaaacaccagcagctataaaaacctgagacgaatttagatgtgggaagggagacaagtgttgggaaccatttttgtgaggtggagaagaaaacgttttg

SEQ ID NO: 27620 - DNA, 231 bp, Glycine max
  Clone ID: 700888890H1
aacaaacctgacacagagacagcgtgaattaattgaagagtttgccaaggaaggacaagaggaatgtgataaacggagagctgcttcggcttctggttgaaaacttttgcagaatctcctctatttgtttattgtcaagtcatatgctcaactaggtgggaacccacttgttagaagttttgtaggagcattaaagttttttttttctttgccccatccacatatagtgta

SEQ ID NO: 27621 - DNA, 231 bp, Glycine max
  Clone ID: 700888891H1
ggcaattctgcaaaggtcttcagtgtactatcatggagtaggtattcaaaatcacccccatccaccaaagatggtgctgaattttctggtcgtagtgaaccatgcaagcctggagctcattgtgccacacttaaaaaattatatgcagcagagaagaaacttttcaaggcattaaaggaggagggaattgttgcattggagtttgacaggaagtccatgttattgcgtaaa

SEQ ID NO: 27622 - DNA, 242 bp, Glycine max
  Clone ID: 700888895H1
caagaactagcagagcatataattccatttctctgctcactctcacaacagtgactgaacctgttagccaaagtttcatttgaaaatggtacttccctgccctgcccaaatactagttggcctctccttagacccagatgacagcaaggagcttctgtcatgggcaataagagttctagccaatccaaatgacaccattgtggctgtgcatgttcttgttgctgcggataagaagaagcgtg

SEQ ID NO: 27623 - DNA, 265 bp, Glycine max
  Clone ID: 700888912H1
ggctgaggcttcagcacaagcttgtgtcagtattccttccaatccctggagttctctgcaaaggggtttcagtgcataataactccctgtaatgtgcactagtaaagaccaaagtatgattattgttacattatgttacatggttgtacttgtatatacatatcttgtcccacctttgtaaatacaattgggacactactaggattgggaagaagggtctttacatttatagtttggcaaatagatattgcaactacctttgtat

SEQ ID NO: 27624 - DNA, 270 bp, Glycine max
  Clone ID: 700888919H1
ccttttcaggcttatcatttgcttttggttggactttgctgaatggagagtgcaagaatcagccaatggttaaatcttcttgtttgtgtactgctattgctcaaggcagaaggatctttagttccattgattttggtcgagaatgcagaatcaaaaggagctgtttgtttggatggaagtcccccagcttaccactttgataagggatttggggaaggtattaatagctggattgttcacattgagggaggaggatggtgcaacaatatc

SEQ ID NO: 27625 - DNA, 262 bp, Glycine max
  Clone ID: 700888927H1
agaactggaccctagggtgcttatacctcattggacactgcttgtcgtggtctggttggcttgtgttgcaagcaccggttctcaagaagtacccggctcgcctctctgtcacttcctacacctgtttctttggactcttgcagtttctcgtcattgctttgctccttgaaagagacgcgcaggcatggcttttccactctggtggagaagctttcactattttatacgcgggagtggtggcatctggaattgccttcgctgt

SEQ ID NO: 27626 - DNA, 274 bp, Glycine max
  Clone ID: 700888934H1
gagaagagaagctaaagaaagaaaggagatgggagtggagaagcagttgttgaggtctggcaccggtccgaagccaattcccggtcagaacgtaaccgttcactgcactggtttcgggaagaacggtgacctttctcagaaattctggaggttacctacctatatcatttctcttcctttcctttcctttccttctttattaattaactctccttatcttacacttacttacagcacaaaggatcctggccagaacccattcactttcaaaatc

SEQ ID NO: 27627 - DNA, 269 bp, Glycine max
  Clone ID: 700888938H1
tgcatctcaatctgaaccaagttacaagagctacccaaaacttctcagaaacattacaaataggagaaggaggttttggaactgtctacaaggccaagttggaagatggcctggttgtggctgtaaaacgtgcaaagaaggaacattttgatagtttgagaacagaattcagcagtgaaattgaacttttggccaaaattgatcatcgaaacctggtgaagctactaggttatattgacaaaggaaatgaacgccttcttattacagag

SEQ ID NO: 27628 - DNA, 260 bp, Glycine max
  Clone ID: 700888943H1
attggtgtgcctgagcctttgtctgtgtttgttgacacctatggcactgggaagatctatgataaggagattctcaacattgtgaaggaaaactttgatttcaggcctggtatgatctccatcaaccttgatctcaagaggggtggaaataacaggtttttgaagactgctgcctatggacactttggaagagaagaccctgacttcacatgggaagtggtcaaacccctcaagtgggagaaggcctaagtaattcattc

SEQ ID NO: 27629 - DNA, 261 bp, Glycine max
  Clone ID: 700888947H1
aaaaataattaactctgatttgaaaagaaaagatggtttgtgtcctttaacacctgaggagactgcccttacacttagggcccttgacatcggtcaaagcattcaaatctacattgcagctggggaaatatatggtggggacaagagaatggcaagtcttgcgaagaactatccaaaattggtcagaaaggaaacactgttggaaccatctgatcttcagttcttccaaaatcattcctctcagatggcggctttggatta

SEQ ID NO: 27630 - DNA, 267 bp, Glycine max
  Clone ID: 700888951H1
gatgcaacgaaatcattcatgaaccttaaactccagcttttggaagaactagtttttgacgtgatatcaaggtctctatgacgaagtggtccagatttttctatccttggctcccccgttctcctaagttgaatttcagacatgtattctgagaaaatatttattccccggacaaagaaaaaccatcctgtcttttcacgggcacaactggtgcaggaaagcatctgtggcaatgataagaaagcagtgtaccagcatattgtcaag

SEQ ID NO: 27631 - DNA, 176 bp, Glycine max
  Clone ID: 700888953H1
gtcgtttttggagcgatttgcatgggtttgtaagtgtaaatctttagaaatagattccatatatgaaaacaatttgcgcaaaacaaaattatcctgtagtgtttgtttccccattttggtgaattctgagtccactttcatgaatatacttcttctaatcaaaatccttcaagccc

SEQ ID NO: 27632 - DNA, 261 bp, Glycine max
  Clone ID: 700888957H1
aacaaaacaacagaaccaaactcagaaccaaactcagaaccaaactcgccaaaactagggttttgcattgatggcactgtgcaaccgcgtcagatcgggaatctctctcttcaccaaatccacgttccttacttcccagcgatccagtctccaacgatccctcgttgcccctttcatttccctcgcctccagaaattacgccaacgtgccggggcaaaaggaaaccaaagttaaggtccctctggctttgtttggaggttc

SEQ ID NO: 27633 - DNA, 258 bp, Glycine max
  Clone ID: 700888959H1
cattattgcacatacaggactggatttgaagaaaacaaggaactgcccattgtgctaaatacagtcttggctggaaggtattatgtaacagaatatcttggttcagctgccttcagtagggttgttcaggcacatgatcttcagacaggaatagatgtttgcttgaagatcattaaaaacgacaaagacttttttgatcaaagcttagatgaaatcaagcttctgaaacttgtcaataagcatgacccagcagatcta

SEQ ID NO: 27634 - DNA, 259 bp, Glycine max
  Clone ID: 700888961H1
aacaagataaaagttaacatgaatgcttctaaggagaaggctcctgatacaaatctgttgcagccttctcaagcagttcaaggacacacgccaactaattcaatttctacagctacttctgcaacgggctcacctaccacaattgatctaatctccgaaagtgagtcactaaggaatcaatagttcataaagaataagagaatgacataggtttgtgtttgtgttgaaaaggtagagcagtatatagtttcttgtaaaa

SEQ ID NO: 27635 - DNA, 263 bp, Glycine max
  Clone ID: 700888969H1
cgttattctcttattcatccttctcttctgaataatccagatctctttctgcccttttctccgtcacgcttttcgtgaccggatctgtatggatttgatccagatctacacgccgatggtggttttggccgggtctttcatagatctggtgcgtagaggctcagatctacggtaccgaggtacaacagagaatcgatgacaagaacgcagatccgacggtagatccagccgattccgcttgttcgatcgctacagacccctgt

SEQ ID NO: 27636 - DNA, 257 bp, Glycine max
  Clone ID: 700888974H1
ttcctttcattttccctcactttctcgctccccaaacgcccctctctctcctccaatggccgaccagctcaccgacgaccagatcgccgagttcaaggaggccttcagcctcttcgacaaggacggcgatggttgcattactaccaaggaacttgggactgttatgaggtcacttggtcaaaacccaactgaggcagaactgcaggatatgataaacgaggttgatgctgatggcaacggaaccatcgatttcccag

SEQ ID NO: 27637 - DNA, 256 bp, Glycine max
  Clone ID: 700888975H1
cagctggagggtggactgcatttagatttagagcagataatccaggagtttggttcatgcactgccacttggaggtacacacaacatgggggctaaagatggcctttttggtggacaatggcaaaggtccaaagcaatcagtgataccaccacctaaagatcttcccaaatgctaatgcgtcaatcatcaattaattatgcaatacacaaaagaaaggccttccaatgccgaaacaaaagaagctttggagggata

SEQ ID NO: 27638 - DNA, 255 bp, Glycine max
  Clone ID: 700888977H1
taaagatgataagattgcttccaagctgtctgctgatgataagaagaaaattgaggatgcaattgagcaggctatccaatggctcgatggaaaccaacttgctgaagctgacgaattcgaggacaagatgaaggagttggagagcatttgtaaccccatcatagcaaagatgtaccaaggagctggtggtgatgcgggtggagccatggatgaggatggtcctgctgctggcagtggaagcggtgctggacccaa

SEQ ID NO: 27639 - DNA, 257 bp, Glycine max
  Clone ID: 700888979H1
gcgaaacaagtcggtgtccccaacatggtcgtgttcttaaacaagcaagaccaagtcgacgacgaagagcttctccaactagtggagctcgaagtccgcgaccttctgagctcctacgaattccccggtgacgatacccccattgtctcgggctccgcgctcttagccctagaagcactcatggccaaccctgcaatcaaacgcggcgacaacgagtgggtcgacaagattttccaactcatggacgaggtcgacaa

SEQ ID NO: 27640 - DNA, 269 bp, Glycine max
  Clone ID: 700888981H1
cttgttcaatgactctcaacatgcaactacctccgatgaacagcgtgtcatgtcaaaggtaaactcactctactgccttctgcagaaggatccttctacagcagaagacatgaccaaaaatggcaatagtctgggagatgcaaatgccttgtcaagggtgaactcactatactcccttctgcagaatgcagaagacgcaatggccagaaatggcaatggtctgagagatgcagatgtgatgtcaagggtgaactcgctgtactgtcttc

SEQ ID NO: 27641 - DNA, 260 bp, Glycine max
  Clone ID: 700888988H1
aaatgtttcatgtttgtcaaacattccgtgtaaaacttcatattctatgcatataaactgtggtggaaatcttgtaactgatggaaagaagacatatgatgatgacacgggtgagactactggaccagcaagctttcataatgaccgtggaaaaaactgggcacttatcaacaatggtcatttctttgataccgaccgcttaaactactataatgtgactaattcaactaagcttgtaatggagaatgttgaactgtaca

SEQ ID NO: 27642 - DNA, 241 bp, Glycine max
  Clone ID: 700888991H1
gcggctcatttggcgttgaaggcgttggggaggaacaatgcaattgatggaacgtgtggagttggaagggaagaaccccagcttattttcgcttctgcagacactgaggaaattgttgatgcttaaacttactttcaaattagctagatatatagcttttcttttcttttctttctgtttggtccctacttaattatgattttaattttggaataaatgaacaacatgtgaattatgaagg

SEQ ID NO: 27643 - DNA, 253 bp, Glycine max
  Clone ID: 700888993H1
gcgagtatccatttctaggtgccatcataataactaataacccaacctctcgagagtttgttatattattactgataaattgttggtgggggtggcatagttgcagttggaaatcgaaagaagagaaaagaaattggatagtgattatttgggttcgttatcgttgaaacgttttctcaaatctggtgtggtgaataacatcacccctcacactcactcaacctaaacaaaatgcagagccagagaaccacgc

SEQ ID NO: 27644 - DNA, 244 bp, Glycine max
  Clone ID: 700889001H1
tctatggaggatttgctgcagctttgagagatttgaatgtttgggtcatgaatgtggttacaatagactccccagatactcttcctattatttatgaacgaggtctttttggtatatatcatgattggtgtgaatcatttagcacctatcctaggacctatgatctcctccatgctgatcatttgttttcaaagcttaagaaaaggtgcaatttggctgctgtagtggctgaggctgatcggat

SEQ ID NO: 27645 - DNA, 245 bp, Glycine max
  Clone ID: 700889002H1
atggtcgctatggagtaggagattggtcattccttaaatgccgagagcacatggcaaatgagagggacaagcgcaaagcattccaggaagtttgcaataatttcaggcctgttatgcattattttttcttggagagatttttacagccagctgagtggtttgaaaagagacttgcttatacccgaagtgttgctgctagttctatggttggttacattgttggccttggagatcgacatgcaatg

SEQ ID NO: 27646 - DNA, 246 bp, Glycine max
  unsure (1)..(246): unsure at all n locations
  Clone ID: 700889004H1
gttttctgttttggaccatggacttggtttttaccaaatcaagaaaaggatgagcttttttgggccttcaaatcttgcttggagaaggctcaattttggtggaaacctctcacacaagaaagcatagtttcttttgggttcattctacttggtgtttagagatggtgagaggaaagactcagctgaggcgcatagagaacgccacnagcaggcaagtcaccttttcaaagcggcgtaatgggttgc

SEQ ID NO: 27647 - DNA, 242 bp, Glycine max
  Clone ID: 700889007H1
caatttaagagatacagtttctcgttccacagttcaggtgtatcccaagtcatggactgcaatttacatgcctttggataatgtgggaatgtggaatgtgaggtctgagaattgggttcatcagtatttgggccagcaattttatcttagagtgtattcccctgcaaattcatggagagatgagtacccaattccaagcaatgctattcggtgtggcaaggctgtgggacactactaatgcc

SEQ ID NO: 27648 - DNA, 242 bp, Glycine max
  Clone ID: 700889009H1
atttgcttcttcgagtttcacagccaagtcgtaaaagggtttcaagggatggaaaacatgcagagcttctggcaattgggtgatgaactccgtgggcactcaaaagcatcggaggatcacaagtggttaatggttgcctcgaaactggccgaacagacaagattgaagggggagcgtgtgaacaaccttgatctttcaaagggacccattgaaacaaggtcaagggataaatttgggttcca

SEQ ID NO: 27649 - DNA, 241 bp, Glycine max
  Clone ID: 700889014H1
gttaactaactccgttccgttccgttctgttctgttccgttacaatggcggaaacctctgctgcactatgcttctccacattcagattctctttcgctccgtcccgttctccttccaagaccttcttcaacaacagctccttccatttccctcctccttctagttctcacacgtgtcttctccatttcgctcccaaagcctccccctccggcaacttctccggcgacgattctttcggttt

SEQ ID NO: 27650 - DNA, 239 bp, Glycine max
  Clone ID: 700889035H1
taacatcactcagtgatgatatatttgccttagccaagaaggaggaccatgtgccattcagaaactcaaagcttacatatctgcttcagccttgtctaggtggagactccaagacactaatgtttgtgaacatatcacctgatccttcttcagttggtgagtcactatgctcactcaggtttgcatcaagagtcaatgcttgtgagattggaacacctcggcgtcaaaccaatggacgt

SEQ ID NO: 27651 - DNA, 235 bp, Glycine max
  Clone ID: 700889038H1
cattccgttactatataggcagggccaatccgacaccaattttattcttcctcacggagaactctggaggaatttgattgatggctgtaaactgtacttcctcaattcgaatcccaattcagaaatatggatcatttctcaagtaccccaacaaaaaattgatgtccaaacgcagctatgtcccaatgaaaaaggcatcggtactgaggatcacagcatccatcaagaacaaggt

SEQ ID NO: 27652 - DNA, 236 bp, Glycine max
  Clone ID: 700889040H1
cacttctggatgcagaccttgaaagtgatatcttgggttggcaatatatctcaggaggcttaccagatggccatgagcttgagcgcttggacaatcctgagattcaaggggctaaatttgatccagaaggtgaatatgtgaggcaatggctacctgagttggcaagaatgccaactgagtggatccatcatccttgggatgcaccacttactgtgcttcgagcagcaggagttgag

SEQ ID NO: 27653 - DNA, 237 bp, Glycine max
  Clone ID: 700889042H1
gacagaatgatgctcacattctctgttttcccatccccaaaggtctctgacacggttgtggagccttacaatgctactttgtccgttcaccaactagtggagaatgcagatgagtgcatggttcttgacaatgaagcactctatgacatttgcttcaggaccttaaaactcaccactcctagttttggtgatctgaaccacctgatttctgcgacaatgagtggagtgacatgttgc

SEQ ID NO: 27654 - DNA, 234 bp, Glycine max
  Clone ID: 700889050H1
gcttcttcagttagtagaattggaggtccgggagcttctttccaagtacgagttccccggagacgatgttccgattatctccggttccgctttgctgtctttggaagctttgatggccaaccctgccatcaagcgcggcgaaaaccaatgggttgataaaatttacgagctcatggaagctgtggatgactacattcccatccctcagcgccaaactgaacttccctttttgct

SEQ ID NO: 27655 - DNA, 233 bp, Glycine max
  Clone ID: 700889066H1
atcaaaaggtaaaaaacaaattaaaagaaaaagggaaaagtatactacgcagaagaggtggttcaaagttcaatggctgagaagaaggaaatgattccgcaacaatttgacatcgatgccaaatgggacgcctgcattgatctcaccgtccgtcgcttcgtctactccgcaaccgccggtgcatttggcggtctcctatttttcaggagtcctgtgactcgatgggcatctat

SEQ ID NO: 27656 - DNA, 233 bp, Glycine max
  Clone ID: 700889074H1
gtgaagagaaacggtggagcttttcaaccgttccaaagagaggaaaaaagtggtgatgcaaaggctagtattaataatgatgcatcagcaattggtaaagcaccctcttcaccaccagtgcctgctacaagttctacaggaccagtgagagtagaaaacaaaaaagaagagaaaggacaagctcagagaaagcaacgcaggtgttggtcacaggaattgcacaagagattctt

SEQ ID NO: 27657 - DNA, 230 bp, Glycine max
  Clone ID: 700889087H1
ccaagtatcaaggcaacattgatggggcttactttggaactacatttccacacctcttcttgatgacttatggacaactgaagccacagaaaccagcacaaggctatgttccaagagtttttgggttcaaagttcacaagccataaagctgaagttgaagctttcatgaaagtaaaaatctgcccgtgtctcatttaactcttccttatggttctctttgcaacatccgg

SEQ ID NO: 27658 - DNA, 227 bp, Glycine max
  Clone ID: 700889093H1
caaacccggggtttgtaagacccccaacagtgatttccctctaaacaacataggaatcaataaaaaatcatgttctcccttaccaccaccaccatttgctcctacccatttgagcaactcaaggagaatgttggaaattcaagacaacgagaagattcctctgcctccatgtccattacaacctcctcgaagaagcacgtccgagaaggaaaagggctttagatggc

SEQ ID NO: 27659 - DNA, 230 bp, Glycine max
  Clone ID: 700889096H1
gcataggggaggaggagggtaaaagcaatgtcactttgttggtttcctcatcaaccaccatggaaagtgtgtgtctcaagagcttagaatttaaagagcgcaactacatgggattatctgattgttcttctgtggacagctcggttccgtccttctctgaagagactaaaagtaatctgaacctgaaagccactgaactcaggctcgggcttccaggatcacagtctcct

SEQ ID NO: 27660 - DNA, 278 bp, Glycine max
  Clone ID: 700889106H1
cagacacagaagtggtaggtctcacgtctcatcataaggtcgaaaactccattgaaacaagtcttccacataattccaatttgccagaagaaccaatggtgtcaacgaaaaaggaagcaacatgttatgcaacaaggcgttacagaggtgtgaggagaaggccatgggggaagtttgcggcagagattcgcgaccccaaaaagaaagggagcagggtgtggcttggcacatttgacactgagattgatgctgctaaggcttatgattgtgctgccttc

SEQ ID NO: 27661 - DNA, 279 bp, Glycine max
  unsure (1)..(279): unsure at all n locations
  Clone ID: 700889116H1
atgagagtgggcatggagggagtnagaagagggaagggatgaaaaggagtgctgggggtgagattgcaccaactacaaggcactataggagtgtctccatggatagtttcattgggaagttgaatttcggtgacgagtcgccgaagctgcctccttcgccggggcagagaggtggtttgatgtcgcctgcgggtggaattgatgggaattcggcggccttcagcttggagtttggaaatggggagtttagtgggcctgaattgaagaaaatatggccaa

SEQ ID NO: 27662 - DNA, 275 bp, Glycine max
  Clone ID: 700889117H1
ctttaagttgtaagttagtgttttatgcctcattgtgtttcgatcttatttgaaagtagcttttaaagcacatcacgttgattagaagcatgtttcttgaaaaggggataaataaactatgttttggtacttgtgaaaatgttatcgtgtttggtatagagctgttgcactagtttactggatcagcagaaatgttgaagctcaagttcctggtacctatcttcttgcattcaagaaaagagttagctgaatgttttggtggggctgaattctgt

SEQ ID NO: 27663 - DNA, 271 bp, Glycine max
  Clone ID: 700889153H1
gcagcgtgcttcattcaggctgcgtggcgccggttcaagaagagaatgctgacaaagagccttagcttgagggaatgccagtccttcaatcacgacgaacaagtcggggatgaaatggaacatggggaagaagagcacagtgcagtgacttcaaacactgcacaagtgaaacagaacctaggtgtcactatacttgcttcaagatttgctgcaaacacaaggagaggggttcagaagattaaggatgtagagttgcccaagtttcaaaagc

SEQ ID NO: 27664 - DNA, 251 bp, Glycine max
  Clone ID: 700889154H1
ttggttgcccctcttgggtaaagcaatgtttgttgtgcattgtgcaacacaattacctctgttcctccccctgggatggaaatgtctcaactttattgtggagggtgtaggacattgctaatgtacacacgtggagctacaagtgtgagatgttcctgctgtcacactgtaaaccttgttccaccagcatctaatcaagtagctcatgtccattgtgggaactgccggacaacatcatgtatccttatgga

SEQ ID NO: 27665 - DNA, 273 bp, Glycine max
  Clone ID: 700889162H1
cattcacaggctcgacagcagttgggaagaaattgatggctggttcagctgaaacagttaaaaaagtatctcttgaactcggtggcaatgcaccttgcatagtttttgatgatgctgacctggatgttgcagtaaaaggaactcttgcagcaaagttccgtaacagtggacaaacatgtgtttgtgcaaatagaattattgtgcaagaaggtatatatgagaagtttgcaaatgctttacgtgatgctgttcagaatatgaaagttggggatg

SEQ ID NO: 27666 - DNA, 263 bp, Glycine max
  Clone ID: 700889189H1
ttagacatgaagaacaagagctttttgaagacccctgttatatccctgatccggtatccttgcttggtcctgtttctgagtcacttgataattttcaattggacttgggaagtggctttgtgacagacacaaagatggcaatgcctcactctttaaaaagcacatctgccggttctgacatcagcaaaccatctccaattgagtccccattgtcccgagaaaagaatagctgttctaatcggtttccaagtatctcccaggcc

SEQ ID NO: 27667 - DNA, 242 bp, Glycine max
  Clone ID: 700889210H1
ggtcgcaacaaacacggccgcggccacgtcaagttcattcgatgctccaactgcggcaaatgctgccctaaggacaaggctatcaagaggtttctggtgaggaacattgttgaacaggctgcagtcagagatgtgcaggaggcttgtgtctacgaacaatacacgcttccgaagctgtatgtgaagatgcagtattgtgtttcctgtgctatccactctcatgttgtgagggttcgatcccg

SEQ ID NO: 27668 - DNA, 249 bp, Glycine max
  Clone ID: 700889217H1
cgcggcttcaaccttgtagttattctctttcttcttttttagctatccctctcttgaaaaatctagatctcgttcttccttgatctacgttacgcttttagtgaccggatctgtatggatctgaaccagatctacacgccgatggtggttttggcctggtctttcatagatctgatgcatggaggctcagatctactgtacagaggtgtgcgattcatgttcgtctctcttttggaatctgtttcgtag

SEQ ID NO: 27669 - DNA, 243 bp, Glycine max
  Clone ID: 700889221H1
gcagcatattgtgtgaaagctgatcgatgtgcttgggagagcatctctaatcatctttgttctagccttcacaatacttgtcagcgcagtctcactaggtggagttggcattgtagcaatggtcaaaaagattgaaaatcacgagtatatgggatttgatgacctctgcacatatgattcatagcccatttcactaaattattttatgctttgttttgtctcaagttcccaataaaggagcca

SEQ ID NO: 27670 - DNA, 238 bp, Glycine max
  unsure (1)..(238): unsure at all n locations
  Clone ID: 700889233H1
ctctactggtctaccaattgaccattctaacatggtcgatctttcaactcaaacttctggcactttgaccagggattggagcccaatgagtatatgtcctcctcatggaagggtgtcatcntcagangcaaatgcttttaatcacgaggcaagtcatttccttattggaagcagttctagtaatgctcctgtagatgttggaggttttcataatgaatttggaatagtagaaatccta

SEQ ID NO: 27671 - DNA, 238 bp, Glycine max
  Clone ID: 700889239H1
gaaagcttcgtttccgattaacaattctttgaataatagagactttactttctgaggttttaacccctttaaggctttccctaacttgaggctgtgctcatttgctgagagttttgctgcaaggacttgacacaaattgtgtaaatgtctgtggcttttaccaacctctcttggtggttgtggagtggaaagcatcaagagccaagaatcccaaatgggccttctataaattcttcgg

SEQ ID NO: 27672 - DNA, 241 bp, Glycine max
  Clone ID: 700889283H1
cccggattccaccgtttctgtttctgatcatcgcgctgctcagatccgaatgatccaagaatctcttcgttttgcctctctgctttctgagaacccttctaaatggcccaagagtatagttgatgttgggtgtggcatagggggcagctccagatacctggccaagaaatttggagcaacgagcgtaggcattactctgagtcctgttcaagctcaaagagcaaattctcttgctgctgct

SEQ ID NO: 27673 - DNA, 240 bp, Glycine max
  Clone ID: 700889293H1
ctctgatactgttgttttcctgaaaccatcacaatttgtttctcaatcatgtcaacctcatcctcttcccaaagcctcaaaattggcatagttggattcggcaactttggccagtttctggccaagacaatgataaaacaaggccacactctcacagcaacttctcgatctgattactctgaactttgtctccaaatgggcatccattttttcagggatgtcagcgcattccttaccgca

SEQ ID NO: 27674 - DNA, 245 bp, Glycine max
  Clone ID: 700889392H1
gaaggctgtcgagatgttcagtggttacgaactaaatggaagagtgttgactgttaataaggctgctccaaaaggagcacagcctgaacgcccaccacgcccaccacgttcctttagttctggtttaagagtctatgttggcaacttgccatgggaagttgacgatgctcggctggagcaaattttcagtgaacatggtaaggttgaggatgctcgggtggtctatgacagagagactggtcgat

SEQ ID NO: 27675 - DNA, 242 bp, Glycine max
  Clone ID: 700889415H1
tttcagctccggtaacctctccttctccgccgccgttgctatctccgccgtgaccttccatccctcaacgccccacagatcttcaatttgattgcttgggtcaacaatttctgtcattctcaatcatggcaactagacttcagtttgaaaataattgtgaagttggagtcttctctaaactcaccaatgcttactgtttggttgcgattggaggttctgaaagcttctacagtgtatttgaa

SEQ ID NO: 27676 - DNA, 113 bp, Glycine max
  unsure (1)..(113): unsure at all n locations
  Clone ID: 700889424H1
cacctttctcctaaaacatctccagtggggtcttnntcttgtattaacanncaacggtcgngccaaagacccatgaancaatgggccaatgggccaacgantccntgcttcct

SEQ ID NO: 27677 - DNA, 244 bp, Glycine max
  Clone ID: 700889425H1
gttccgtgctcacaagtccacattccctaaggccttcccaagaaaaccaactataatgtcttccttgttgcaatccgtgtttcgttcacccaagaaatctaagcacgctgacacattgcaaggactcaggagtccctccaatgtgcatgaaactccgttctttccttcgccacttaccccggtttgtgtgatggctcacggggcagagaagatggaggcttcgaggcaggaggtagaagatgca

SEQ ID NO: 27678 - DNA, 243 bp, Glycine max
  Clone ID: 700889426H1
gtgaattatccaaccctcatagaggaacggtgtctggaattctggttttccctcacaaacagtcagaaaaagaaatggataataatttctctgggcatatctataagaggccttcacattccggcccattggttcctggttctgtctgggcaaaaggcaggaaggaagttgatgatgtacctcctgtttcaaacagagtgaacctatcaaaactatctgggctagtggcatctaggactttgc

SEQ ID NO: 27679 - DNA, 242 bp, Glycine max
  Clone ID: 700889428H1
cgctcacgcctcacacgttttctgtctcttgctcactctactcagttcccttcccaatcgccgctcagccatcaccgtcgccactcacggggagactcgccctcctcgaccgacgttccctccacatccttcaacaaagtttccggcgtctgttcgagcatgtgaatcataggaagaggaggcgaatttggtaatttgttgtgtgttcgaaatgggtgaaatttggtggtcccttttggggg

SEQ ID NO: 27680 - DNA, 240 bp, Glycine max
  Clone ID: 700889430H1
gggatctggtgggtttgccttccatgaacatcatgagaaaaagacccagagcatgctcacaggcacaagatagaagaggaggttgcagcagcagctgcagtgggatctggtgggtttgccttccatgaacatcatgagaaaaaggaagcaaaggagcaagatgaggaagctcatggaaagaagcaccaccatctctttggctgaagcataagcaaccaattatgagcatattccttctac

SEQ ID NO: 27681 - DNA, 245 bp, Glycine max
  Clone ID: 700889441H1
taatagaaaagtcttccaaagtagctttccccatccatctttctttccaacgttcacaaagaaaaagagaaaaaaaggaaggttgctattaaaatggaaagcagccataacatgaggcaaagcaccatggaaactgagtttgaggacttgctgccagtgatggcagagaagcttgatgtggagtcctttgtctctgaactgtgtggaggtttcaagcttctatcggacccggaaactggtttgat

SEQ ID NO: 27682 - DNA, 241 bp, Glycine max
  Clone ID: 700889443H1
agaacatctcattgcagcattccaatattttgacaaggatggtagtgggtacattacagttgatgaacttcaacaagcttgtgcagaacaaaacatgactgacgcttttcttgaagacatcattagagaagttgatcaagataatgatggaaggattgattatggtgaatttgctgccatgatgcaaaaaggcaacgctggaattggtaggagaactatgcgcaacagtctgaatttaagc

SEQ ID NO: 27683 - DNA, 157 bp, Glycine max
  Clone ID: 700889455H1
aggagatcgggtgtatctgtaatgtgtatcatatgctggactgtttggtcttgtcaaacaatacagttgcaatttgctcctcttttcttccttaatttaaatatagaaaaatgttattaacttggcctctcgtttaaacaattgacttgatcccccc

SEQ ID NO: 27684 - DNA, 239 bp, Glycine max
  Clone ID: 700889457H1
ctttttgtgcaaccaactctattattgcttgatgaacccacaaatcatcttgacctgagggctgttctctggttggaagagtatttgtgccgttggaagaaaactctggtggttgtctcacatgatagggattttctcaatacagtgtgtactgagattattcatctccatgatttgaaacttcatttctatcgtggaaattttgatgattttgagagcgggtacgaacagcgtcgtaa

SEQ ID NO: 27685 - DNA, 245 bp, Glycine max
  Clone ID: 700889467H1
ctcgagctctgcgagatcttcattcgccgattttaaaagatgagtaagcttcagagtgatgctttgcgtgaagccatttcaggaatcatggccgattccaaggagaagaatcgcaaatttgtggagaccatcgaactccaaatcgggttgaaaaactacgatccacagaaggacaagcgtttcagtggctctgtcaagctgccccacatccctcgccccaagatgaaaatttgcatgcttggtga

SEQ ID NO: 27686 - DNA, 244 bp, Glycine max
  Clone ID: 700889471H1
ggacacacagcacaaccaacacctccacagcctctcctacctcccggagccatggccgccgccgactcctccgccgctccatcgcaccagttgtcgcagagggagacggacatccagatgatgctcgccgccgacgttcacctcggcaccaaaaactgcgactttcagatggaacgctacgtcttcaagcgcagaaccgatggtatttacataattaaccttggcaagacatgggagaagctcc

SEQ ID NO: 27687 - DNA, 237 bp, Glycine max
  Clone ID: 700889474H1
gttatcgatccctttggggagataagaaaatgtggcttgtgcagctctcaaccccatttctgaacggccatggccatggctccagccttctctggaaacccagttcggcggtgactcagacccactgggccccgccgagtttgctgcctcaaatcaatgcgatgaagacgatgcagggaaaagtggtgtgctccacgaacgacaagacggtggcagtggaggtggtgcggctggccc

SEQ ID NO: 27688 - DNA, 236 bp, Glycine max
  Clone ID: 700889479H1
ggaatttcagtcagcggcttcggaatttctctttaaccctctttgcgtggcttggcaagattactttggagacatacatttcccagtttcatatttggttaaggtctacatgccaaacggacagcccaagtggcttctttctcttatcccggagtatcctatgctcaacttcatgctaacaactgctatatacgtctttgtatctcatcgactttttgaattaacaaatacactca

SEQ ID NO: 27689 - DNA, 253 bp, Glycine max
  Clone ID: 700889508H1
gcttatatctcttattagtactattgtatgtagaattgttttggggagaaggtatgaagaggagggatctgaaggtagcagattccataagttgttcaatgagtgtgaagctatgttgggtaacttctttgtttcagattatattcctttcatgggttggattgataaactcaggggactggatgcacgtcttgaacgcaatttcaaggagatggataagttctaccaagaagccattgatgaacacatgaat

SEQ ID NO: 27690 - DNA, 253 bp, Glycine max
  Clone ID: 700889515H1
gtgatttcagtgagtgatcggtgttcacttgatctcatcataatcgtcagcgtcaattgaagaagatgccgatcagaaacatcgccgtcggaaggcctgaagaggcgactcaccccgacacgttgaaggcggctttggctgagttcatctcaaccttcatcttcgtgttcgccggctcaggctccggcatcgcctacaacaagctcaccgacaacggcgctgccacccctgccggcctcatctccgcctccat

SEQ ID NO: 27691 - DNA, 249 bp, Glycine max
  Clone ID: 700889562H1
ataccatgcacaattacacacacctttgttctaaggtctaactaactctaaccatttcgactttcaagctagattgaggtctgaggatagtgatctttgtcttcgccaacaacatcgtccacttaaaaataaaaaagccctgaaatatctgaacttaaaagccacacttttatttgttgtgtgtgaggtttgatttgatgggaaaatatcttgaatctgcggcgaggttggaagagctatcgcggattg

SEQ ID NO: 27692 - DNA, 247 bp, Glycine max
  Clone ID: 700889589H1
cagttccaatctaaaatcaaccatgggttcagcagctgagactcagattactccaacccatgtatctgatgaagaggcaaacctttttgccatgcaactagccagtgcctctgtactccctatggttctcaaatcagctcttgagcttgatctgttggaaatcatagccaaggctggccctggtgttcatctttcccccactgacatttcttctcagcttccaacacagaaccctgatgcacccgtt

SEQ ID NO: 27693 - DNA, 246 bp, Glycine max
  Clone ID: 700889595H1
atcgaggtcatgggcctcatgcagggcaagaccgacgccgacgccatcatcgtcatggacgccttcgccctcccagtcgaaggcaccgagactcgcgtcaatgcccaggccgatgcctacgagtacatggtcgattattcccagaccaacaaacaggctgggcggttggagaatgttgtgggatggtatcactctcatcctggttacggttgctggctgtcggggatcgatgtttcgacgcagatg

SEQ ID NO: 27694 - DNA, 260 bp, Glycine max
  Clone ID: 700889601H1
ctttcaagtatgcctgggtgctggacaaacttaaggctgagcgtgaaagaggaatcaccattgatattgctttgtggaagtttgaaacaacaaagtattattgcacagttattgatgcgcctggacatagggatttcattaagaatatgattactgggacatcccaagctgactgtgctgttcttatcattgattcgaccactggtggttttgaagctggtatttccaaggatggacagactcgtgaacatgctctgctt

SEQ ID NO: 27695 - DNA, 253 bp, Glycine max
  Clone ID: 700889620H1
gagaaacctgcagcaaccaaagtctcaagtatgtttggtggaactagagataaatgtgccggttgtcaaaaaacagtgtatcccactgaaaaggttactgtgaatggaactccttatcacaagagttgtttcaaatgcactcatggagggtgtgttattagtccctccaactacattgcacacgagggcaaactctactgcaagcaccaccacgtccaactgatcaaggagaagggtaatttaagccaacttg

SEQ ID NO: 27696 - DNA, 249 bp, Glycine max
  Clone ID: 700889622H1
ctgaccaaggcccctctggttccaccgagtacgccagtggttaatgcactgtcaaagcagcgagctatgctggaaaacatcctaagggcttgtgttggattagctcctgagaacaacatgatcctggagtacaagtgaagttcaaagtcttaagagtaatggtttgggatactgtagttgaatgagatcaaaacttaactcatatcccataccctcttttctgttatatatttatggcaaatgtgaaat

SEQ ID NO: 27697 - DNA, 231 bp, Glycine max
  Clone ID: 700889810H1
ctctgccaaatgtttatcataaatgctggccctggatttaggttgctatggaacactgtcaagtctttccttgatcccaagacaacttcaaagattcatgtatgtagaaatgctatattgtagcgcctaaggctcttttcatgatggcttatggctgctgacattgcttggtgcctctatggaaatattacttaggttctcggaaacaagtaccaaagcaaattgtttgaa

SEQ ID NO: 27698 - DNA, 232 bp, Glycine max
  Clone ID: 700889811H1
aaaagagagagaaaaagattttgaattttaattgaacacttaagattgcaggcagtgacgtagtttccctgtaacgttgtgaactccgtttctcatgcttttttgtccctcatcggatctcgcctctttctcttcccttcaagcaagggtcagtccattcctgggtttactttttttattttgtgatatcttttgttgaggaggtggattgagtttaaggatttagttaagg

SEQ ID NO: 27699 - DNA, 230 bp, Glycine max
  Clone ID: 700889825H1
gttcaccgatggccccacatcgatgcaactcaaagccatcctccactacgcgacctctcagattgtccctcaacaatctctttccgagattacaataaccttcgacgtgctccaaagcctccacgccccgccaacttcctcgtgtttgggctgggccgcgattctctcatgtgggccagcctcaacccccacggcaccacgctgttcctcgaggaggaccctaaatggtt

SEQ ID NO: 27700 - DNA, 230 bp, Glycine max
  Clone ID: 700889831H1
gtttgacgttgttcacaatcactttctgcgcttcactcactcccttcgtgcggttttctttctttgtcgaactcgtgcgaaaatgcgtgagattcttcacatacagggagggcaatgcggaaccagatcggagcgaagttctgggaggtggtgtgcgcggagacgggatcgattccacggggaggtaccagggggacaacgagttgcaactcgagcgagtcaacgtctat

SEQ ID NO: 27701 - DNA, 228 bp, Glycine max
  Clone ID: 700889842H1
cagagcttgtggaattcccgttgttgctgacaccaatcgattccaactacagagcttgcaccattccttacagattcccctccgataaccctcgcaagcccactcccaccgaaatctcttggttgatctcttcctcaactcaatcccctctttcaagaagcgtgcagagagtgatacttctgttcctgatgctgcagctaaagctgaaaaatttgctcaaagatatgc

SEQ ID NO: 27702 - DNA, 227 bp, Glycine max
  Clone ID: 700889844H1
gactagttctggatcgcgggcggccgcccttttatagaggcgcggattgctgtgttcttgtgtatgatgtgaatgtgatgaagtcgttcgatacccttgagaactggcatgaggagtttccaaacaggcaaaccctcctgatcccagggcatttccatttattttacttggaaacaagatcgatattgatggtgggaatagtcgagtggtttctgagaagaaagcaa

SEQ ID NO: 27703 - DNA, 228 bp, Glycine max
  Clone ID: 700889845H1
cagagttggttctttctttccccaatttgtgagtgttactattgaatcgattggattgacatggcgagcgcgatggttgaggacgccaacttcgaagatgaccagctcgccaatatgaccccgacgacgtcgtcagagcttctcgtcttctcgacaacgagattcgcatcctcaaagaagagttgcagaggaccaatttggagttggaatcgtacaaggacaagatca

SEQ ID NO: 27704 - DNA, 235 bp, Glycine max
  Clone ID: 700889849H1
ctgataaattctactgcgatgactactacaaattaacctacccttgtactcctggtgcagcatactatggccgtggtgccatcccactttactggaactacaactatggaaaagctggggaagctgaaggtggatctgttgaaccatccagaatacatagaacaaaatgccaccttagccttccaggctgcactctggcagtggatgaacccaccagagaagcacctaccatcac

SEQ ID NO: 27705 - DNA, 226 bp, Glycine max
  Clone ID: 700889857H1
gagattacgaatcagcgttggagcatcttgtgcttgctagcatggctatgattgcaaatggtcaagataatgaggttgcgtcaattgatgttagcattgggaacatttacatgtcacttttcgatttgatgaggcgattttctcttaccagaaggcactaactgtgtttaagtctgccaagggtgagaaccacccttctgttgcatctgtttttgtgcggctggct

SEQ ID NO: 27706 - DNA, 226 bp, Glycine max
  Clone ID: 700889860H1
aacacgttgcatatggaagcctgcttttatgaatggaactgattggcctagccctgctgcaaatttatctattgttgagcaacaaatcaagaaaattctagcggccacaggtgttgatgtcctagcctcgctatagatgggaatgctccagctacacttcctttgccattggcggctcttttgagtctcacaataacatataaactggataaatcttgtgagcgct

SEQ ID NO: 27707 - DNA, 225 bp, Glycine max
  Clone ID: 700889871H1
tgagttccaagctagtgatctgggtctgcttgttgaaaacacctcagtggagcagcttggtttggctaggaaaattaccatctccaaggattctaccactgtcattgctgatgctgcgcaaaggatgagttgcaagccagggttgctcagttaaagaaggagctgtctcagacagactcagtatatgatactgagaaactggctgagaggatagctaaactgtct

SEQ ID NO: 27708 - DNA, 224 bp, Glycine max
  Clone ID: 700889872H1
tctgaacatgggaaggaaggattttgagcatcaatacggtaatgatccttctgtgggattgtcaatgtctcattccatagcagacacttcatcatgtctcaattttggtggcatcagaaagttaaagttaatcaagtcagagattctgacaactgcatgcctgctgcatctatggggcactcctatagtagggaagataatagtacaatttcagtaggtgctgg

SEQ ID NO: 27709 - DNA, 225 bp, Glycine max
  Clone ID: 700889873H1
gttgggtgtcattcgttttcttattttcttcttagcatacatgaatcagaatgcacagaatttttatctggggatggatgtgaagagaatcatggatggtgatagagttgggaacactattgggtaattaaggaagatggtgtagaagatagcaacgattcatcatccattggattcaactcagaagattctatttgctcttcttcttcatcagagttggccgag

SEQ ID NO: 27710 - DNA, 226 bp, Glycine max
  Clone ID: 700889876H1
ctcctcctcaatcttcattgtcctgttctttcccttggtgacaaaccaagactaacacacacagaacatagcttgtgttggtgaggtgagaagataaagaaagaatggcatttgcaggacaacacagaagtgtatggcctgtgacaaaaccgtttatctggttgataagttgaccgcggataaccgagttttccacaaagcttggcttcagatgccatcactgcaa

SEQ ID NO: 27711 - DNA, 227 bp, Glycine max
  Clone ID: 700889877H1
aaaagaagataaaggaaaggatggtgggaaggaagtgaaagagaagaagaaaaaagaagacaaagacaagaaggagaagaagaaaaaagttactggaaaggacaagaccaaggatcttacactctgaagcagaagcttgaaaaaattaacggaaaaatacaaccactccttgaaaagaaggctgatatagaaaggcagattaaagaagttgaagctgaaggtcatgt

SEQ ID NO: 27712 - DNA, 223 bp, Glycine max
  Clone ID: 700889889H1
ggattgcactaaccatctacatgagtcttcgcatgtttgctggcgtgtggaggatgggaacaggaactggaccttggcgttttctcagaggccgctcaatgtcttgatgatgacattaacaaaagaaatttcgttgttgagcagaaaaaatgttttgtatcacttttcaccatttaggatcagttgtaatttcgttgttgagcagaaaaaatgttttgtatca

SEQ ID NO: 27713 - DNA, 223 bp, Glycine max
  Clone ID: 700889891H1
cccgcagtcgacctctggaacttggttatcttttccgccaacagtgttgagaatcagaattcagaacccatacatcttctatcccttatttacatggctgtatcggcgcgtgccatgcttgaaccaaagtgctgctccgaatccacctttcttcgcgcgtagattctcacgcgcagtctccgccacacactcttctctccgttcggtagcgattggctttaga

SEQ ID NO: 27714 - DNA, 222 bp, Glycine max
  Clone ID: 700889892H1
atggcataattcatcctttgaaggttctggctttgcaagactgtttctccccacaaatctggataatcaggccttttttacacaggattggataacagagtgtatagagttgtggaatctataccaaattgccaattctggaacaatcaatgggcagatgttattgctcgtgttgtaaaaaattaccacaatgttgactgggagtgcttcttgcctttgctt

SEQ ID NO: 27715 - DNA, 227 bp, Glycine max
  Clone ID: 700889896H1
caaagagtgttgtgttggtaattaagaaagagaggaaaaatgccgctcaagttggcgggaggagccactgtcggttcccttctcctatgtgttgctatttctctctttcacatcgctgggccgaagatccctacaggttcttcaactggaatgttacttatggtgacatttaccctcttggtgttcgccaaacgggaatattgatcaacgggcaattcccaggtcca

SEQ ID NO: 27716 - DNA, 242 bp, Glycine max
  Clone ID: 700889901H1
aactgacaaagttttctgagaaaataaggattattattgagagaatggctggctcatcggaagagggacaagtcattagctgccacaccgttgaagaatggaacgatcaactccagaagggcaacgaatccaagaaactcattgttgtggattttactgcttcttggtgtggaccatgccgtttcattgcaccattcttggctgagctggctaagaagttcacaagtgtcatattcctaaag

SEQ ID NO: 27717 - DNA, 235 bp, Glycine max
  Clone ID: 700889912H1
aaattgaaaaccgctcaacttatctctcagctataaaatcagaagttcaaagacaaggggagttcatcagtttcttaattaaggaggtagagtccacctcttttgcagatgtttctgaggtggaatcatttgtcaaatggctagatggggaactatcttcattggtggatgaaaggtcagtgctaaaacattttcctcaatggccagaacaaaaagtagatgcactcagggaagc

SEQ ID NO: 27718 - DNA, 236 bp, Glycine max
  Clone ID: 700889914H1
gagaaaaacacagagacagagacagagggtagtagttgagttgagcgagtggggggaagtagcgaagaatgagtatgttgaaaggaggtgaaatgggtggagaaggagggagagaaggggattgggagtgcagcagttgcaacaacaggaactacgccttcagatcattctgcaacagatgcaagcaaccccgcctcctcgtcgattccaaaacccccgctgattccaagtggctc

SEQ ID NO: 27719 - DNA, 239 bp, Glycine max
  Clone ID: 700889915H1
aaaaaaaagaaaaagaaacgacgtcgtgattattcccggaattaatgttggcgctacaacggacacgatgatcaccactttactttgccaccaaaacccttctcattcctttcaaataaaaataacacactcacagtgttaatgcaatcgccattaacgccaatgccggatatcaccgtcgatttccgcgctccacctccctctccggtggcttccggccggagttccaccgtcaccaa

SEQ ID NO: 27720 - DNA, 239 bp, Glycine max
  Clone ID: 700889916H1
ctcaaagaacttgggccaagatagtagtgtgagtgaattggactcagttacactaccagccaagtctggtagccttattgggtctgggaattactttgtggttgttggtcttggaacacccaagagggacttgtcactcatctttgacactggcagtgatctcacttggactcagtgtgaaccatgtgctcgttcttgctacaagcaacaagatgctatctttgatccatcaaagtcta

SEQ ID NO: 27721 - DNA, 231 bp, Glycine max
  Clone ID: 700889923H1
cgaatagattatcctaagtctttgggaatagtgctgcaatggcttcaagtcaggaggaggtgacccttttgggagctactggaagcccatttgtgtgcagggttcatattgccctcaagttgaagggagttcaatacaaatatgtcgaagaaaatttgaggaacaagagtgaactgcttctcaaatccaacccagttcacaagaaggttccagtgtttattcacaatgaga

SEQ ID NO: 27722 - DNA, 230 bp, Glycine max
  Clone ID: 700889926H1
attgggacgtgatcatggtggatgcacccaccggctacttcgatgaggcgccagggaggatgagtgcaatctacactgctggcttgattgcccggaacaaggaacgcggccaaaccgatgtttttgtgcatgatgtggataggaaagtggaggacatgttctctaaggcttttctctgtgaagggtatttcaaggagcaagaagggaggatcaggcacttcaacattcca

SEQ ID NO: 27723 - DNA, 237 bp, Glycine max
  Clone ID: 700889931H1
gcagcaacaacttgcattgcaatctatcctttctacatagttgtcattgctttgctgcatatccatcatttcttcatagcatctggcttggcagttggtgtcttgctctttttgggaacaagctttttccagtttggtggtctctatatttgtacccattctttttgccataagatggtttccatcattcattcttgcatggtgttctatatcagttttgagaatgcagagtcaatt

SEQ ID NO: 27724 - DNA, 232 bp, Glycine max
  Clone ID: 700889935H1
ctaaaacctcactgcaactcaaaacaggaaccaacagtttcctttgcaatattttcttctttctctcaccgccgcgcgaatcctccttcttcgttgcttcattctctgcttctcttcactcgcattcttccttcctaccgctatgtttctatcaaagttggaattctagttgattagttttcctgactctagttggaaagatgggaagcacatttaatccacagattttggt

SEQ ID NO: 27725 - DNA, 229 bp, Glycine max
  Clone ID: 700889940H1
cagagagaagctatggttgcagctgaaagacgacaggttgatgaaaaagttaaaaaaatcattgaactgaagaataaggtttgttctggtaatgatagcaattttgttgtcctcaatcaaaaaggaattgatcccccatctctggacctgcttgcaagggaaggaataattgctcttcggagagcaaagaggagaaacatggaaagattggttttggcctgtggagggg

SEQ ID NO: 27726 - DNA, 226 bp, Glycine max
  Clone ID: 700889942H1
gccatatcaacctcagaaggtaaaggcctaatccagagcaatggacaagcacaagaacttcttgggaagttatatggaagcatagaagagtcaataaggttgaacgacaaagttgaggaaactaaagacgggtacaaagaagaaatacttaatactacaagaaaagcacaaggtggaggaagttcaggaggcacaggaagtagaggaaagacaggagctggtggca

SEQ ID NO: 27727 - DNA, 230 bp, Glycine max
  Clone ID: 700889944H1
agttcgaattggtcaattgtttcgttctaagaatgatgggtcgatcacatcccgcagatttgtttgctctaaagaggggttccagcacccttcaagagttggttgtggggcttatttaaggattaagagacagccatcgggaaagtggatagtggaccgcctccgaaaagatcataaccatgatctggactctgaaaaggtgggcagggcaaaaagtcttcctgcttcta

SEQ ID NO: 27728 - DNA, 232 bp, Glycine max
  Clone ID: 700889952H1
gttttctgattaactctttcttctcataactctgccgccgcaacagccccaaatccaatggcttcagagaagaaactttcgaacccaatgagggagataaaggtgcagaagctcgtcctcaatatctccgttggcgagagtggagatcgtctcaccagagccgctaaggttttggaacagcttagtggccaaacccctgtgttttccaaagcaaggtacacggttcgttcct

SEQ ID NO: 27729 - DNA, 227 bp, Glycine max
  Clone ID: 700889953H1
gaagtggttcctgactcacacagtatcagtgacattgaaccagttcataaggcaccatccacagaacccgctgcggaggaaacaccaccactggaactagaaaaggaaccaagcaacacagatgagactagtcctctgacagaatcagaaggaggggtgctgaaagaagctcaagttttggaaacatgtgcccaagtggaagagaagcctgagcctgtgtctacacc

SEQ ID NO: 27730 - DNA, 227 bp, Glycine max
  Clone ID: 700889958H1
aaaggatccagtaaccggaaagatgaaagttgctaatccgttaagtagtagacttgtctgggaaacatgtttgagtgaatttaaatccctgggaaagattgctgttaggctcatttttctgcatgcaacttcaagtgggtttaagagtaactcgtctttcactaggaaagtttcagctaataaacactcaagagttaccttggagagggctcagaaaataatatata

SEQ ID NO: 27731 - DNA, 227 bp, Glycine max
  Clone ID: 700889960H1
ggctgctttaatcaaaacatttcttctaatgtttactcttaggaagcagtgtttcttaggtcttgtatgtgcatatgcaccacttttgtgagggagttgttcattttgccatgtttataaatggatgttctagactatgaatcgttgccatgttttagatattagattcgatgcatgtggaggtaggcttgaatatgatctttaaagtattacaaggtattatgcaa

SEQ ID NO: 27732 - DNA, 233 bp, Glycine max
  Clone ID: 700889963H1
cacccctgacttgaacctcttaccgtgcgcatcttctcaatccataacaacttcgccaccgttgcaccgaaaccaatcgccacaaactcgggatctcagattcgacgcgccaaaccatgtcgaaggcgcgtgtctacacagatgtcaatgtccttcgccctaaagagtattgggattacgagtctctcacccttcaatggggtgatcaagatgattatgaggttgtgcgaaaa

SEQ ID NO: 27733 - DNA, 231 bp, Glycine max
  Clone ID: 700889965H1
gtagatttgttgacaaatatgatgtgacccttgatgtttgtttatcttcagtgttctcacaaaccaaagtcctcaatccccagcaagtaactgaaaccatagatgtatgtgtggaagatgaaacagtcaattatctgaacaggaaagatgtgcagtcagctatgcatgcacatcttgttggagttcaaagatggtctgcttgcagcaatgtcctggattatgagctgcgtg

SEQ ID NO: 27734 - DNA, 225 bp, Glycine max
  Clone ID: 700889971H1
gcattgcgttgctctctctataccttctaattcccaaatttctagggtttggtacagagagaaaaaggaacataagatgtctcagaacgggaagctgatgccaaatctagaccagcatagcaccaagcttctcaatctcactgttcttcaacgaatcgacccttttgtcgaggaaattctcatcaccgctgcgcatgtcaccttctacgagttcaacatcgacct

SEQ ID NO: 27735 - DNA, 225 bp, Glycine max
  Clone ID: 700889972H1
ggcgctggtggcttcatcgcctcttggatggtcaaactcctcttggagaaaggctacactgtccgaggaaccctcagaaacccagatgatcccaagaacgggcacttaaaagagtttgaaggagcttcccagagactaactctgcataaggttgacctccttcatcttgactccgttagatctgttattaacggctgtcatggtgtctttcacactgcttctccc

SEQ ID NO: 27736 - DNA, 233 bp, Glycine max
  Clone ID: 700889980H1
ggagcttctttttcccaccttgaattttataaagagggtcatttactatgtatgttgcagctgaggatattgaagctggacctaggacgaagtttcaaacggaaccaactctaccaatatatctaaagttcacggatgtgacctacaagatagtgatcaaggggatgacaacaactgaggagaaggatatcttgaatgggatcactggttctgtaaatccaggggaagttttg

SEQ ID NO: 27737 - DNA, 229 bp, Glycine max
  Clone ID: 700889982H1
tgcataagagctctggacaatgaccaaggacacatccctttcagaggcagtaaactgactgaagttttgagggattcatttgttggcaactcccgcaccgttatgatttcatgcatatcaccaagcactggttcatgtgaacatactctgaatacattaagatatgctgacagggtaaaaagcctatcgaaagggaacaattcaaagaaggatgttttatcgtcaaatt

SEQ ID NO: 27738 - DNA, 226 bp, Glycine max
  Clone ID: 700889984H1
gttaactcctctcagaaacctgctctcaagttcttgatctatggcagaacaggttggattgggggtttgctggggaagttgtgtgaaaagcaaggaattccctatgaatatggaaaaggacgcctggaggaccgatcatcacttgtggctgatattcagaatgtgaagccaacacacatttttaatgcagctggagtaactggcagacccaatgtcgattggtgtg

SEQ ID NO: 27739 - DNA, 222 bp, Glycine max
  Clone ID: 700889986H1
agagagagaatgggtctcatctcaatgcaatttaggttctgaaaaccaaagcttttcataggaaaagttgtgctaagatgccagggaaacctgacactgatgattggcgtgtagagcgtggggagcagattcagtttcagtcttccatttactctcatcatcagccttggtggcgcggagtgggggaaaatgcctccaaatcatcttcagatgatcagttaa

SEQ ID NO: 27740 - DNA, 221 bp, Glycine max
  Clone ID: 700889989H1
atcaccgtttgacaatcccatcgttaaaggcttatatgacaagtggcttgagcagcctggttctgtgaaagctgggagatacatgcacacacaatatcatcctgttgaaaaaagcattacttctcagttgcataattggtgaggtgttgaaactgaacttttcatattgtttcttctcaaggtcattttgtggtattaggcggaagagtactttaatcctt

SEQ ID NO: 27741 - DNA, 224 bp, Glycine max
  Clone ID: 700889992H1
ctttgactcttcttcgtctcaaatctcttcgttccttcgattcgttccatttcttccaaaatggccaaagacccagttcgcgttctcgtcactggagctgcagggcaaattgggtatgctcttgtccctatgattgctaggggagtgatgttgggtcctgaccagcccgtgatcctccacatgcttgacattcctccggcagcagagtcattgaatggggttaa

SEQ ID NO: 27742 - DNA, 230 bp, Glycine max
  Clone ID: 700889996H1
ctttcttcttcttctcttaaaagagcctttgctttttctttaggcctttccgaattaagtacttgtttcattttctctcgaagcaagaaaaatgttcatcgagagtttcaaggttgagagtcctaacgtgaagtacacagagactgagattcagtccgtgtacaactatgaaaccactgaacttgttcacgagaacaagaatggcacttatcagtgggttgtcaagccca

SEQ ID NO: 27743 - DNA, 247 bp, Glycine max
  Clone ID: 700890001H1
gatgaagggagattaccacaggtacctcgccgagttcaagaccggcgccgagcgtaaggaggctgccgagagcacctctctgcatacaaagccgctcaggacattgcaaatgccgaactgcctccaactcatccaattaggcttggccttgcacttaacttctctgtattttactacgaaatccttaactctcccgatcgtgcctgcaaccttgcaaaacaggcttttgatgaagctattgctgaat

SEQ ID NO: 27744 - DNA, 241 bp, Glycine max
  Clone ID: 700890004H1
gaaagatttggtattcaaagtgcaatactgtggaatatgccactcagatctacatatgttaaagaacgagtggggcaacacaacctatcctctggttcctgggcacgagattgctggtgtggtaacagaagttggaagcaaggtgcaaaagttcaaagttggagaccgggtaggtgtggggtgcatgattggatcctgtcgttcatgtgaaagctgtgatgaaaatcttgagaattactgc

SEQ ID NO: 27745 - DNA, 239 bp, Glycine max
  Clone ID: 700890005H1
cacacacttgttctgttcctacggttttgttatggctcttccttcactatcctttctcttcatcttcacttccttcatcgtctccgtctcacactcaataccctttattgttattcatggaattggggatcagtgctctaatcgtggagtgaaaaaattcacacagcaattgagcagcttctctggtgctgaaggatattgtgtcgaggttggaaatggatcatgggattcatggtttg

SEQ ID NO: 27746 - DNA, 240 bp, Glycine max
  Clone ID: 700890009H1
catctcaaaacctagtctgaaaccatagcacaaaatcaaccatgtctccattgattgttgccttggctacaatcgcagcagcaatcctcatatatcgtataataaagttcataacacgcccatccctccccctcccaccgggccctaaaccatggcccatagtgggaaacttgccacacatgggcccggtgccgcaccactccctcgcggcgttggcccgcatccacggcccgttgatgc

SEQ ID NO: 27747 - DNA, 239 bp, Glycine max
  Clone ID: 700890010H1
gaggatatcaagggattggattttatagtttttgaggagccggaaatgacaattataagttgccacgttgaaggaaatggtacagatgaactacataaacacctgatggtagaaatcaggtcagctagtgacctaaacaagatagagtcagtcttccccctgccaatttcaaacttcttccaagtgaagggcttatcaaaaggcagacaccttctaaagcttcaatctggtctcccatc

SEQ ID NO: 27748 - DNA, 239 bp, Glycine max
  Clone ID: 700890011H1
cacttaactagtaatatttattagaatttgctagagaattagaagaataaacataataccccagatggcttcaaaaacttgttcctcccttgcccttttcctcacactcaacctcgttttcttctcacttgtctctgcatgcggttatacaccatgccctggtccaaacccaaagccaaggcccaaccccaaccctaaccctaaccccagcccaagtggctcgtgcccccgtgacgcac

SEQ ID NO: 27749 - DNA, 238 bp, Glycine max
  Clone ID: 700890012H1
ggttatgttaaaaaaccaaattttctattggagactggtccagatgacgaggtcttcaatcctaaagctaagttacctgtgaagactactttgaaggtgactgtatatatgggggaaggatggtactatgatttcaagcatacacactttgatcaatattcacctccagacttctacacaagagtggggattgctggagtccctaatgatactataatgaagagaactaaggcaatag

SEQ ID NO: 27750 - DNA, 240 bp, Glycine max
  Clone ID: 700890019H1
ccactacacgcaaagcaaaacacacctccacattcacccttagtcctcactcaacaaacaaattagccatgagcaccaaggagtgctgccaccacgacgaggagcggcgtcagtcccccgccgcgtattcgccgcgatcctcggcttcatcctcctcatcctcctggtgatcttcctcatctggatcatcctccgccccaccaaaccccgcttcatcctccaagacgccaccgtctacgc

SEQ ID NO: 27751 - DNA, 237 bp, Glycine max
  Clone ID: 700890021H1
cacaatgtccgattcagccagggcagagctatgtctacaacttcaccatcaatggtcaaagaggcacacttctctggcatgcacacatcacgtggctaagagccacggtgtatggtggcattgtcatattgcctaaacgaggcatttcttatccatttcctaaacctgacaaagaaaagataatcattctaggtgagtggtggaaatcagatgttgaagcaattctcaatcaggctg

SEQ ID NO: 27752 - DNA, 237 bp, Glycine max
  Clone ID: 700890022H1
tgaatttaaaaccaacacccatgtccctaaactaggggtaatgcttgtggggtgggggggaaacaatggctcaaccctcactggtggtgttattgctaaccgagagggtatttcatgggcaacaaaggacaagattcaacaagccaattactttgggtcgctgacccaggcatcagctatcagagtggggtctttccaaggggaagaaatatatgctccattcaagagcctgcttcc

SEQ ID NO: 27753 - DNA, 239 bp, Glycine max
  Clone ID: 700890024H1
gaaacttaatcgatcatcacttcacttcactaatacatcatggcagacgagacccagaacaagtatgagagctctgaggttgaggtccaggatcgtggtgtttttgactttctcggtaagaaaaaggatgaagaagacaagcctcatcctcaggaggaggtcatcgccaccgagtttcaaaaagtcactgtctcagaccaaggagagaacaagcacagcctcttagaaaagcttcaccg

SEQ ID NO: 27754 - DNA, 238 bp, Glycine max
  Clone ID: 700890027H1
tctttttccgagtcttccagtgaaagaaaggcagcgatggaagaagacttcgacatccccggcggcgaggaaatggatctcggcgaagacgaggtcggcgaggagagggagatcggctctggcggcctcaagaagaagctcctcaaggaaggtcaaggctgggaaacccccgaagtcggtgacgaagtccaagttcattacacggggactttgctcgacgggactaagttcgattcga

SEQ ID NO: 27755 - DNA, 237 bp, Glycine max
  Clone ID: 700890028H1
tgatgaaattgttttttaattttttaaacttcgcaatttggaattcttgttattaagccttcacttatgttataagtataaatgctttggctttaaccaagttcattagttgaaaaaggaaaaagaatgtagcttgctgagttttgcaacaattaaccaattgtgtcaagctaaagttatattgttcctaacttccaagcttcgatgatttttcttggttggttgacttggtaaaca

SEQ ID NO: 27756 - DNA, 237 bp, Glycine max
  Clone ID: 700890029H1
gtgcatgccaccaaagtgtccctctctgccctgtgagggtgaagttgtacacaaaggccacacggaaaaagtcatcatattgagtgaatggtggaaatcagatactgaagctgtaataaatgaagctttgaaatctgggtcggctccaaatgtctctgatgctcacacaatcaatggtcatcctggatctgttcaaaattgtgcatcacaagggggatacaaactccaagttcaacc

SEQ ID NO: 27757 - DNA, 240 bp, Glycine max
  Clone ID: 700890034H1
ttccattccctttaccgacctcacagcacatcaatacatcttcaaattcccctcttctctctctcacatctcttcgtcctctctctcacatcacaatttcataaaaaacctctttttaagtttcttgcttctttctctctgaaagaaaattgaagtcctaaccagttggctcttttgttttatcgttctccatggctcagaaaaccgagaaagaagaaaccgacttcaaagttccggaaa

SEQ ID NO: 27758 - DNA, 237 bp, Glycine max
  Clone ID: 700890039H1
attacaatagcctctattcaaagaggagaactaggtctagatattatgatgattcaaaatcagaagaatttaattcttctaggcttaaggaaaaagaaaaataacaaatttatgaaaaaagaaatatttgttatcgaaccagttcgcctgtctagaaaaaacaataaacaattttttatgtatcaaaccataggtctttcattaattcaaaagaataaacgaaaaatttatcacaaa

SEQ ID NO: 27759 - DNA, 236 bp, Glycine max
  Clone ID: 700890041H1
atgacagggtggttgaagtagtaggggatcccactggagtgcataaggcattagagttaattgcctcccacctaaggaagtttttagttgatcgcggtgtaattccaatttttgaaatgaatatgcaaacagctaatacccaccatgcggagcacatgccaccccaccaatcttggggtccacctcagggtcttcctccaaatgttggtggaggttctggttttggacctccttct

SEQ ID NO: 27760 - DNA, 235 bp, Glycine max
  Clone ID: 700890045H1
gcacttaccagcaccactacttataccaagagaaacaaataaaaaatgcatgttagatggctacgaaattccagccaagacattattatatgtgaatgcttgggcaattcatagagatcctaaggcttggaaagatccagaagagtttatacctgagaggtttttaaattgcgacatagatctttatggacaagattttgagtttattccattcggtgctggtcgtagattgtgc

SEQ ID NO: 27761 - DNA, 236 bp, Glycine max
  Clone ID: 700890046H1
gaactcctagctattgggtgcaactatttttctcagagtcaagtggagcaacacttctaagtacatcacttcaagcaccttcctcaaattcacttgttgcatcagcaattacatttcaaaattctgtagataagaaaaattacatacgaataaaggttgtgaacttcggtaccactgccgtgaacctcaaaatctctcttgatggactggaaccaaactcattgcagttatctggg

SEQ ID NO: 27762 - DNA, 237 bp, Glycine max
  Clone ID: 700890048H1
ggatctcttatagtaagcttcaaaggaaaggacctaacacgcattgaatcagctataaaagcattacacaagaagtttcaacccagtgctttcgttgagatgaactaggatgatgttctaaatgctatggtccatttcttttggatgccaacagaatgaaaacctttcatggctgggatcatatcattctcatattatctacaaatataagatgcattgggataaagatggagaggg

SEQ ID NO: 27763 - DNA, 239 bp, Glycine max
  Clone ID: 700890049H1
catttcacaattccagtctgattcattgctcgaagttatgtcatcactacccttgaagaatcaattcaactggttaactctgccattcatcttctgctaatggaacgaactactgaaaaaacattcaggatcttccagtcccaggagcacgagcttgttaacaagtacaattatgttgttagcctttggaaaagggtatcaactgtcactggagaattgcactatggtgatgcattgag

SEQ ID NO: 27764 - DNA, 234 bp, Glycine max
  Clone ID: 700890056H1
attgtttgttgttgtaactcgttcttcttcttttgttgttctgtgtttgtgtttgttttttctctcacctgaaaatgtcttgctgcggtggtaactgtggttgcggaagctcctgcaagtgcggcaacggctgcggaggctgcaagatgtacccagacttgagctacactgagtcaaccaccaccgagaccttggtcatgggagtggcacctgttaaggctcaatttgagggtg

SEQ ID NO: 27765 - DNA, 234 bp, Glycine max
  Clone ID: 700890061H1
tatcactgtgttgcgagcagtgatcgattctgcgaactgcgattcgcattgccaatttcaacagcgtgcgttcgtacgtcggagatggagtcgctaccgacgacgaagcgaggaggagcgagatcgaagcccgttcagacctcgaaatcgtccctcgtcatggccttcttctcctgcgtcgcgtggctctacgtcgctggaaggttatggcaagacgcagagaatcggaatttg

SEQ ID NO: 27766 - DNA, 239 bp, Glycine max
  Clone ID: 700890065H1
gtgacttgagaaaaagaaatttagggtcttaagggtttcattctgcggcatcagacatgggaggaggcaatgggcaaaaggcaaagatggcacgcgagaagaacctcgagaagcagaaggccgcctcaaagggaagccagctggattcaaacaagaaagcaatgtcgattcagtgcaaggtgtgcatgcaaacatttatgtgcaccacatcggaagtgaagtgtagggagcatgctgaa

SEQ ID NO: 27767 - DNA, 233 bp, Glycine max
  Clone ID: 700890070H1
catcatcatcgagttctccgaaaagaggaaggcattcaaatttgtttcttattcttggaattgctattggcataatcttcattgctatcatatctgtacttatattctgtttatgtacgtttctgtcaaaagcaaagacacctccgatagaaactgaaaagccaaggacagagagtgcaatttcaactgtgggttctcttccccacccaactagtacacgatttattgcttat

SEQ ID NO: 27768 - DNA, 233 bp, Glycine max
  Clone ID: 700890073H1
caaaaccatatatgacttcaagctggggcaccattttctctgagagaaaaagggaaaaagaagatattaaaagaagaaaatgatacccagttatatacattattaccactttatgtcaggaagcttgtgtgtgtacgaaggggttttcatcttttttattttactttattttggttaattcacatgctttctttctaggacttttagaatgagggttttctatgggaatcatt

SEQ ID NO: 27769 - DNA, 232 bp, Glycine max
  Clone ID: 700890074H1
cctgttcatgaggaagctaagatagtaggaaaaacaagctatgccagcaacttgtctgggtatgatgaatatgttccaatggtagacatacctgttgatgctggttggaagaagcaagcatctctacagaggtcttacacctctaaaggagcacctcctcctgacactcagaaaactcctgaagggattcaagctcggatgtgggtagcactgtctatcttcttcttgactg

SEQ ID NO: 27770 - DNA, 232 bp, Glycine max
  Clone ID: 700890084H1
atccacccacaccactcaaacaggtacagggtgtcagttttccaagagatgtgattgctgaagaatgtatacctgcttctgtaaacaacagaaaaactgggatttctaatatgattgacatggagaggaggaaagagactggcactgtgggttgttcatttggagaaaacagagaatcaaatcatgctgatagtattacatgctcagttggtagttgtagtatcactagcag

SEQ ID NO: 27771 - DNA, 231 bp, Glycine max
  Clone ID: 700890091H1
ctcttcaaaagggagaagaaaaggaaagaaaactctcaaaaaactattatagcaatggcagaacaaaaccaaaaccaaacaactgaagctggaaggcaccaagaggttggtcacaagagccttctccagagtgatgctctttaccagtatattctggagacaagtgtctacccaagagaacctgaatccatgaaagaactgagagagttgacagcaaaacacccatggaac

SEQ ID NO: 27772 - DNA, 263 bp, Glycine max
  Clone ID: 700890110H1
caccaaattaatccatatatagagagagttaggaaaacaatggaagccatttctcctaagcatcttatgacatcccttgtaataattatagcttctagtttgaccgcacactgtggctgtgccaagagagggggtgaaagaccatacaaagaagccaacacactgttcataagaacatcttgcagctccacaacatatccaagactctgctacagctccttagtgaagcatgcagacttgatccaaacaaatcgtgtggttct

SEQ ID NO: 27773 - DNA, 260 bp, Glycine max
  Clone ID: 700890111H1
ggttggaaacgcctgctgggagctttactgcctcgaacacggcattcagcctgatgggcagatgccaagtgacaagaccgttggtggaggtgatgatgctttcaacaccttcttcagtgaaactggggcaggaaagcacgtgccccgtgcgatttttgtagatcttgagcccactgtgattgatgaggttaggactgggacataccgccaactattccatcctgagcagctcattagtggaaaggaggatgcagcaaaca

SEQ ID NO: 27774 - DNA, 262 bp, Glycine max
  Clone ID: 700890122H1
gagaatttcttccatgttacagatgctatcttctcttaaaaggatcatgtctttgccagatgatacaagtatttactgtggtcatgaatataccttgaacaattcaaagtttgccttgtctatagaacctgaaaacaaggaacttcaatcctatgctacccatgtatctaaccttagaaataaaggcttgcccacggtaattttcagaacttggcttctttaatggatggtttcaagtgccctctgtaggggctcttccttc

SEQ ID NO: 27775 - DNA, 257 bp, Glycine max
  Clone ID: 700890127H1
aaccttgccttgccatggcctcaaactccatggctggcttgatcaccggttcgaattctcacttctcgcgtgactccgatgagcatcagactcctcctacccgacaggcttcatcgaaaactacttgtcgagtttgtggcgatgagattggatacaaggaaaatggggagctgtttgtggcttgtcatgtgtgtggatttcctgtttgccgaccgtgttatgagtatgagaggagtgaagggaaccagagctgtcct

SEQ ID NO: 27776 - DNA, 257 bp, Glycine max
  Clone ID: 700890128H1
cgcttctgattccgtcttcaatcacctcgttcgtgctcccgaagatcctatcctcggggtaactgtcgcttataacaaagatccaagtccagttaagctcaacttgggagttggtgcttaccgaactgaggaaggaaaacctcttgttttgaatgtagtgaggcgagttgaacagcaactcataaatgacgtgtcacgcaacaaggaatatattccgatcgttgggcttgctgattttaataaattgagtgctaagc

SEQ ID NO: 27777 - DNA, 259 bp, Glycine max
  Clone ID: 700890134H1
ttttgagtaatggggaacctggtactgctcagaatgtagacaaaacaaccagcttggcacgaaaagtcttccgtctctttaagtttgtcaatgacctacatgctttgataagtccaacaccacaggggacacccctccccctagctctgttgggaaagtccaagaatgctctactctccactttcttgtttcttgatcaatttgtgtggcttggcagaacaggcatctaccagaataaagagcgcaccgaactaattgg

SEQ ID NO: 27778 - DNA, 259 bp, Glycine max
  Clone ID: 700890139H1
gctatctctgttggggacactcgattgtccattgagaagtccacttttgaagtgggggatgatgggaatggtggtgtgatcatagactctggcaccacaatcacctacgttcaacaaaaggcctatgaggcactcaaaaaagagttcatttctcaaaccaaacttgctttggacaaaactagctcaacagggttggatctttgtttctccttgccatcagggtcaacacaagtggagattccaaagcttgttttccatt

SEQ ID NO: 27779 - DNA, 258 bp, Glycine max
  Clone ID: 700890141H1
cctaatcgcactccgctctccgcactccgctattgcacctccctcgacggcacctcaggcgcactcgttttcggttccgattgcattgaatcaaatctgagaaccattctcattgcccgtctgtaatcatgtcaggaaagtatatcatttctgctattcttggatcatttggagttgcatgggtttgtgattattatgtttcagagaaaaagctatttggaggttctacccctggcactattacgaacaatgagtggg

SEQ ID NO: 27780 - DNA, 258 bp, Glycine max
  Clone ID: 700890142H1
aagaggtcaagccactgatagtcatagtcttgcagaaagagttcggagggagaaaatcagtgaaagaatgaagcttctccaagatcttgtcccaggttgcaacaaggtcacgggtaaagcactaatgcttgatgaaattataaactatgttcagtcattgcagcgccaagttgagtttctgtctatgaagttggcttctgttaacaccaggctggattttagtattgagagtctaatctcaaaagatatatttcaatc

SEQ ID NO: 27781 - DNA, 256 bp, Glycine max
  Clone ID: 700890143H1
tttacaacaacaatggcttctgtgcctcaaccaaaaatctcccttctaaccttattcttcttctcgtccttcaccatcattgcgcatgcaattgttcctcaaaacgaaaccttcaaatttgagaactcaggtgaacttggaccctacatcgttgagtacggtgcagattacagaatgataagcatcttcaactctccattccaagttggtttctacaacaccaccccaaatgccttcactctagctttgcgtgtag

SEQ ID NO: 27782 - DNA, 257 bp, Glycine max
  unsure (1)..(257): unsure at all n locations
  Clone ID: 700890148H1
agaagattgaagaggacatgtntgatagaatagctagagaaaaagcggaagaagaggcaaggcagcaggcattgcttagaaagcgatcaaaagtccttcaacgggaacttcctaggcctcctacagcatcattggagcttataagaaattccttgatgagaactgacgtggacaagagttcctttgttccaccaacctctattgaccaagctgacgagatgattagacgggagcttctaagtttactggagcatgac

SEQ ID NO: 27783 - DNA, 256 bp, Glycine max
  Clone ID: 700890150H1
cttttgcttccttaacctattttgttatcctcaattttcaatggctcaatcccattctggaaaaacctcttccatgacttcaatactcctcctgtttatgcttcttatcagtaatacaggcacaacaggtgcacaatctggtgtatgctatggaagagttggcaacaatctgccatcgccacaagaagtagtttccctttttaaacagtacggcttccaaaggatgagaatctatgatcgaaaccatgaagtcctc

SEQ ID NO: 27784 - DNA, 254 bp, Glycine max
  Clone ID: 700890158H1
gaaagtctcaacctttattcgaaagagcaaggatctgagttgagttgagtgatcatgtgtggtggtgcgattatctccgacttcataccggcaggtcccgccagcggggcgcggcgcgtgaccgccgacatcctgtggccgagtttgaggaagcgcttctcgaagccgctgctggacgatgatttcgaggctgggttcagagaattcaaggatgattcggaaatcgaggatgttgatgacgaggacgatgaaga

SEQ ID NO: 27785 - DNA, 251 bp, Glycine max
  Clone ID: 700890160H1
agaagaattaatcgggtggacctatgcagatccctcttgggcccggatcgctgcccttgttccagttgtagtgacctgtgcagaggctggggatgaggttgcaaataagatcttgctagattctgtacaagagctagcttcaagtgtcaaagctgttgtagagagacttggattgtgtggtcaagatggaaagagtgcctttccccttgttatggttggcggtgttctcgaagcaaataggaggaggtggg

SEQ ID NO: 27786 - DNA, 251 bp, Glycine max
  Clone ID: 700890161H1
ggaaagtgtgatggaggacgaggctgagagtgaaggggagttgccctttggtggtgacgaatacaatggtcctgtaggaaatggtgtgcctaatgtttcaaggctttctgtgtctgtgaaaaacacgagaactggtgagaaaagtaggcagcagatgggtgtaaagcaaaagagtggctttttggctgggacatcatctggaaacacaactgtgaatgagttacctgcaagctcatgtttcgtgaagctaa

SEQ ID NO: 27787 - DNA, 248 bp, Glycine max
  Clone ID: 700890169H1
ccggattcgagtacctgtcgaggttccaatctcgctccctcgacgccaacgccagagaagaatccgttgcatggattctcaaggtacacgcgtattatggctttcagcctttgacggcgtacctcgccgtcaactatatggatcggtttttggattctagccagttgccggaaacaaatgggtggcctctgcaacttctatctgttgcatgcttgtctttggcagcaaaaatggaggaacctcttgtt

SEQ ID NO: 27788 - DNA, 244 bp, Glycine max
  Clone ID: 700890178H1
gtgaaactgaaaccgcgaccaaatccaaaagtttgccagcatctactgagaactatatttcaagtggaaataggttgctggttgacagttgtccttgcaatcttgtatctcaaatttgctctttggcaattggacttcaagactgtggcctcgctaccgggcagacaaagggggatcaagcaaaaatttgcaggagcaaaagccttcagttgagcacttatgacacggacaagtgttccagaaa

SEQ ID NO: 27789 - DNA, 246 bp, Glycine max
  Clone ID: 700890179H1
ttcacattcttccagaatcatcaaagccatcaacgggcttgacttggcaactagctggaagatgaagcaagcaactcttttcttcttctcactcttcctactcctttcctccaccaccatggccatttcaccagcacctgcagcagcaccaaaagccacagcaaaaactcctcctaccccaaaggcaacagcaccatcaccaaaaccattagttcccacaatacctcagtctccagactctcctga

SEQ ID NO: 27790 - DNA, 246 bp, Glycine max
  Clone ID: 700890185H1
ttgccagcatctgcacctcaattttatcaacaggtgcagtctcctactgttcctctgcctgaacagtatggaggagcttcctccagcttgagagtggccaggcctcctatattgcctggttcatatgtgcaaggggcttatggtcctgtacttctttccccaggggttgtccaatttccgggatggagtcattattcggcacctgtaagtcctgtgccatctcctggcgctcaacctgctgttggg

SEQ ID NO: 27791 - DNA, 247 bp, Glycine max
  Clone ID: 700890188H1
cactcacctgctaatattactcagtgtgtagatcttttgcatttagcacctaactctcctgatgctaaggtgtttgagggattccaaaaatctgccaaaacaaacagctccaccccagtttcagtttccagtggtgctgagaagggatcaagctcaagtgctcaggaaaagagtggtgctgtctccacaattacaaaggcacaccacctgttttactctatcttaccattaccattattatttcttg

SEQ ID NO: 27792 - DNA, 243 bp, Glycine max
  Clone ID: 700890195H1
gctagatcggttgcttaggccaggaggttactttgcatactcatctccagaagcatatgctcaggatgaagaggatcaaaggatatggagagagatgagcgcccttgtgggacgtatgtgttggagaattgctgcaaagaggaaccaaactgtcatctggcaaaaacctctaacaaatgaatgctatatggagagagaacccggcactcgccctcctctttgccagtctgatgatgacccaga

SEQ ID NO: 27793 - DNA, 237 bp, Glycine max
  Clone ID: 700890208H1
gtgaaacatgacagggttgaggaagcacaaagtgcaacaccacccccaacagaaggagatgatcacaaggttgagcctgctgttgcagtagaaaagattgaagattctgtgccatcagatgaatctgtcgttgcagttgaagacagtgtaaaggaggagaaggaagtggttcctgactcacacactatcagtgacattgaaccagttcatcaggcaccatccacagaacaagctgtg

SEQ ID NO: 27794 - DNA, 238 bp, Glycine max
  Clone ID: 700890210H1
cagcatttgatcaaggcaatacaaggccacttagggaacaagaatataaaagaaggaaaaagaagaagacgacatagcaaagcctagaaacatgggtcaccattcttgctgcaaccaacagaaggttaaaagaggactttggtctcctgaggaagatgaaaagctcatcagatacattactactcatggatatggctgttggagtgaagttccagaaaaagctgggcttcaaaggtgt

SEQ ID NO: 27795 - DNA, 239 bp, Glycine max; identical to SEQ ID NO: 27745
  Clone ID: 700890213H1

SEQ ID NO: 27796 - DNA, 235 bp, Glycine max
  Clone ID: 700890227H1
cgtggtctcaaagcatgacataatgccaaggcttctctttgctcccataacaccttacactgctcaaataaacttcctgcttcagttttggcaactgtccatgactgctccaggctttgggaagcttgcagttccaatttctgaccaacagaaagagctgttcaactttgtgatgagtcacttggatgcagccacacaagatgaagaagggtctgcacctgttttgtttcaccca

SEQ ID NO: 27797 - DNA, 239 bp, Glycine max
  Clone ID: 700890229H1
accgcgttgtgcatggtattgatgtctttgatccaaaattcaacattgtctcccctggagctgatcaaaccatttacttcccccacactgaaaccagccgtaggttgacatccttccaccctgaaatcgaagaactcctttacagctcagtggagaatgaagaacacatatgtgtgctgaaggaccgcagcaagccaattatcttcaccatggcaaggttggatcgagtgaagaacatc

SEQ ID NO: 27798 - DNA, 189 bp, Glycine max
  Clone ID: 700890230H1
gtgagagccgccgctatctcgagatgttctatgctctcaagtaccgcaaattggccgagtctgtgccccttgctgttgagtaaactgaggatgaagagttggataaagaaatggaggaaccggctttttgtttctcatttggagtttgtcttacttgagttctataaataatatgtccctgatgatttt

SEQ ID NO: 27799 - DNA, 233 bp, Glycine max
  Clone ID: 700890240H1
gtaccctccataccagccaaatcaagcaacaaacccatcacctgcagaaacactgccaaacagcatggccatgcaaatgccatactcgggagttccaccaccaggatctagccgcaccgatgccataccttatggatatggaggagctggcagaacagttccacagcagcctccaccccagcagatgaagagctcttttcctgcacccccagctgacatgtatggaccttccg

SEQ ID NO: 27800 - DNA, 238 bp, Glycine max
  Clone ID: 700890247H1
aataataatggcttgcgggctaaccaaactccacgaatgcgaacatatactaaggttcaaaagcgtggctctgttggaagatgtattgatgttacccgttacaagggatatgatgaactccggcatgatttggctagaatgtttgggattgaagggcagctagaagatcctctaaggactgattggaaattagtatatgtggatcatgaaaatgacattcttcttgttggtgatgacc

SEQ ID NO: 27801 - DNA, 235 bp, Glycine max
  Clone ID: 700890250H1
gatgaattgaggttggaatgagctactggtggatttagatcatggtgcatatactgaagacaataagccgtgcccataataaccctcatccttgcgctccagtcaagaggttcaacttccttaacatgcagatgctcaaataagtttccattcggagcatactcaaacaccatcatccttgtgaatggttcttcttcgtcacagtacccaataaggttggtaaagttcttatggt

SEQ ID NO: 27802 - DNA, 229 bp, Glycine max
  Clone ID: 700890257H1
cctgatgggaggattggggagactgcggctttgaatggggaagagtttgatggttgtgaatttgagaacctgcagtgtctggcaagccagaatttggggctcaaggatcttcgcgcttgtggggttggggttggacacacagggtctaatgtaaattcttctgccttatcaaagaaaagaaaagggggatctcgtgctgcaacagctggttgaagaattgataatttgg

SEQ ID NO: 27803 - DNA, 237 bp, Glycine max
  Clone ID: 700890263H1
gtcgactcctgctaggaagaggctgatgagagacttcaagaggctgcaacaagacccgcctgcagggatcagcggtgccccccaggataacaacataatgctgtggaatgctgtcatatttggtcctgatgatactccatgggatggaggcacgttcaagttgactctccagtttactgaggattatccaaataaaccaccaactgtgcgatttgtgtctcgcatgtttcatccaaa

SEQ ID NO: 27804 - DNA, 225 bp, Glycine max
  Clone ID: 700890289H1
catagttgataacaccaaaggcacaacaacattgagggaatgaggcttgtcatatcagctgtatgtgttattgtgctattttcttatgctgctgcgtatgatcctttggatccaaatggaaacataacgatcaaatgggatgttgtgtcatggacaccagatggctatgtagccgtggtaacaatgagcaatttccaaatgtttcggcacatcatgaatcctgga

SEQ ID NO: 27805 - DNA, 226 bp, Glycine max
  Clone ID: 700890290H1
ttgcattccaaactcaccatcactccagggttggaagacaggtccatgttgtttattcggctggaacataggcaagaatagagttaatggcaaacctcagattaagtaccatgatattgatcttacattcccaacttctctggtcgacaaaacatttttgagagggaaggagctcaaatgctgctatagggctacaattgatggattcagtgcaaccaatttccac

SEQ ID NO: 27806 - DNA, 253 bp, Glycine max
  Clone ID: 700890330H1
cacgaggaaaaaatgtttagtgccagtgtttattactgattttccagaaactacacttttgctggctggttatgtttgtgttgtcgtgtggtttcatattttcttgattaggttctattcccattcagttattcccaatttctaagcgcaatgccatgcaattgaagttgtattttactttacattgctcattcctttcagttagcatggtctttagaacctgctattgatatctttttcttcttctcaaatg

SEQ ID NO: 27807 - DNA, 265 bp, Glycine max
  Clone ID: 700890368H1
gaataatcgagacacagatcatagtgatcattttttaatttctcagatttatccgacgtcgctgcagatccaccaaccgttatggctgccttcagcggtgatgaaacggcaccgtttttcggcttccttggcgccgcagctgccctcgtcttctcctgtatgggagctgcctatggcacagcgaagagtggcgtgggcgtggcttccatgggtgtaatgagacctgagctggtgatgaagtcgattgttcctgttgtcatggctg

SEQ ID NO: 27808 - DNA, 255 bp, Glycine max
  Clone ID: 700890373H1
gattgttggaggtgaccataggctgaggaactattcttccataatcaccgtccatccagaggtcatcgatgggagacccggtacaatggtgatcgaatcatttgtggtggatgtgcctgatgggaacaccagggatgaaacttgttactttgtggaggctttgatcaggtgtaacctaagctctttagctgatgtctcagagaggatggccgtgcaaggtcgaaccaatcctatcaaccattaagcatgtctagg

SEQ ID NO: 27809 - DNA, 261 bp, Glycine max
  Clone ID: 700890379H1
gtcgaactgatgctggagtgcatgctttgtcaaatgtttgtcatgttgatattcaacgcatcagcaaaaggaggcctggtgaagtgttaccacctcatgaacctgctgtcgttggaagagctgtaaaccatttcttacagaagcacgacagtgacttaatggttattgatgttcgatgtgttccatctgattttcatgcaagatttaaagcgcaagagcgcacatacttctatcggttgctttctgggccagagcctttgt

SEQ ID NO: 27810 - DNA, 255 bp, Glycine max
  Clone ID: 700890382H1
caggataagtcttggcgcgtgcgttacatggttgcaaatcaattgtatgagctttgtgaagctgtaggccctgaacctaccagaacggaattggtacctgcttatgtgcggttgcttcgagataatgaggctgaagtgcgcatagcagctgctggaaaagtgaccaagttttgccggattttaaatccagatctttcaattcagcatattctttcttgtgtgaaggaattgtcatcagattcttctcagcatgtc

SEQ ID NO: 27811 - DNA, 255 bp, Glycine max
  Clone ID: 700890383H1
accgatgctgccgtacagaagagcggaggttggttcggcttcatctccgaagctatggagttcgttctcaaggtgttgaaggatggtctttctgccgtgcatgtcccttatgcatatggatttgctatcatattgctcactgttatagttaaggcagcgacgcttcccctgacaaagcaacaggttgaatctacattggctatgcaaaatcttcaaccaaaaattaaggccattcaagatagatatgctggcaat

SEQ ID NO: 27812 - DNA, 255 bp, Glycine max
  Clone ID: 700890404H1
gaagacgatagctatcactgaatatgggattcgctcagtggctgccaagtatatcatgaagtgtgatgatgacacgtttgtcagaatagagtctatcatcagcgaacaagaaaagtaggaagtggtagaagtcctatataggaaatatgaattaccaccataggcccctacgttctggcaaatgggcagtaacatatgaggaatggtcagaggaagagtatcctacctatgctaatggtccaggctatacaatct

SEQ ID NO: 27813 - DNA, 254 bp, Glycine max
  Clone ID: 700890407H1
gccaagaggcaattgctagaatcagggtggagcatatcatacgggaacaaaatacatgggctgcatatgaaattttggagttgttctgtgaatttgttcttgcacgtgtacctataattgagaatcagagggaggccccacggaattgcgagaagccattgcaagtataatttttgctgctcctagatgttcagatgtaccagacttattgcacatcaagaacttgttaccactaaatatgggaaagaatttgt

SEQ ID NO: 27814 - DNA, 254 bp, Glycine max
  Clone ID: 700890408H1
caagaaggatattagtggaaatgccagagctctgaggaggttgagaacagcatgtgagcgggcaaagaggactctctcttccactgctcaaaccaccatagagattgattccttgtacgagggtattgacttctcacaaccattacccgtgcccgttttgaagagctaaacatggatttattcaggaagtgcatggagcccgtggagaagtgtttgcgggatgccaagatggataagagtaccgtccatgatgt

SEQ ID NO: 27815 - DNA, 261 bp, Glycine max
  Clone ID: 700890417H1
ccgccaccaccatcatgacggctatcaccatcaatcttcagtactatactacttactacaatacaaaatgcatacgtaaaaagcagttcagtgaaggaagtggggcaggcattcgctttcttttgttagcattattatgtattattttctttcttctcatatctgtagtagctgaaggaaaccacaggttaaaataacacacaaagagtcacctgagtcaatgtgtagtaggaactccatggcactgtaatttcttctcat

SEQ ID NO: 27816 - DNA, 251 bp, Glycine max
  Clone ID: 700890430H1
gtagaaggtccaaagaagattgaggaggtacacagggatgccgctcaggagaggcaggcccaagctggtaggtcaggtcgtggtcttggcaacaatcaatcagctagacggaatcccatggattttggtccagaggatcttctatgctgtcttctcccaattctcaaatgggtggactgcgtggtcttcctactcaagttcgtgggtatggtgcttttcaggatgctcgatttgaggaacgacaatcttat

SEQ ID NO: 27817 - DNA, 253 bp, Glycine max
  Clone ID: 700890431H1
agatcatccctgtaaatactgagctagtggagtgaggttcatggccaaaacaaggcaaaataataaatgtattcttttgtcagtgtctggtaattagggatgtatacgcactgatatagctagttccttcttaccttttatataaggtacttctatcatctggactagtttggtcaactctgtactatgcagatatcatttagtggtctacttatcttgtggcataattttaattcatctctttcctttgttt

SEQ ID NO: 27818 - DNA, 247 bp, Glycine max
  Clone ID: 700890441H1
ccttgacattacacagttagcgttctgctgagagcttaaccaaatccacgacgaggtagtagggttcttgccggcaagtggcaaccatggccactaccagcttgcagatgagccctcaggtggagcagtcctcggcgaaatctgcgatcacttttgagctctcgcgtatgtccatatctctctcagatccagcgcgtagatttttcttaattccagattctctgtttcatgttagatgatgaatttc

SEQ ID NO: 27819 - DNA, 245 bp, Glycine max
  Clone ID: 700890471H1
gaagaaagacaagagaagaaacattggttttcctaagcgcccgccattgccaaagaggatagtgcgaaacaagaagaacaaaatttcccatttctcgttctgaaaatcggagttaaacactattatatatttgtgatttgtgatatcttctatctgattcagcatcatggttcagctaatgaggtctgatacggataatcactgtttgaaaaaggtgaagttggaggttcaagatgaaatccccc

SEQ ID NO: 27820 - DNA, 244 bp, Glycine max
  Clone ID: 700890473H1
cgggactttcactagccgcagcagcctcaggaggagaataaggatgtctcacaggaagttcgagcacccaaggcacgggtcactgggatttctccccaggaagcgtgctgctcgtcacaggggaaagtgaaggcattccccaaggatgacccatccaaggcacccaagctcactgcattcttgggttacaaggctggtatgactcacattgttagagaggtcgagaagccaggatcaaagcttc

SEQ ID NO: 27821 - DNA, 244 bp, Glycine max
  Clone ID: 700890477H1
gacttactttttcccatttttttagcccataactccaactcaccaaaaatgaagagagagggtagacaacatggtatggtgaggtcttatagaatcctaccaaattcacttaaccctcgacccatactcgattcatcacccaatttgatgcccctcccactgctggattcttcgtaaaagtgtcctctaagccaaccaatcactccaagttcactggcaagtgtggcacaccacgttgcaccgg

SEQ ID NO: 27822 - DNA, 245 bp, Glycine max
  Clone ID: 700890478H1
atcgaataaaactagggtttccgatcgtcgtcgaggagaatgccgaagaacaagggaaagggaggaaagaaccggaagcgcgggaagaacgaggcggacgacgagaagcgggagcttgtgttcaagaggacggccaggagtacgcgcaggtgctccggatgctggggaacggccgctgcgaggcgatgtgcatcgacggcaccaagcgcctctgccacatccgcggcaagatgcacaagaaggtc

SEQ ID NO: 27823 - DNA, 242 bp, Glycine max
  Clone ID: 700890493H1
agaaagcaagctcatcctagagttttaaaaatggcagcagcctcctccatggctctctcttccccatccttggctggcaaggccgtgaagctgggcccatcagcccccgaagtcgggagggtcgcatgaggaagaccgtcaccaagcaggcctcctccggaagcccatggtacggcccagaccgcgtcaagtacttgggcccattctctggcgagcccccgtcctacctcactggcgagttc

SEQ ID NO: 27824 - DNA, 243 bp, Glycine max
  Clone ID: 700890494H1
atggaactgtcttcagcactggaaaagatgtttagttgttttacaatcagtcaatgtggttcccatggagtttgtggtcgagataagttgactgaaaatagattgatggatctcctccatggtcagaatatgtgctcacctatgaagacaaggatggtgattggatgcttgttggtgatgttccatgggagatgttcaccgactcttgcaagaggttgaggataatgaagagttctgaagcaa

SEQ ID NO: 27825 - DNA, 245 bp, Glycine max
  Clone ID: 700890520H1
gaagatggattcattggtatgttcaacagcggtttgtggcgaggaactggcagcagccctctgtgcgtttgaacaatgcactcatacacatgtatgctagttgtggaatccttcacgaagcttatcaagtgtttgtcaagatgcctcggaaaagcaccgtatcttggactagcatgatcatggcttttgcgaaacagggactcgggaaggaggcccttgatctgtttaagactatgctcagtgat

SEQ ID NO: 27826 - DNA, 129 bp, Glycine max
  Clone ID: 700890594H1
aagaaatttaagtgaggagctagagaatgatgatgaagtctgctatgtgtgcagtggtggttgtagcacttcttcttctggcggaggtggggcccatggctgaggctgtgacatgcaccccaacagagt

SEQ ID NO: 27827 - DNA, 256 bp, Glycine max
  unsure (1)..(256): unsure at all n locations
  Clone ID: 700890624H1
ggcagcaagaatcttggtagtgctcttgtgcaaacatgagtttgatgtgagataccagatgcctgaagataaattgtatattgctcagctatatttcccacttgttggacagganttaagtgaagaagctgccatgtgccttcttgcacaatttgatggatagtcttaaaacggtggaggaatggacaatctgtagagtcgtgggaggctcataaggcaccggtccaaactatcataaagctggccctcaagagag

SEQ ID NO: 27828 - DNA, 249 bp, Glycine max
  Clone ID: 700890643H1
ctgattattatccttttttttctcatgttccgtattcctctttccagaggacaaggagagtaatagcaagaaatcaatgtttcaccaagttatgtagcatgtatatctatcattaattgataatttcttttggactccaatttcaggaaatccctgtacttgccttacagtgcagccaacacttgacaatcaatattcccagtcaaagccaagcttcagctccacaaatcaacccagtttctcaaagcc

SEQ ID NO: 27829 - DNA, 247 bp, Glycine max
  Clone ID: 700890658H1
gtttcatttgaagagtcatcttcagaaatacaggcttggtaagcaatctgggaaagatgtgggcgaaggatgcaaagatggttcatatcttttagaaagccctggtgctgataacacttctccaaagttgccaactcctgatacaaatgagggttatgaaatcaaggaggcattgagagcacagatggaagtgcaaagtaaattacatttgcaagtggaggcggaaaagcacttgcagattcgccag

SEQ ID NO: 27830 - DNA, 245 bp, Glycine max
  Clone ID: 700890659H1
gcctgacatagagaagaagaagagagagtgatggagtgcgtattcggattggtgggtaatgggtttgcgatcgtggtggctgattcatcggcggtgcacagcatcctcgtccacaagtccaacgaggacaagatcatgctcctcgattcccacaaactcattgccgctagcggcgagcccggagacagggttcagttcacagagtacattcagaagaacgtcgccttgtatcagttccgtaacgg

SEQ ID NO: 27831 - DNA, 245 bp, Glycine max
  Clone ID: 700890679H1
ctgggatgagagagagaaaattccagaccctagtgcagtaaagccagatgactgggatgaggatgcacccttggaaattgttgatgaagaagcagagaaacctgaaggatggttagacaatgaacccgaggagattgatgatccagaggcaacaaaaccagaagattgggatgatgaggaggatggtgaatgggaagccccaaagattgagaacccaaaatgtgaagcagcccccggttgtggtg

SEQ ID NO: 27832 - DNA, 250 bp, Glycine max
  Clone ID: 700890709H1
aggttgaagaagaagcatgacgaagaaggggaagaagcaattgatgtcatcggcgccgtggagaggcgaggagagtgaagaatccttcaaagagggaaagctgaaagtgacgaggcagggtgatggcacttccaccatgcacgtccctgcctccaagtccaagcatcatcaccatgacctccacgacgacctcggaatcgagattgatcctgaactacgctacagcttccagcgcaattttcagtttctt

SEQ ID NO: 27833 - DNA, 246 bp, Glycine max
  Clone ID: 700890711H1
aattaatcattcttttggttatttcatccaaaattgtaattcgcttgtgttcctcctagaaattactttcataactgttggaaaataggagctttttagaaaataaagagcatttttttatcattgcttctctttccttgatattttgtatagctaggttcactgcatcttaggaagtattgataacttaattgctctcttgtaaattgtagttggagattgattatctttgtaatactttgtgaa

SEQ ID NO: 27834 - DNA, 247 bp, Glycine max
  Clone ID: 700890716H1
attctctgtgttgtgttgtgtacttgtgttaattgtgttgttgttgtaggaaatttaagtgaagagagaatgatgatgaagtctgctatgtgtgcattggtgcttgtggcactggttgtggttgaagtggggcccatggctgaggctgcggtgacttgcaacccaacacagttgactccttgtcttccggcaattaattcaggttctgcaccttcgagtgcttgttgccagaagctgaaggagtaaa

SEQ ID NO: 27835 - DNA, 248 bp, Glycine max
  Clone ID: 700890718H1
gcaagatgatttatgcaagctccaaagacagattcaagagggagctggatggaattcaagtagagttgcaagcaactgatcctactgagatgggtcttgatgtgttcaaaagccgtgccaactaaaatgattatataaaatagtaggctttctggtgggagcagcacccctgaagccttagttactcatatggaaaatatcctagtttgtgggatggtcaacttgggtagttatggtcccaaactctc

SEQ ID NO: 27836 - DNA, 246 bp, Glycine max
  Clone ID: 700890720H1
ggagcctccgagaggttaactctgcataaggttgacctccttcatcttgactccgttagatcagttattaacggttgccatggtgtctttcacactgcttctcccgtcaccgataaccccgaagaaatggtggagccagcggtgagtggagctaagaatgtgatcatagctgctgcagaggctaaagttagacgtgtggtgttcacctcatccattggtgccgtctatatggaccccagtaggagc

SEQ ID NO: 27837 - DNA, 247 bp, Glycine max
  Clone ID: 700890723H1
ctccgaacatcaagcctcctcccattaatgacggaactccgaatgagagtgttgcagatgtttttgttcgtgtgacacagctcatgtcaattcttgaaactcagtattcgggtgacaccgttattattgtgtcgccagattctgacaacttgacaatccttcaggcaggtttgataggactagaccttcgaaggtatggttttaatcaaaagcttcaattaaggttttaattttggttactagttca

SEQ ID NO: 27838 - DNA, 246 bp, Glycine max
  Clone ID: 700890725H1
cttagagagacattgtggttacccatagtctcatatagtgtcatacagcaaaaaaattcagcaacacaaaacaatgggttctcttatggcaggatggtattctacccacatggatcctcaatcagccacacttaaaaggaaccgctcactcactaaggatgaaattgatgcttactggaaatcaaagaagaagatagaggaagaacaccttagagctatttccaatgtgtcagagactattcaggc

SEQ ID NO: 27839 - DNA, 242 bp, Glycine max
  Clone ID: 700890727H1
tgcaattacaattcctataatttgcaatcctttccaatatcatctaaaccttcatttaattaacaaaaccaaaatgatgaataggcaatctgtcttgcccttctcactagtactgctagtttcatttctgtattgcacctccaccttagcccaattatcaccagcttctgcccctctcaaaccaccccaacctacccctaccccaccagctgcggctcctcaacaaccattggttccttcat

SEQ ID NO: 27840 - DNA, 248 bp, Glycine max
  Clone ID: 700890733H1
tacgcagacagtttccgagttgaaggactttgtgaaaaagctgaactcattgccagagatgaccaggcacataaatcttgctcagcatctatcaacattcacatcaaagccttcatttcttgggcaacttgatatggaacatacaattgtagaggcccagagttatgatatatgctttgagtatattgaagaactgatccataagcaggagcctttgacaacagtcttacgccttctaatcctatttt

SEQ ID NO: 27841 - DNA, 247 bp, Glycine max
  Clone ID: 700890735H1
ctgagaaaggcaaagtcattcaacatcctaatccgcctcatgaaaaccacccaattgatcaaccaactcaatgcacagctcctcactactaaatccggaggcatcaccattcttgccccagatgacagttccttctctgaactcaaagctggcttcctcaactctctttctgatggccaaaagctcgagctcttacagttccacgttatttcagactacgtgtctagctccaactttgatacactga

SEQ ID NO: 27842 - DNA, 246 bp, Glycine max
  Clone ID: 700890736H1
gcttcaaatacagtttcttagtagatagtagtaagaagttgaagctatagattaatttattgtagtaacaattctagcaatttttgagccgataaaaaatttgcccttttgtatttagtatggtaaataatgtccacatatcccggacccattgagctgtatgaaatttatttgaaattgtgatataattcaaaaacaaatggattaggtgcatctagttccatcattgttggaactgaactattg

SEQ ID NO: 27843 - DNA, 246 bp, Glycine max
  Clone ID: 700890740H1
ctaacacttctctagatcgtagaactgctacacctttcactctctaattacacaatgaccaatttgaagcttgtgttcacgatcagttccattcttctagccttggtgtttatcaatggaatttcttcagttatggggaggccactgaaaaaggagcacatcataacaacaacctacgaaaacagtgtcaaagaaatgggcacagtggaagacaacaatattctcctgtggcgccgaagcatcata

SEQ ID NO: 27844 - DNA, 245 bp, Glycine max
  Clone ID: 700890741H1
ggctgctctttggcgctgtcgccgttcttagccctagtctctctgtctctcgtcgcctctctgcaagttagctgggacaagccaccaaggaaaacattttactgtgaagaacaatgaggaagcttaagtttcatgaaaagaagcttttgaagaaggttaattttttggaatggaagagggaagggggtcacagagagaacctcattatgcaacgctaccatgttactggacgggacgattacaaa

SEQ ID NO: 27845 - DNA, 244 bp, Glycine max
  Clone ID: 700890750H1
gaggcttctgcctcaccttaattgtctacttgtcatattctgcagctttgtgataaatttgcaaccaggccttttatgttgtacccggcttgatttgttcctcatgtcttttctttttctcttgacaggggagcttatataattgttactatgtgtggctggtagggacatagtagttgttagcatgtacaggtttaggacatatttggttcccatgtttccttattatatatagaaggatggg

SEQ ID NO: 27846 - DNA, 145 bp, Glycine max
  Clone ID: 700890752H1
cgaatgagaaaatagttggaaattcgttagggacaagaaataatatagaagatgtttatatgatcccgtttttgtttccaggtaaaaatatgtgactttgtccattctattgcctgcttaatgataatgtcaatgtttccagttt

SEQ ID NO: 27847 - DNA, 244 bp, Glycine max
  Clone ID: 700890753H1
gaagaatgttcatccattgaggaatcggtggcgagcgtgatcgaagaagccaaggaggttcaagacgccgtttcctctcacatctcaaaggcttccagcgatgaagaacctctccgccaacgtgtccgtgccgtcgattccagaatccattcgctacgttcctctctcgattctcttgtctccaccaaacaaatccctccctccttagccgttaagttagatgaagatttgcagagagcgagat

SEQ ID NO: 27848 - DNA, 244 bp, Glycine max
  Clone ID: 700890754H1
agctctcttattaatttgtcatctttcagcagatccccctagtttttcttccaacatgagtttcaaatctcccctgcaattgctcatcatcatccttctagttttttcatttgttgtctcttctgctgctctccaaacaacaagaaggcttttgccaaacaaagaaaaactctcaacccagattacatctgataagggtgttgaggaattgagaaatggagaagaaatgttagatatggcagaa

SEQ ID NO: 27849 - DNA, 244 bp, Glycine max
  Clone ID: 700890755H1
gatcgttgatacaacttgcccatgggttgcaaaggtatggaattctgttgaaaaacacaagcaacgagattatacctctgtaattcatggtaaatatgcccatgaggaaactgtagcaactgcttcttttgctggaaaatatataattgtgaagaatatggcggaggctgaatatgtttgcgactatattcttggtggtgaattaaatggatccagtccaaccaaggaagcatttttagagaaa

SEQ ID NO: 27850 - DNA, 242 bp, Glycine max
  Clone ID: 700890762H1
aaatcacctccacctccagtttacatatatgcttccccacctccacctatctacaagtaagttcgaattgcggaagcaccattcacgataaatcatgttctagtttttatcgaggaataaaggcaagctctatttggagtcaagtgaaacatctatcttcctgtccaagttctttgaataaaagtctgaatgtgtcatctctgcactacaatatttgtgattctgaccaagttggttctatt

SEQ ID NO: 27851 - DNA, 241 bp, Glycine max
  Clone ID: 700890763H1
aaattattcagtttatagcagtgccttgcggttggtgcgttctatgctaccattaccacaccttaaagttggatatttaactgcacctcctgtgggggcatcgattgcacctcataatgactggaaacgatcagaattccttttggatcatgaaaagcttcagcagatacccagaggagaatataaacaagtaccacctcaaaatctctcaggcagattggtagatgcagtgagtggagat

SEQ ID NO: 27852 - DNA, 242 bp, Glycine max
  Clone ID: 700890767H1
ctagaactagtcactccttttagcaagttaacaacacttttgtcttcgttccattatctagttctcaattctcttcaccctttgcctctgaaagaaatgggtagtcttgaagcggaaagaacaacagtaggattggcagcaagagacccttcagggattctctccccatacacctacaatctaagaaacacaggccctgatgatgtttacattaaagttcactactgtggaatttgccattc

SEQ ID NO: 27853 - DNA, 241 bp, Glycine max
  Clone ID: 700890769H1
cagagtcccacagaagaaaaacaaaaccctcactgagcgctgctgctttgagagagagatggctccgaaccttgaatgtcgtatgtacgaagcgaagtacccggaggtggacatggcggtgatgatacaggtgaagaacatagcggacatgggggcgtacgtgtcgctgctggagtacaacaacatcgagggcatgatcttgttctcggagctctctcgccgtcgtattcggagtgtgagc

SEQ ID NO: 27854 - DNA, 241 bp, Glycine max
  Clone ID: 700890770H1
aaattacaatcttgtcctcgccatgctgtggcgccacccggaaaacgttaaattagaccaagtcaaggttgttcactattgcgcacggggtccaagccatggagatatacggggaaggaagagaatatgcagagggaggacataaagatgctggtgaagaaatggtgggatatctacaatgatgcttcgcttgactacaagccattgatgaatgcaagtgaagctccagcagcggatggtg

SEQ ID NO: 27855 - DNA, 242 bp, Glycine max
  Clone ID: 700890771H1
ggaccgaatcctgcattgaggccaattaacactgaaggtgctcaaaaggtcgggcagaagaggggtagattgaatattgaggaagaggatgattcacagcccaaaaagaaggttcgtttgggggttcctgctacacaatggatttcagtttacaatgcaagactgccaatgaagcaaaggtaccattacaatgtagcggacgcaagattagcacaacatgtggagagagggattgctgatgg

SEQ ID NO: 27856 - DNA, 238 bp, Glycine max
  Clone ID: 700890774H1
gcaagacctcttgtggttatggggtggctacagggggacccttagcctggggcttatgctacaataaggaattgagtcctgataaattctactgcgatgactactacaaattaacctacccttgtactcctggtgcagcatactatggccgtggtgccatcccactttactggaactacaactatggaaaagctggggaagccttgaaggtggatctgttgaaccatccagaatacat

SEQ ID NO: 27857 - DNA, 236 bp, Glycine max
  Clone ID: 700890777H1
tttcttcttttttagctatccctctcttgaaaaatctagatctcgttcttccttgatctacgttacgcttttagtgaccggatctgtatggatctgaaccagatctacacgccgatggtggttttggcctggtctttcatagatctgatgcatggaggctcagatctactgtacagaggtgtgcgattcatgttcgtctctcttttggaatctgtttcgtagaaagtcgtttggtc

SEQ ID NO: 27858 - DNA, 239 bp, Glycine max
  Clone ID: 700890784H1
actaggcctagatatccagtctcatctaatggtggacataatgacaaacagaattttaggatacaggataggtcatatcatcatgatcaatactacaacgggacaactgggttttataccatggcaatggaggaaggtgcaagagctaggccatatgcagtgcctttgccaaggacacctgcagtgacgttatcgaggcctcccaattcagggtcaacaactaatggacaacaccaatt

SEQ ID NO: 27859 - DNA, 239 bp, Glycine max
  Clone ID: 700890785H1
actgaatgttgttgacgtctcctatggaggtgagaatgggtttaatcaggctattgaactatctgctgaaattctgtccaatgtgaagtttatccaggaaaagcgactgattggaaaatactttgaggaaatcagccaggatactggaaagtatgtttttggagttgatgatactctaaaagctttggagatgggagctgtcgagacacttattgtctgggaaaatctggatatgaata

SEQ ID NO: 27860 - DNA, 240 bp, Glycine max
  Clone ID: 700890787H1
tttctcggcaaccaaacattccaatcaattaactcgtattttatattattatttttaattcgcggtaggaattcgttttctctgatcgggatctggaagggaagcgaatcgacatgggtttcttggtgacgacgctgatcttcgtagtgatcggaatcatcgcgtgcctctgcaccagaatttgctgcaacagaggaccttctaccaatctatttcaccttactttggtaattactgcaa

SEQ ID NO: 27861 - DNA, 237 bp, Glycine max
  Clone ID: 700890790H1
gagatttcaatttgtcaacagaaaaacctaatgtctcatcgagactctgattccaagcgtcgccactccaagttcgatcgagaagcaagtcccaagagatatagaagggatagtaacagagtaacctcagatggaggagatcggagaaacccaccacatcattctaggcgtgaacccttcgatgctgctcccaagaaatcaaattcaaatgatcatcatgagaatccgccccaacat

SEQ ID NO: 27862 - DNA, 235 bp, Glycine max
  Clone ID: 700890791H1
cagctctcttattaatttgtcatctttcagatctccaatttgtttctcttcaacatgaggttcaaatcccccctgcaattgctcatcatccttctggttttttcatttgttctctcttctgctgctctccaaacaacaagaaggcttttgccaaacaaagaaaaaacccctacccaaattacatcagataagtttcagggtgttgaggaattgaaaaatggagaagaaatgtttg

SEQ ID NO: 27863 - DNA, 236 bp, Glycine max
  Clone ID: 700890793H1
caaggccttctcctctcaggataatcgaaacaagtttctccgatggcgtattcagttgttggagcgcagtattcggcacctcgacttcactccttcctccggcatcaacaccattttccaagtcaatgacctcaaaaactcccctggccctgctaaacgtgagcttcgccttgccaccaaacaagctttgcagttgcttcaggacaactatcccgaatttgttgccaaacaggttt

SEQ ID NO: 27864 - DNA, 237 bp, Glycine max
  Clone ID: 700890794H1
gaagattcagttcgggatttttgcgcttcgtcctcaatttgcagcgcgtgagtgagggaacatggacggtgccgaattgtccaacataaagaaatggattgtgatgtatcctgtttacataaactccaaaaaaacgatggccgaaggaagacgcattggcctcgccaaagcctgcgaaaaccctacttgcgctgaaatcggtgattgctgcagctatctgaagcttccttttgcaat

SEQ ID NO: 27865 - DNA, 227 bp, Glycine max
  Clone ID: 700890812H1
gttgatagaggactgttacataagtgtgggggatgatgcaattgcaataaaaagtggctgggatcaatacggaattacttatggaaggccttccaagaatatagtaattcgaaaccttgttgttcgctctaacgtcagtgctggcatctcaataggcagtgagatgtctggtggggtatccaatgtcctggtggagaacattcttgtatgggaatcaaggcgtgcca

SEQ ID NO: 27866 - DNA, 243 bp, Glycine max
  Clone ID: 700890817H1
cgaaaattagggtttgtagtgtagcaggaagaagcagcaatggcgccgaagataacacgtaaggttagcagaaaccctgaattgataaggggaatcggaaagtactcgaggtcgcagatgtaccacaagaggggcatttgggctatcaaggccaaaaacggtggcgttttacctcgccacgaccctaaacccaagcctgaagctcctgctgaaaaaccacccaaattttaccctgctgatgat

SEQ ID NO: 27867 - DNA, 227 bp, Glycine max
  Clone ID: 700890822H1
agatcatttctgcaattaaagaagcaggaaatgttaagaagttctatccatctgagtttggaaatgatgtggaccggactcatgcagttgaaccagccaagtctgcatttgcaacaaaggccaaagttcgccgagctattgaggctgaaggaattcccttcacttatgtgtcaagcaacttctttgctggttacttcctgcccaacttgtcacagcctggagccaca

SEQ ID NO: 27868 - DNA, 241 bp, Glycine max
  Clone ID: 700890849H1
gtaatattagctgtgtatgtattggccagtatatgaactcttcatcaactcaactagtcctcacgaaaaggatgggtatatatgatccattccatcaagtgaacatgtggggggacagctttaaaattgatggaagcttgaactcaattgctccccaaatgttgatgattaagcctagcatgcggaacaagtctgaatgtactcctcacgaatcaagggaaccttctggagatgatcaaga

SEQ ID NO: 27869 - DNA, 234 bp, Glycine max
  Clone ID: 700890850H1
ggaaaacaaagtatagagtgaaagaatgggtgagaaaagcaagattttgatcataggaggcaccggctacatcggcaaacatatagtggaagcaagcgcaaaggctggaaatcccacttttgctttggtgagggaatccacactctctgacccctccaaggcacaactcatccacaattttgaggctttgggcgttaatttggtccgcggggatctgtacgatcatgagaagtt

SEQ ID NO: 27870 - DNA, 230 bp, Glycine max
  Clone ID: 700890867H1
gaaggatttaagttggatgtccaaccaggaaacacctacttgctaagaatcatcaatgctgcactcaatgaagagctattcttcaaaattgctggccatgaactcactgttgttgaggttgatgcagtctacacaaaaccattcaaaactgataccattgtcatagcacctggccagaccacaaatgtgcttctaacaaccaaacatgcagcaggcaaatacttggttgc

SEQ ID NO: 27871 - DNA, 228 bp, Glycine max
  Clone ID: 700890868H1
tctgaatctgcgtgtgtttgtgaattgttgttgagatctgaatcaaaatcagaaacgataatggctacaccggaccacctcttcaacctccgcaacaacttctacctcggcgcttaccaagccgccatcaacagcagcgacgttgccaacctctcccaagaagataccctcgagcgcgacaccctcgtccaccgctgctacatcgccctcggccagctccagttcgtc

SEQ ID NO: 27872 - DNA, 222 bp, Glycine max
  Clone ID: 700890891H1
ggcatccccatcatctgaaaggacaaattgtacttccgtggttgatgttggcttatgcaagcctgtttctggtagattcctgggtagatcttttagaggaagggatcgcaggaagatgatctcatggaaagacatgaaacttaattccagctgtatctaatagtggtaggttcctgtctggatcttccagagggtaggatcaaattgatcttatgtgaagat

SEQ ID NO: 27873 - DNA, 241 bp, Glycine max
  Clone ID: 700890919H1
taccacttcaacaaactggtgctgctttgaaaaagtctgatgggttcaagattcccatctcatcagctcagcaatggcctgtatgtatcaggccggcctgaacagccaaaagaaaagactcccacaatgagctcagttgccatgccctatactggtggtgacatcaagaggtcgggagaattaggcaaaatgtttgatatcccaatggatggctctaaatctagaaaatccggtcccataa

SEQ ID NO: 27874 - DNA, 238 bp, Glycine max
  Clone ID: 700890922H1
tgggaacattggtgacggtggctggggccatgttgatgaccttgtacaaaggtcctatggtttggaccaaagatgcacctcataatgggcaaatcaataatgcaacaaataccacaacatattcagacaaggattggttcataggctctatcctcctaatcattgccactcttgcctgggcatccctctttgttttacaagccaaagccattgaaacctacaaaaatcaccagctaag

SEQ ID NO: 27875 - DNA, 243 bp, Glycine max
  Clone ID: 700890927H1
ttaacatatacaaattctctgtgttgtgttgtgtacttgtgttaattgtgttgttgttgtaggaaatttaagtgaagagagaatgatgatgaagtctgctatgtgtgcattggtgcttgtggcactggttgtggttgaagtggggcccatggctgaggctgcggtgacttgcaacccaacacagttgactccttgtcttccggcaattaattcaggttctgcaccttcgagtgcttgttgcca

SEQ ID NO: 27876 - DNA, 239 bp, Glycine max
  Clone ID: 700890935H1
gaaagatctctacataaaccaagctattcaaatggatgtggctggtaatcgcaaggctgtagtcatctatgtgcctttcagattgaggaaggcattccgcaagattcatcttcgacttgtcagagagttggagaagaagtttagtgggaaggatgttgtcttgattgccacaaggaggatcgtgcgaccgccaaagaaaggctctgctgttcagcgaccccgaacccgcactttgaccg

SEQ ID NO: 27877 - DNA, 242 bp, Glycine max
  Clone ID: 700890958H1
tttctctctgtctcgtttacacatctctccaacctttcactttcgtttctcagttttattcgaatccctctctcaatctcctttccaaatggccagcgttgaggttgcacagcaaacaccaacaacagttccagaaaatgaaacaaccgaggtaagcaagacccaggaaacaaccccagtcactgaggctcctgcaacagaacaaccagcagctgaggttcctgcaacagaacaaccagccg

SEQ ID NO: 27878 - DNA, 251 bp, Glycine max
  Clone ID: 700890962H1
acttactgcactgtaagtagggcaaacccttatattagtacattaaaagttaaaacatccacccttgatatgaaaactattcacattaagtatttttataaagtagtttcattatgctcattgttcatacaatactaaaaaagttatttttagaattagcgtagttttcactggtggcttcttttaaaggtggaagcaatggcacatcctttctttgaggagcttcgcgagcccaatgcccggctacctaa

SEQ ID NO: 27879 - DNA, 238 bp, Glycine max
  Clone ID: 700890975H1
gtggtggcaatgggtagcgaagaagagagggttcttgagaatcaactggaacttcaattgcaagagcaaagggattctctctctgctatcggtcaagctcttctctctgatccaactaaccctgaacttctggcggttcatgaggagcttgttcaggcaattaaggatgcagaagaaggacttcttcacctaaaacgtgcacgattgttacaggaagcagattcagtgctgcataaca

SEQ ID NO: 27880 - DNA, 246 bp, Glycine max
  Clone ID: 700890978H1
atcgaagctttgggtttgatacgcagccagtcctcattgggctcatcatatttcagcatactgtaatcccacttcagcaattggtcagctttggtctgaacctagtcagccgatcatttgaatttcaggctgatggctttgccaagaagcttggatatgcatctggattacgcggtggtcttgtgaaactacaggaggagaatctgtcagctatgaatacagatccttggtactctgcttatcact

SEQ ID NO: 27881 - DNA, 234 bp, Glycine max
  Clone ID: 700890988H1
aagacatgccctgctgcaatgggatttgcatttgctgctggaacaacagatggacctggagcttttgactttaagcaaggtgatgatcagggaaatcctttctggatgctggtccgtaacttgcttaaaacgccaggcaaggaacaagtagactgtcaccacccaaagcccattttgcttgatactggcgaaatgaagctaccatatgattgggcgccttcaatacttcctatc

SEQ ID NO: 27882 - DNA, 236 bp, Glycine max
  Clone ID: 700890989H1
cttttctaagtgctgtgattctttctttcatctttttcttcaggtcctaaagcatacttgtgatttcctccattatttcctttgagatttggacagtagttggtcatacacccaattctaaattagagttgggatgtctggaggagtagtttgatacagtgatgcatctccacagatacttgagtaaagctatatgctgtggtgtagatttttactatggagttaaatgcaagtta

SEQ ID NO: 27883 - DNA, 266 bp, Glycine max
  Clone ID: 700891002H1
gccttatcctttggatatgagaggcgagctagatgacactgctgctttcaagaacttcaagaaatggggagacattgaatttccactgccatttggaagggttatgagtgccaccgagtctttcattcatggattagatgaaaagacaagtgcatccttaaaattcacagtgttgaacccaaagggccgaatttggacaatggtagctgggggaggtgctagtgtcatttatgctgatacggtaggagatcttggctttgcatctg

SEQ ID NO: 27884 - DNA, 264 bp, Glycine max
  Clone ID: 700891006H1
gttgtttttctttttttcatttgcattgcaaagcaaaaaccttgcaaattgcaatggcttccaacaaggttattgccaccatcttggttctttctctccttgcctactcaacatcattcaccaatgcatgtggcacatgccacccaaaacctactccttctccccctcctccatcagggaagtgccccaaggacacattgaagctaggggtgtgtgctgatgttctaggacttgttaatgttgttgttggttcccctgtctcta

SEQ ID NO: 27885 - DNA, 258 bp, Glycine max
  Clone ID: 700891069H1
gcttttcatgccaaaggtgaaataattgctgttgcatctggccacaagttgtacatatggcaccacaacaagaaaggtgaagcatcctctccaatatttgtgttgaagacaaagcgctcccttcgtgctgtgcattttcaccctcatgccgcaccatatcttttaactgcagaggtcaatgatcttgattcttcagattcctcaatgacagaggctacatctcttggttatttacaatatcctccgcctgctgttttt

SEQ ID NO: 27886 - DNA, 259 bp, Glycine max
  Clone ID: 700891081H1
ctagctggataggtcaaacatcatcatgtcggacgaagagcaccatttcgagtccaaggcagacgccggtgcctccaaaacctaccctcagcaagccggtaccattcgcaagaacggctacatcgtcatcaaaggacgcccctgcaaggttgtggaagtttcgacttccaaaactggaaagcacggtcacgccaagtgccactttgttggaattgatattttcactgccaagaaacttgaggatattgtgccctcttct

SEQ ID NO: 27887 - DNA, 256 bp, Glycine max
  Clone ID: 700891085H1
gtcacagggttactctaaatgtttatgacttgagccaaggtcttgcacggcagctttcaatgtcctttttggggaaagctattgaaggcatatggcacacaggagttgttgtttatggtaatgagtattactttggtgggggtattcaacactctcctgctggatcaactccatatggaactccactaagagtggtagacttaggtgtgacacatgttcccaaggatgtctttgaaatgtatttgcaggaaatcag

SEQ ID NO: 27888 - DNA, 260 bp, Glycine max
  Clone ID: 700891088H1
ggacacaagaaaaggtggtcctttagaaggagctcatgttcacattgttcacttgtctgattcaagtgcttccttggatctgattaaggaagcaaaaagtcgtggtgacagcataagtgttgagacttgtccccattacttagctttctcatctgaagagataccaaatggagatactcgttttaagtgttccccgcccattcgtgatgcttataacagagaaaaattatggggggctgtattagagggacacattgacc

SEQ ID NO: 27889 - DNA, 245 bp, Glycine max
  Clone ID: 700891113H1
ctcgggagcaaatgaaaattacagaactacgccttgcaaagctcttttcaagtagagaaaacatttcttctacagctgataagaattccactgctagaaaggcagaagaagatcgtataagcattatcagtagtcacatgactgctacttcagagagttcaacaggcaaatcaattcagcatcctgccagaacccgccctcccattaccactcacgtgttggatgtttcgcggggggctccagct

SEQ ID NO: 27890 - DNA, 243 bp, Glycine max
  Clone ID: 700891121H1
gtcttcccttactggcttatcactgttctcatcatcattctcttcatagggacttcttcaaggtcattctttaaaggaattgagatgtggagggaagagactattttcaagagagaaaagaccaagcaacgggcgacgttggttgattctcatggtgaagataagacagttagaatcgacacaaaatatgaaccgctgattcctaaagaagagaagtcaactatacaaattttatgtctcaac

SEQ ID NO: 27891 - DNA, 239 bp, Glycine max
  Clone ID: 700891125H1
ggattacaacaagttctatgaggctttctctaagaacttaaagcttggtatccatgaggattcccagaacaagggaaagattgctgaattgctcaggtaccactccaccaagagtggtgatgagctgacaagcctcaaggattatgtgaccaggatgaaggaaggtcagagtgacatctactacatcaccggtgaaagcaagaaggctgttgagaactccccattcttggagaagttga

SEQ ID NO: 27892 - DNA, 246 bp, Glycine max
  unsure (1)..(246): unsure at all n locations
  Clone ID: 700891135H1
caagttctggatctgaaggaggagatccgcatatcatcgatgagaggaagcggaagaggatgctgtcganccgcgagtcggcgcggcgatcgcggatgaggaagcagaaacagctggaggatctgaccgatgaagttagcagattgcaaagcgcgaacaagaagcttgcggagaacatagaggccaaggaagaagcgtgcgtcgagaccgaagcggcgaacagcattctgagagcacagacaatgg

SEQ ID NO: 27893 - DNA, 64 bp, Glycine max
  Clone ID: 700891144H1
aaattattgtatacattattaaatgagtcgttatatagataacataattctttgtgaacttgat

SEQ ID NO: 27894 - DNA, 241 bp, Glycine max
  Clone ID: 700891145H1
gcaaggacccccagccatgatgcctccacaagctggatttggataccagcagcaactagttcctggaatgagacctggtggtggtcccatgccaagcttctttgttcctatggttcagcaaggccaacaagggcagcgcccagggggccgccgaggaacaggtcctgtgcaacaaccccaacagccaatgccaatgatgcagcagcagatgcttccaagggggcgtgtctatcgttaccct

SEQ ID NO: 27895 - DNA, 244 bp, Glycine max
  Clone ID: 700891146H1
ccacttgcatccaagcactcgaaacaagagcttcactcttcgaaacaattcgctgtttaccagattctcttcacgatctcgaacacttaaagcttctctacaattcaatcttgcgtgatcgcaagcttcctggtcctgcgtggaagcgccacaacgtgcgctacagagaaattccagggaaactttgctccctcactattaaaattcaggaacttaaacagaggttggcttctggtgaaactgg

SEQ ID NO: 27896 - DNA, 241 bp, Glycine max
  Clone ID: 700891152H1
gaaattcgtaagttataactgacaaagttttctgagaaaataaggattattattatcgagagaatggcaggctcctcggaggagggacaagtcattagctgtcacaccgttgacgcatggaacgatcaactccagaagggcaaccaatccaagaaactcattgttgtggattttactgcttcttggtgtggaccatgccgtttcattgcaccattcttggctgagctggctaagaagttca

SEQ ID NO: 27897 - DNA, 245 bp, Glycine max
  Clone ID: 700891163H1
cacgctcttcgcattctccgccaccttctcaattctctttcgattatctttgcatctttgcaccaacctccatggccacgaacacgttcaccggagcattactctccgaacgttgtctccgtctcaacttgaataagagattggcctaggatcttcttcatcaatggattcctttgcttcttggaagataaatggcagcggaatggggaaggaagagagagaggagacgccacttcaaggagaag

SEQ ID NO: 27898 - DNA, 241 bp, Glycine max
  Clone ID: 700891167H1
ggaaaagtgaaaaccagaagtacgaacgaaagagaagagcgatttagaagtgagagaagatggggttgtcgttcacgaagctgttcagcaggttgtttgcgaagaaggaaatgaggattctgatggtaggtctcgatgctgctggtaagacaaccatcttgtacaagctcaagcttggagaaatcgtcaccactatccccaccatcggatttaatgttgagactgtggagtacaagaacat

SEQ ID NO: 27899 - DNA, 235 bp, Glycine max
  Clone ID: 700891173H1
cgatcactctcacgcgctcctatattcgctcctccaccgtcgctctctcgaacaaccacaacaccatcttcatcacatggcaaacgcagcatctggtatggcagtccatgatgactgcaagttgaggtttttggagctgaaggcaaaaaggacacaccgtttcatagtttttaagattgaggagcagcagaagcaggtcattgtggagaagcttggtgagcctgcccagggctat

SEQ ID NO: 27900 - DNA, 238 bp, Glycine max
  Clone ID: 700891184H1
ccattttgcaaaaagttttcaattgaaccacgcgcacctgagttctacttctctcagaagattgactacctgaaggacaaagtacaaccttcttttgtgaaggaacgtagagcaatgaagagggagtatgaagagtttaaagtgcgagttaatgctttggtagcaaaggctcagaaaacaccagatgaaggatggactatgcaagatggaacttcatggccaggaaacaactcacgtg

SEQ ID NO: 27901 - DNA, 238 bp, Glycine max
  Clone ID: 700891194H1
atatagcccaagccctatacaaccaaaccctaacacacacccatttgattcagtttccatggctagcctcaaggttgcatttttggctgcagtgctctgcatggttgtggtgagtgcacccatggcacatgcagctatcacgtgcgggcaggtgacgaatagcctgatcaattgcatcggttacctccagaacggaggaacgccgccgtcgggatgctgcaacggagtgaagagcctc

SEQ ID NO: 27902 - DNA, 278 bp, Glycine max
  Clone ID: 700891201H1
cactgatctccattcccattccatggcttccactgaatcatcccctttcaagaaaattcagattcaaagggatgacactacatttgacgcatatgtggttggaaaagaggatgctcctggaattgttgtgattcaggagtggtggggtgtggattacgaaattaagaaccatgccgtgaagatttctcagcttggtagtgggttaaagctcttattccagatttatacagaggaaaggttggtctggatgttgctgaagctcagcatttgatggatgg

SEQ ID NO: 27903 - DNA, 270 bp, Glycine max
  Clone ID: 700891207H1
tgatttttggaagtgaattttttgaagaatatattggacaacttgcactggcttctttagcatctatagaaattgaggaagactcacaggatcctgaagtttgaggcagagaattcaagaaaagatgaaagcttggcagaaggaaagggagcaaaagctttcaacatttctgaaagatcgcctgcaaccatttgttgatggtcgagaagatgaatttacagcatgggcaaaatcagaagcacgtagtctttctaaagctgcttttggaga

SEQ ID NO: 27904 - DNA, 265 bp, Glycine max
  Clone ID: 700891210H1
ggtgagcaaatatggagctttgttggcaaacatccatccatggttcttgaagaagcatggagataaaggggtgtgagagggtcctcaccactcacactcctccacttaaaacagtttgttttggcttagctttggcttctctaatcaacaagggatgtgttctaacattctctcttgagtggcagaagcagattgcattctccaaaggaggagaggctttggctacagcctggcaaaccggcaagtcacgaaaaggcaatggact

SEQ ID NO: 27905 - DNA, 275 bp, Glycine max
  Clone ID: 700891217H1
aaacgaacgaagacagcgaaggagctacgctgcgagatttagaaattgaatccctaatttcgaggttccgactcctgtggagtgatcatatagcgaattttgtgttagcgaatcaatttgcagagtaaggaataaggatgggaaaaaaccaagcctacaaagctatgcagagagccaggctcggcggcgcctccgccggccccgacgaggttgaagacggcatggtggatggttcatttcattcaccagaatggcatgcagctcgtttggctagc

SEQ ID NO: 27906 - DNA, 269 bp, Glycine max
  Clone ID: 700891219H1
gtgtaggtccttcgaagagcagcatgccgcatgtcatcgatgggatattgaatgcggttgaggttatgaagttgaacaattctcgcagtagtcttgatggagaggtttgtgctgatttagttatgaagagctggtcgacgaggaataatacaggtatgctgtttactttggtggctgctgtttgcattgtgttgagcttgtccatagtgattcgtaggaggttgattgggtcgagggaatctgtgtcttggtcaaggttgcctgtgaat

SEQ ID NO: 27907 - DNA, 267 bp, Glycine max
  Clone ID: 700891221H1
gcgagctcttcctcgagaagttgatccagtggtttacaatatgttgcatgaagatcctggtaatatcagctattcagctgttggtggcttatctgatcagatcagggaattgagggagtcaattgaactacctctgatgaatcctgagctctttcttcgagttggaattaaacctccaaagggtgttctcctttacgggcctcctggtactggtaaaacattgttagccagggctattgccagtaatatagatgctaacttcctaaa

SEQ ID NO: 27908 - DNA, 260 bp, Glycine max
  Clone ID: 700891229H1
gtgccaggtggttatggagtggccactggaggacctttggcctggggtctttgttacaatcatgaaatgagtcctatgcagtcatactgtgatgactacttcaaactcacatacccctgtactcctggtgctgactactatggacgtggagccattcccattttttggaactacaactatggtgctgtcggagaagctttgaagattgacctactaagccatccagaatacatagagcagaatgccacccttgctttcca

SEQ ID NO: 27909 - DNA, 260 bp, Glycine max
  Clone ID: 700891231H1
ctcttaaggaggcttttgagatcttttgcaacaagggtgttgctggaagctcaagtgcagaactgcttgccactttctgtgacaatattcttaagaaaggaggaagtgaaaaattgagtgatgaagcaattgaagaaactcttgaaaaggttgtcaagttgcttgcctatattagcgacaaagatttgtttgctgaattttataggaagaagcttgctcgaaggctcctttttgacaagagtgccaatgatgatcatgag

SEQ ID NO: 27910 - DNA, 261 bp, Glycine max
  Clone ID: 700891232H1
gtctccgattctttaatcaacttcaacctgaattcatggtggtccaaagcacaagacttagattagtgttcatgcaatctattatgcctcgttgcttctaagctctcacctttatttcattctcaagttggtcgcaaaagcttggtcaaaagcttctgttgagcagtgacgaggttggaacataaggcaggtttgccaaggatattggaagtactagtacttatctgttgcaaatagtactcgtttccataagcaacttct

SEQ ID NO: 27911 - DNA, 262 bp, Glycine max
  Clone ID: 700891241H1
gaatggcaaagccaagatcttggactcagatatggtcttctattgtcggagtgtgtgttctgaattttgttctgaacttcaagatcgtggcagtagcagatgacactggaagcaacagtattgtatcagaaggtgactgcaagaacacaaattatcagattttcctccctccaccttatcagaatatatcctctaccatatgcaaacctgtttggcattcatacgaattgaggtacaccaagacgggtgacaccacaactat

SEQ ID NO: 27912 - DNA, 259 bp, Glycine max
  Clone ID: 700891243H1
gcctggatcacttgctccaactggattgtatatcggtggcaccaaatacatggtcatccagggtgagcctggtgctgtcattcgagggaagaagggtcctggtggtgttactgtgaagaagaccggtgcggccttgatcattggcatttatgatgaaccaatgactccaggtcaatgcaacatggtagttgaaaggcttggcgattatctcattgatcagggtctctaatctttgctttatgtcttgttatcgtgcata

SEQ ID NO: 27913 - DNA, 257 bp, Glycine max
  Clone ID: 700891246H1
aggaaactaggtgttcattttttagcaagagaggccttcatcaagtgggaatgtggatgcatgaatgccattgtggagcatcatctacttcatttgattgtttagggttaaacaatggttgggatctcccaagtagtttatgtccctgttgtgagcctagctctccggtatcagagcagttgcattgttggagagactactataagtggagatgcatcccgctagactcgcctgttgctttgcttcttcaatggcca

SEQ ID NO: 27914 - DNA, 258 bp, Glycine max
  Clone ID: 700891247H1
gagatgaccagcctcaaggactatgttaccaggatgaaggaagggcagaatgacatctactacattactggtgaaagcaagaaagctgttgagaattcccctttccttgaaaagcttaagaagaaggggttcgaggttctctacatggttgatgctattgacgagtatgctgttggtcagcttaaggaatttgagggaaagaagttggtctctgctactaaggaaggcctgaaacttgacgagagcgaagacgaaaag

SEQ ID NO: 27915 - DNA, 256 bp, Glycine max
  Clone ID: 700891263H1
aattacaacaccaatctcacccatttcaaaaaaaggccgttagtgttactattcgtaaaatggccactcttgttctttaccaattctttctcaaactcttgctcctaatttcagtctttcagctttcctttgctgctaggagactcaaccagctggttcaggaccagtcacagttactccattaccacaacggtcctcttctatacggcaaaatcgccgtgaacctaatctggtatggtcacttcaaaccatccca

SEQ ID NO: 27916 - DNA, 266 bp, Glycine max
  Clone ID: 700891265H1
ggcagttgaggaacagggatgctgctgtgaggtcaagggagaggaagaagttgtatgtgaaaaaccttgagatgaagagtaggtacctagaaggggaatgcagaagactggggcatttgctccagtgctgctatgctgagaacaacgctttgcggctttgcttgcaattgcgtggtacatatggtgcttcaagaccatgcaggagtctgctgtgctcttgttgggtaaggcttgcgattgcaagctgtattaccttttattgccat

SEQ ID NO: 27917 - DNA, 265 bp, Glycine max
  Clone ID: 700891266H1
ccaccaccacctcgctctcttcttccctgcttcacaatttttattttaatgatactattttgttattgttaagacggcatcatcagggaaatggatcgggtgaagggtccatggagcccagaagaggacgaggctttgcggaggctggttcaggcccacgggcctcgaaactggtcggtgataagcaagtcgttccgggacgatccgggaaatcgtgccgcttacggtggtgcaaccagctctcgccgcaggtggcccaccgccc

SEQ ID NO: 27918 - DNA, 257 bp, Glycine max
  Clone ID: 700891274H1
cacagatcacagaacaagagggtcaccctccactttgcattatatctgacgtgttccttggctgggttaacaacgttgcaaagactttaggtattaggaacctaagcttcaccacttgtggtgcttatggaactttggcctatatttctatctggtccaacctacctcataggaaaacagactctgatgagttccatgttccggggttccctcaaaactacaaattccaccgcacccaattgcataaatttctaaga

SEQ ID NO: 27919 - DNA, 255 bp, Glycine max
  Clone ID: 700891275H1
agattttcagactatgctcttgtgataagagcattgggatcactagaaggcacagctaaagctctggatcctgattttaaagtcattcagagtgcatatccttttgtcattgggagacttattgcagacccaagccctgatatgagaagaattctgagggaacttctcattcgtaacaatggatccataaggtggaatcgtctagaacgcttggtagcagcaatctctgaacaagcttctgagataactggagac

SEQ ID NO: 27920 - DNA, 254 bp, Glycine max
  Clone ID: 700891277H1
tcttgaacgaagagacagaggtggttgaaaaaaatagagtaaacagagaacactctgagaataacagagaccggaagttggaggcgaagttacggttcttcaaagagcttgaagagtcactgagggagagaataataatggagtcagaaaaagcaagggaagaatctgactctgttcatcctctggttctgacgaggtgcaaatctgaacccgcgagaaccgcacaaaaactcgatcctgaaatgaacgggctt

SEQ ID NO: 27921 - DNA, 262 bp, Glycine max
  Clone ID: 700891283H1
aaacactcataacacaaagcacaaagcaaagctcatccttgagttaaaaaatggcagcagcttcttccatggctctctcatccccatccttggctggcaaggccgtgaagctgggcccatcagccccagaagtgggaagggtgagcatgaggaagaccgtcaccaagcaggtctcctcaggaagcccatggtacggcccagaccgagtcaagtacttgggcccattctctggcgagcccccgtcctacctaaccggtgagtt

SEQ ID NO: 27922 - DNA, 253 bp, Glycine max
  Clone ID: 700891296H1
ctgccgtgatgaattccgtaccctccattacctttgtactagcaatcatttttcgattggagcgcatgaactttaaggagctaggatgtatagccaaagtgattggcactgcagttagtcttggaggtgcttttctaatggcactgtacaaaggtcctgttgttaacattgcaggctcatcggctagccacgtgggacagcctgagaatgtgaacgacccttctggcagtcactggctcattggtgcatgttt

SEQ ID NO: 27923 - DNA, 254 bp, Glycine max
  Clone ID: 700891301H1
atggagtcaaggcttttacacaggatctaatagcaggtgggactgagagttcagcagtaacagtggaatgggcaatcacagagctattgagaaggccagagattttcaagaaggcaacagaggagctagacagggtaataggtagagaaagatgggttgaagagaaggacattgtaaatttgccttatgtgaatgccattgcaaaggaagcaatgaggctgcaccctgtggcaccaatgttggtgccaagacta

SEQ ID NO: 27924 - DNA, 250 bp, Glycine max
  Clone ID: 700891302H1
caaagaatgcaggtccgttgtcaatcaatatggacaaacaatcttggaattgctcttggctgaagcaaagccaaaaaagatctgctcacaaattggattgtgtacctttgatgggactcatggtgttagcatgggtatcgagagtgtggtggataagaatgaaaaaaaatcatctggtggcattcgggatgctggttgttctgcatgtgagatggctgttatttggatgcagaaccagctgaggcagaat

SEQ ID NO: 27925 - DNA, 247 bp, Glycine max
  Clone ID: 700891306H1
attcttccagaatcatcaaagccatcaacgggcttgacttggcaactagctggaagatgaagcaagcaactcttttcttcttctcactcttcctactcctttcctccaccaccatggccatttcaccagcacctgcagcagcaccaaaagccacagcaaaaactcctcctaccccaaaggcaacagcaccatcaccaaaaccattagttcccacaatacctcagtctccagactctcctgactcggt

SEQ ID NO: 27926 - DNA, 243 bp, Glycine max
  Clone ID: 700891310H1
ggggtagaagagacttctgctgcagcagatgttgcaaaaattcctgatgaatccgcttctacagaaagtgaagatatcaaattggatggggtgaaagagacattagctgcagcagatgttgcaaaaattcctgatgaatctgcccctttagaaagtgaagatagcaatttggatgtggtgaaagagccgttagctgcagcaaatgctgaagttacaaaaatttctggtgaattggtttctgta

SEQ ID NO: 27927 - DNA, 240 bp, Glycine max
  Clone ID: 700891312H1
atgagaatgtggaggaagggtcgttttatgagtactattatgggaagagaaaaggagggtggaagaggttcttctcttacggcaactctgattcttgtgcttggatttggttgcaaatgggttggagaattttggtgagcttcggaattgcgctgcttgtgttctacattgctacaaaacctccatcacccaatgtctccgttgagatcgcaaggtttccagaatttaaactagcggaag

SEQ ID NO: 27928 - DNA, 239 bp, Glycine max
  Clone ID: 700891313H1
tcttaagctcgccgacttcggttcggcggagtggttcggcgacgggaggagcatgagcggcgtggtggggacgccgtactacgtggcgccggaggttctgttggggagggagtacgatgagaaggttgatgtgtggagctgtggggtgattttgtatataatgttggcggggattccccctttttacggagactctgctgctgagatctttgaggctgtggttagggctaacctcaggt

SEQ ID NO: 27929 - DNA, 246 bp, Glycine max
  Clone ID: 700891320H1
gccaaaggtaagtgcaagccggccaccctgcaaataagttatacatagacgaaaatgcaaagttgtcctcatctaatctaaagctgccaaagttgactgcatgccagccaccctacaagtaagaagccaagattttgcttgtgattattggttatttagatgcctgaaatggatgccgagaaagtggtgcatactggaggctgccattgtaagagtgtaaggtggaaagtggttgcttcttccagt

SEQ ID NO: 27930 - DNA, 244 bp, Glycine max
  Clone ID: 700891322H1
gttgtaactcgttcttcttcttttgttgttctgtgtttgtgtttgttttttctctcacctgaaaatgtcttgctgcggtggtaactgtggttgcggaagctcctgcaagtgcggcaacggctgcggaggctgcaagatgtacccagacttgagctacactgagtcaaccaccaccgagaccttggtcatgggagtggcacctgttaaggctcaatttgagggtgctgaaatgggtgtgcccgct

SEQ ID NO: 27931 - DNA, 241 bp, Glycine max
  Clone ID: 700891331H1
attaggtcttggaccgacccttttgtgtaagtgcaatggccatggctaagcttgtatgtgttctgcttctggcattccttggcatttccatgatcacaactcaagttatggcaacagattctgcctatcacttggatggaaggagttatggacctgggagtctaaagacctcacagtgcccttctgaatgcacaagaagatgtagccagacacagtaccacaagccgtgcatgtttttctg

SEQ ID NO: 27932 - DNA, 244 bp, Glycine max
  Clone ID: 700891332H1
cccacttgtgcctgtggctgccagaacaggaggaactgtgtcaagagtgactctaaacgtatcaacatggtggggattcacactccaaagaaagacaatgaaccattgctacagtgcactcatcatatgtgtccaataagggtgcactggcacgtgaagctcaactataaggactattggcgagtcaaggttgctgtgacgaatttcaactacaggatgaattactccctctggactcttgctg

SEQ ID NO: 27933 - DNA, 249 bp, Glycine max
  Clone ID: 700891333H1
ctcgacaatgaagccatttatgacatctgcaggcgttcactggacattgagaggccaacctacaccaaccttaatcgtttagtttctcaggtgatatcatcactgactgcttccctgaggtttgatggagccttgaatgttgatgtcaatgaattccagaccaaccttgtgccataccccaggattcattttatgctttcatcttatgctcctgtaatttcagccgagaaggctcaccatgagcagcta

SEQ ID NO: 27934 - DNA, 244 bp, Glycine max
  Clone ID: 700891338H1
aaaagattgaagcatttgttggttcaaaaacagttatccagatacgaagtcatgcacagaagtattttcttaaagttcagaagaagggaacaagtgaacatgtacctcctccccggccaaagagaaaagctgctcgcccataccctcaaaaagctcctaaaactcctactgtatcccaagttatgggcccattgcaatcttcatcttctttcattgaacctgcatacatttatatcccggattc

SEQ ID NO: 27935 - DNA, 240 bp, Glycine max
  Clone ID: 700891341H1
ggacactactaggattgggaagaagggtctttacatttttagtttggcaaatagatattgcaactacctttgtataaatctatttctgaagaagcaattacaactttcaagggatgatagcattttgtggcataaggattaaggaggcataaaggaccaattgctttggaatattcactcatgacaaggcacaaggtcatgcgtgtatgccaacacatagtaatgatgtgtgtttttatt

SEQ ID NO: 27936 - DNA, 239 bp, Glycine max
  Clone ID: 700891342H1
gggtgcagatgtctatcctgctgcacagcaaatgctaattcatcaagggaaagttcttagggatgcttctaccttggaggagaataaagtagttgaaaatactttcattgtaattatgctatcaaagagtaagagcccatccggtgaaggatctactacttcaactgctccatcaaccaaggccccacagacaagtacagttcctgcttcaacccctccagcgtcagtagttcctcaag

SEQ ID NO: 27937 - DNA, 237 bp, Glycine max
  Clone ID: 700891344H1
gttcaatccttttcagtcatctctttggtcacgttttcacagtaacataacatattctgtggaaatatggcaaaacttggagactgtgcagctcatttttttattgcagcaatggttttgagcacgttttacgtgaccaaaactgtggcacaatcagaaattgcacccacatcgcaaatggagactggtgcagggtttgctttgtctgtttctggggtgaccttatgttcttctgtg

SEQ ID NO: 27938 - DNA, 237 bp, Glycine max
  Clone ID: 700891346H1
ccgactcttagccgccgatctctcagggcttgcatcttctcagctgtgaagatgtacacatcaaggaagaaaatccacaaggataaggatgctgaaccaactgaatttgaagagtcagttggacaggcattgtttgatctggaaaataccaatcaggagcttaaaagtgatctgaaggatttatacataaactcagccgtgcaagttgatgtttctggaaaccgcaaggctgttgtt

SEQ ID NO: 27939 - DNA, 238 bp, Glycine max
  Clone ID: 700891347H1
caagcaaccacttgatcggtcttctgaacttcctaacgttcctgctgtcgattccgatcctaggtggcggaatatggctgagcagcagggccaacaacaccgactgcctcaagttcctgcagtggccgctcatcatcatcggagtcagcatcatggtcgtgtccctcgcggggttcgccggcgcgtgctaccgcaacaccttcctcatgcgcctctacctcgtcgtcatgttcctcgt

SEQ ID NO: 27940 - DNA, 241 bp, Glycine max
  Clone ID: 700891348H1
cgggaaggatctcatttgggccgattatgggccgcactacgtgaaggtgaggaaggtttgcacgctcgagcttttcacgccgaagcgcctcgagtccctcaggcccattagggaggacgaggtcaccaccatggttgagtccgtttacaatcactgcaccaccactggaaatttagggaaagcaatattggtgaggaagcacttggggtctgtggcattcaacaacatcaccaggttggca

SEQ ID NO: 27941 - DNA, 243 bp, Glycine max
  Clone ID: 700891350H1
tatggaaataccctaagttgtgggtgggattcttgaagtgtgtgcagttgacaaaaccacagtcatttggcattttgcttcagctgcctccagcacaattggaaaatgcattaaatagaattgcagccttgaaggcaccattgattgcgcatgcaagccagccagatatacaatctaaacttccgagggctgtgctggttgttctgggacttgcttccgattctcaggtttcaagtcaagcac

SEQ ID NO: 27942 - DNA, 243 bp, Glycine max
  Clone ID: 700891351H1
aaacactcataacacaaagcacaaagcaaagctcatccttgagttaaaaaatggcagcagcttcttccatggctctctcatccccatccttggctggcaaggccgtgaagctgggcccatcagccccagaagtgggaagggtgagcatgaggaagaccgtcaccaagcaggtctcctcaggaagcccatggtacggcccagaccgagtcaagtacttgggcccattctctggcgagcccccgt

SEQ ID NO: 27943 - DNA, 239 bp, Glycine max
  Clone ID: 700891356H1
aatcagaagatgagtcaaccaataagaaagataagcttctcatgggaaaagaagcctggtgtctccaaagtaacaactactactcatggtgaaaatctgatcccaaaagaggaagagtttttggccaagttgccaccaccaccttgcacaccagaagaatcaagtgctactcatcatcacaaaaaccaccaccctcttcttgattttcaaattccacttcctccttgtgcttttcagcc

SEQ ID NO: 27944 - DNA, 235 bp, Glycine max
  Clone ID: 700891358H1
ctcaccatattcttgttctcatttttctgccacagtctctcaattaggttcctcaaccaattggccatcctcatttgcgcaccacaagatgcaatgtcattggtgaccccagagtacttaaccgagattttggagaaaggaacttttttgaacactgttgggaacaggatcttctactcagcacttcctcttttgctttggatctttgggccagtgctggttttcttgtgctcta

SEQ ID NO: 27945 - DNA, 234 bp, Glycine max
  Clone ID: 700891360H1
gaaatttggtcttcttgcaaattggcaacagaggtttaccatggaagatatactgacccagctgaagaaggaaatggcggcttcacataaccgcaagcttgtccaacctcctgaaggtactcactattagtgtccaagatcacactgatattggatcatattgcatttgcagtatgcaatatatagtatgtaatactctggatccttctaaattcaagaacatactggggaatg

SEQ ID NO: 27946 - DNA, 239 bp, Glycine max
  Clone ID: 700891364H1
ctttgtcaagggtattgttgattctgaagatctcccactcaacatttcaagagaaatgttgcaacagaacaagatcttgaaggtcatccgtaagaacttggtcaagaagtgccttgagctcttctttgaaattgcagagaacaaggaggattacaacaagttctatgaggctttctctaagaacttaaagcttggtatccatgaggattcccagaacaagggaaagattgctgaattgc

SEQ ID NO: 27947 - DNA, 237 bp, Glycine max
  Clone ID: 700891367H1
aaaaggagatgctttctgaagcacgagcccggttggccaacacaaaaggaaagaaagcaaaaaggaaagctagggagaaacagcttgaggaagccaggaggcttgcttctttacaaaagaagagagaattgaaggctgctggaattgatattaggcagcggaagagaaaaaggaaaggaatagattacaatgcagcaaccaaatgggagtgttcctgttatttagtaaccttggtgg

SEQ ID NO: 27948 - DNA, 237 bp, Glycine max
  Clone ID: 700891368H1
ggttgaagcatggtggacccaacaacagaagcctcatggtttgggatctgccagttccagaagaagcaaccaggggcttatttcaactgccacgttcagctattgaaaaaatcaagcaaattgtggttatgtccaagaagaaagggaataacaacaccaaccttcacttgtcaacgttgtgttatctattgcatatgcgttggtttgcagagtgagagcagaagaagtaaaaagtaa

SEQ ID NO: 27949 - DNA, 234 bp, Glycine max
  Clone ID: 700891370H1
gccatggccatgagcaatttgagatgacaggtttggaccctgagtataatagattgttcaatgagggcatggtgtgcactgctagggttgtgtccaaggctgtgatcactgggtacaaagatgggttcaaccagattaagtccttggttgatgttggaggtggcattggagggtctctttctgagattgttagggcttatcctcacatcaatgccatcaactttgacttgcctc

SEQ ID NO: 27950 - DNA, 233 bp, Glycine max
  Clone ID: 700891371H1
ggatgataatagtgcacaatcaagttttgggtccgttgagcagggacagacaacagatcagctgaagggaaaacctgggaaatctccattttctgcatcttcacttgcatttgcttctagcagccttatctctgctattccatccaagctgcaactatcattttcattctggaacaaggggagatcaaaaccgaagccagttcctcccccatgcattgatagcttgagtaata

SEQ ID NO: 27951 - DNA, 233 bp, Glycine max
  Clone ID: 700891372H1
gaaaaggccaaggctaaaggggtttctttgttgcttccaactgatgttgtcatagcagacaagtttgctgctgatgctaacagcaagactgtgccggcatcaagcatcccagatgggtggatggggttggatattggtcctgattccatcaagacatttggtgaagcattggatacgactcagaccattatttggaatggaccaatgagtgtttttgagtttgataagtttgc

SEQ ID NO: 27952 - DNA, 233 bp, Glycine max
  Clone ID: 700891373H1
gacaagtacttccaaaggaagcaactgtcaagtgtcttgctgatgcaggcttcttcctagatgagaaggatattagtggaaacagtacaatgagatctttctatcatgatgttgcccagcttcagggtcttgcaaaaagtttgcacaaagattgcattgctaaaatggaaccatctaagtgtctctttccatcagaaattgctaaaaacataaagactccactgttccttgtt

SEQ ID NO: 27953 - DNA, 229 bp, Glycine max
  Clone ID: 700891376H1
caataaccgggttgaatataattggctatgctattgcattgtgtggagttgtgatgtacaattacataaaggttaaggatgtccgtgcctctcaattgcctgttgaaagtataccggataggatcacgaaggactggaaattcgagaagaagtcatcggatatttatgtgccagataacattggtgacgatgagggaagcagtggagctaatggtactgcttctgatat

SEQ ID NO: 27954 - DNA, 229 bp, Glycine max
  Clone ID: 700891377H1
aattggtgcagcctatctagttggtagttggttccattggacacaagtgaaaactacgtgccatggcttccaagaatgtaattcttcaatttgtcttattttccatgtgtttggctatggcaaattcggtcgagttcaaatatccagcagttttcaacttcggtgattcaaattcggacacaggagaacttgctgcagggttgggctttcaggttgccccacctaatgg

SEQ ID NO: 27955 - DNA, 230 bp, Glycine max
  Clone ID: 700891378H1
gaattctccagagagaagaagaaacttaatcgatcatcacttcacttcactaatacatcatggcagacgagacccagaacaagtatgagagctctgaggttgaggtccaggatcgtggtgtttttgactttctcggtaagaaaaaggatgaagaagacaagcctcatcctcaggaggaggtcatcgccaccgagtttcaaaaagtcactgtctcagaccaaggagagaac

SEQ ID NO: 27956 - DNA, 231 bp, Glycine max
  Clone ID: 700891379H1
atttagtaaaagcagttcgcaaggcagctggaaacatagagaaaccattggagggtttccatatagttgttgatgcaggcaatggagcaggaggcttttttgcagcaaaggttctggaacctctgggggcaataacttctgggagtcaatttttggagcctgatggcttgtttccaaatcatatcccaaatcctgaggacaaaacagcaatgaaagctataacccaagcag

SEQ ID NO: 27957 - DNA, 234 bp, Glycine max
  Clone ID: 700891380H1
ccaatatattccattctctctgtgtatttccctacctctcccttcaagatgcagatcttcgtcaagaccctcaccggcaagaccatcacccttgaggtggaaagctctgacaccatcgacaacgtcaaggccaagatccaggacaaggaaggaatccccccggaccagcaacgtctcattttcgccggaaagcaacttgaggacggccgtacccttgctgactacaacattcag

SEQ ID NO: 27958 - DNA, 238 bp, Glycine max
  Clone ID: 700891381H1
gaaagaacaacttcatgataatactgtgtcaatgatgcaatctcaacatttctcccagatggggaggtctgctggtttcagtttgggaggatcatatccatcacatcgtacacaacagcaacagcagcatgccccttctgtcagtagcaatggtgtctcattttcatctgtaaacaatcaagatcttctccatctgcatggaacggatatttttccatcttcacactcaacatatcat

SEQ ID NO: 27959 - DNA, 236 bp, Glycine max
  Clone ID: 700891383H1
cactcattaattgcaagaatggcacttcgttgcttggtgatgtccctttctgttctcttcactcttggtcttgcgagagaaagccatgccagagacgaagatttttggcatgctgtttggccaaacactcccattccaagttcattgcgagatcttctaaagcctggccctgcaagtgttgaaatcgatgatcaccctatgcaaattgaagaaacacagtacccgaaaaccttctt

SEQ ID NO: 27960 - DNA, 231 bp, Glycine max
  Clone ID: 700891388H1
ctctgcaggtccgtgaagaaaattttattagattattcctctaatggctgtttgataggtatgtaaattttgattgcacaagagtcctgtagccatatgttaaaagttaattatcccgtcataatattttacacatgtttcaccttcattgcaaggtggtgtaaagttgtaacatctaacttgaaattttaaatcactgttagtccctttttatttccccgtccttcattc

SEQ ID NO: 27961 - DNA, 226 bp, Glycine max
  Clone ID: 700891391H1
ccttcgttcactcttcttctcttgcggctagggttttagcgcagttcttctagatttaaggaagatgggtaaggaaaaggttcacatcagtattgtggttattggccatgttgactctgggaagtccactaccactggccacctgatctacaagcttggaggcattgacaagcgtgttattgagagatttgagaaggaagctgctgagatgaacaagaggtctttc

SEQ ID NO: 27962 - DNA, 230 bp, Glycine max
  Clone ID: 700891395H1
attccaagccgttggttgcggagattgagatttcaaaacttcttgatccaaccaaaggcactgcaagtattagtgcagttgctggttcctttggttacataccaccagaatatgcatatactatgcaagtcacagcaccaggaaatgtttatagctatggtgttgttctgctggaaatccttacaactagactaccagttgatgaggattttggtgaaggtgtagatttg

SEQ ID NO: 27963 - DNA, 252 bp, Glycine max
  Clone ID: 700891410H1
gaggaaattgctgcaagacttttagaagtattgctgaacaatgtgaagattcgagaaacgaaagtaacaaagtcagctatcgtaccattatcacagtatcttttggacccacaaactcaagcacagcaggcaaggttgttggcaactttggctcttggggatctgtttcagaatgaggctcttgctcgaacaagtgatgcagtttcagcttgtcgtgctttagtgaatgtgcttgaagagcaaccaacagaa

SEQ ID NO: 27964 - DNA, 247 bp, Glycine max
  Clone ID: 700891427H1
tggatatgaaaaaggattccctggaaggccagatggtttgcagaagtttcctccattaaattatgatggttccacaaaattgttaaggaatggttctcagtcttccatgggaagtctttctgtggatgatcttagagccagcagcatcagaacatctgctgatgaggatattactagcatccatacttttgttgctgggatgaaagaaatggtcaaacaagaatatgagaagcatcttgttgatggt

SEQ ID NO: 27965 - DNA, 247 bp, Glycine max
  Clone ID: 700891430H1
ggaagttctgagcacttctttgtccctctttcagaaactggcttttctaatttagatgcagacaaaaggggagcttcattaaggagcaaaagattatttgtatcccaaatggatgattctttgcttgagagtcatgcatctggtgggcatggggagagcaagtttgatgaatttccagatatgttgaatgatttggaaaggctttctgtctctgattacaacaatgttaatggttttctatcatata

SEQ ID NO: 27966 - DNA, 252 bp, Glycine max
  Clone ID: 700891438H1
ttcacatccaaatctagtaaagttaattggatattgctgtgaagacgaacatagggtgctaatatacgagtacatgtcccggggaagtgtggaacacaacttgttctcaaaaattttgcttcccttgccatggtccataagaatgaagattgcgtttggcgctgcaaagggacttgcatttcttcatgaagcagagaaacctgtcatctatcgagatttcaagacatcaaatattttattggaccaggagta

SEQ ID NO: 27967 - DNA, 250 bp, Glycine max
  unsure (1)..(250): unsure at all n locations
  Clone ID: 700891441H1
ggangaccaccttgttgtgacaaagaaggggtcaagaaagggccttggactcctgaagaagacatcatattggtgtcttatattcaggaacatggtcctggaaattggagggcagttcctgccaaaacagggttgtcaagatgcagcaagagttgcagacttagatggacgaattacctgaggccaggaatcangcgtggtaacttcacagaacaagaggagnagatgataatccatcttcaagatcttt

SEQ ID NO: 27968 - DNA, 248 bp, Glycine max
  Clone ID: 700891448H1
gggagaggcagaaagaagagaaaaaaggggaatggcatggttgcagttgcagagaatcgtgaccaagggaggtgctaatttgatctcaccactcccactttcacgattcttctcgaaatcttcttccccctatgttgtgaaagttggaattccagagtttctaaacgggattgggaagggggttgagtcccacgttcctaagcttgaatccgaaatcggtgatttccagaagcttctcctcactcgca

SEQ ID NO: 27969 - DNA, 242 bp, Glycine max
  Clone ID: 700891459H1
gaagactacagaaacacatttgctaacttggcactacctctgttttcaatggctgaaccagttccaccgaaaattatcaagcatcaagatatgagttggacagtttgggatagatggattctcggaaacaatcctaccctcagggaacttctcgagtggctgaaagcaaagggcttgaatgcttatagcatctcttgtggaagttgcctactctataatagcatgttccctaggcataagga

SEQ ID NO: 27970 - DNA, 243 bp, Glycine max
  Clone ID: 700891462H1
caatgcctcccgaggcacttgagatcacaaggaagttcatgaacaaacctgtgaggatccttgtgaagcgtgatgagctcaccttggagggtatcaagcaatttcatgtcaatgttgagaaagaggaatggaagcttgacacactgtgtgatctttatgagacattggcaattactcagagtgtcatttttgtgaacaccagaagaaaggttgattggctgactgacaagatgcgaagtcgag

SEQ ID NO: 27971 - DNA, 247 bp, Glycine max
  Clone ID: 700891483H1
cattaacatgggtgctggtgactactacaaaatactgaaggtgaagcatgatgccactgatgaagaagtgaagaaggcttataagaaattggcaatgaaatggcacccagataagaaccttgaagaccctcttaggaaagaagagtttgaggccaagtttaaacaagtttctgaggcctatgatgtgcttagtgacccaaagaagcgccagatctatgacttgtacggtcactatccccttaactct

SEQ ID NO: 27972 - DNA, 245 bp, Glycine max
  Clone ID: 700891485H1
tcttgtttctggaagttagttgcatctggaaaaagcaaaagggaagcccaaaatagtttaaagggtgctcagttgcaaaagaaaattgaggaattggctattgactacaataatttaccagtcatgtaccgacaaggatcctcggtttatagggacaaggtagatattgctctaattcatcaggagaatggagagtttcctgaaaattatggaaaggttattgtaggacatattgacattattgg

SEQ ID NO: 27973 - DNA, 212 bp, Glycine max
  Clone ID: 700891590H1
gcaatatcaaatgaaagcttcggtgtaaattgccgaaacatagttcaatgggcaaaattacacattgagagtggagatatacaaggtattatcgatcccttgttgcggaatgactatgaccttcaatcgatgtggaaaatagcagagaaagcattgatgtgtgttcagccccacggacatatgcgaccatcaatttcagaagctctaaagga

SEQ ID NO: 27974 - DNA, 211 bp, Glycine max
  Clone ID: 700891591H1
cagatctcctaaatctaagggggagccattgttgaagaaggcttatggcgaagaaggcggtgatgacattgattatgatcgcagacagcttagctctgatgaatccctttcacttgggaagactgaggatgattcagctgcaaatcgatcatcagtgtctgaatttggggatgacaattttgctgttgggagttgggagcagaaagaagta

SEQ ID NO: 27975 - DNA, 216 bp, Glycine max
  Clone ID: 700891594H1
cttcaatcctttcgttattctcttattcatccttctcttctgaataatccagatctctttctgcccttttctccgtcacgcttttcgtgaccggatctgtatggatttgatccagatctacacgccgatggtggttttggccgggtctttcatagatctggtgcgtagaggctcagatctacggtaccgaggtacaacagagaatcgatgacaaga

SEQ ID NO: 27976 - DNA, 233 bp, Glycine max
  Clone ID: 700891609H1
ggatttgttgagggcttcggcggaggtgttggggaagggtagcgtggggacttcgtataaggcggtgctggaggaaggaaccaccgtggtggtgaagaggctgaaggatgttgtggtgacgaagaaagagttcgagacgcaaatggaggttctggggaagattaagcacgagaatgtggttcctctcagagccttttacttctccaaggacgagaaattgctcgtttacgatt

SEQ ID NO: 27977 - DNA, 234 bp, Glycine max
  Clone ID: 700891613H1
tttgtttttatttgtggaaaaaatgtgcagtgtgataggaacaactgtacttggaatggggcattatacagtaatgtatggacaactcagagaaaatgaagaagagacaagctgtgacgaaagctctgattctttggacaagatggtaccccttttgcaagaaaagatggaagtgtgaatagaacttcgaaagattctagaggcagaggaattcacctatttttcagaatcttc

SEQ ID NO: 27978 - DNA, 237 bp, Glycine max
  Clone ID: 700891615H1
ctctgtgtatttccctacctctcccttcaagatgcagatcttcgtcaagaccctcaccggcaagaccatcacccttgaggtggaaagctctgacaccatcgacaacgtcaaggccaagatccaggacaaggaaggaatccccccggaccagcaacgtctcattttcgccggaaagcaacttgaggacggccgtacccttgctgactacaacattcagaaggagagtactcttcacct

SEQ ID NO: 27979 - DNA, 230 bp, Glycine max
  Clone ID: 700891622H1
gtgctttgaaaatgggaaagtttagttcaagttacagtacttctgattttgttcactttggagttctacttccctttcttctgttatcacagttgttctttcaacttgcatggtgtggctccatagtaaagttccttcctggattagagggaccccttccttttgttcttgaaaccgggtatgtgggagtgggtgaatcagaggatgtgcaggcattctactacttcatt

SEQ ID NO: 27980 - DNA, 228 bp, Glycine max
  Clone ID: 700891639H1
ctctatcaccccattttctcaaacacctacacaaaatgtgcttcctcaacacaaagtccctggctcacttcatgttgctaacaacaattgtagttggcattgcaatgggagattcatcaaaggacaaagaggaatgcactgagcaattggcaggcctagcaacatgtctgccctatgttgggggtcaagcacaagctccaaccccagattgttgtagtggtctcaagc

SEQ ID NO: 27981 - DNA, 228 bp, Glycine max
  Clone ID: 700891645H1
tgcatttctttcttgggttgcattgcagctgaaatgattaatggctgctgcttgtgtttttacactatactcgtggcagtgcttcttcttctggaagcttctctggtgggattcattgcacttgatagtgattgggaaaaggatattccactcgatccaaccggtcaacttgacgagcttcgagctttcattgaagataatatagatatctgcacatgggttggcatt

SEQ ID NO: 27982 - DNA, 226 bp, Glycine max
  Clone ID: 700891654H1
ggtgctggtgactcaatactttgacaccatgaaagagattggagcatcttcaaagtcctcatctgttttcataccacatggtcctggcgcagttaaggacattgccatgcagattcgggatggtctgcttcaggccaccacttcacagaattaagctttcctggagttgtaaataacaaatagtagcgtgccagattttttttcagtaaatgcttttcttgtttga

SEQ ID NO: 27983 - DNA, 226 bp, Glycine max
  Clone ID: 700891660H1
gcagcactattgctaattctggggcgtttgtcaaggtttccatggatggagcaccttaccttcgcaaggtggacctcacaatgtacaaaagctacaaagacttatctgatgccttggccaaaatgttcagctccttcaccatgggtaactatggggcccaaggaatgatagacttcatgaatgagagcaagttgatggatcttcttaacagctctgagtatgtgcc

SEQ ID NO: 27984 - DNA, 228 bp, Glycine max
  Clone ID: 700891661H1
gacagatcatataattttttttagcaaaatccatggcagatcttcaagaaaaactggatgctctgaagggtcttgttggtgtgctaaataacatggatgagggtgaaactcacaacaacaatgcaacctcctcacccaataattcccatagtcctgctcctatgcctggaaggaatcgctctgttggaaaatataacaacagtggcactcagaagattaaaggtctga

SEQ ID NO: 27985 - DNA, 233 bp, Glycine max
  Clone ID: 700891664H1
atcaagtcgaatgttttgggtggaaaccgatgaaaaccgcaacacccttccctctcctctcccacataaaacccacaagccccttcttcccattgggtaccgcagaggcatggccaagaagagaaaatccatatccacaagcctcgacgaggtggatcgaaccatctactcttccttctccagtgccgccaattccctctctcacctctacactctctccatgaaccaccaga

SEQ ID NO: 27986 - DNA, 223 bp, Glycine max
  Clone ID: 700891673H1
cagaaaagggtgtggtggttttcaccaagagctcttgttgcctctgctatgcagtcaacattctgttccaagagcttggagtgatccctgtggttcatgaaattgacaaagaccctgagggcaaggaaatagagaaagctataacaaggttggggtgtcctacacctgttcctgcagtcttcatcggagggaagctggtggggtccaccaatgaagtcatgtc

SEQ ID NO: 27987 - DNA, 225 bp, Glycine max
  Clone ID: 700891677H1
tcaagattttgtggatccccattgtggagacctgatggacgagaagataatgggcaatcaatttgaagagccagaccaacccatgcagagcatcgatacgatcatgcagataatttcagaagctaccgtaccagcagttgggacctattcttttgaccagtttatggaggaacaaatttatgacttggaatctgaatctgatgctgaatctgatcttgatataga

SEQ ID NO: 27988 - DNA, 227 bp, Glycine max
  Clone ID: 700891681H1
caaattgtaggtcccttatattttgacattggtaagatagcactggagcatattgctgcttatgtttcaacatggcctgctcctgttcctggtaagttaatggatcttccaattgggaatacaatgcttaaagtgaacctgccacctgcacacagcttgcccatggaaaatggagtatctcttgatgaatctgctgctcctgtggctccttttcttcctaataatca

SEQ ID NO: 27989 - DNA, 223 bp, Glycine max
  Clone ID: 700891685H1
aatggttgtgtctcaagaatcaacactgatgctcaaggatttaacaagaagctcaactcagctgcaacgagtcttcaaaagcaacttcctggtcttaagattgcggttttcgacatttacaagcctctctatgaccttgttcaatccccttcaaaatctggttttgtggaggcaaacagaggatgctgtggtaccgggactgtagagacaacatccttgttgt

SEQ ID NO: 27990 - DNA, 221 bp, Glycine max
  Clone ID: 700891688H1
ccattgttggtgcatcagggacaccttatcacgatggcttgtttttctttgatatatgtttccctccagagtatcccagcgaaccccctatggtgcattataattccggcgggctacgattgaatcctaatttgtatgagtccgggaaagtctgtctgagtctcctaaacacgtggactggtacagacaccgaagtttggaaccctggagcttccacaatt

SEQ ID NO: 27991 - DNA, 223 bp, Glycine max
  Clone ID: 700891689H1
caccgattggctcttcaagacttgcttctttaccatttcattcctaaaaccctattcttcttcgctcattcatcagcactgccatcagccccaacctccccacaaggtcacagggactaaagaggtgtaccaccatgtcggacgatgaaagggaggagaaggagttggatctctcttctgcagaagttgtaaccaaatacaaaaccgcggctgagatcgttaa

SEQ ID NO: 27992 - DNA, 174 bp, Glycine max
  Clone ID: 700891690H1
tcacaatttttattttttaatgatactattttgttattgttattgatggtatcatcatcgggaaaaagcagagaaatggatagggtgaagggtccatggagcccagaagaggacgaggccctgcgggcgctggttcaggcccacgggcctcgaaactggtcggtgataagcaag

SEQ ID NO: 27993 - DNA, 225 bp, Glycine max
  Clone ID: 700891694H1
ctaacaaccacttatcccctttctccttctaacgagtgaggaaaaatggcgcgtaagaagatcagagagtatgactcaaagaggttgttgaaggagcactttaagagactctctggcaaggagttgccgatcaagtctgcacaaattaccgcatcaactgatttcactgagctacaagagaaggaaccctggctttcatcttctaaattggttgttaaacctgac

SEQ ID NO: 27994 - DNA, 227 bp, Glycine max
  Clone ID: 700891695H1
caggacttgtcacttaggagacttaatgaatatcaaacgcatctccgaacacttcaaaaagaaaagtctgatcgccttcaaaaggtcttgcaatgcgtgaatgaggtgcattctctttgtagtgtgcttgggttggattttggtcagaccgtgggtgatgttcatccaagtttgcatgggactcaggtggaacagtcaactaatattagcaatagcacattggaagg

SEQ ID NO: 27995 - DNA, 245 bp, Glycine max
  Clone ID: 700891702H1
gcatttcgatggaaagcatctgttggaccatgggaggagagacctgggcactttggtgatgtttggatgtactggactgatgatggacttggctattatgagtttctccaacttgcggaggacttgggtactgcaccaatatgggtatttaataatggtgtcagtcataatgatcaagttgatacatctgcggtcttacctcttgtgcaagaagcccttgatggacttgagttcgcgagaggtga

SEQ ID NO: 27996 - DNA, 235 bp, Glycine max
  Clone ID: 700891727H1
ggctgttgtatggaagaggatcaattgttactgatttatgaatacatggaaaacaatagtcttgctcatgctttatttgccaaaaatgatgactctgagaaatgtcaattgagattggattggcaaacaaggcataggatttgtgttggtatcgctaaaggtttggcttaccttcatgaagagtccaaactgaagattgttcatagggacatcaaggccaataatgtgttgctgg

SEQ ID NO: 27997 - DNA, 234 bp, Glycine max
  Clone ID: 700891739H1
tctttggattgagaagaccactgaaaaggagatttctgatgatgaggacgaggaagagaagaaggatgaggagggtaaagttgaagatgtggatgaagataaggagaaggaggagaagaaaaagaagaccattaaggaggtatctcatgagtggtcattggtgaacaagcagaagcctatttggatgaggaaacctgaagagatcacaaaagaagaatatgctgctttctacaa

SEQ ID NO: 27998 - DNA, 235 bp, Glycine max
  Clone ID: 700891747H1
cgactcagttgttgtcagcgagtgagtgagtcgtttctctgcagcaacaaggtttagccactccaaacagacgagaaatgggtcgtggggtcagtgctggtggtggtcagagttccttaggttatctctttggcagtggggtgcctgccagcagtgcaaacagtcagcctgcaaatggtgctcgcactcaaaatgctagtgctccttcaccaccagtcgataagcaaagtccagc

SEQ ID NO: 27999 - DNA, 229 bp, Glycine max
  Clone ID: 700891770H1
gcggctgccattgcttatgggctcgacaaaaaggccactagctctggggagaagaatgttctcatttttgatctcggtggtgggacttttgatgtctctcttctcaccatcgaggagggtattttcgaggtgaaggccactgctggtgatactcacttgggaggtgaagattttgataacagaatggtgaaccattttgttcaggaattcaagaggaagaacaagaagg

SEQ ID NO: 28000 - DNA, 228 bp, Glycine max
  Clone ID: 700891773H1
caaccactcttaatttctctctgccttgctcatttacacacctctccaacctttcactttcagctttatttgaatccctctctctcctttccaaatggccagcgttgaggttgcacatcaaacaccaacaacagttccagaaaatgaaacaaccgaggtaatcaagacccaggaaacaaccccggaaccagtaccagccactgaggctcctgcaacagaacaagcagc

SEQ ID NO: 28001 - DNA, 227 bp, Glycine max
  Clone ID: 700891775H1
caattgaccaattagcattggatttgaaacctggatcagagaccttgtccttgacatggtttggaaggtgttttgacctcttgcccttaatcaacaaggcttttgcaaagcttgttgcggatattgactacccaatgagtaaatgggagattttttccattgaagggtactacttgagctacaccttgagtttgctagagcttctgaattccatttcttcttgtttt

SEQ ID NO: 28002 - DNA, 230 bp, Glycine max
  Clone ID: 700891776H1
gtcagaatcagaatcagaagaagcgagcaaagatgtcgggtcgtggaaagggaggcaagggtttgggtaagggaggagccaagaggcacaggaaggtgctccgcgataacatccagggaatcacaaaacccgccattcgccgtttggctcgcagaggcggcgtcaagagaatcagtggcctcatctatgaagaaacccgcggcgtccttaagatcttcctcgagaacgtt

SEQ ID NO: 28003 - DNA, 228 bp, Glycine max
  Clone ID: 700891783H1
tgaagaataaatcataaaattagaacagataacagctctggatgaattaatgtcattgatgagtttcttctttctgtattatttatttctctggatttgatcacgaaacattgaattgaattgtgagcctgttttctctgcagcatagtgttttgaataattttgtgtagtgcccttcatctcatcgagcctcatgcgtaatttggtgatgtttctcactgtttttga

SEQ ID NO: 28004 - DNA, 227 bp, Glycine max
  Clone ID: 700891785H1
cggatgcaagattagcgcaacatgtggagagagggattgcagatggccttctaattagttgtgtggcttcttgttccaatctctgggcccttattatggatgctggaactggcttttcaagtcaagtttataagttgtcaccatttttcttacacaaggaatggatcatggaacagtgggaaaagaactattacattacttctattgcaggggctaataatgggagc

SEQ ID NO: 28005 - DNA, 266 bp, Glycine max
  Clone ID: 700891805H1
tacaagtctttattataccaatttttgctattgcaatcagtatttttgttagtttcacctttgctgccatgtatggtattgccgttgctgcacttggcatgctgagtaccattgccaccggattggccattgatgcatatggtccaatcagtgacaatgctggaggtattgctgagatggccggtatgagtcacagaattagagagagaactgatgcccttgatgctgccggaaacacaactgccgcaattgggaagggatttgcc

SEQ ID NO: 28006 - DNA, 268 bp, Glycine max
  Clone ID: 700891848H1
gacaatttaaggctagattcaggacaaagagggtatcccaccagaccaacagaggctcatctttgctggaaagcagctagaagatggccgaaccttggctgattacaacatccaaaaagaatctaccctccacttggttctccgccttcgtggtgggatgcaaatctttgtcaagactctcactggaaagaccatcacccttgaggtggagagctctgacactattgacaatgtcaaagccaagattcaggacaaagaaggtatccca

SEQ ID NO: 28007 - DNA, 252 bp, Glycine max
  Clone ID: 700891889H1
aacattctaatctcattctccttctgttcaaacactctctctcatggcatcagataagaagattaggatcggcatcaacgggtttggaaggattggccgtttggtggccagggttgcccttcaaaggaatgatgttgaacttgttgctgtcaacgatcctttcatcaccactgattacatgacatacatgttcaagtacgacaccgttcatggccagtggaagcattttgatgtgaaggtgaaggactctaa

SEQ ID NO: 28008 - DNA, 244 bp, Glycine max
  Clone ID: 700891911H1
aattcctatcatttcctatatcatctaaaccttcttttaacaaaaaccaaaatgatgaacaagcaatctgtcttgccttctcactagcattgctagtttcatttttgaattgcaccaccaccttagcccaattatcaccagcttctgcccctctcaaaccaccccaacctgctcctaccataccagctgctgctcctcaacaaccattggttccttcattgccacaatcaccaagtgattccac

SEQ ID NO: 28009 - DNA, 243 bp, Glycine max
  Clone ID: 700891913H1
gcagcagaattgtaccggagatgttcttttggatcagaactttgtgaatgacatgaattcttccccattatatgtagccataaagcaaaacgtgttcttcaacgtgctgtttggaatgacacatcttttctgaattcaatcaatgtgatggattactccttgcttgttggagtagattctcagaagcacgagcttgtctgcgggatcattgattatctcaggcagtatacttgggacaaacat

SEQ ID NO: 28010 - DNA, 255 bp, Glycine max
  Clone ID: 700891917H1
gtctggaatcttcaggtccaaaccaatagcaaggtttcaaatttgtttgctggaactcaggaaaaatgtgttgcttgcaaaaaacagtttacccaattgaaaaggtagctgttgatggaacatcttaccataaggcttgtttcaggtgcactcatggggggtgtgtaattagcccctcaaattacgttgcccatgaacatcgtctttattgtaggcaccatcacactcagttgttcaagcagaaaggtaattcag

SEQ ID NO: 28011 - DNA, 251 bp, Glycine max
  Clone ID: 700891932H1
cgtatataagctggatttatcttagatactggcagaggaaaccagaaactaaacatagaggtgatctgagtgaagatttgctttctccacatttttcccagaatttttaagaccagtcatagaccctatcgcttcaatatttcatcgaatgctctgtggaagatatgatgcttctaatgatggtcaaggcaacagtctggaaagtgagcctttaccaggttcggactcaattgaggcatccaggagacgag

SEQ ID NO: 28012 - DNA, 242 bp, Glycine max
  Clone ID: 700891955H1
gcgtttcgtcgtccctgaaggcaccaaaaaggtttcttatgagagggacacgaagatcatcaatgcggcgtcttcaccatcgagagagaggagcacactatcggcaacatcctccgcatgcagctgcacagagaccccaatgtcttgtttgccggatacaagcttcctcatcctcttcaatacaaaattattgtcaggatacacaccactagtcagtcttcgccaatgcaggcatataacca

SEQ ID NO: 28013 - DNA, 242 bp, Glycine max
  Clone ID: 700891962H1
gcaaagggatcaatataaaccagacagaagcacaagtagttggagtccagattcatggaaatgaacaaagtatgagacagattctgctgcaaggccactggaaagaggacttgaggtgcctgcacaattaccagtacctgaggttgatcagtactcttatttacatacaaacaacttagtttcctcagaaagcatgtatatgagtggaaaaccaatgcactatcctgagttgcaaaaccctg

SEQ ID NO: 28014 - DNA, 240 bp, Glycine max
  Clone ID: 700891969H1
tgattgagaggtccacaaaccttgactggtacaagggtccaactctgcttgatgcacttgaccagattaggagcccaagaggccctctgacaagcccctcaggcttccccttcaggatgtgtacaagattggaggtattggaactgtgccagtgggacgtgttgagaccggtgtcttgaagcctggaatggtggtgacttttgcaccaactggactgacaactgaagtcaagtctgtgga

SEQ ID NO: 28015 - DNA, 234 bp, Glycine max
  Clone ID: 700891975H1
tcttcttctcttgcggctagggttttagcgcagttcttctagatttaaggaagatgggtaaggaaaggttcacatcagtattgtggtcattggccatgtcgactctgggaaatccactaccactggtcacctgatttacaagcttggaggcattgacaagcgtgttattgagaggtttgagaaggaagctgctgagatgaacaagaggtctttcaagtatgcctgggtgctgga

SEQ ID NO: 28016 - DNA, 237 bp, Glycine max
  Clone ID: 700891986H1
gatgattattgagtctaataattttgaacagatctggtgtgacgtgcatcacaattgaatcgaattgaatttgttgtcgtggttgcagcaaggaatgccgctggtattagcgaaaagcgattcgatccagattcgcgaggtatggaacgataacctggaagaggagttcgcgttgattcgcgaaattgtggacgattacccttacatcgccatggacacggagtttccagggatcgt

SEQ ID NO: 28017 - DNA, 237 bp, Glycine max
  Clone ID: 700891987H1
ctttaatcaatcatcatatttatctttgcaactaaaatggcgtcgtcacaaccagagatggagcatcaaagaaggtttttggttgggctgctcgggactcatctgggcttctctccccattcaacttctccagaagagaaacgggggagaaagatttggtattcaaagtgcaatactgtggaatatgccactcagatctacatatgttaaagaacgagtggggcaacacaacctatc

SEQ ID NO: 28018 - DNA, 232 bp, Glycine max
  Clone ID: 700891991H1
aacggaagcatacctgtttcctttatccaaattattaatgaagaaactaggcctgaaaagtgagatgaggttgagattaaatgcatgggacatccagtgcttccttcactgcaggtgcaaaatttggttgacctgtggggggttgatacagcgtctttgggacatagaatttcagcaaccattggatcctcagggaaagattttgtcatgatcctaacctatggtcggaagg

SEQ ID NO: 28019 - DNA, 250 bp, Glycine max
  Clone ID: 700892013H1
cgatgctaggtcatttttcaaaagatccttctcagatggaaacattcttaatgaaagttctacaccgatgtcagccccaaaggccaagcatgaaaaattcccaagccaaggcggcttaccagatcgatcagaagaaggaagcaagggactctgtgagtcatcaccagaaatatctactactgagagtgacatctcattttcaaggtacactccctcaatgcctcggagacagctctttggagatatgcaa

SEQ ID NO: 28020 - DNA, 251 bp, Glycine max
  Clone ID: 700892104H1
agtgaacccagttttggtacttggaccattactgcaacccagcataaatgctagtacaattcacatcctcaagtacctcactggctctgctaagacctatgcaaatgccacacaggcgtatgttcatgttagggacgtggcattggcccacatacttgtttatgagaagccttctgcctctggtagaacatatgtgccgaaagctctctccaccgtggagaattagttgaaattctcgccaagtatttccc

SEQ ID NO: 28021 - DNA, 255 bp, Glycine max
  Clone ID: 700892109H1
ccttgttcttctttctctattgtctatagtcatctccattgttctcttcattacccacacacacaaaagaaacaacactccaagaggaccaccaggtcctccacctcttcctctcatcggcaaccttcaccaactccacaactcatccccacatctctgcctatggcaactcgccaaactccacggtcctctcatgtcgtttcgcctcggcgccgtgcaaaccgtcgtggtttcatcggccagaatcgccgaaca

SEQ ID NO: 28022 - DNA, 251 bp, Glycine max
  Clone ID: 700892112H1
aaagaccatgaatacagcaaaaagagttgtgacataattcaaagtggacatgtcagtgatcctgggattggcaaagctgaattttgtgcttctccaaagctcaagcgatcctgctctgacctggaaagaagggatgtactaagggagacttgtcatctctttccatcttcaaagtcacagtcttttgaggatttgcaggggttatcagcacatcagatggttaatctagaaagccccaggtctgtgatgac

SEQ ID NO: 28023 - DNA, 251 bp, Glycine max
  unsure (1)..(251): unsure at all n locations
  Clone ID: 700892117H1
ctctnctcattaacacactacgcgtgcaaagaacctctgctctcctcttgcttttgatnnagaagaaagaagcgagaagatgtcagancgcgttctgcagcgactgcaagaggcagacggaggtggtgtttgaccactctgccggcgacacggtgtgctcggagtgcggnctcgtactggagtcccatctatcgacgagacctctgagtngcgtaccttcgccaacgagtccggtgacaagatcncaatcg

SEQ ID NO: 28024 - DNA, 249 bp, Glycine max
  Clone ID: 700892125H1
caatttcttatcttttctcattcccttctcttcttcctcaacacacacaaaatatctcttccaatttcaatttctcgtcgtccctcatcatggctcgtctcgcgatcgctgtcgccgccgtgctcctcgtggccctctccgcctccaccgcgacggcgcgtccctgcaggaccttcataatctctcctactcgttccgcaaccctaactccaacaccttcgccaccatcaccgagatccgatccttcac

SEQ ID NO: 28025 - DNA, 251 bp, Glycine max
  Clone ID: 700892133H1
caccaacaaagtctacatccaaagagaaaactgaaaaagtcactaaaggaaaaggcaagaagaaagagaagtcaagccctagtgataatcagttacgtgatgcgatatgtaaaattcttaaagaagttgacttcaatacggcaacatttactgacattctgaagcaacttgctaagcaatttgatatggatctcactcctaaaaaggcatctataaagctgatgattcaggaagaactgacaaaactagct

SEQ ID NO: 28026 - DNA, 246 bp, Glycine max
  Clone ID: 700892138H1
ctggcacagaggtagattcagagacttccattgaagttccagaagaaacatcatcactcatttctgctcttaacgtcgaaaagattctccgtggcttaccaattacagatgcagatcattatggtaggctaggtattccaagaggatgtccctttgacttggtggggggtgcatataatatcaaggttcaagaattgaagagtcagaatttagaggaggatgaacttgagaagaaattggaacttc

SEQ ID NO: 28027 - DNA, 247 bp, Glycine max
  Clone ID: 700892140H1
tgaagaataaatcataaaattagaacagataacagctctggatgaattaatgtcattgatgagtttcttctttctgtattatttatttctctggatttgatcacgaaacattgaattgaattgtgagcctgttttctctgcagcatagtgttttgaataattttgtgtagtgcccttcatctcatcgagcctcatgcgtaatttggtgatgtttctcactgtttttgaattcttggattttcttttt

SEQ ID NO: 28028 - DNA, 247 bp, Glycine max
  Clone ID: 700892141H1
gaatcaaacaacacccttattaccaaacttcgcttagccaaagacacttacttctcttcatgggttctattggaattgagagctcgggacctgaggttgtcaccgttgatgtacatgcaaccaaggatctgatccagaccagtcatgtttatctggatgtcaggacggtggaagagtttcagaaagggcatgtggatgcagagaagatcattaacgttgcatacatgtttaatacaccagaaggcag

SEQ ID NO: 28029 - DNA, 245 bp, Glycine max
  Clone ID: 700892143H1
gaagaacccacaggatatttggagtctcaaagaaaattctagaatatttcttgaagcatttagacttttttttacaaaaagggaaaaggagattggcaatctaagctttgataaagatgatcagttggctgtagaatttgttactgcagctgcaaacataagggctgcttcatttggcatccctctccaaaacctttttgaagctaaaggtattgctggtaatattgtgcatgctgttgcgacta

SEQ ID NO: 28030 - DNA, 245 bp, Glycine max
  Clone ID: 700892144H1
aagaaatttaagtgaggagctagagaatgatgatgaagtctgctatgtgtgcagtggtggttgtagcacttcttcttctggcggaggtggggcccatggctgaggctgtgacatgcaccccaacagagttgagtccgtgtcttccagcaatcacttccggtgctaaaccttccaatgcttgttgcacgaagctgaagcagcaaaaaccatgcttatgtggctacctcaaaaacgctagcttgaag

SEQ ID NO: 28031 - DNA, 244 bp, Glycine max
  Clone ID: 700892145H1
cttgggcttggcagggatggcttactacccttagtatttgctaaagtccactccaaataccacacccctgttcattctcagatctgggttggcttggttgccagtgttttggctgggctatttaatgttcatgtgctctctcacattctttccgttggtacactgactggctattcggttgtctcagcatgtgttgtcgttcttcgctggaaggataagacaaatagtcaagtgtcatcttctg

SEQ ID NO: 28032 - DNA, 248 bp, Glycine max
  Clone ID: 700892149H1
aatatattccattctctctgtgtatttccctacctctcccttcaagatgcagatcttcgtcaagaccctcaccggcaagaccatcacccttgaggtggaaagctctgacaccatcgacaacgtcaaggccaagatccaggacaaggaaggaatccccccggaccagcaacgtctcattttcgccggaaagcaacttgaggacggccgtacccttgctgactacaacattcagaaggagagctctgaca

SEQ ID NO: 28033 - DNA, 243 bp, Glycine max
  Clone ID: 700892154H1
agctccgcgccgtccttctcagatgagactaaaagcaatctgaaccttaaggctactgagctgagactggggcttccgggattgcagtctcccgaacgagattcagatctttgcttgagaagttcaattcagtttgatgaaaaaccactgtttcctttgcatcctgctactgatgatcacattcctcatcaaagcctgctgttttgggtaacaaaagagggttctcagatgtcatgagtggat

SEQ ID NO: 28034 - DNA, 245 bp, Glycine max
  Clone ID: 700892157H1
gtttgctgaactcatgaccaagattgacaggcgatccggcaaagagcttgagaaggagcccaagtttttgaagaacggtgatgctggttttgttaagatgattccaaccaaacccatggttgttgaaactttctccgagtatcctccacttggtaggtttgctgttagggacatgcgtcaaactgttgctgtgggagtcatcaagaacgttgagaagaaggatcctaccggagccaaggtcacca

SEQ ID NO: 28035 - DNA, 248 bp, Glycine max
  Clone ID: 700892164H1
gaaaaacttagctactaaggaaggatcaaagagaatggctcaagcaatggcatcaatggctggcttgcgtggttcctctcaggctgtgttggaaggtagccttcaggtgagtggctccacacgcttgaatgtggggagtggaagcagggtggcctcagtcacacgtgcagggttcacagttagagcacaacaacaacaagtgagtggtgaggtacaaagcagccgtagggcagtgctttcacttgttg

SEQ ID NO: 28036 - DNA, 244 bp, Glycine max
  Clone ID: 700892167H1
aaatggtaagatatcatccaaaagcaaatagcagtggcagcagctgacaaagctgagttttgttcaagggcaacatttgagttactgattatatttttcttaaaggtagagcatcatttaggtaatggtagatgtctataggtaattcatttttgtgccttcacaaacttaccataatcacccaccctgtataaaatttaaattcaaaaacacaaaaaaatccgtagctggttctcaggttata

SEQ ID NO: 28037 - DNA, 242 bp, Glycine max
  Clone ID: 700892169H1
accttctgctctagaaaattcagtgctgaaacatggcttcggctactctctctgtagccaaaccagcccttcaggcaaatgggaaaggcttctctgaattctctggcctccgaagctcatcaggcttccttcccttttctagaaaatcttcagaggatttccattctgtcattgccttccagacctatgcagttggaagcagtggaggatacaagaagggtgtgacagaagcaaaactgaag

SEQ ID NO: 28038 - DNA, 242 bp, Glycine max
  unsure (1)..(242): unsure at all n locations
  Clone ID: 700892170H1
aaccactttgtcccatcccacttggacttccacctcacccctttttntcaacgccatgaaaatagatatcagcaattgatcaaaggtcattttgtttttgtggctctgagaggggagtgattctaaactaaaatatatgggggctggggaagagagtacagctaaatcttctaaagtatcttcggcagctcaggagacaccaacagcacttgcatatcctgactggtcaagctccatgcagg

SEQ ID NO: 28039 - DNA, 239 bp, Glycine max
  Clone ID: 700892191H1
tggagaatcaatttacggagagaagtttgctgatgagaacttcaagttaaagcatactggaccaggacttctatcaatggcaaatgctggtcctaataccaatggttcacaatttttcattacaactgtgacaactagctggttggacggaaggcatgttgtttttggtaaagttctttctggaatggatgttgtttacaagattgaagctgaaggaacacaaagtggcactcccaaga

SEQ ID NO: 28040 - DNA, 267 bp, Glycine max
  Clone ID: 700892209H1
agcgaagaaagattcgaaacgaagaaagaaagcgttgtgaagaatggcggaagagggacaagtgatcggtgtccacagcgtagaggagtggaaggaacatctcaagaagggagaagagtccaagaaattgattgtggtggattttactgcttcttggtgcggtccatgccgtttcattgccccaattcttgcagagtttgctaaaaagttgccgaatgtcaccttcctcaaggtggatgtggatgaattggagactgtttccaagga

SEQ ID NO: 28041 - DNA, 265 bp, Glycine max; identical to SEQ ID NO: 27807
  Clone ID: 700892221H1

SEQ ID NO: 28042 - DNA, 261 bp, Glycine max; identical to SEQ ID NO: 27809
  Clone ID: 700892232H1

SEQ ID NO: 28043 - DNA, 262 bp, Glycine max
  Clone ID: 700892235H1
aagattcgaaacgaagaaagaaagcgttgtgaagaatggcggaagagggacaagtgatcggtgtccacagcgtagaggagtggaaggaacatctcaagaagggagaagagtccaagaaattgattgtggtggattttactgcttcttggtgcggtccatgccgtttcattgccccaattcttgcagagtttgctaaaaagttgccgaatgtcaccttcctcaaggtggatgtggatgaattggagactgtttccaaggagtg

SEQ ID NO: 28044 - DNA, 261 bp, Glycine max
  Clone ID: 700892242H1
tcctaacataacattttttcagaaaaaatcaagccatcagatgtaggtcttgaacaagaggcacaagtggttcagaattggtccggttcaatgcttgaacgtaatgggagccatcaatctttgccacctatcaaatatttgcatttgcatgaaagtgattccttctctataggaattttttgcatgcccccctcttctatcattcctctccataatcatcctggaatgacagtgttgagcaagctgttatatggctcaatg

SEQ ID NO: 28045 - DNA, 257 bp, Glycine max
  Clone ID: 700892246H1
tttttattgctcagttggtggcaacttttatagcagtgtatgctaactggggctttgcaagaataaagggaatgggatggggttgggctggtgtaatctggctgtacagtgtggtaacctatatccctcttgatttactcaaatttgctatccgctatattctaagtgggaaggcttgggataatcttttggagaacaagactgccttcactacaaagaaagactatggtaaagaagagagggaagctcaatgggcg

SEQ ID NO: 28046 - DNA, 259 bp, Glycine max
  Clone ID: 700892248H1
gctaggtcaaatagtgttattaatactttatatttatataaaaacaagttcacactagacaatctactcaagttgagtcagctagataaaagtattctaaacgaaaagtcttgtttacgagtattttaatatagatgataaatcgaagacagataataaagaatttatataacttacacattcggttagcctaattaaatacgttggtggttaaattagaataagtttgcatgagtcgatatatgcagtgagtgatatc

SEQ ID NO: 28047 - DNA, 260 bp, Glycine max
  Clone ID: 700892255H1
ctctgattgggtggaagagaaaagcagctcagtgcatgttggaggtggaggcgtgaacgtgcatacaggaaaaggaggtggcagtggcaccactgtcaacgttggtggaaaaggaggcggaggcgtaaacgtgcatgcaggccacaagggaaagccagtgcatgtttcagttggctcaaagtctccatttgattacgtctacgccgccacggaaactcaattacacgatgaccccaacgtggcactcttcttcttggaaa

SEQ ID NO: 28048 - DNA, 256 bp, Glycine max
  Clone ID: 700892258H1
gagcaacagcaaggaaggcatctttgtccataattgctgaaaatgctttattagatgctatccaatccaaaaggtatggggatgcactatatttttgggtgcgcatggatatggattcacgaaacccttcgcaaacggacttttggtcattttgtgatgccgttaatgcgggaaattgcaagtttgctttctcagaagccatgaggggaatgtatggggtaaaaggtgatgcggattctttgcctcccatgccggt

SEQ ID NO: 28049 - DNA, 258 bp, Glycine max
  Clone ID: 700892268H1
ataacacaaggcagaaagcaagctcatcctagagttttaaaaatggcagcagcctcctccatggctctctcttccccatccttggctggcaaggccgtgaagctgggcccatcagcccccgaagtcgggagggtcagcatgaggaagaccgtcaccaagcaggcctcctccggaagcccatggtacggcccagaccgcgtcaagtacttgggcccattctctggcgagcccccgtcctacctcactggcgagttccca

SEQ ID NO: 28050 - DNA, 255 bp, Glycine max; identical to SEQ ID NO: 27808
  Clone ID: 700892274H1

SEQ ID NO: 28051 - DNA, 253 bp, Glycine max; identical to SEQ ID NO: 27806
  Clone ID: 700892279H1

SEQ ID NO: 28052 - DNA, 255 bp, Glycine max; identical to SEQ ID NO: 27810
  Clone ID: 700892283H1

SEQ ID NO: 28053 - DNA, 256 bp, Glycine max
  Clone ID: 700892327H1
cggggattctcgagcaatcatgggatccaaggatagcaatgactccattgtggctattcagttgactgttgatttgaagcctgatttgccaagggaagcagagagaattaagaagtgcaaaggtagggtatttgctttgcaagatgagcctgaagtgcctagggtgtggttgccctttgatgatgcaccaggattagccatggctagagcatttggagatttctgcttgaaggagtatggtgtgatttctatacct

SEQ ID NO: 28054 - DNA, 253 bp, Glycine max
  Clone ID: 700892343H1
gcttcttgggttggttctctgagtttttacctcctctgggtctgatccaaaaaggcttaattttctttgttccgaggaaaaaattctgcttttgaatttgttggttttcaagcttggtgtagaaggaaatggcacaacgttctcatgtacccaaatttggcaattgggatagtggagagaatgttccttatacagcatattttgacaaggcgcggaaaggtcgaactggggcaaggataataaatccaaatga

SEQ ID NO: 28055 - DNA, 260 bp, Glycine max
  Clone ID: 700892347H1
ctgctgagaaaattgcgacgcggaaacacgcgcatcttcacgatcctggaatccaccgcggcgtatccagcgattccgatctccgacgagtctgcgcaggcgaagaatcgcgaggccagccgccggtgaagaatcgcgcgatttgtctggaaatcgcgattcagccacgattcatccccgatactgagactcaaccacgattcaggaagaaaaacgagacaacctccgattcgtatcggtagcagttggaatcatatcga

SEQ ID NO: 28056 - DNA, 253 bp, Glycine max
  Clone ID: 700892351H1
gaagaagctgctgccatggctctctcatccccatccttggctggcaaggccgtgaagctgggcccatcagccccagaagtgggaagggtgagcatgaggaagaccgtcaccaagcaggtctcctcaggaagcccatggtacggcccagaccgagtcaagtacttgggcccattctctggcgagcccccgtcctacctaaccggtgagttcccaggcgactacggctgggacactgctgggctttccgcagacc

SEQ ID NO: 28057 - DNA, 251 bp, Glycine max
  Clone ID: 700892358H1
tccaagttgaaaagggattctgctgctactggttcatggagtattcaggatgaaatacgaagagtaagatccagggcaacagaggaattgcttagatcacttccatcctcaaaaattgactggtctgcatttgccatggagaataaaaataatgtaaactcttcagctattgaaaatattggagctagtttgggagagagagtacataattcaacaaatttagttgatgcatctgtgaacttggccagagg

SEQ ID NO: 28058 - DNA, 252 bp, Glycine max
  Clone ID: 700892394H1
ccagaacacatgcattgccttgctatgttttggggccctcttgctcctcccaacactggggttgtagcctttcagaacttatcaaacaatcaggcaacatttaggattactgcaactgcagttgtacttgagtttaatcatgcagcaaggatagtgaagaaaatcaaattggttggttatccatgcaagatattcaagaagacagcacttatcaaggatatgtttacctcagatcttgaagtagctcgtttt

SEQ ID NO: 28059 - DNA, 249 bp, Glycine max
  Clone ID: 700892409H1
gattctatacccttttcatccagcaaggtggaggttgtattcaacaagttttccgtaaaacccgggtcagaggaggcccagatcatgaagaatactctcagtgagtgtgaagagggtggcatcaaaggagaggaaaagtactgtgccacttcgcttgaatccatgattgatttcagcacttccaagcttggaaaaaatgttgaggttgtgtccacggaagtagtggaggacaaggaaacgggattgcag

SEQ ID NO: 28060 - DNA, 246 bp, Glycine max
  Clone ID: 700892425H1
gttttctacttctcccaacactcgcggaactagaaagcctctacttccaattccacgtggcaaaaaggagagactctgattctgagccgcttctagaaccttccattgtccaagaagtttcattccacgacgacaacgaagaagaagaattccttgacgaatttgaatacgatgaagacgacggtgacggtgacgaatactatgaggaagaagaggaatacgaagaggaggctggtgtgccttatg

SEQ ID NO: 28061 - DNA, 244 bp, Glycine max
  Clone ID: 700892428H1
ggaaaaggaatagaaaagttttgtaatttttctcttgctccaagttgttgtgaggatatgaaaaaatttatcaattctaactatggaaaaatatcgtgtaccatccttgccgccggcggtctttctcttttgatttatgtgttaaagagatggcccaaaccaaagcccaagcctgagactgagcccacgctcgggcccaagtccgagccccagtccatgcccaagcttgggcccaagtctgtat

SEQ ID NO: 28062 - DNA, 146 bp, Glycine max
  Clone ID: 700892430H1
caacaagcacaacaaggtcactgtgttgaagttggtcgctttggacttgatgaagagattgatcgtttgaggcgtgacaagcacgtgttgatgatggagcttgtgaagctgagacagcagcaacagaacacaaggtcataccttca

SEQ ID NO: 28063 - DNA, 246 bp, Glycine max
  Clone ID: 700892433H1
gtgaagagaatggctcccaagggtttaacctttctggctgtgttaatatgcgtttcagcactgtcactgagtccttctgttgcgggggaagggcaaaataatggccttgttatgaacttctacaaggaatcatgccctcaggctgaagacatcatcacagaacaagtcaagcttctctacaagcgccacaagaacactgctttctcctggctcaggaacatcttccatgactgtgctgttcagagt

SEQ ID NO: 28064 - DNA, 241 bp, Glycine max
  Clone ID: 700892434H1
aaaaatcatggcattttctcagcagggagctagagctgtatgcattttgtcagccaatggtgctgtctctactgtcacacttcgtcagccatcaacttcaggtggcactgtcacatacgaggggcgctttgagatagtgtgtctgtcaggctcttacttggtcaccgataatggtggctcacgcaatcgaactggtggattgagtgtgtcccttgctagtcctgatggtcgtgtcattggt

SEQ ID NO: 28065 - DNA, 237 bp, Glycine max
  Clone ID: 700892438H1
attaaagtctgggatgtatctggaaatttggaaggtaaaaaatttgaaggacctggagggggcattgagtggcttaggtggcatccaagaggacacatactcttagctggttctgaggatttcagcatttggatgtggaatactgataatgctgccttacttaatacatttattggtcatggtgatagtgtaacctgtggtgattttactcccgatgggaaaataatatgtactggt

SEQ ID NO: 28066 - DNA, 242 bp, Glycine max
  Clone ID: 700892440H1
attggattgttcctccgaacagtgaaccctcacctaacaatcagaacccaggatttggtgaaacgatgaacagtgataggaaaattggggttgccttggacttttccaaaggaagcaaaatcgctctgaaatgggctattgacaatcttatcagcaacggtgacactctctacatcgtccacaccaagccttccggaggaagtgaatcaggaaatcttctctggtccaccactggttcacct

SEQ ID NO: 28067 - DNA, 238 bp, Glycine max
  Clone ID: 700892444H1
ggtgaaagaagagcgagtcattttcagttcagcctcgatttgttttggaaaggtcgagagttgcagtataaagacactggactgttgaaaaatcttgacctttcaacaaacaacctgtccggagaaatcccgcctgaactttttagcctcactgaactgttgttcttgaacttgtctagaaataatttaatgggaaagatacctagcaagattggtggcatgaaaaatttggagtccc

SEQ ID NO: 28068 - DNA, 239 bp, Glycine max
  Clone ID: 700892445H1
gttaatttttatcaggttgaggagctcttaaaagaatatgacaatgtgtgcaccctcagggttcgcatgccaatttcatctgacttgagcaatccacgcaatttcatcaccaagatttctcgttataacaaagtggtcaacattccaaacagcatgaccattttggatgaacttctgcctatttcaattgagatggcaaagcgaaacttgaggggcatctggaacttcacaaatcctgg

SEQ ID NO: 28069 - DNA, 240 bp, Glycine max
  Clone ID: 700892446H1
aatcgctagagagagaaaccaagaaagagaaacacagagaaatcgctttcgctattatatcctccctcaaaaaaccgcgatggacggtgcagacgcgtggcgcgtggccgcgtgtgccaacaccaacgtcaacagaataatgctccgctttcgcccgatcgcgccgaaaccggtcgccggaagttccgccgtctccagagccaccggcgctggcgacggaagccagagtagccacgtgtc

SEQ ID NO: 28070 - DNA, 240 bp, Glycine max
  Clone ID: 700892447H1
agaaggtgttgtgaaaggttaagatcgagaaattagggtgaagtgaaggagaagctcttgagaagctgacttgaaagttgaaacagaagatgggagaagcaacagaaagatatgcagttgtgacgggtgcaaataaaggaattggattagagatagttagacagttagcttcagctggaatcaaagtgttgctcacagcaagaaatgagaagaagggtctccaagcactggaaacactca

SEQ ID NO: 28071 - DNA, 241 bp, Glycine max
  Clone ID: 700892450H1
atccagtgtcgtggttccaaggaacttcagattgctggaggagcttgagaagggagaaaaaggaataggagatggcacagttagttatggaatggatgatggtgatgacatttacatgcgctcttggactggaaccattattggtccctataatactgtacatgaaggaagaatttatcaattgaagctgttttgtgataaagactaccctgaaaagcccccgagcgtccggtttcattca

SEQ ID NO: 28072 - DNA, 240 bp, Glycine max
  Clone ID: 700892451H1
gtgatgctaaaaggggtgatttggtgaagtgtgaggcctatgaggcagacagatcagaggttgagggtgcaagcacaccgtcagaggctgcaaagaaggtaaaaattgggatatattttgcaacctggtgggctctgaatgtggtgttcaatatttataacaagaaggttctgaatgcctacccttacccttggcttacttcaactctctcacttgcatgtgggtctcttatgatgttga

SEQ ID NO: 28073 - DNA, 241 bp, Glycine max
  Clone ID: 700892453H1
gaaactttctctgagtatcctccccttggtcgttttgctgtgagggacatgcgtcaaactgtggctgtcggagtcatcaagagtgttgagaagaaagaccccaccggagccaaggtcaccaaggccgctgccaagaagaagtgattgcatttgggcaattttgctagcacatgtgatcatcatcgtggttactcctttatagtagttttatccttgcagagtcttaggtgttttgtttaag

SEQ ID NO: 28074 - DNA, 243 bp, Glycine max
  unsure (1)..(243): unsure at all n locations
  Clone ID: 700892455H1
atggcagatcatccncagcaccaagacatattcataggactccggtagctgttcaggccctcccagtccaatctcaggcattgggaccacagcaaaattcaataactaatttgaatagttccttgctacctagcaattcctctgctactcctcatatttctttgtccaaccctacctctgtagatactttgaatgccatactaagtgatacggaaagacaacaacatttttctcgaaccccaa

SEQ ID NO: 28075 - DNA, 245 bp, Glycine max
  Clone ID: 700892456H1
cctcaatggaacaaacctcagaagcagaaaaaggtcttctctctttctctctccttttccctcaagctcagaatctcccgaacgaaagttgaattttggtgcatattttacaaattaagaatcttgttaaaaagaagaaggatgtcaagcggagcaacacactggtgtcatgcatgcagacagccagttgtgcttgatgggagagatgctgtttgcccttactgcgatggaggatttgtacaaga

SEQ ID NO: 28076 - DNA, 241 bp, Glycine max
  Clone ID: 700892462H1
cgaaaactttctaacaagcctaattgctggaacctcactactaagcattcaaaaagcatatatataattcgatggcaggtattgcgtatgggatcagcgtgcttgccgttggtgcaggtgaagctccacggcgaccaacacaagcccaaactactactcccaacactcatcacaataacaacactacttctgaagagttcacttatttaaattctgggaagcaaaatatcaagggtcttac

SEQ ID NO: 28077 - DNA, 247 bp, Glycine max
  Clone ID: 700892464H1
ctcaaccatggaatgaatcgttacgtcttcgttgtctatcgcaatgccatcgctgcattggcccttgctccttttgcattgattttcgagaggaaaattaggccaaagataacactccctgtcttcttacagatagtggcactgggatttgtggagccagtgattgaccaagggttcactttcttgggcatgcaatatacatcggcttcatttgcctctgccataatgaatgccgtgccttctgtca

SEQ ID NO: 28078 - DNA, 235 bp, Glycine max
  Clone ID: 700892467H1
gtgatgttgtgattgctgtgcctgactctggtgttgtggctgcgcttggttatgctgcgaaagctggggttccgtttcagcagggtttgattaggtcgcactatgtggggaggactttcattgagccctctcagaagattagggactttggtgtgaagctgaagctatcacctgttcgtgctgtgcttgaaggtaaacgtgttgtggttgtggatgattccattgtgagaggaac

SEQ ID NO: 28079 - DNA, 237 bp, Glycine max
  Clone ID: 700892470H1
cttaatccaaatacgatggcagccatggcaaccacaaccctctcttcaaaccccaaactctcattcttcaacggaaagcccgtcacatattcttcccgcgtcgcgcccaccaccaaattatcctcatccaaacaaggcacaatttccatgtccctaaccccacccccctacgacctccagtccttcaaattccagcccatcaaagaatccatcgtgtcacgggaaatgacgcgccgc

SEQ ID NO: 28080 - DNA, 241 bp, Glycine max
  Clone ID: 700892472H1
ctcggatactgtcaggactccgggttcaactaccaggcctacttgttcagctgaagcttatcgaagaacagagcatgcagctagaaggcaaatcccaacctcccgtgaaatggatgaattctttgctgaaattgaagaggctcagcaaaaaaaattcattgagaagtacaactttgatcctgtgaatgagaagccgctctcagggcgctatgaatgggaaaagttgaaaccctagaagggt

SEQ ID NO: 28081 - DNA, 237 bp, Glycine max
  Clone ID: 700892476H1
ctgtggcagaatctgtagctaatgaacttgtgctacaaagcttttcttcctcaaaaaatggccaatttggttctactgagcaacaagatgaagctgctaagaataaatcaaaagattcaaaaggtgtgaaaggtggtcgctcatctcatgaagaaaaaaaggtggctaaatcacatgaagagaagagatctaggccacggaagatgatggagtttcacaacatcaaaattagtcagg

SEQ ID NO: 28082 - DNA, 236 bp, Glycine max
  Clone ID: 700892477H1
caaccggcttgaagatggcttcaacattcattggcaactctacctccattcaggagatgttccgtagagtgagtgagcaattcactgctatgttcaggaggaaggccttcttgcattggtataccggggaaggcatggacgagatggagttcactgaggctgagagcaacatgaacgatcttgtgtcagagtatcaacagtaccaggatgccactgctgatgaggatgagtatgag

SEQ ID NO: 28083 - DNA, 237 bp, Glycine max
  Clone ID: 700892478H1
gccaattcgagtagccgagggatcaccgccttggggaagcgagtcgccaaccagatctggacttccaaccccccctcagctcctctcacttccaggaggggagcaatagcagctgcatacagtagcagcggcgggtcagtgtatgacaagaaccctgatgatcagatccactctggggcggtcccagacgatgtgatccaggcaacacaatccggcaaatactgggccccacaccca

SEQ ID NO: 28084 - DNA, 236 bp, Glycine max
  Clone ID: 700892485H1
atcaaacaccaacaacagttccagaaaatgaaacaaccgaggtaatcaagacccaggaaacaaccccggaaccagtaccagccactgaggctcctgcaacagaacaagcagcagctgaggttcctgctcaagaagaacaacaagcaactgaggttcctgccccagaatcaaccaccgaagcaccaaaggaagaaaccaccgaagcaccaacaacagaaacagtagaaacaacaact

SEQ ID NO: 28085 - DNA, 267 bp, Glycine max
  Clone ID: 700892501H1
ctcaaatcatggatttcttgcaagcacaagaaaatcagatacttgtgggtgtggccgtggccgttgtagccattgggcttggtgcagtatatctctattcatccaagaagaccaaaggttgcttggacccagagaactttaaggcattcaaacttgttaagcgtgcacagctgagccataatgttgcaaagttcacatttgcactcccaacacctacatctgttttgggtcttccaattgggcaacacataagttgcaggggtaaag

SEQ ID NO: 28086 - DNA, 257 bp, Glycine max
  Clone ID: 700892518H1
ctccttcaagaagggttctgctcgctctgccagtaaaagtcaggagaacaagtcatctggattatcaaagtcatcgactaatgcaaataattatggttcagtttcttctcaaagttcaagtgtacctgcaaacagtactgaggatgacatggatgattttgatccaagaggaacttctaccaaaacttcagctggaaactctaaccaggttgatctctttggacaagatttaatcggtgacctcatggatgctccaa

SEQ ID NO: 28087 - DNA, 250 bp, Glycine max
  Clone ID: 700892538H1
ggttttctgattaactctttcttctcataactctgccgccgcaacagccccaaatccaatggcttcagagaagaaactttcgaacccaatgagggagataaaggtgcagaagctcgtcctcaatatctccgttggcgagagtggagatcgtcttaccagagccgctaaggtgttggaacagcttagtggccaagcccctgtgttttccaaagcaaggtacacggttcgttcctttgggattagaagaaat

SEQ ID NO: 28088 - DNA, 250 bp, Glycine max
  Clone ID: 700892556H1
ggcttatcagaaagcaaggttatgcctgcacccagacaaactgcagcaaagaggagcaacactccttcagaagtatgtagcagagaaggctttctcaattcttcaggatgcatgggctgcattcatttccatagatgtttccttctagccagtggatgactctaatcttgataactcagttttgtcttgagatttgtggacaaacaccaagcttgacattcgaaatgtcgggagtgtttgttgttgacaa

SEQ ID NO: 28089 - DNA, 257 bp, Glycine max
  Clone ID: 700892560H1
gcggaggctgcaagacaaagtcttggaccaagatcactccaatctccatttggcttctccagaaaagcctcctttcttgttaaggcagctgctaccccccctgtcaagcaaggatcagacagacctttgtggtttgcatcaaagcaaagtctttcttacttggatggcagccttccgggtgactatggatttgaccctctgggactttcagaccctgaaggaacaggagggttcattgagccgaaatggctagcata

SEQ ID NO: 28090 - DNA, 199 bp, Glycine max
  Clone ID: 700892563H1
cggcagtaatcagactgctcttcttgatttggctttccccgatagttttggaagattgcatgacaggggaaaggaagccccaaagccaaacaaaaccttaactaagcttttcccaaataaagtgactattcacatgccacaggatgaggcacttctagcatcttggaagcagcaactcgatcgagatgttgagactctt

SEQ ID NO: 28091 - DNA, 247 bp, Glycine max
  Clone ID: 700892572H1
ggggaatggatttcacaactgacaagctgaggtcattggtgcgaaaatggcaaactctaattgaagcccatgtggatgtgaagacaactgataactacacattgaggatgttttgcattggatttaccaagagaagagctaaccaagtgaagagaacctgctatgcacaatcaagccagattagacagattcgtaggaagatgagggagatcatgaccaaccaggcaacatcctgtgatttgaagga

SEQ ID NO: 28092 - DNA, 248 bp, Glycine max
  Clone ID: 700892590H1
ggctctcagtacagttgtttttgttggaggctcaaaaccatgggaggataaacttttagagcatgccaaagctcttaaagtaaatgccggaactgaacctgatacagatcttggtccggtgatcagcaagcaggcaaaggagagaatacacagattagttcaatctggggttgaaagtggtgccagactactgcttgatggaagaaatatagtggtcccaggatatgaatctggcaattttattggtc

SEQ ID NO: 28093 - DNA, 212 bp, Glycine max
  Clone ID: 700892625H1
ctcaacatcttacgagaagattggaaacctgtccttaatataaacactgtcatctatggcttgtatcatctcttcacggaaccaaattacgaggatccactgaatcatgatgctgctgctgtgttgagagagaaccctaagatgtttgaatctaatgtgaggagggcaatggctggagggtatgtggggcaaacctttttcccacgctgtat

SEQ ID NO: 28094 - DNA, 215 bp, Glycine max
  Clone ID: 700892627H1
ctcacccaccctccatacacactctctctgagtcggtcgagttgaatcggtgtgagtcagtgaccgagtcgaaccatgtcggacgaagaacaccatttcgaatccaaggccgatgctggagcctccaagacctatcctcaacaagccggaaccatccgcaaaaacggttacatcgtcatcaagggtcgtccctgcaaggttgttgaagtttctac

SEQ ID NO: 28095 - DNA, 224 bp, Glycine max
  Clone ID: 700892634H1
gcagcggatgacacaagtgactactggtgctgctgccattaagggaaaatttcatgcttttaatcaggatattagcaatcaagttgctgcttatatgagagatcctaatagaatgatcaatcagatgcggctgagaagatcagctgttaatatatttggatctgttccagaggttgacgataaacataaagaagctgaaacacgtactgatggtgatcctgaac

SEQ ID NO: 28096 - DNA, 214 bp, Glycine max
  Clone ID: 700892638H1
ctaggactcaattctttggttacttaatagtagttcctttttaactatctttcttcaatggctgactcagcctcagcctcagcctcttcttccagaatgtggtgctccatccccgaaaggtttcagctgcatgcggccatgttggccctgcagtttggctatgccggcttccatgttgtctcaagagttgcccttaacatgggcattagcaaac

SEQ ID NO: 28097 - DNA, 222 bp, Glycine max
  Clone ID: 700892650H1
ctatccactcacctgcctcttcttcacccctttctccatctaacgagtaaggaaaaatggcgcgtaagaagatcagagagtatgactcaaagaggttgttgaaggagcactttaagagactttctggcaaggagttgccgatcaagtctgcacaaattactgcatcaactgatttcactgagctacaagagaaggaaccctggctttcatcttctaaattgg

SEQ ID NO: 28098 - DNA, 218 bp, Glycine max
  Clone ID: 700892651H1
cctcaccatgcaacttcctcatcttcggcctcacccatgagaccctcctttggaaagccctcaaccacaacggaagaaccgtcttcatcgatgaaaaccggtactacgccgcgtacttcgaagaaaaacaccctgaaatcgatgcctatgacgtgcaatacacgaccaaaaggagcgagttgaaggagctgatagcttcgacgaaagaacaggtggga

SEQ ID NO: 28099 - DNA, 214 bp, Glycine max
  Clone ID: 700892653H1
tggggattctgtacgcgctggttggtcgtggatcggtggtgctggcggagttcagcggcaccaccaccaacgccagcgcaatcgcgcgtcagatccttgaaaaaatccccggcaacaacgacacgcacgtttcttactctcaggatcgctacatcttccatgttaaacgcaccgatggactcaccgttctctgcatggccgacgacaccgccgg

SEQ ID NO: 28100 - DNA, 208 bp, Glycine max
  Clone ID: 700892657H1
tatagcccaagccctatacaaccaaaccctaacacacacccatttgattcagtttccatggctagcctcaaggttgcatttttggctgcagtgctctgcatggttgtggtgagtgcacccatggcacatgcagctatcacgtgcgggcaggtgacgaatagcctgatcaattgcatcggttacctccagaacggaggaacgccgccgt

SEQ ID NO: 28101 - DNA, 209 bp, Glycine max
  Clone ID: 700892658H1
gaagagaactggaagtggctgttcaaagaaacaggtttcgcccgttacaacatcatcaagatcaacgctcttccttccatcattgaggcgtttccaatctaacgaagaggaagccactacacttcatgtgcgtggttttatgttgcatgtgttgttattattattaacagctatgtgatcttcgtgtgatgtggttttcatccctaccc

SEQ ID NO: 28102 - DNA, 212 bp, Glycine max
  Clone ID: 700892669H1
tgccaactttgttgcccctggttacaccaagggtgatggtcttggtgctgagattgttggcactttcatccttgtttacaccgttttctccgccaccgatgccaaacgtagcgccagagactcccacgtccccattttggcacccttgccaattgggttcgctgtgttcttggttcacttggcaaccatccccatcaccggaactggtatca

SEQ ID NO: 28103 - DNA, 209 bp, Glycine max
  Clone ID: 700892671H1
tccagatttaggatcaatttctttctggtttcgtaacaatttcccttcaatatctctgggtgttgttgctggacccaagagttatttaaatgtgcattccagatttaggatcaatatcaataacaatataacatttaatttaggaataaggaatcatttggttcaagtacgtcatcatcgggtggagctagcctcgatacctataggtt

SEQ ID NO: 28104 - DNA, 217 bp, Glycine max
  Clone ID: 700892682H1
ccagaagatgcaacctgatgctgatgggaaatatccatacactggctccgttgattgtgctgtcaaaaccttcaaagcaggaggaccattcaaattttacaccggattccctgtctattgtgttaggattgctcctcatgtgatgatgacatggattttcctgaaccagatacagaaattgcagaaatcctacgggttgtagtttgtagttctccgt

SEQ ID NO: 28105 - DNA, 209 bp, Glycine max
  Clone ID: 700892684H1
gtggaactgaaaaatggggagacatataacgggcatttggttaattgcgacacatggatgaacatccatctgcgagaagtcatttgtacatctaaagacggagatagattttggaggatgcctgaatgctacatacgaggcaatacaatcaagtaccttcgagtacctgatgaggttattgataaagttcaagaagaaaccaagagccg

SEQ ID NO: 28106 - DNA, 203 bp, Glycine max
  Clone ID: 700892690H1
gcaagagagttaacaatgaggcagaatttgcctatggtgctggtcaattgaacccaagaagtgctgtgagccctggtctagtctatgacatggatgccttaggttatatccagttcttatgccatgagggttacaaaggttccagtttatcagctttagttggttcacctgtaaattgctcctctttgcttcctggtcttggc

SEQ ID NO: 28107 - DNA, 203 bp, Glycine max
  Clone ID: 700892691H1
cacacttgttctgttcctacggttttgttatggctcttccttcactatcctttctcttcatcttcacttccttcatcgtctccgtctcacactcaataccctttattgttattcatggaattggggatcagtgctctaatcgtggagtgaaaaaattcacacagcaattgagcagcttctctggtgctgaaggatattgtgtc

SEQ ID NO: 28108 - DNA, 257 bp, Glycine max
  Clone ID: 700892712H1
ctgagggggatgatagggaggtggagaacaagcttttgtttcaccttgagtttgataaattcagcctcattaagtttttgttgcggaataggttgaagattgtgtggtgcacgcggttggcgagggcgcaggaccaggaggagagggagaagattgaggaggagatgaaggggacggagttgcagccaattttggagcagttgcacgcaacaagggcttctgcaaaggagaggcagaagaatttggagaagagtatt

SEQ ID NO: 28109 - DNA, 254 bp, Glycine max
  Clone ID: 700892743H1
atgaactgaaaagagaagcagcagaaagaggctggaacttgggagctgtaacagaaaatgaccaattggcaaattccgaattatgagattcagaaaaccggttcaaaaaagaggggaggggctgcatctagttattcaatccttattgaaattagtactttcccatcttccccccctaatgcattagcagatcaagatacctgtttgtttcggtgatatacgaacttgattccatcggcaattcaacatgggat

SEQ ID NO: 28110 - DNA, 249 bp, Glycine max
  Clone ID: 700892759H1
caggccgcccggaaagctcctgttgctgcacggggttttcgaattcaatgtaacaagtgggctgtgatagtgcgtttactgttgggagaaatacctgagcggactgtcttcatgcagaaaggaatggagaaagctctaaggccttactttgagcttacaaatgctgtgcggattggagacttggaactgtttaggaatattgcggacaagtttgccactacctttaatgcagacagaacccataatttg

SEQ ID NO: 28111 - DNA, 242 bp, Glycine max
  Clone ID: 700892803H1
ttgcaacctaattatgggtatcaaaagggtttaacatatgaacagttaaatgcattagaggatgaggtagaaactttgttagctagtgatttaagtaagaattctgaagaatttcaggaattaatggatgtgatggaaaaacatgagacaatggacattgattgtgttggctgctctggatcctccaagaaagcaaatgacttttccttggaatccgattattcttggattgaaagtgataa

SEQ ID NO: 28112 - DNA, 241 bp, Glycine max
  Clone ID: 700892808H1
ggagaactgaagtcatttttagaagcatgtctcctaggcataacaggtactatctatttctatttgccttaaactttgcctttgtcctcttttttcatttaagaaaaagaaaatgtgttgggacccaacccaagcaaggtacgacttttgagtctcatattttaagtattatattctgttatggagtttgtaagacctttccttgatcttgtcaactatagtgagtagctttcatggtgtg

SEQ ID NO: 28113 - DNA, 240 bp, Glycine max
  Clone ID: 700892811H1
attgttctttgcctaggttttaatgtagttgctgtgactgtctgttggattagaggcggcggtgttaaaatttttttccttgcggttatatatgctctacttggtgttcccctttcatatgttctttggtacagacccctctatcgtgctatgaggacggacagtgcactgaagtttggttggtttttcatgctctacttgcttcatattggattttgtatctttgctgcaattgcacct

SEQ ID NO: 28114 - DNA, 241 bp, Glycine max
  Clone ID: 700892819H1
tgacaagatgggttacgaagtcaaatttgtcagagtaaccaggagagttcatgaggcatactttgctcagttatatcttaccaaggttggaaatgacgcagaatatgtgagctttgatcttcgaccttcagatgctatcaatattgcagtaagatgcaaggttcctatacaagtcaacaagtacttggcatacagtgatggtatgagagtaattgaatcaggcaaattgtcaacacagttc

SEQ ID NO: 28115 - DNA, 240 bp, Glycine max
  Clone ID: 700892820H1
attgaattcaaaaacttaagttcattccttgtgttttgctttcttcctcaaaaccaaacatgtcgaacacatgcggcaactgcgactgcgctgacaagactagctgcaccaagggaaacagctatggtgttattgtagagactgagaagagttacatcgagactgttgtcatggatgttccagcagctgagcatgatgggaagtgcaagtgtggcactaactgcacttgcacggactgca

SEQ ID NO: 28116 - DNA, 241 bp, Glycine max
  Clone ID: 700892823H1
aaggatttgaagcgtggttatgttgcctcaaactcaaaggatgaccctgcaaaggaggctgctaacttcacagcccaagtcatcatcatgaaccaccctggtcagattggaaatggctatgcccctgtcctcgactgccacacttctcacattgctgtcaagtttgctgaactcatgaccaagattgacaggcgatccggcaaagagcttgagaaggagcccaagtttttgaagaacggtg

SEQ ID NO: 28117 - DNA, 242 bp, Glycine max
  Clone ID: 700892831H1
accactttagcccaattatcaccagcttctgcccctctcaaaccaccccaacctgctcctaccataccagctgctgctcctcagcaaccattggttccttcattgccacaatcaccaagtgattccacccctgacagtactccaactgttgacattgttggaatcctgagaaaggcaaagtcattcaacatcctaatccgcctcatgaaaaccacccaattgatcaaccaactcaatgcaca

SEQ ID NO: 28118 - DNA, 240 bp, Glycine max
  Clone ID: 700892842H1
ccactctcaatcctctccaagcaaaatccttgtgttttcttctctcatcctggtttgctgctggctgctttctattcttacctcaagagaaataagagaatgggtgcaaagaaatggtttaagataatagtcaaattgaagaaatcgaagaaagataaatccaaagaagaaaaggaacagatcactgatgaaaattcaaacgaatactccaacgggaagcagagtactcgtgaagagtca

SEQ ID NO: 28119 - DNA, 238 bp, Glycine max
  Clone ID: 700892843H1
gtgtaggtagctttcagaaacctgattctgattctggttatgtttcttacattaaggtctcgacagatggaggcgctggcacgggttctgggggcggcggaggtgtccataagcacaccatagttgttgtggtcattgtcataatagccttggttgtcatttgtggtctggtctttgggggagttagataccacagaagaaagcaaaggttgcctgagtctcctagagaaggttcaga

SEQ ID NO: 28120 - DNA, 243 bp, Glycine max
  Clone ID: 700892849H1
ataacatcactcagtgatgatatatttgccttagccaagaaggaggaccatgtgccattcagaaactcaaagcttacatatctgcttcagccttgtctaggtggagactccaagacactaatgtttgtgaacatatcacctgatccttcttcagttggtgagtcactatgctcactcaggtttgcatcaagagtcaatgcttgtgagattggaacacctcggcgtcaaaccaatggacgttca

SEQ ID NO: 28121 - DNA, 239 bp, Glycine max
  Clone ID: 700892852H1
ccagccagaagaagaaccaacatggcacccacaatctataatttttcgtattctaaaaggttctcagagtcattcaattcttcaacatcaaaaaaaggagtcatccagttccaacatccttgctttccactccatagctcaatggaatgctcattataaagccaccaaagaaactaacaagctgatggtacttgatttcacagccacatggtgtggaccttgcaaactcatggaccctg

SEQ ID NO: 28122 - DNA, 238 bp, Glycine max
  Clone ID: 700892853H1
gaacattggtgctgcagatgacgttattgttggggatataagagatgctgaaagtattgttcctgcaattcaaggtatagatgccctcataatcctcacaagtgcagttccacagataaagcctggttttgatccaaccaaaggacaaagaccagagttctattttgaggatggggcatatcctgaacaggttgactggattgggcagaaaaatcaaatagatgtcgccaaggctgct

SEQ ID NO: 28123 - DNA, 239 bp, Glycine max
  Clone ID: 700892858H1
gaaggttttcgcgatggcatcgaaacggatcttgaaggaactcaaggatctccagaaggatcctcctacctcttgcagcgccggtcctgttgctgaagacatgtttcactggcaagcaacaattatgggtcctccagacagtccttatgctggaggtgttttcctagtcactattcatttccctccagattatcccttcaagccacccaaggttgcattcagaacaaaggtatttcacc

SEQ ID NO: 28124 - DNA, 239 bp, Glycine max
  Clone ID: 700892863H1
gaagatctctagagaaattgcagatgccagtggaaaaaccatgccagtagaggaaatcttgaccattaatgtcaagcctggctggaagaaaggaacaaagatcacattccccgagaagggaaatgaacagccaaacgtgacacctgcagaccttgttttcattatagatgagaaaccgcacagtgtcttcgcccgcgatggaaacgaccttgttgtaacccagaagatttctcttgcag

SEQ ID NO: 28125 - DNA, 236 bp, Glycine max
  Clone ID: 700892869H1
gcgaaaatgacaaccaccttcgcgaccgtcgcaggactcggtggtgcatcactgtcatccacctcatctcgtctcacctcagggtttgtgaaatcgccagtgagtgctaggaatcccttgaggcaagctgtggcaatgggaaatgggagggttacatgcttcgagaggaattggctgcgggcagattacagtgtgattgggtttgggttgattggttggctagcaccctcaagcgt

SEQ ID NO: 28126 - DNA, 238 bp, Glycine max
  Clone ID: 700892872H1
tgagcttattatttattagtactttagctatgtcacttctgttggttgtcatgttcttttcctttcttttgttttcttctcagtatgatgattcatattacacatggttctaagttgaagtgccaaattatttttctgggctatgtccctaacgtctttatattttcattcttcaaagtcgcatgggtaacctgtacgttgacataaggacaagttactccttcctctgaattggatg

SEQ ID NO: 28127 - DNA, 237 bp, Glycine max
  Clone ID: 700892875H1
cggcaaggtttggctccaacaagagaaacgagcaatcatatggtatttgatttttagggtggaagaaaaatcagagtgagagaaaaaatcgatggagatggaagtagacatcgagaagaagcaacaagacgtggtgaaagagaaagacttgttcaaagctgcagaagagggcgaggcatcaacgttcgaagctctctcttctgaaatcctctccaaagccctctctctcagaaacga

SEQ ID NO: 28128 - DNA, 236 bp, Glycine max
  Clone ID: 700892877H1
caaatccttgcaccattcttctttggatcccttatctctgccgcgaacttgccccaagtcctacgcctcacaccccggtaatgcttccataccggtggcgcgtgaacttcacgctcctccctagggtgttctcttttgcatgctaaggaatcgtttgcatcatggacgacaccctccaagctgaacgtagggcttgggaatgcattgtacgttgcagaatagcaaacttcgtggtt

SEQ ID NO: 28129 - DNA, 238 bp, Glycine max
  Clone ID: 700892880H1
aaatttaattccagtagacccatgcacaccagaacacttccttctgcggcgggttgcttcctcctcttacgagcctttccattcactccatcgattcggtgggtgcgggtgctgcgaaaccgagctagaccctgatcggtgtcggcacaccgccggagaacaagatgatcgtctgcgtcgccgtcgtcggtcaccagaacaatccgctgtacattcagagcttcacggaggccgacga

SEQ ID NO: 28130 - DNA, 237 bp, Glycine max
  Clone ID: 700892885H1
cactctttgatatacttatcctatttatttgcaagaacttgcaaatttttaggctttagggtggaagacaagctaatttaccaaattttgagcaatttgcagttttccagcaccaccacctagaagacaacaaattcatgtgcacaatgaggatatgagaaggcttagagagattttccttcagccacctcaaagatccacattccaaataaacacacaagctcccccaccggtaga

SEQ ID NO: 28131 - DNA, 263 bp, Glycine max
  Clone ID: 700892903H1
ggcaattcgagtcttgaatccctctttcaaccttaacactcctcacttcgtttccgtcgcagctttttacacactccaccgctgcttccccttcacctccgatttcgttaatcagagatcaaaatgtctcgaagatatgacagccgtacaacaatcttctccccggaaggacgtctttaccaagtggaatatgcaatggaggctattgggatgctggtaccgcaatagggatcttatcaaaagatggggtagtgctggttggt

SEQ ID NO: 28132 - DNA, 262 bp, Glycine max
  Clone ID: 700892913H1
ctttttactcgttgaatatctggtgccagacattaagaaaaattcacgatctcactcaatagagtagcttctttttggttttactgtgctggactgatatgtacttcacgcatcaattatttcttttctctaattttgttgtgatgatatttctgtttcttatgaaggatggaattaagagcaagaaatcattgaagactactcaacaatcaaaatatcgattaccaggaaaaggcagcccaacttctataaacaaggggag

SEQ ID NO: 28133 - DNA, 265 bp, Glycine max
  Clone ID: 700892916H1
agcaaatatggaatctgaagcactgatatggggtgacaaactcatactgaagggattgtcattccgtggttttcatggagcactaccggaagaaaggaagctaggccagaagttcgtggtagatgttgatgcatggatggatctgaaagcagctggcaaatctgatcacttatcagatacaattagttacacagatatatatgatatagctaaggaaattcttgaagggtcacctcaaaaccttctggagtcagtggcacaaaaa

SEQ ID NO: 28134 - DNA, 260 bp, Glycine max
  Clone ID: 700892924H1
gcttatggcttgctctctgaattgaccgtgcatgagattctcaccttctctgttatagctgcttccaatgatgagcttgctgagctttactggagtgctggtttgacggacaaagctccaggtcttgtgcagaaacttattgacaggagcaaacatattctggctgtcaagtttgtttttgagttcaatcttgctcataagattccaccagttcccattttggaagctcatgtgaatgagtctcagaaacttgttaaaag

SEQ ID NO: 28135 - DNA, 260 bp, Glycine max
  Clone ID: 700892928H1
gcgatgatgaagctgacaaggctgtgaagacacttctggccttaaatgaacacaaggataagtactcaggtggaggcaataatggtgacactgacaatgatgttgacgttgatgctgacaatgatgaagatgatagtgaggaagatttcgattgttctgaatcaaaactcgatgcagcagaagcaatacaagttgcatgatgaatataagatagagctaaatggggaattttttgctctcctactgattatacctgaagg

SEQ ID NO: 28136 - DNA, 261 bp, Glycine max
  Clone ID: 700892930H1
caagggtgaagagaagcaatttgctgcagaagaaatctcttctatggtgctcatcaagatgcgtgagattgctgaggcttaccttggctccacggtgaagaatgctgttgtcactgtccctgcttacttcaatgattctcagcgtcaagctaccaaggatgctggagtcattgctggtcttaatgtgatgcgaattatcaatgagcctactgcagctgccattgcttatggtcttgataagaaggccacaagtgttggtga

SEQ ID NO: 28137 - DNA, 266 bp, Glycine max
  unsure (1)..(266): unsure at all n locations
  Clone ID: 700892932H1
gccacacttcgaccaactncnccaanancanctggtagtcttgacaaaagcttccgaagggacaccaaaaattgctaaaccagaaaaaaccggggaagagaaacctgcagcaaccaaagtctcaagtatgtttggtggaactagagataaatgtgccggttgtcaaaaaacagtgtatcccactgaaaaggttactgtgaatggnactccttatcacaagagttgtttcaaatgcactcatggagggtgtgttattagtccctcca

SEQ ID NO: 28138 - DNA, 257 bp, Glycine max
  Clone ID: 700892935H1
gcagagcaacaggagttgtttaagaagcacatcgagggagcaactaaatacctgctctctaagattaaagatttccaattttttgttggtgagagcatgggtgatgatgcttgcttggtctttgcctactacaaggacggcgctgctgatccaacattcctgtactttgcatatgccttaaaggaggtcaagtgctaagtgacttaatgtaccgagctatctactcattttatctagtttttttttacgttctgtcc

SEQ ID NO: 28139 - DNA, 254 bp, Glycine max
  Clone ID: 700892957H1
attggaatgggaatttactatggttatggtgataggagcagtcacaggttgaattggagctgagattgttggaagctcttgagatttaccctccaatgaaactacaaggagtacatcgtcactttgtcctttatggtctgatggaatttctaaggaggaagtttgacagacaattttcttctgaggaggtcctacaattgctggatcggttctacaacttagaaatgctgaaaacagatgatgacgagattgat

SEQ ID NO: 28140 - DNA, 196 bp, Glycine max
  Clone ID: 700892961H1
tattttcttaaagaagcagttcagctcgaaaataaaattctctttatccctattacttgtgggagttggcattgcttctatcacagaccttcagctcaattttgtgggaaccattctttcccttctggcaatcataacgacatgtgttggccaaatcctgaccaacacaatacagaagaagcttaacgtctcttcc

SEQ ID NO: 28141 - DNA, 154 bp, Glycine max
  Clone ID: 700892969H1
ggagctgactggcctattgattatacaaaggagaattttgaagacctgtctgaaaagtttgatgtggtgtatgatacagtagggcaaactgaacaggcattcaaggttttgaaagaaggaggaaaagttgtgacaatagtaccacctggatttc

SEQ ID NO: 28142 - DNA, 187 bp, Glycine max
  Clone ID: 700892975H1
ctaaactaaaaatggatcgagaatggggatcgaagccggggagcggaggtgcggcgtcggcgcagaacgaagccatagaccggcgagagcgtctccggcgattggctctggagaccatagacctggcgaaggatccctatttcatgcgcaaccacctcggaagctacgaatgcaaactctgtctcac

SEQ ID NO: 28143 - DNA, 254 bp, Glycine max
  Clone ID: 700892976H1
tttccggtttcactcttctaaaatggcgaatctagcacgcttctccaagagagccctaagaagcgcacacgcgctagcaaggccccacgtgcagcctcagctgctgacagcagaacgcgctttttcgacggatgcgccgacatcgattaccccgtcggcggatcgcgtgaagtgggactaccgtgggcagaggaagataatcccgttggggcagtggctccccaaagttgccgtggatgcttacgtggcaccca

SEQ ID NO: 28144 - DNA, 254 bp, Glycine max
  Clone ID: 700892978H1
ttaggactaaagttttccacccaaatatcaacagcaatggtagtatttgtcttgatatcttaaaggagcagtggagccccgccttgacaatatctaaggttttgctctccatttgctccctattgacggatccaaacccagatgatcccttggtgcctgaaattgctcatatgtacaagacagacaggtccaagtatgagacaactgctaggagctggactcagaagtatgcaatgggctagcaaattggaata

SEQ ID NO: 28145 - DNA, 120 bp, Glycine max
  Clone ID: 700892982H1
gttgtgcccaggaagacggaatttcccacctggcctccgacaccgttcattacgaccctacagatctctattcctgggtccaaagcatgttaaccgaactcaaccccgaacccaacaaca

SEQ ID NO: 28146 - DNA, 251 bp, Glycine max
  Clone ID: 700892987H1
ggtttctctttctctttctctgtctgcttcttcactttctctcgtttcaatcgaaaaaaatcatgggcagaaaattcttcgtcggtggcaactggaaatgcaatgggaccactgaggaggtgaagaagattgttactactttaaatgaagctaaagtccctggagaagatgttgtagaagttgttgtgagccctccttttgtgttccttccttttgtaaaaagtttgctgcgccctgatttccatgtctcg

SEQ ID NO: 28147 - DNA, 250 bp, Glycine max
  Clone ID: 700892989H1
cacttgggtatccccctccacataaagaaccttatgattctgtgcttcaattgaatgagaaacttcaaaagcaaacaatttcatctactagtaggcctaccgagggacaacaaaagcaaaacaagtgcagcacatgtaatgtttctttcgatgactctaagctgtacagggaacatcacaagagtgaatggcacaaacacaatatcaagcgtaagacaaggcaactcccaccacttactgaggaagagtg

SEQ ID NO: 28148 - DNA, 252 bp, Glycine max
  Clone ID: 700892992H1
ggctgtaagaacaggcacagttgcagtggcctaatcaaagaataatccatgacatgatgatgagtggggaaagtgcccaatttttgaaggaaaaaaagatggaatattggaatggaaaaagttccaaatgaagaagtgaaatcatcaataatccatgaagattctgataacccgggatgaatcttcaattcgccgcctttgtaaagaaaaaagttgggttttccattgagccaaaattctttgttgattttt

SEQ ID NO: 28149 - DNA, 271 bp, Glycine max
  Clone ID: 700893001H1
actaattcggagaccttgcaagacttcatcaatggctgtcaaagtttatattgtgtactactccatgtatgggcatgttgagaaactagcagaagaaataaagaaaggggcttcctctgtggaaggtgttgaggccaagttatggcaggtacctgagacactgctggatgaggtgcttggtaagatgagtgcaccacccaagagtgacgtaccagtcattacccccaatgaactatccgaggctgatggctttgtattcggcttcccaaca

SEQ ID NO: 28150 - DNA, 258 bp, Glycine max
  Clone ID: 700893005H1
gcatgatgttcttgggattgctatggaagagaaaagggttggatttggggaccagaaaattaacagtcatgttgattggacgcttggatctttcataattgaaacaatggcagaaccccttgaattggaacatatagatacagggatgattgttggcaatgaatcactcacatatttttcattatttgcatttcttttcttattcatacttgctgcattctttgtaatgcaatggagaaagccacaattgaagacggt

SEQ ID NO: 28151 - DNA, 257 bp, Glycine max
  Clone ID: 700893009H1
ctttggtaaggtgagagaataggaaaaagggaaatatggcatttgcaggaacaactcagaagtgcatggcttgtgacaaaacagtttatctggttgataagttgacagcagataaccgagtgtaccataaggcttgcttcagatgccaccactgcaaaggaacactcaagcttagcaactataactcttttgagggggttctttactgcaggccacacttcgaccaactgttcaaaagaactggtagtcttgacaaa

SEQ ID NO: 28152 - DNA, 255 bp, Glycine max
  Clone ID: 700893012H1
gaaaaggttggctggcaggatcaagccatatgtgctatcagtcaaactttgtccctttgtaaatctggtgcaggaaagcgtagaggctcaaatggtagagcagacatatggttggctttccttggacccgatagacttggaaaaaggaaaattgcttcagttcttgcagagactatatttggaaaccctgaaagcctaatctctgtggatcttggcttccaggacagcttttacccattgaactcggtttttgaa

SEQ ID NO: 28153 - DNA, 258 bp, Glycine max
  Clone ID: 700893015H1
caattcctaattgtttaaacctaattctcatttcttcatcgttcgattcttctcctcctaaagatgcagatcttcgtgaaaactttgaccggtaagaccatcacccttgaggtggagtcctccgacaccatcgataacgtgaaagctaagattcaagacaaggaagggatcccacctgaccagcagagacttatctttgcgggtaaacagcttgaggatggtcgaacccttgccgactacaacatccaaaaggaatcc

SEQ ID NO: 28154 - DNA, 262 bp, Glycine max
  Clone ID: 700893016H1
gtgcagcatcgtagagaaataagggaaaaatggtgtcgctgaaactgcagaagcgcctctccgcaagcgtgctcaagtgcggcagaggaaaggtttggcttgaccccaatgaagtcaacgaaatctccatggccaattctcggcaaaacatcaggaagttggttaaggatgggtttatcatcaggaagccaaccaagattcactcccgctcacgtgctcgtaggatgaaggaggcaaagaggaagggccgccactccggtta

SEQ ID NO: 28155 - DNA, 261 bp, Glycine max
  Clone ID: 700893018H1
ggatgaagatggctttctatatatgacttacagtggagagaacacatttgggcttgtgttctgaaataatccgtcgtgacaggcaaccatctgaatagaacttcctaaaattgaccaatgttaagaagtcagcttaattgtaaattctctggtttgatgctttttatgtaaagtttattatgtctactggaacttatttgaaaattgtcgtgtttctatcagttctaaattgaataagtttaagggtatgtttgttctttg

SEQ ID NO: 28156 - DNA, 258 bp, Glycine max
  Clone ID: 700893022H1
tggagattcacaggtggaagctatgttggacaagactatatgtgccatgtctagcgtgttcattggagcccctggttccactttcactgaagacatcctgcggctgagaaaggactggggatcagcatccatgtgtgatgagtatctttgccaaggtgaggaaccaaacataatagcggaaaatgaatgacaacaaaaaaaggtcttctcaagcccatgactcaggtccagcacgtattttcttctgccatgattggg

SEQ ID NO: 28157 - DNA, 254 bp, Glycine max
  Clone ID: 700893023H1
agaaaatttgctattagatgcttatgggaaccttaaagtttctgattttggtttgagtgccctctcccagcaagttagggacgatggacttcttcatactacatgtggcactcctaattatgttgctcctgaggtccttaacgatagaggctatgatggggtaactgcagacttgtggtcatgtggggttattctctttgtattggttgcaggttacttgcctttcgatgaccctaatcttatgaacctgtata

SEQ ID NO: 28158 - DNA, 253 bp, Glycine max
  Clone ID: 700893025H1
caaaagagatcgttgcagagattcctacctatatcagagtcttcagcgacggcaccgtggaaaggccaagagaaacaccctttgtgccaccctcaattgatgaccctcaaaccggagtctcatccaaagacatcgtcatctcacaaaaccccttagtctctgctcgaatttaccttccaaaacttaccacaataaatcaagttcccatcttggtcttctttcacggtggtggcttctttttcgaatccgcttt

SEQ ID NO: 28159 - DNA, 262 bp, Glycine max
  Clone ID: 700893032H1
gaagtaaataaacgacactcacactatactaaagaatttcgtttcgtttgtacaaaacaaaagctagcaccgttctgcggcggtcccctccgtcatcgtctttacagagcttccccggtgaccacaatcgccattcgccgccgcagacgacggcgctcatggctcagccgccgttcgatccgttctacctttaccaacatgatgagcagagcaacatcaacacgctatttgtctccggtctaccagacgacgtgaaggcgcg

SEQ ID NO: 28160 - DNA, 261 bp, Glycine max
  Clone ID: 700893034H1
gagtattaacccagatgaagctgttgcttatggtgctgcagtgcaggctgcgattctcagtggcgagggtaatgagaaagtgcaggatcttcttttgttggatgttactcctctatccactggtttggagactgcaggaggagtcatgactgtgttgattcccagaaacacaaccattcccaccaagaaggagcaggtgttctcaacctactctgacaaccagcccggtgtgttgattcaggtctatgaaggtgaacgaac

SEQ ID NO: 28161 - DNA, 257 bp, Glycine max
  Clone ID: 700893035H1
cttagacgccgcacgccaccaccgtcactgtttcaatcctcgaactgtgtcttcttcgctttctggtctttttattaggttttgttcatcgatccatcgccaaacatgccttccagtcacttgcttctcgaggaacctattaggatggtctccatccttgagccatccaagcctagttttttctctgcaatgacaaagattgttggtaccctgggacctaaatctagatccgtcgaaaccatttctggttgcctcaa

SEQ ID NO: 28162 - DNA, 252 bp, Glycine max
  Clone ID: 700893039H1
ctattatgaaatcgacaatacacctacaggaacttgtgctgtttgtgtggttggtggtgaaaggtcccttgttgccaacttatcagctgcaaattgctacaagtctgagcatttgacgagaccggaaaattgggcattagttgaaaaggccaagtattactacatttctggctttttcctcactgtatctcctgattccatacaattggttgctgaacatgcagctgcaaataacaagatcttcatgatgaa

SEQ ID NO: 28163 - DNA, 249 bp, Glycine max
  Clone ID: 700893043H1
ttgagacagagaaacacagtgggattgcagagttgcttgaaatattgggcagcataattaatggttttgctttgcctttgaaggaagagcataagctgtttcttgcccgtgcgttgatcccgcttcacaagcctaagtgtgttgctctttatcatcaacagctttcgtattgcataactcagtttgttgagaaggacgtcaaactagccgatactgtggtaagaggccttttgaaatattggccgataa

SEQ ID NO: 28164 - DNA, 249 bp, Glycine max
  Clone ID: 700893044H1
cagacttcgggctagctagattgggaccatctgatgggctgactcatgtctccacagcggtcgtaggaacaatgggttatgcagctccagaatatgttcaaactggacgtctcacgtcaaagagtgatgtatggagctatggtgtcttcctttatgaactcatcactggccgccgtccaattgatcgaaatcgccccaagggtgagcagaagctgttggaatgggtaaggccatacctttcagatggga

SEQ ID NO: 28165 - DNA, 252 bp, Glycine max
  Clone ID: 700893047H1
ctgccatggattatagatggttaatgataatcaaggttttaaaaaaatggtccgcgactgcaattttgactggttctatctatgattctatatgaccacattgtgactacatttgagggcatatgagttgcatttgtccgcatttttttacaatgttaaggattgcagcaaaaccgtgactgtggctacaattttaaaatcttgatgataataatgactatttttttatatgatttttctgcatctattgtt

SEQ ID NO: 28166 - DNA, 253 bp, Glycine max
  Clone ID: 700893053H1
aaagctgtgagcatggctgatttagagcatgcaaaagacaagatcctgatgggaagtgaacgcaagtcagctgtcatatctgcggagtcacggaagttgactgctttccacgagggtggccatgcccttgtggccatccatactgatggggccctccctgttcacaaggcaactatagttccccgtggaatggctcttggcatggttactcaattgcctgaccaggaccagaccagcgtttcccgtaaacaga

SEQ ID NO: 28167 - DNA, 246 bp, Glycine max
  Clone ID: 700893058H1
ccggaaagaccatcacccttgaggtggaaagctctgacaccatcgacaacgtcaaggccaagatccaggacaaggaaggaattcccccggatcagcaacgtctcatcttcgccggaaagcagctcgaggacggccgtaccctcgccgactacaacatccagaaggagtcaacccttcaccttgtccttcgtctccgtggtggcatgcagatcttcgtcaagactctcactggcaaaaccataaccc

SEQ ID NO: 28168 - DNA, 248 bp, Glycine max
  Clone ID: 700893060H1
tgcaggaggtatgcatgcgggattgcccaaatatgtccatgtaaatctgagagacatagaagatgctaaatttaaggaaggggaagaagtgtctctagagtcactgaaggcgaaaggtgtgattaatccatcaggaagagaaaggagacttcctttgaagatcttgggtgaaggagaactgagcaagcagttgacattaaaagcccgcgccttttccacatcagcaaaggagaaacttgagaatgctg

SEQ ID NO: 28169 - DNA, 251 bp, Glycine max
  Clone ID: 700893063H1
aagagagtgaccccttaacatgtcagtgtcacaaatcctaactaacttcccccatagtcatatttcgtcgtcacaacattagaaggctcatcttgtttatgcccgacatgttcctttttgtaaatctgtgtgcatttagagttgcacttatagatgattcttgatatcatcagcaattttttatccaatattctattatgcctttgctgcttgtgtcacatgttccgtttcctcttttattaactttgcca

SEQ ID NO: 28170 - DNA, 255 bp, Glycine max
  Clone ID: 700893064H1
ctctctctccttctcgctctttcagctttgacttttgttggaaactaaggcctaatcaaaatggtgaagttcacagctgaagagctacgtcgtattatggactataagcataatatccgtaatatgtctgtcattgctcatgttgatcacggaaaatcaaccctcactgattctcttgtggctgctgctggtattattgctcaagaagttgccggtgatgtccgtatgactgatacccgtgcagatgaagctgag

SEQ ID NO: 28171 - DNA, 253 bp, Glycine max
  Clone ID: 700893067H1
ggtagtttcttttcagttcgaacatgatggggtcgagacctaggatgcaccaaaacgggcaccaggacggaggacggaggacggaaaacggttaaaagaagagaaggttcaagtagttgatgtctcgctaagagagacatatgtgcttagcgagtgacatccgctaagcaaagcatgcagctcgcttagcatgttggaaaaccctagaataggatcagtcagagatgtgctcgcccagcatgccgcaaacttg

SEQ ID NO: 28172 - DNA, 247 bp, Glycine max
  Clone ID: 700893072H1
cgaagatgtgacccaaactcctagttgttgtgctcatttgacaagcaatgttgggcatggagacagtgaacacaatttatgtggaactgctggaaagaaagggatgccaacagagactgtggaaattctgggaaatcagaagtctttcctcaacggttatcttgaagatgttttcatggctagattatcaaatctttctaaggatattgattggcgtgaatttacgtgccctcaatgcacgtctctc

SEQ ID NO: 28173 - DNA, 247 bp, Glycine max
  Clone ID: 700893073H1
aattgcggaatctgctagaattttctaataatggcgaaagacgttgagcaggtcacagagcaaggtgaatactccgcgaaggactaccatgaccctcctccggcaccgttgatcgacccagatgagctcacaaagtggtccttgtacagagccgccatagctgagttcatagcaacactcctttttctttacatcaccgtgttgaccattattggctacaagagacagagtgacaccaaaatccccg

SEQ ID NO: 28174 - DNA, 244 bp, Glycine max
  Clone ID: 700893076H1
aaaataataagaatcttagattaactagaagctggagttgtacggaacatcacatggctggttctcccaagtcaggcggaggagtacagaggactccagccaatggatatgaaaaaggattccctggaagaccagatggtttgcagagaaagtttcctccattaaattatgatggttcaacaagattgttaaggaatggttctcagtcttccatgggaagtctttctgtggatgatcttagagc

SEQ ID NO: 28175 - DNA, 253 bp, Glycine max
  Clone ID: 700893080H1
gattgacaggcgatctggcaaagagcttgagaaggaacccaagtttttgaagaatggtgatgctggttttgttaagatgattccgaccaaacccatggtggttgaaactttctctgagtaccccccacttggtcgctttgctgtcagggatatgcgtcaaactgttgctgtgggagtcatcaagaacgtggagaagaaggatcctactggagccaaggtcaccaaggctgcccagaagaagaagtgaatcgtg

SEQ ID NO: 28176 - DNA, 247 bp, Glycine max
  Clone ID: 700893083H1
catgagaccctaccttcacgagtttcttacttcagtttattctgagtatgacattatgatatggtcggcaaccagcatgaagtggattaaagtcaagatggaacaacttggggtgttggacaatcctaactacaaaatcaccgcacttcttgaccacatggcaatgatcacggttcagacttcttctcgtggggtctttgattgcaagcctcttggtttgatctgggctaagttccctgagttctac

SEQ ID NO: 28177 - DNA, 247 bp, Glycine max
  Clone ID: 700893086H1
gcaattcactctgtacaattcttcgttcgttctctgcagttatatcctttttgagcttcaatggcggacgctgaaaccttcgctttccaggctgagatcaaccagcttctaagtctcatcatcaacacattctacagcaacaaggagattttcttgcgtgaactcatcagcaatgcttctgatgctttggataagattcgattcgagagcttaaccgacaagagcaagctcgatgctcagccagagc

SEQ ID NO: 28178 - DNA, 242 bp, Glycine max
  Clone ID: 700893089H1
cccggatcccaatccctaatctttctaccactctcactccaaaaatctctaattttttcatctgggaagatcggttgacgaatcgaggatccgatcgcttgcgaggaactagggtttcaatcgatcgcatcacacacaaacaatcatgtttagccggatgttcggtaaacctaaacaggaaaccaatgctgttgccactttggacaagctaaacgagacacttgaaatgctggagaaaaagg

SEQ ID NO: 28179 - DNA, 194 bp, Glycine max
  Clone ID: 700893090H1
ggaagaaccagctgaagaatctgatgatgacatgggtttcagtctgtttgactaatttatgtaatgcttttgttgagtttatttggttagaattgaagttgtgtttgcctttcatttcaggtgttattttagtgtattcatgttacattgcaactacttttaatttccatagttaattaaagcttcaacgtttc

SEQ ID NO: 28180 - DNA, 243 bp, Glycine max
  Clone ID: 700893092H1
gaagattctggtgaatgcgtagaaaaggaaaataaagaaattagcgtgaaaaatgttgggtgtgttcagcagctccatagtgtcgccgccggaggagctcgttgccgccggcagccgtacaccgtcgccgaagatgacggcggcggcgctgcggaagtggttcgaggagaagaacccctccgcagtgtcggtggaggtcggagagcatgtccagctcgcttatacccaccagaacgagtcgcc

SEQ ID NO: 28181 - DNA, 247 bp, Glycine max
  Clone ID: 700893095H1
taccaggtttgaaagagaagatggcactggaggaaatgttgatacgatgccaactgaagatccttctaatggccttactcaaccaagcttgcaaattgaagatacagaccaaggcaatatgcatgagttaagtgaggtacatactgagcaatctcagcggggtgatataattaatgatgaaagcgatatagttgatgatgtagatttgattgaatctattgctctggaaggggagcaacaggaagaa

SEQ ID NO: 28182 - DNA, 251 bp, Glycine max
  Clone ID: 700893096H1
gtttcccaatttccattgcctccgcttccacctcgcaaccatgatcatcccggagaagaaccgcaaggagatctgcaaatacctcttccaagagggagtttgcttcgcgaagaaggacttcaatttggccaagcaccctgagatcgacgtgccgaatctgcaggtgattaagctgatgcagagtttcaagtctcgcgagtacgtgagagaaacttttgcttggatgcactattactggttcctcaccaacg

SEQ ID NO: 28183 - DNA, 247 bp, Glycine max
  Clone ID: 700893109H1
ttttgactgatgaattgagtgttaaacttgaaaaaactgagaaaagtctagaagaaactgagcagtcattgtttgatcttgaggaaaggcacaaacaagcaaatgcaacaatcaaggaaaaggaatttttgatatcaaatctcctaaaatctgagaaagcacttgtggagcgtgcaattgaactgcgagcagaactcgagaatgctgcatcagatgtgtcaaacctcttttctaaaattgagcggaa

SEQ ID NO: 28184 - DNA, 238 bp, Glycine max
  Clone ID: 700893136H1
gatcaaatgctcccaaacagatgggaatggaagtcctgcaaagaggacagtgcttcatgatctttatgagaaagaagggcagagtccatggtatgataatctctgcagacctgttacagaccttcttcctcttatagcaagtggtgtcagaggcgtcactagcaaccctgcgatttttcagaaagctatctcatcatcgaatgcttacaatgatcagttcagggaacttgtgcaagca

SEQ ID NO: 28185 - DNA, 241 bp, Glycine max
  Clone ID: 700893142H1
gttcgtctttcatggggccgcagtccttcaaacaaacaggctcaggcagatccaaaccagtggaatggtggtgctggttctggtggtggatactatgggtatgctgcacaaggttatgaaaattatgggtatgctcctgctgctggacaggatcccaacatgtatggcagttatccggggtatcctggttaccaaccacctcagcaacagcaacaaataggatatagttgagaagagaatg

SEQ ID NO: 28186 - DNA, 241 bp, Glycine max
  Clone ID: 700893143H1
gcttttgacaggagttggtttcttttctcttatattgtttgggggcccgcttgcacctggtcttgcaagtcttggaatgactccacttctagctgctgtatatgtgggtgctttgcagaacatatttagcaagagtgccaagtacagcttatttgatccctgcaaagaaatggcctacattccattggacgaggataccaaggttaaagggaaggcagccattgatgttgtgtgcaatcca

SEQ ID NO: 28187 - DNA, 242 bp, Glycine max; identical to SEQ ID NO: 28178
  Clone ID: 700893146H1

SEQ ID NO: 28188 - DNA, 244 bp, Glycine max
  Clone ID: 700893147H1
cgttaaactccaacttcaatatcttcaattcacaactctaaatttatcacatgcctttgaaaattctcagtagatgaaggctttgaactgatgagaagcttcaacactttgtcaagcatttcgaattcattagtgtcggacacttaagaatcacaagatattctctttggctgcaccagcttggagattaccgaccacctgctctgctttaagtgacttttggggccagtaatgaaacacaaca

SEQ ID NO: 28189 - DNA, 241 bp, Glycine max
  Clone ID: 700893149H1
gtgttacttgatgaaaacctggaagctagagtctctgattttggaatggctaggtatatgagtgctatggatacacatttgagtgtgagcacactggcaggcacaccagggtatgttcctccggagtactatgagagcttcagatgctctaccaaaggtgatgtctacagttatggtgtggttttgttggagctgctaactgggaaaaggccaacagattcggctgattttggtgataata

SEQ ID NO: 28190 - DNA, 241 bp, Glycine max
  unsure (1)..(241): unsure at all n locations
  Clone ID: 700893155H1
cgagcttcacaaagatgaatcgggaaaaattgatgaagatggccggtngcggttagaactgggggaaagggcaccgtngagaagaaagaagaaggctgtccacaagacaacaaccacagatgacaaaaggcttcagagcaccctgaagagaataggggtgaatgccancccggctattgaggaggtcaatatctttaaggatgacgtanttatccagtttctaaatcccaaagttcaagca

SEQ ID NO: 28191 - DNA, 240 bp, Glycine max
  Clone ID: 700893162H1
gtcaaatgtggtcaagtttgaagtgcagctttacaaaactcgtgaggagaaatatctgcttgatcttcaaagggtccagggcccacagtttcttttcttggatctgtgcgctgctttcctttcacagctacgtgttctctagtgaagctcacaagtcgcaaaggagaccttgaggtgtcttgtgtggcatgtgaataagcttacgttgtacatatcaatgccctttcagtatgggtatat

SEQ ID NO: 28192 - DNA, 217 bp, Glycine max
  unsure (1)..(217): unsure at all n locations
  Clone ID: 700893168H1
gtttccacacccaaganaagaagcaagagctcgaantctacagatccattcgaggaagatgaatgttcacccagatgtcaactttgaagaacttgctcggtccacagatgatttcaatggagctcaactgaaggctgtttgtgttgaggctggcatgttggctctacgccgtgatgcaactgaggtgaaccatgaggactttaatgaaggtattatt

SEQ ID NO: 28193 - DNA, 237 bp, Glycine max
  unsure (1)..(237): unsure at all n locations
  Clone ID: 700893192H1
ccaagcttgaacccgaaaggaaggtccaacttgcaaaagancttggcttgcagccaaggcaagttgctatatggttccaaaaccgaagagcaaggttcaagaccaagcagctagaaaaagactatggcgtgttgaaagctagttatgataggctcaaaggtgactatgaaagtcttgttcaagagaatgacaagttaaaagcagaggtgaattctctggagagcaaattgattcttt

SEQ ID NO: 28194 - DNA, 239 bp, Glycine max
  Clone ID: 700893195H1
gtgattgagaggttcgagaaggaggctgctgagatgaacaagaggtcattcaagtatgcctgggtgcttgacaagctcaaggctgagcgcgaaagaggaattaccattgatattgctttgtggaagtttgaaaccaccaagtactactgcacagtcatcgatgcccccggacatcgtgactttatcaagaacatgattactggtacctcccaggctgattgtgctgtccttatcattga

SEQ ID NO: 28195 - DNA, 244 bp, Glycine max
  Clone ID: 700893201H1
ggggtgaacatgcactccgacgatatccaacaggagaggaacgctgcattgcttgcaaactttgtgaagctatatgtcctgcacaagcaatcacaattgaggctgaggagcgagaagatggaagccgcaggacaactcggtatgatattgacatgaccaagtgcatttattgtggattttgtcaagaggcatgccctgttgatgcgattgttgaagggccaaactttgaatttgctacagagac

SEQ ID NO: 28196 - DNA, 241 bp, Glycine max
  Clone ID: 700893206H1
gcagatcttcgtcaagaccctcaccggcaagaccatcacccttgaggtggaaagctctgacaccatcgacaacgtcaaggccaagatccaggacaaggaaggaatccccccggaccagcaacgtctcattttcgccggaaagcaacttgaggacggccgtacccttgctgactacaacattcagaaggagagtactcttcacctcgtcctccgtctccgtggtggcatgcagatcttcgtt

SEQ ID NO: 28197 - DNA, 237 bp, Glycine max
  Clone ID: 700893243H1
gagacttggtgcgaaagttgaaagcacgaaaatggggtgggtttggaaggatgacaacagcgacgatgttcgacgcgataactcttcggaacgatgcgccaccaccaaggtcgtcaaatctcagtgcagaacagaggaggtcgaaactggaaagttcgtcagaaagtgcgagaaaaccgaagagattctcaggaattgcatcggaaagcccgccgaagtgttgcaatcaaacaaaga

SEQ ID NO: 28198 - DNA, 245 bp, Glycine max
  Clone ID: 700893248H1
aaacataatcatcaagcacacacaatctcactactcgaaacagatcgaatagagatatatatagttagagagagagaatattatacagagagataagtgcaataatggagtgttgtaagagggtatatgagtggttatgcaattcaaaatcatacttgataatattgagcttgcaatttggctccgccggcatgtaccttatcaccatggatgctctcaataagggcatgagtcattatgtgttt

SEQ ID NO: 28199 - DNA, 230 bp, Glycine max
  Clone ID: 700893267H1
atcctgatgatgatgattcttgttcagttgcttcaataactgcagcttctgtgcgatcaatcaagtccaggacaactgttgcttctgctcctgtgtttcggtccagtcaacgtgcagaaaaacggaaggagttttatacaaaattagaggaaaagcagcaagcaatggaagctgagaagaatcaaagtgaagctaggaccaaggaagagatggaggaagctatcaagcag

SEQ ID NO: 28200 - DNA, 230 bp, Glycine max
  Clone ID: 700893272H1
gcagaccagggcaactggtgctgtgtacccttctcgaagataggaagatggaagggcgtgttagattatcctgtctcaccaggatgcggatgaaaacatacaagattatttatcgggtttgtgggagaatgttttttgaagcattgacggagtaatcttgtgccctgggcaaaatatgattttaagttgccggtgctatctccactttctgtagtaatttatttctccca

SEQ ID NO: 28201 - DNA, 116 bp, Glycine max
  Clone ID: 700893320H1
aattaatactccaatggggaatgccttggggggaaagaaaaccacaaaggtgatgaagattgatggggaaaccttcaagcttaaaaccccaataaaagtttgtgatgtgctaaaaa

SEQ ID NO: 28202 - DNA, 122 bp, Glycine max
  Clone ID: 700893331H1
gcgtcttcttgttcctctcgcccagaatccgagatcaaccccgacgaaggcaaggggtttttctcggcttcttcagatttctgaaatggcgcctgtttcagctttagccaagtacaagctcg

SEQ ID NO: 28203 - DNA, 111 bp, Glycine max
  Clone ID: 700893382H1
ccgaagcccttcagcaaccatgtcgaggagaaaggttagggagccaaaggaggaaaatgtcactcttggtccagccgttagagacggtgaacatgttttcggcgtggctcg

SEQ ID NO: 28204 - DNA, 234 bp, Glycine max
  Clone ID: 700893406H1
gcagcactggagctgctaaggctgtaggaaaagttcttccagcgctgaatggtaaattgactggaatgtccttccgagtccccactgttgatgtttcagttgttgacctaactgtcaggctagagaagccagcacctatgagcaaatcaaagctgctatcaaggaggaatcagagggcaaactgaagggtattttgggatacaccgaagatgatgttgtgtctactgattttgt

SEQ ID NO: 28205 - DNA, 234 bp, Glycine max
  Clone ID: 700893429H1
cagagatggtagctattggctttggagcccctccttctccacttccgtttcatcttcgcctggcttcctctccttctcctttggccttcccaataatccacaaattccaaaacgcaggcaagtcagtgataaaatctgttcaaagaaaaatgcaaaatcaagggtggtcactctctgctctgcacctgtgcaagttgatatgcaggagcaggaggttagtgatattactttgag

SEQ ID NO: 28206 - DNA, 237 bp, Glycine max
  Clone ID: 700893449H1
taaatttgaggaaaggaagaaaatccaaccatcaaatgcaatttctaccacaagaattaatgttcctgctcctcccacagcatctgagcaggtaactcctattaccaaacctcagcatgtggagaaagtggaccagtagcaccacaaccaccagcttcccaaccacaagctgaaacatcaaagcaagctacagacacagttcaaaatatccctccaaaagttgactatgctacagac

SEQ ID NO: 28207 - DNA, 228 bp, Glycine max
  Clone ID: 700893462H1
tagcattccatggtcatgtccacactattgatcctttctggcacatgttgggattgggatatcaggaaaatacaagttttgctgatgctgagactgctggtgtcatccatttcaatggcagggcaaagcatggctagatatagcttttccccatctaaagccattgtggaccaagtacattgacttttcagattacttcataaagagttgtcacattagggcattgta

SEQ ID NO: 28208 - DNA, 224 bp, Glycine max
  Clone ID: 700893470H1
caacagctgtttacgtgtatttgtattcagtatactactactatgtgaagacgaagatgtcaggcttcttccaaaccagcttctattttggatacactttgatgttttgtcttggactgggaatctgtgtggagctgtgggttatcttggttcgaatttgtttgtgaggaggatctacagaaacatcaagtgtgactaaggcttttgtaggagtctgagaccag

SEQ ID NO: 28209 - DNA, 128 bp, Glycine max
  Clone ID: 700893473H1
ctgcaataggtgcaccagccacacctccacctgttgcacctgtgccagatttacttggagatttgatgggcatggataattctattgttcctattgatcagccagctactcctactgggcctccttac

SEQ ID NO: 28210 - DNA, 230 bp, Glycine max
  Clone ID: 700893481H1
gcttaggaagatgaggctgcatactcttgtgtgaccaaagttgcttcctctatctatcgtgttcttcgcgttagggtttgcgtaattttcagatagaaaaacactgacatcattgtattgtgcggttcagaagatgagtgaagacgtggagatgaaagatcaggcaacgccttcacactcgctttcttcagttcctccatctgcattgcagcatttgaaggaaatagcat

SEQ ID NO: 28211 - DNA, 221 bp, Glycine max
  Clone ID: 700893488H1
aaaaggagcatcgagtaggtttcctactcccttctcatcgttggcaagatgagtgccatgaaattttgccgtgaatgcaataacattctgtaccctaaggaagacagagaccagaaagttctctcttcgcttgccgcaactgcgaccatcaggaggttgctgataacttctgtgtgtataggaatgagatacatcactctgttggagagcgcactcaggtg

SEQ ID NO: 28212 - DNA, 224 bp, Glycine max
  Clone ID: 700893494H1
attcgggctttccgctggagtcggagttggcaacgctttggtgttggagatcgtgatgaccttcggtttggtgtacacagtctacgccactgccgttgaccccaagaagggcaatttgggaatattgctcccatcgccattggtttcattgttggcgctaacattttgttgggtggggccttctccggagcagccatgaaccctgctgtgacatttgggcctgc

SEQ ID NO: 28213 - DNA, 210 bp, Glycine max
  Clone ID: 700893495H1
ttttcttttctcaatttttacccccccccctgatttcagtttcttattttctggggcaggtctttttcaaaaaattcccccttacaattattcactgtaaaatcttaggaccgattctgcattcttggtgcaaattcttattattattctggcaccaactgtaagatatatcgctaattaaacaaagattttctaccagctttcattgtc

SEQ ID NO: 28214 - DNA, 232 bp, Glycine max
  Clone ID: 700893509H1
ctctcttgttacacattctacattctctctctattatttttcaccctttttctctcttttgcaaagaaaacaatttaattaagtcaatttgtaccaaaatggcttctcaagtttgtgaaactttggctttcatcaacggtgatgatgggttgaaaatcaacggtgctcttctaatgtccctgatggaagagccatcaccaagtgatgagagtgatgatgatcgattggatag

SEQ ID NO: 28215 - DNA, 230 bp, Glycine max
  Clone ID: 700893526H1
tgttactgttggagagtcagttacctcacctgctgctcttaatttagctggactcctttctgattgtgctgagcttttctctagaatattgagaaccctatttgaagttgttatatttgagaaccgtggcaatcattggactcttagccgagccattttgagcatgatactaatcagtgaagagatgttcacaaatgtcaaggctcaaattttggtttcgtatccaccag

SEQ ID NO: 28216 - DNA, 229 bp, Glycine max
  Clone ID: 700893535H1
gaagtttacagcttgtcgacgagtgttgccaataggccctatttgtaattgtaggaatgatgagttgagaaaaagtgtgagcttttgggaagaagatatgagctgcttgaagtggctagaaaagcagaaggccaagtcagttgtatacatctcattcggaagttgggtgagtcccattggggaagcaaagttgaaaaatttagcactggcactcgaggcttcagggagg

SEQ ID NO: 28217 - DNA, 226 bp, Glycine max
  Clone ID: 700893539H1
tggtgcgcagaaagatcttcagtgcacaagaatcagagacaggagaaaccctcttcggcttgacacgagcctcgaagtggatccttcgcgacacgaaaatgaccctagcacccatgttgctgctggagaaccacccaattcacctgaaccctgcgcactacatcagtgagattattagagaaggcacaaaaaatggcactgctttctttaagtgccatggacatga

SEQ ID NO: 28218 - DNA, 234 bp, Glycine max
  Clone ID: 700893548H1
ctccattttttttcaacaccctttatgacccttacagagaaggtgctgatttcgtccgtggatacccttttagtcttcgtgagggtgcccccactgctgtttctcatggcctctggctcaatatacctgattatgatgctccaacacagcttgtcaaacccctcgagaggaacaccaggtatgttgatgctgttcttaccattcccaaaggaacattgttccccatgtgtggta

SEQ ID NO: 28219 - DNA, 223 bp, Glycine max
  Clone ID: 700893567H1
gtggcagtgggaaggttgtggacagtggtcctgatgatcatatatttgtatactatactgaccatggaggtcctggggtgctcgggatgcctgctggtccttacttatacgcggatgatctgattgaagtcttgaagaaaaagcatgcttctggaacatataaaaacctagtattttatctggaggcatgtgaatctgggagtatctttgaaggtcttcttcc

SEQ ID NO: 28220 - DNA, 222 bp, Glycine max
  Clone ID: 700893571H1
tgagcaatcgccaaagattgggccctgcaggccttgctttgcattatgcaaatatagtgcttcaaattgatactcttgtggctagatcctctatacctgcaaatacaaaggatgcattatatcaaagcttgcctcctaatataaaattagctctgcgctccaaattaccatcccttcgtgttgtagaagagctaactatagcagatatcacagatgagatgg

SEQ ID NO: 28221 - DNA, 225 bp, Glycine max
  Clone ID: 700893576H1
gttgtaactcgttcttcttcttttgttgttctgtgtttgtgtttgttttttctctcacctgaaaatgtcttgctgcggtggtaactgtggttgcggaagctcctgcaagtgcggcaacggctgcggaggctgcaagatgtacccagacttgagctacactgagtcaaccaccaccgagaccttggtcatgggagtggcacctgttaaggctcaatttgagggtgc

SEQ ID NO: 28222 - DNA, 227 bp, Glycine max
  Clone ID: 700893594H1
aatcagagctcagcgataagcagaaagtggagatcgcgaaatggttcctcctcaactctcctcccggagaaatccaatacgttgccaaagatgtgaaatcgattctcaacaacgacgatttgtacaaggaagccgcttccgaggcttttccctattacaacaaatcgcacttgatttccattccaatgcccaaccgaagcggagacgtactggttacttcgttcggt

SEQ ID NO: 28223 - DNA, 227 bp, Glycine max
  Clone ID: 700893596H1
ctgggcaactgctctgctgtacttgtggtctctcgtagctcctatcatgtttccagaaagggagttctgagcatcacgttcctcagttccaagtttctgagggaaaatgtgtcacctaactactatatagtcgagtggtgttgctttttataataggatatacggtatgcatctatatcagcatacatttgaataaagtgttacgaatgacatgattccgagtggtg

SEQ ID NO: 28224 - DNA, 243 bp, Glycine max
  Clone ID: 700893605H1
tgaaaattgacgttgtacaaaaatgtacattcccaaccaacccaactatctatgcaattaaaaataatagtacagtagtataaatagtatcagaccaccaatagcgaagacaataacagtaagtaacgtggaccccctaagcaattatttgcgacatgtgaatattgtaagatattaagtattatcaatcgtctttcaaataaaatcaatgtgtctctcagggatatcaattgcttaataaaa

SEQ ID NO: 28225 - DNA, 239 bp, Glycine max
  Clone ID: 700893621H1
atcaaccccaattacttcatgtctggacaagaggcacgtgagccttgtaacaacccacctgtggagcagcataatataaccagtgactacttttacaatactgggagtggcacttttgcttcttcttcccctttgaacaaccgttctcctaattccaccagctcttatgctgctgtcattgggaactccaggtacctcaaaccggttcagtcccttcttgaagatcttgttgatgttgg

SEQ ID NO: 28226 - DNA, 236 bp, Glycine max
  Clone ID: 700893626H1
cttcctagtgctgcttcttgcagcccttatcctcatgcctcaagggcttgctacttactacaaaccaattaagaagccaccagtgtacaagcctccagtgtacaagccaccagtgtacaaaccaccggtttataagccaaaaccaccggtttacaagccgaaaccaccggtttacaagccaccatataagaagccaccatacaagaaaccaccttatggaaagtaccctccagtag

SEQ ID NO: 28227 - DNA, 234 bp, Glycine max
  Clone ID: 700893643H1
tgaaaaaggagctgcatgaagtaaagaggaaaagtgctgctcttcaaatgcaacagtttgttggagaggaaaagaacgatttattggattacttgagatctcttcaacctgaacaggtagctcagctttccgaatttacatcccctgagcttaaggacaccatcctctttgttgtccatggtctccttgctaccctttctcctaagatgcattctaaaccttccaccatctcag

SEQ ID NO: 28228 - DNA, 236 bp, Glycine max
  Clone ID: 700893655H1
gaaaaatgacgcagaaggcgaatcttttcaagggtaaagcaaagaagaaatcaatacctcccaatcgtcatgggaaagtccctgttactcgtaaaggaaagagattcgtgaagccatccaaggttacaaaggatatggatactgatcgaggtgagcaaattcattaaccactgcaatgagatcaaagcagcgactctagcaacgaaggatggtgggcaactaggcatcattaagcc

SEQ ID NO: 28229 - DNA, 230 bp, Glycine max
  Clone ID: 700893675H1
gtttcgacctctgttgttgagccttacaacagtgtcctctccactcattctcttcttgagcacactgatgtggctgtcctgctcgacaatgaagccatttatgacatctgcaggcgttcactggacattgagaggccaacctacaccaaccttaatcgtttagtttctcaggtgatatcatcactgactgcttccctgaggtttgatggagccttgaatgttgatgtcaa

SEQ ID NO: 28230 - DNA, 233 bp, Glycine max
  Clone ID: 700893678H1
tggaaatgcaatgggaccactgaggaggtaaagaagattgttactactttgaatgaggctaaagtccctggagaagatgtcgtagaagttgttgtgagccctccttttgtgttccttcctgttgtaaaaagtttgctgcgccctgatttccatgtttcggcacaaaactgttgggttcgcaaaggtggtgcttataccggtgaggttagtgctgaaatgcttgttaatttggg

SEQ ID NO: 28231 - DNA, 232 bp, Glycine max
  Clone ID: 700893684H1
caactttcaagggatgatagcattttgtggcataaggattaaggaggcataaaggaccaattgctttggaatattcactcatgacaaggcacaaggtcatgcgtgtatgccaacacatagtaatgatgtgtgtttttattcagtaggcaactggcagatcgggttttcccttgtcacttttgtataattattttggaagaatttatgatgtcaaagttattgtttaatatta

SEQ ID NO: 28232 - DNA, 229 bp, Glycine max
  Clone ID: 700893689H1
cttaatttctctctgccttgctcatttacacacctctccaacctttcactttcagctttatttgaatccctctctctcctttccaaatggccagcgttgaggttgcacatcaaacaccaacaacagttccagaaaatgaaacaaccgaggtaatcaagacccaggaaacaaccccggaaccagtaccagccactgaggctcctgcaacagaacaagcagcagctgaggt

SEQ ID NO: 28233 - DNA, 230 bp, Glycine max
  Clone ID: 700893693H1
cggatatccagatagctagagaagctgagttaatgagaaaacgacatgataatttgcagccgaggcaacaagtttccagttaacttgtgtgactgccccgtgtcttgtagaaactacagaaatctcaaatgaaatggcttcccttgtatttgttcatcacaatgcattcctgtggctgttggttgcgcaagtgaccagatgaatagctgaagcagattgcattggtgtaa

SEQ ID NO: 28234 - DNA, 134 bp, Glycine max
  Clone ID: 700893712H1
gactttttatattgaattttaaaataatttgtatcagtatataaaaataaaacttcatcctaggtttaattttgatcccgccactgtcagttgtaaaatttgaagaagaaatttcagattgtgttgtatttttt

SEQ ID NO: 28235 - DNA, 236 bp, Glycine max
  Clone ID: 700893731H1
cctttttcttttatctgtagtagctgaatgaaccacaggttaaaataacacacaaagaatcatccgagtcaatgtgtagtaggaactccatggcactgtaatttcttctcattacccttggatgtagtagtttagattgttagtcctatgttgttacaggtataatttcaagtctttgtacagctggagcattacccagagagaaagcatgcatagatgaagtggtaaaaccgtaa

SEQ ID NO: 28236 - DNA, 232 bp, Glycine max
  Clone ID: 700893745H1
cgaatgctctgtggaagatatgatgcttctaatgatgatggctacagtctggaaaatgagcctttaccaggttcagactcaattgaggcatccaggagaagagaaagaggtgctcgagcactggaagaacgattggctgcagagaggttggctgctgcacgacgtgagttgcaaagagaggctgaggaaaatgtgtaattcctcagattttgtaaatttggatcagttcagc

SEQ ID NO: 28237 - DNA, 226 bp, Glycine max
  Clone ID: 700893778H1
gtttgagttacccaactgcttcatattccacaatgccaatgcttgggaggaggaagatgaagttgttctgatcacatgccgccttcagaatccaaatttggatttggtcggtgggactgccaaggaaaagcttgaaaatttctcaaatgagctgtatgaaatgagatttaacatgaaaacgggtgaagcttctcaaaagaaactatcagcatctgctgtagatttt

SEQ ID NO: 28238 - DNA, 235 bp, Glycine max
  Clone ID: 700893866H1
ccacgggtcacccatgagatccgcagtgtctggatatcatacagaaaggttccccatacctcctgctatctgcagtggaaggcgtgaaaagtgtggaattgagaaggagaacaacttcaagcagcccggagagagataccggtcttgggcacctgacaggcaagatagatttgctcgccgatgggttgatgctttatctgacccacgggtcacccatgagatccgcagtgtctgg

SEQ ID NO: 28239 - DNA, 230 bp, Glycine max
  Clone ID: 700893910H1
cgtggatactattcagtggagactgttacacttttggtggctttgaaagtccgttatagagatagaatcacaattctcaggggaaatcatgaaagccgtcaaattactcaagtgtatggcttctatgatgaatgcttgagaaaatatggaaatgcgaatgtctggaaatactttacagacttgtttgattatttgcctctgactgccctcattgagagtcagattttctg

SEQ ID NO: 28240 - DNA, 229 bp, Glycine max
  Clone ID: 700893924H1
ggcaaatcctggcaagttgaggttacttgacttgactgaaaatgatagagtgttcaatattggtaagtacagcaagaatgaaaataaatctgatgcccacagaatggtgaggactggtcttcaaaaagaaggatcaagagtgatttttggtgttcctaaacctgggaagaaaagaaaatttatggaagtaagcaagcattatgttgcagatgggacaagcaagatcaat

SEQ ID NO: 28241 - DNA, 228 bp, Glycine max
  Clone ID: 700893927H1
gtagtttcaggcgctctaggaaataccagtccaggaggattcccaattgctcgacctggtacaggtggtttgatgccagggatgccagggaccaggaggatgcctgggatgcctggaattgataatgacaactgggagatgcctaagacaagatcaatgccgagagtagacatgtcaggcatgcaaactggaggacatagccagtctccctttctttccaagacatcc

SEQ ID NO: 28242 - DNA, 226 bp, Glycine max
  unsure (1)..(226): unsure at all n locations
  Clone ID: 700893942H1
gcaaattgtggtatcatcatttgagcaagcagcgggttatggggcggcaaaatcttacactgcccttgccctaaaaactatctcaaagcaattcaggtgcctgaaagatgcaatctctgcacaaatcaaagccacgagcaagacattgggtgaagatgattgcttaggagttaaagtagannggtcaaggcttaggtatgttgaccaccatcttcggcaacaaagg

SEQ ID NO: 28243 - DNA, 226 bp, Glycine max
  Clone ID: 700893943H1
gtcaatcttcaatgtaaatgggaaggtaaaggatactctaatttttaatacttttgttctctgccaagttttcaacgagttcaactctagaagtatggagaaacttaatgtgttccaaggcactcacaaaaaccacttgtttcttggaattgtggggattactttggttcttcaagtattgatggtggaactcctaaggaagtttgctgatacggagagattaaca

SEQ ID NO: 28244 - DNA, 223 bp, Glycine max
  Clone ID: 700893959H1
aatttccatggcttctgcggatgttgaataccgatgctttgttggtgggctcgcttgggccactgacaactacgatctggagaaagccttctctcagtacggtgacgtcgttgaatcgaagattatcaacgatcgtgagactggaagatccaggggatttggatttgttaccttcgcctccgaggattcaatgagggatgcgatcgaagggatgaacggtcag

SEQ ID NO: 28245 - DNA, 217 bp, Glycine max
  Clone ID: 700893965H1
ccacgttcacaagtggtgtggtgatgcttgtttccagagttcggttgagccttttatattgaagtcacagttgtacagtattgtgaaggacagaacacaagtggatagggaattagagtctctaaggagggacaaagtactgcgtgttttcaaattaaatactggacaagatgatcatgccataatgtttttggatgactacctaaaccagatagat

SEQ ID NO: 28246 - DNA, 217 bp, Glycine max
  Clone ID: 700893968H1
gtcggattttcatatggaaaaagaaaagtggtcagcttattcgtgtcatggatctgtgtcatctcaatccaagatggatgctgatgagaaagtcaccccgcaagtttttaagggacacaggaattgtgagacggtgaagggtgttaacttttttggacctaaatgtgagtatgtggtgagtgggtcagattgtggtcggattttcatatggaaaaag

SEQ ID NO: 28247 - DNA, 222 bp, Glycine max
  Clone ID: 700893972H1
ggtgaattgacttatggcaaaattggtgagtggagatttgataaaaggtcacatctacgaggacctccaccaaaaaacttgcccttgcccccaccaggggttcctgaaagtgtggtaacccttgtaaagatggtgaacgaggctagtgctaacattccaaattgggactcatcttccacctcatcatgatgatatcccaagtgcacatttcgaaaaggaaaa

SEQ ID NO: 28248 - DNA, 227 bp, Glycine max
  Clone ID: 700893979H1
gcaacccttctcttcctttatgtcactgtgctcaccattattggctacaaaaggcagactgatacaacggtaggtggcaccgactgtgatggggttggcattttgggcatcgcttgggcctttggtggcatgatcttcatccttgtttactgcaccgccggtatttcaggaggacacataaacccggcggtgacattcgggttgttcctaggacgcaaggtgtcgtt

SEQ ID NO: 28249 - DNA, 222 bp, Glycine max
  Clone ID: 700893993H1
aaaagttagggttcacaacttttccttttccttttgcttgcgaatctgaatcaaataatcaatcatccattcattattcatcatgtcgtcggcgaagaaaatcacgctgaagagttcggacggcgaggctttcgaggtggaggaggcggtggcgctggagtcgcagacgataaagcacatgatcgaggacgactgcgccgacagcggcatccctctgccgaa

SEQ ID NO: 28250 - DNA, 250 bp, Glycine max
  Clone ID: 700894003H1
ctgtaagttcacaattgttgggcaggagttcacaaaaagtggctggggatttgcattcaatgctagacatcaaaacctcaacataaggaagctcatcaacaactgctgcaacccctccagctttagggccacgccgaagggcatcaatataatcctccatgttgaggttttgatgtctagcattgactgtaagttcacaattgttgggcaggagttcacaaaaagtggctggggatttgcattccaaagg

SEQ ID NO: 28251 - DNA, 250 bp, Glycine max
  Clone ID: 700894017H1
cttccgttcctttcttcgttccttccccaacccaatcttcgccttcgcccacaacaactcctccttcaggatcgctgccaacgttactttccatttttacccttcatcctcgagaaaaaaatggcgaacgcagcatctggtatggccgtccatgatgagtgcaagctaaagtttctggagctcaaggcgaagaggacgtaccggtatatcgtttttaagattgaggagaaatcgaagcaagttattgtgg

SEQ ID NO: 28252 - DNA, 248 bp, Glycine max
  unsure (1)..(248): unsure at all n locations
  Clone ID: 700894021H1
ggtttttccagagttgtctttgaagtcctaaaacttgctgcacaaaataacaaactatttcgggtcttctgcacagagggaagaccagaccgaacaggtttgcggttgtcgaatgagctggccaaacttgatgtttcagtgaaacttctaatagattctgctgttgcatatactatggatgaggtggacatggtttttgtgggtgcggatggagttgntcgaaagtgggggcataatcaacatgatgg

SEQ ID NO: 28253 - DNA, 270 bp, Glycine max
  unsure (1)..(270): unsure at all n locations
  Clone ID: 700894027H1
aggtnctacngatctggttaccccnggnaanttttttncttaggtttctccggnttcttatctccngagtgncagggggctnaagcacaancggttgactngtctcaaggnttaanctccgntncttcaggngtctnatngctaaagaggtccatggaaaatcctgagggcagggtgggaggctgctataaatcctcatttctccaantatacaggtgnancgnatttaaggcgcnntcttggagtccaaacnaacggctnaagaaggaa

SEQ ID NO: 28254 - DNA, 251 bp, Glycine max
  Clone ID: 700894030H1
ttccaatatattccattctctctgtgtatttccctacctctcccttcaagatgcagatcttcgtcaagaccctcaccggcaagaccatcacccttgaggtggaaagctctgacaccatcgacaacgtcaaggccaagatccaggacaaggaaggaatccccccggaccagcaacgtctcattttcgccggaaagcaacttgaggacggccgtacccttgctgactacaacattcagaaggagagtactctt

SEQ ID NO: 28255 - DNA, 244 bp, Glycine max
  Clone ID: 700894035H1
ggaagagtcatttactttttggggcaccccagaaggtgatattgttcatcctgcagagtgcatggaacaattacttgagaaagttaggcgtcatagagttaatattgatggcaatgtttgtactgtcatggtgacaaccttagttcttgagggttggcagcgaaaacttgatcctgggtacaatgtgatgcagacattgcagacattgctacttagagctgattgggcaaagtctctttcgtac

SEQ ID NO: 28256 - DNA, 255 bp, Glycine max
  Clone ID: 700894044H1
gttggtgcaaagcatccttcgtttcaatttctctctctcagcgctttctgcaatcgaacctttcatctccaaagggatccacaggccgaaggagaaatggggctgacattcacaaagcttttcagtcggcttttcgcgaagaaggaaatgcgaattctgatggttggtcttgatgctgctggtaagaccactatcctgtacaagctcaagctcggagagatcgttaccacaattcctaccatcgggttcaatgtt

SEQ ID NO: 28257 - DNA, 240 bp, Glycine max
  Clone ID: 700894067H1
cagcaatattggcttcgtcttctctggggtttgatagtgaaatgagcttttactatatatgtggagctctattgtttttcgccttgcttggcctttctgggtgcttcattacctgctatgatcgaagagtacgcaatgatttagctcagccttgtagagaactatgtctttgttgctgtcaacctggagtttgtgcagactgtcatttgccaggcactctttgtatgtggactgattgca

SEQ ID NO: 28258 - DNA, 241 bp, Glycine max
  Clone ID: 700894071H1
gaccttggctgcatttgatgaggataacttgattccttgttttggatttggggatgcatcaacacatgatcaagatgtctttagtttctatccagatgaacgaatttgcaatggatttgaagaagtgttgagtcggtatagggaaattgttcctattattcgacttgcaggtcctacttcatttgcaccaatcgttgaaatggccatgacaatagttgagcagactggaggccagtaccat

SEQ ID NO: 28259 - DNA, 254 bp, Glycine max
  Clone ID: 700894077H1
gttatcttctagtatttttcaagtaacttaaggtttcaaacctaggaagttggaagtcatggcagcaacattgatggcagcaacaagttctggcactcttaaagcaactcctttcctaggccaaggcaagggtgccaatgccaatgctcttagggatgttgtttccatgggaactgggaagtacaccatgggcaatgatttgtggtatggaccagacagagtgaaatacttgggacccttttcagctcagaccc

SEQ ID NO: 28260 - DNA, 255 bp, Glycine max
  Clone ID: 700894094H1
gggagtgcagcgtagtcgcagtacacgacttgctcaacttcaaccaaaatctaaacgcaagtttggtcgaccttagagcacaagtgagcaaccaaagaaaacactttgccacggctcaatcaaccagcggagcagacccagtccatgccatgttccaatgcaggaactacctctccatcactgactgcaccacctgctttgccaccgctgccaccagaattcacaactgctccactggaaacggtgcccatgtcg

SEQ ID NO: 28261 - DNA, 257 bp, Glycine max
  Clone ID: 700894104H1
atgtttttctctttttttcctacggtgtggccaggctgttcactttagcgaaggatcaaaaaccctgtgaaagtgtgtttgtttggtcgagttgattgaattcgctggcagcttacagctatgatcatcaacaacgccccttttcctctatgattgattcgattcgattgaagtcgattccgtagagagtgagaaatcagatcacaataatcatcgatgggtaatttgttcgtgaagaagcccaaggtaacagacgt

SEQ ID NO: 28262 - DNA, 258 bp, Glycine max
  Clone ID: 700894105H1
agctcgtgaaggagtgcgagagcataattgatgcagtgttcccggccgaggaagaagctgaaagagcaaaggaagcaaaagaggcgataactgtggcaggaaaagggattttcagaaacacggttgcagctttgcttacactgcaagaaatcagaaaaggtagctccacagagagccctttttctctgcctccactcaatttgccggactctgatctcatccaatcaatacagctcaatgctgcagttcctattgtct

SEQ ID NO: 28263 - DNA, 252 bp, Glycine max
  Clone ID: 700894126H1
caggcgaggagaaagatggaggggaaggagcaggatgtgtcgttgggagcgaacaagttccccgagagacagccgattgggacggcggcgcagagccaagacgacggcaaggactaccaggagccggcgccggcgccgctggttgacccgacggagtttacgtcatggtcgttttacagagcagggatagcagagtttgtggccacttttctgtttctctacatcaccgtcttaaccgttatgggagtcgcc

SEQ ID NO: 28264 - DNA, 251 bp, Glycine max
  Clone ID: 700894134H1
ctgagaaggagatgaatcggcgcaaggacatgctttcaaatttgagatcaaaagttaatcagatggcttccacgttgaacatgtcaaactttgcaaatagggatagtttgcttgggccagaaagaaaaccagatgcaatgaccagaatggttggcctggacaacaatggacttgttggacttcagcggcaaattatgaaagaacaagacgatggccttgagcaattggaagagaccgtggcaagcaccaaa

SEQ ID NO: 28265 - DNA, 252 bp, Glycine max
  Clone ID: 700894136H1
gtggttcagaaacaaatgaggtttacacctactatagatcgcttcccatgccagttcacttcacacaaatttgggtccattgatcccatttctggtaaagacactgatgatgacaatggtcagtttgtttcaagtgtgtgctggagagggaaatcgggcatgcttattgcggccaattcaagtggatgtgtaaaagtgttacagatggtttaaagaaaaggttccatgtgacggcgactttcttacatttgc

SEQ ID NO: 28266 - DNA, 252 bp, Glycine max
  Clone ID: 700894140H1
gttcgtagaaacccctgaagatggtggcaaaaacttcgacgatgatggacgagtcagaagaacgggtacatggataactgcgagtgcccatatcataacggcagtgatagggtcaggagtgttgtcacttgcatgggcaattgcacaaatgggttgggtggctggccctgccgttctctttgccttctctttcatcacttacttcacttccactcttcttgccgactgttatcgttcacctgatcctgttca

SEQ ID NO: 28267 - DNA, 249 bp, Glycine max
  Clone ID: 700894147H1
cctcagccaacccaaaaggttagcgaggagaagaaagccccgaaagttgaaactgctcctgctaaagagaagcccaaaacacctcctgccactctgaagtctcccactgagccccagcttcctcctaaagaaagagaaagacgagttcctatgacaaggcttcggaaacgagttgctacacggctgaaagattcccaaaacacatttgctatgctgactaccttcaatgaagttgatatgactaatttg

SEQ ID NO: 28268 - DNA, 247 bp, Glycine max
  Clone ID: 700894151H1
ggctccatggctcagtatgttcctgctcttaagcactacagtgatgggaaattgcctttggtttgtaccatgtatgcttcttctgagtgctactttggggttaatctgaagcctctttgtgatcctggtgatgttgcttttacgctcttgcctaacatgggttactttgagttccttcctcttggacataacgggacgctgttgatggactttgatgaaggggagcaggttcccaatgataagcttg

SEQ ID NO: 28269 - DNA, 247 bp, Glycine max
  Clone ID: 700894158H1
gcagcatcaaaatgcaagaagggaactctaagatactggctcagtgcaggtcctggagatttcttgctatcatcagcaggatgtccaacatctgcattctatgcagtagtcattgaccaagatatttcccaatgcaaagagggagttaaagtgattacttccaacataccaatgaagccttctctatttgccacagccaaaaatgtgaactatcttccaaatgtcctttcagtaatggaagctgaag

SEQ ID NO: 28270 - DNA, 244 bp, Glycine max
  Clone ID: 700894160H1
ctcatgatccctgagccatggtaccatttccctcataaaattctctcttcctttttgggttctcctattccaagcttcaatcttttctctcttctcacagccttcttcactcacaggaggtgaagatgtcgactccggctaggaagagactgatgagggattttaaaagattgcaacaagatcctcctgctggcatcagtggggctccccaagacaataatattatgctttggaatgctgttat

SEQ ID NO: 28271 - DNA, 243 bp, Glycine max
  Clone ID: 700894161H1
aaagtggtggttggaaagcttgctcctttgttgttgtatatgaggtattcgaaagaatggcttattatgggatatcatcaaatttgatcctttatcttacaacaaagcttcaccaaggcacagtatcctctgcaaacaatgtcaccaattgggttggcaccatttggatgacacccatattaggcgcctacgttgctgacgctttccttggccgctattggacttttgtcatagcctccacca

SEQ ID NO: 28272 - DNA, 245 bp, Glycine max
  Clone ID: 700894162H1
aaatatttcagaatttatgaaggcatatttgcttagtaatataaaatcaacgacaaaggtggaaaacagtgacattgctaaaccttaaaccctaatttttacaatccgagggtgaagagtttgatgggtcagcgaaagaacgacaacaacatcaatcagtgctcctcaagcaaggaagacgctgacatgaataacaaccaccttcgctttgaagaggctgtcgacgagagttccaacctcgacca

SEQ ID NO: 28273 - DNA, 246 bp, Glycine max
  Clone ID: 700894166H1
gtcggtatggtgtcgaccttgcaaagcagttagcaacatgtttgctcagtgttcttggtagttgtgggagtgtaaatatccttttcagataggactccacaaaagttatcgaatattatagtcaaagaacttggaaataatccaaaagtttatatttgggatgggcaagaaccaaacccacaaatggggcatctagcttgggccgatgcatttgttgtcacagcagattcagttagcatgataagt

SEQ ID NO: 28274 - DNA, 246 bp, Glycine max
  Clone ID: 700894171H1
cacctaacaagcttggttggtaagttatctacaatctgcatcatggaaggtgttattctgagaagggtcattccttcggataacagttgcctcttcaatgctgttggctatgttatggatcatgacaaaaagaaagctgctgagttgagacaggttatagcagcaacagtagcaagtgatccacagaaatattgtgaagcatttcttgggaagccaaacacagagtattgtaactggattcttgac

SEQ ID NO: 28275 - DNA, 242 bp, Glycine max
  Clone ID: 700894178H1
gtcagaggctaagctgcgtgcaacagcagcacgaggagcatggtgtgctcttcccagcacttgcaagtggagaattggaggttgttgaggccatggtggaggaagaccccactgtgttggaacacaccactggctgtgaccgcctttctcctctgcatgtagctgctgccaatggtcggatcgaggttctttccatgttgttggataggtctttcaatgttgacgtattgaatcgccataaa

SEQ ID NO: 28276 - DNA, 242 bp, Glycine max
  Clone ID: 700894191H1
aattgaatttcaatttccctaggggcttaatatctccccgcatttgtgcctagcctcattattatcatagtagatattcattccccttatctttctctcttctctctccccgcccaaaccctaactccctaccctattccgctttctctcatccatcatgaaaggaggaaagtccaagaccgaatctaagagagccgatgccaaacttgctgtgaataagaagggcgccgccaccaagacta

SEQ ID NO: 28277 - DNA, 243 bp, Glycine max
  Clone ID: 700894230H1
gcagagtccgcatacgcagtttgcattcgtttgaactctgttctgttgcctccacaaaccaaaccaggcccaagtagtacagtgaaaacgaaattgaagtatagctaggtgaaaggaagtagtcaagtacaagagaatggcgaagtcattgagatcaaagagggagaagaggctgagggctattcggagggagattgttgaacctttctatgacaagaaagaagctgctaagctcgctgccca

SEQ ID NO: 28278 - DNA, 240 bp, Glycine max
  Clone ID: 700894248H1
taattcacccactaaatcacttgagggctgttcgaaatctggttccagggataaaaagtctggatcttcagcacacaaaagactaggagaagccgtagttcagagacttcacaaatcttttaaagaaaatcagtatccagatagaaccacaaaagaaagcttggcacaagaacttggacttacttatcagcaggttgccaaatggtttggcaatacacgttggagcttccggcattcatc

SEQ ID NO: 28279 - DNA, 238 bp, Glycine max
  Clone ID: 700894253H1
ggacagatggtcaagtgtggtggcctgctgagatcctggaagaaacatctgcattatccaaccctggcagtggtggacatgttttagttcagttttatggaaatcttcccagtgcctggattgatccaatgacagatatttcaacttttgaggattcttttgaagacaagagcaacaacccttcagaagattttcaacaggctttaaagaaggccttacagaggaaggcacaacttag

SEQ ID NO: 28280 - DNA, 236 bp, Glycine max
  Clone ID: 700894261H1
gttttccttgtttcccctattattatctcgctctcacaaaatcatggcattctctagtgctttgattctgtggtcgttgctagcaatcaacatggccctgccaaccctcgcaaccgtctacaccgtgggagatacttcaggttgggcaattggtactgattatagcacttggactggcgacaagatcttttcagtgggtgatagtctcgcgttcaactatggagctgggcacacag

SEQ ID NO: 28281 - DNA, 238 bp, Glycine max
  Clone ID: 700894267H1
atttcattgctcagagttcccaaattctccccaagagataaaatgtctctaatcccaaacttcttcggtggccggagaaacaatgtgttcgatcctttctcactggacgtgtgggatcccttcaaggattttcctttcccaaatacgctttcttcagcttccttccctgaattttctcgggaaaattcagcatttgtgagcacccgtgtggactggaaggagaccccagaggcgcacg

SEQ ID NO: 28282 - DNA, 235 bp, Glycine max
  Clone ID: 700894279H1
cctcccttacttaattggactaattttccgtgaccgcattcatcaatggttaaagagatggcccaagaatgccgcaatgattaggcttgctggggaaggaagctggttccatcaatttcaagtagttgctctgtttagagtttctccttttccgtataccatattcaactatgctgtagtagtgacaaatatgaggttttggccgtacttatgtgggtcaatagcaggaatggtg

SEQ ID NO: 28283 - DNA, 239 bp, Glycine max
  Clone ID: 700894281H1
cgcatctccaccctctcccctcaccctcccaccttcccagttgatggccgagcccaatataccccaacagcccgatcccaagaccgtgctagtccagaaaaccattgacaggcccaagccctggctcactggcgccactggatcccataaaaaccacggaaaacacgtcaccgtcaaagagagtgaatccaaggagaagggtattcacagaaagctttcgcagtctgaggagtctggta

SEQ ID NO: 28284 - DNA, 233 bp, Glycine max
  Clone ID: 700894289H1
ctcataaattgcaggtgcagcagcagagagtgcggtaggctcatccgagaccggaagcagcaatggggatcgatctcaaggccggaggtaaaagcaaaaaaaccaaaagaacagcacccaagtccaatgatatctatcttaagctcttggtcaagctttatcgcttccttgttcggagaactggcagcaaattcaatgccgttatactcaagagattgttcatgagcaaggtt

SEQ ID NO: 28285 - DNA, 232 bp, Glycine max
  Clone ID: 700894290H1
cccaatttccattgaacagaaaaggaccacctcatgggttgccaatggaaaaacttattacagatactcaacagtcgtgactaacaaatctaacaacagtctcaattctctcaatctttcaatatccaagctttatggtccaatctggggtgtcacaaagtcaggtgattcatacacattcccatcatggctcagctcattatcagctggcaaaagccttgaatttgtctac

SEQ ID NO: 28286 - DNA, 239 bp, Glycine max
  Clone ID: 700894303H1
ggtttttccagagttgtctttgaagtcctaaaacttgctgcacaaaataacaaactatttcgggtcttctgcacagagggaagaccagaccgaacaggtttgcggttgtcgaatgagctggccaaacttgatgtttcagtgaaacttctaatagattctgctgttgcatatactatggatgaggtggacatggtttttgtgggtgcggatggagttgtcgaaagtgggggcataatcaa

SEQ ID NO: 28287 - DNA, 240 bp, Glycine max
  Clone ID: 700894308H1
gatcgcaaaggacaagcgcggttggatcttcgatcccatagcacccattattgttggatgcaattggaatacggcgtcgtttttggtttggaagtgtttaccgcgtgttcgtttgtggttcgtctctctcattcgaattctttttctctctagttcgaatttctcactcagactctctttttctctgaaacaattctctgaactactgattaaggcagctagtgattatggtgctttgac

SEQ ID NO: 28288 - DNA, 245 bp, Glycine max
  Clone ID: 700894310H1
gtccctttggtcttcatcttctgttctgatccaggtatggcttctaaacgcatcttgaaggagctcaaggatttgcagaaggatcctcctacctcatgcagtgcaggccctgtggctgaggacatgtttcactggcaagccacaatcatgggacctgctgatagcccatatgcaggtggtgttttcctagtttcaattcattttcctcctgactatcccttcaagccaccaaaggttgcttttcg

SEQ ID NO: 28289 - DNA, 235 bp, Glycine max
  Clone ID: 700894336H1
ggaagaagacgaagaagaatccaaaagcaatcccatctgtgtgtttgcacatcagaagggagggctatcaaactcaaaggattgctctgaatcggtttagtcttcttcgtttttcttcaaattcctcgtgacagatctaatctaatcaggcttttgggggtgtttcagacattgcatgcatatgggagcagtggttgtgttggatgctataaaaggcctacactgagtgctactg

SEQ ID NO: 28290 - DNA, 150 bp, Glycine max
  Clone ID: 700894341H1
attggtttgttcaagacctggcgtatagattctagtcagactagtcttaacaatggtttttatggatgtggtgacagaaactattatcacatttttctggttttctttgttgtcctgtgattttattataaaggaggagtctattgtggg

SEQ ID NO: 28291 - DNA, 242 bp, Glycine max
  Clone ID: 700894342H1
ccgagaccttggtcatgggagtggcacctgttaaggctcaatttgagggtgctgaaatgggtgtgcccgctgagaacgatggctgcaaatgtggaccaaactgctcctgcaacccctgcacttgcaagtgaggtgttgggagagcaagcttcaagcagagatagcccttaattaggaataatgataaactattaatgtgtagctaaaaacttatgtattatgtctgtgatggttttcgtgca

SEQ ID NO: 28292 - DNA, 112 bp, Glycine max
  Clone ID: 700894349H1
gtaggatgttcgtggggacgtggaatgttggaggaaagtctccgaacgagggattgaacttgaggaattggttgatgttgccttcaccagctgatatctatgtcattgggtt

SEQ ID NO: 28293 - DNA, 241 bp, Glycine max
  Clone ID: 700894357H1
gattgacagtatcagagacgaggttcggcttctgcaatcaatctacgagggattgcaggaagatccaagggaagtgaagggatacagaaaagaggacttcaggattctgtgggtcccagttgtggatgagtggaatcttctgcacagggccgagtatgataacctgaagcttgaaatgccgtggtatgtggcggaatacttctaccccttggccggaataaggctcataagggaggacttg

SEQ ID NO: 28294 - DNA, 234 bp, Glycine max
  Clone ID: 700894382H1
catgactttcaagcgcaggaatggaggtcgcaacaaacacggccgcggccacgtcaagttcattcgatgctccaactgcggcaaatgctgccctaaggacaaggctatcaagaggtttctggtgaggaacattgttgaacaggctgcagtcagagatgtgcaggaggcttgtgtctacgaacaatacacgcttccgaagctgtatgtgaagatgcagtattgtgtttcctgtgc

SEQ ID NO: 28295 - DNA, 233 bp, Glycine max
  Clone ID: 700894384H1
agaaggaagcacaggaagagtaacgtgctcgattttatccatagaccacaccaatatgttttacagagtctgcgccgtttgcgaaagaactatttccgaccccactttcgtctgccacccctccaaccctccctccaaacgactctttcgcatcctcatgtcggttgccacagacacacaggttctcactgtcgtctgcttcgacagggttgccaggctcctcttcggctgct

SEQ ID NO: 28296 - DNA, 238 bp, Glycine max
  Clone ID: 700894389H1
ggtgttgaaggccgtcgttcacggcgatgaaaacctattcaacagctacccagaattgcaagatgccttggtttgggtctactttcactcaaacattccagaattcaacaaggtggaatgttggggcccactgaaggaagcgtcacacccacaggtggggtccaggaggaggggttggcaattccacagccatgccaagaagaatgccaatgttgctttccaccgcttacgttgagcc

SEQ ID NO: 28297 - DNA, 183 bp, Glycine max
  Clone ID: 700894393H1
gggatgcatcttatagctccacggctgaacttgtcactgtggatgaggaagagggtcctgtcacaagcgttgcctgggctcccgatggatgccatgtagccatcggtttgaacaactcgcatgtcctgctctgggattctaatgtttctaggctggtaagaacattgagaggtggacatcaac

SEQ ID NO: 28298 - DNA, 247 bp, Glycine max
  Clone ID: 700894405H1
cttagcggccattatcatcactgctgtgattggtctaatagattatcaatctgcatacaaattatggaaggttgacaaacttgatttcttggcctgtttgtgctccttttttggggttctgttcatttcagtgcttttaggccttggtatagcggttatcatatcagtcttcaagatcctgcttcatgtcactcgaccaaacactttggttttggggaatataccaggaacacaaatattccacaac

SEQ ID NO: 28299 - DNA, 252 bp, Glycine max
  unsure (1)..(252): unsure at all n locations
  Clone ID: 700894412H1
aagggatnnacnntttanactcctctnntcttcccggtggttgcatcgctggttgaatcttngatcagaaggttgnttcagagntnccccattcatnggaancactatcatnggggttaactngaaaggaggtgtcggtctcggagccgaatctncgaaanagcacgngagtgtatttgncaaccgagcattggncaaaatcatcagtcantggtaatgtatacgtgtgtcggcctggatngggngtgattt

SEQ ID NO: 28300 - DNA, 246 bp, Glycine max
  Clone ID: 700894421H1
ctactctcacacactgcaacaacgaaaaccaaagaagaaaaaagagtttcttctttccgaaatccaagcagtagggttagggtttttttccgatctcaatggcggaggaaccggagagcaccgtcaccaccggcgcccccgacgaatcgctgctcgataagatcaccgagaagcttcacggccacgattcttcctcttcttcctcttcggattccgattccgaaaaaaccgttacttcgtccgtta

SEQ ID NO: 28301 - DNA, 246 bp, Glycine max
  Clone ID: 700894423H1
gtcttgttggtaaagaaagagaagaaaagagtggaatcgaagacgaagacgaagatggaggacgcatcagcatcaaagttcatcccacaccaaatcggaggggtccaaaacgacgtgcttcgatttggtctccatggagtcaagagcgacatcgttggttcccaccctcttcaatcttcactccaatctacaaggagaatggatgaagcgatgaagaagcaatgcaaagttaacctgtacggaact

SEQ ID NO: 28302 - DNA, 246 bp, Glycine max
  Clone ID: 700894424H1
gcgaactgtctgaatcgactgtgttatggtggatcaatgagttggaatatggtgaatgtaggagctttggtactattcaaggggcactgggttgatttcaggtcaattgtaaggtctttcttgccttttattgtggttgtttgcttaggtgtttttatggttggatggcccttcttacttgggctactatccttctctttactcttaatagggtggtttatattgggtacttacctatttagaaac

SEQ ID NO: 28303 - DNA, 250 bp, Glycine max
  Clone ID: 700894445H1
cttatacgcggatgatctgattgaagtcttgaagaaaaagcatgcttctggaacatataaaaacctagtattttatctggaggcatgtgaatctgggagtatctttgaaggtcttcttcctgaagatatcaatatttatgcaaccactgcttccaatgcagaagaaagtagttggggaacatattgccccggggagtatcctagtcctcccccagaatatacaacctgtttgggtgacttgtacagtgtt

SEQ ID NO: 28304 - DNA, 250 bp, Glycine max
  Clone ID: 700894446H1
tggtgatagttgcggacggccaggtaacaagaagtattgacactgagcatgggagactaagtccacaggagcagagcactgtggatgccattgttgaggccagtaaatttcctctttcaatcatattggttggtgttggagatggtccttgggacatgatgaaggagtttgatgacaatatcccagcccgggtctttgataattttcagtttgtgaatttcacagaaattatgtcaaagaatattcctcc

SEQ ID NO: 28305 - DNA, 243 bp, Glycine max
  Clone ID: 700894455H1
gtctgaggaaagtgagtgagagaaagagatcgcagacacagagcagaatggcttctacccaatgtttcttgcaccaccatgctcttaccacccctgccagtgccagatccccatcactacgcatcttggttagcaccaagcctaaccagcttgtttgcaaggcacagaaacaacaaacaccacaagaggatattgatgtcagcccaatctctcgccgtttagctctaactgtgctcattggtg

SEQ ID NO: 28306 - DNA, 149 bp, Glycine max
  Clone ID: 700894464H1
tagaaaaccaccatgggtattaattagtcttcctttttctagaattttgctttatctttcaatgttatggggggagctagtgtgaatccatctgtgcttgcattgtacaatagttctttcaaatatattctactctaaagttgtccacc

SEQ ID NO: 28307 - DNA, 237 bp, Glycine max
  Clone ID: 700894469H1
gggacatgcgtcaaactgttgctgtgggagtcatcaagaacgttgagaagaaggatcctaccggagccaaggtcaccaaggctgcccagaagaagaagtgaatcgtgcgggctggttcatcaggggatgttggttacaataaatgttggtttcttttctgtactcttgtgtcttcttttctaggtagcttgtttttcggacaaagtttgaagtctccaccatcatctcgcaactgtt

SEQ ID NO: 28308 - DNA, 237 bp, Glycine max
  unsure (1)..(237): unsure at all n locations
  Clone ID: 700894470H1
ccggcgaacgcgaagatctcgaagggacgcgaaggagacggtgcaggaatgcgtgtcggagttcatcagcttcataacgggtgaggcgtcggacaagtgccagagggagaagcgcaagaccatcaacggcgacgatcttctctgggcnatnaaaacncngggtttcnaagtnncgtggacctctgaagatttacctccagcgttccgcgagatggagggagagaagaccgtggccgc

SEQ ID NO: 28309 - DNA, 245 bp, Glycine max
  Clone ID: 700894478H1
catattttcttcttttcttcttatcttattgttgcagactttcgggtcatcattgagcttgctgtagtgaggtgttcaatctgaaatttccttaaccaaattcatggcggaactgatagggcctcgcttgtacagctgctctaattgtaggaaccatgtctcactccatgatgatatcatttccaaggcttttcatggaagaaacggccgagcctttctgttttcccatgcaatgaatattgtca

SEQ ID NO: 28310 - DNA, 246 bp, Glycine max
  Clone ID: 700894479H1
cggtccttcagtccattttcctttccatttcggatctgataggaatagatttcgtcagtgttgaaatcacgagaaattcatggctgctccaccggcaagagctcgtgcggattacgattatctcataaaacttctcttgattggcgatagtggtgtcggaaagagttgccttcttctatgattctctgatggttctttcacaactagtttcatcacaactataggcattgattttaagataagaac

SEQ ID NO: 28311 - DNA, 241 bp, Glycine max
  Clone ID: 700894493H1
caacttctagggttttctgttgcctactcttttgctgctcccattttttcaatccatttgcatttgcatttccctcttccactcccttcgttccgtctactgacttctgagtaatgcggggacggcagagatagggattgttttggctgtcagattactttcttttgaggtttatgatcgtgttgggttttcactatgagtggtgttcctaagagatctcatgaggatgctgttcatcagt

SEQ ID NO: 28312 - DNA, 248 bp, Glycine max
  Clone ID: 700894512H1
aagcttgctactgagtttccacactgcataccttaggtcttccgaattcgaagttaatttgcaagatggctaaggaaaaggctcagatcaacattgtggtggttggtcatgtggaccctgaggaggcaaccaccattaacgagctgaagaagcctgttgtggagaaagaagctccagggcatgccatatgagggcatgcacgtacggcctcggaggggaaccagaaaattatgttacaaaataatctg

SEQ ID NO: 28313 - DNA, 247 bp, Glycine max
  Clone ID: 700894514H1
gggagtgatgctgagccacaaggggctggtgaccagcattgctcagcaggttgacggtgataatcccaacctctattaccactgccacgacaccatcctctgcgtgcttcccctctttcacatttactctctcaactccgttcttctctgtggcttgcgtgccaaggctaccattctcctcatgcccaagttcgatattaactccttgcttgctctcattcacaagcacaaagtcatattgcccctg

SEQ ID NO: 28314 - DNA, 250 bp, Glycine max
  Clone ID: 700894518H1
gcgtacgacaaggccgcgtacaagctccgaggtgacttcgccaggctcaacttccccaacctccgacaccagggttcctccgtcggtggtgacttcggggagtataagcctcttcattccgccgttgacgccaagcttcaggccatttgcgagggcctggctgagctgcagaaacaggggaagaccgagaagcctccgaggaaaacgcgatccaaactcgcttctccgccagagaacgcaacaacaacga

SEQ ID NO: 28315 - DNA, 245 bp, Glycine max
  Clone ID: 700894541H1
gttggacggcgttctcctcggcatgtgcaaccctctcctcgacatctctgccgtcgtcgacgacgctttcttgcaaaaatacggtatcaagttgaacgatgcgattctcgccgaggataaacacaaacctatgtatgaagaattggctaacaatcctaatgtggagtacattgctggaggtgctactcagaattcaatcagggttgctcagtggatgcttcaagcaccaggtgcacaagttatat

SEQ ID NO: 28316 - DNA, 243 bp, Glycine max
  Clone ID: 700894546H1
ctcttccaatactgatacggaagggtggtatattagccaggtctgctctagagctaaatcttgttcttcagcagtcctaactgatgctgatgttgtacgaacttaaagccaaattgtgaagaagtaacatggctcaatatgcttttaggcaggattgtgcttaaaacgtgaaggtttcatgttgggttattgagatcatagcctacaattttgtcttgatgatttgctctatagctgtcatca

SEQ ID NO: 28317 - DNA, 244 bp, Glycine max
  Clone ID: 700894552H1
gaaatggactctctccaccactctcatcgtcactgcacttggagcaattttgcacgtaatatccacttcactgcttggtataacagcaattaccatggcaaacaccattgctggtgaagaaacagtgcataaggttgcttcacttttgcttgtatttctgggtggtagttatataatgttgtttctgatgggaaagggtggccatagtcattcacacaaccaacccatggagaaatggctgtag

SEQ ID NO: 28318 - DNA, 243 bp, Glycine max
  Clone ID: 700894570H1
ctttcaaaagggagaagaaaaggaaaggaaacaaaacgcacaaaggattattatagcaatggcagaacaaaaccaaaaccagacaactgaagctggaaggcaccaagaggttggccacaagagccttctccagagtgatgctctttaccagtatattctggagaccagtgtctacccaagagaacctgaatccatgaaagaactgagagagttgacagcaaaacacccatgaacatcatgaca

SEQ ID NO: 28319 - DNA, 241 bp, Glycine max
  Clone ID: 700894572H1
ggcggctcttgatgttttcactgaggagccaccacccaaagacagcaagttgattctgcatgagctcgttactgcaacacctcatcttggtgccagtaccatggaagctcaggaaggtgtggctattgaaatagcagaagctgttgttggggcattgaaaggggagcttgctgctactgcagtcaatgcaccaatggttccctcagaggtgttaacagaattgaaaccatcattgatcttg

SEQ ID NO: 28320 - DNA, 240 bp, Glycine max
  Clone ID: 700894584H1
ccaaaatggatgtaaaggcaatgccaacatttttgctgctgaaggacggtgctgcggtggacaaggtggttggtgccaatccagaagagataaagaaaaggatagatggggttgctgagtccactcgtgtctcactggcatagttaagcatctgtatgatattctactgttgcaagttgcaagatatgtgcttgtggtcctgcactgcactatggcatctgagtcaaactttttgtgatg

SEQ ID NO: 28321 - DNA, 238 bp, Glycine max
  Clone ID: 700894588H1
ctctttccaatttttgttgaatgtaaccaacaattaaaatggaatggttatgttgtatttgtagtttgagtgttgacatgatataacatggagacattgcattctatctctgtaatcttgaaactctgcatccgtgtaatattacactgtcatttttaagcatattattgcataagatgtggttgatgtatgcttgtgtaacattgttttgtctgcctttgtgtgtgttattcgatga

SEQ ID NO: 28322 - DNA, 239 bp, Glycine max
  Clone ID: 700894589H1
attgatgatcatcacacaaatgaagacgttgcccttgctattggaacagctttgctgcatgcccttggtgataggaagggtattaaccggtttggtaacttctctgctcctcttgatgaagcattgatacatgtttcactggatttgtctggccgaccacatctaagttataatttggacatacccactcagagggttgggacatatgatactcagttggtggagcattcttccaatcc

SEQ ID NO: 28323 - DNA, 238 bp, Glycine max
  Clone ID: 700894592H1
gtcactctccacaacttccgatcgccggcgtcaactctccggctactttcttatctctcaatgcacgaatgaatgacaacgccttcactctgtaaatcaacttcacagtcactgtgtcgatcaccatgctctctcgtttaattcccaaaccctctcatctccgtcgctttctctcttttccgttgaagccttcccacgcgcctgcgaatccctacttcaccgtcgtgttcccaaacac

SEQ ID NO: 28324 - DNA, 261 bp, Glycine max
  Clone ID: 700894609H1
ataccttcaagtccttccatcttcttaatgctttaagcgacctcctgatgcttcctaaggatatgctcttaaatgcatccatcaggaaagaggtgtgtccaatgtttagtgcatcgctaatcaagaagattctagacaattttgtcccggatgagttttgccctgatccaattcccactgatgtttttgaagctctggactcacaggatgatcttaggatgaaaatgagtctatcagcaacttcccctgcaatgcagctcc

SEQ ID NO: 28325 - DNA, 259 bp, Glycine max
  Clone ID: 700894628H1
gccatttgaggtggctttcatgagaaaaagagaaacatgaaggagcatgctgccgatcaagctagaaaaggaagacattctgaaagcccggctaataccaatgttttagggattgttgtattatatctaagttgccttacttgtttatatcataatattaaggcatcccttttgcctctagactttgttttcttaccattgttaattttgctcgttttgtaatgttgtagctttcctcattgttattgcttgaactttt

SEQ ID NO: 28326 - DNA, 114 bp, Glycine max
  Clone ID: 700894630H1
tagagagtgtgtgtgagagagaatatatattatattccctttgtattatctcggattttactagtattgttatcaagaagaagggtgaatcggattgcgaaagttggcgtttgg

SEQ ID NO: 28327 - DNA, 115 bp, Glycine max
  Clone ID: 700894633H1
atttgtatggataatgttaagctaatgtttgtaatgtgattttattgaagttaatgttttctcaacatgttgtttggtagcaatgagaaaattgatctacgatattatttaagtc

SEQ ID NO: 28328 - DNA, 258 bp, Glycine max
  unsure (1)..(258): unsure at all n locations
  Clone ID: 700894637H1
tttctccaacgctatcgagccaaacccaaacgttaactcagaagaagaccnnnnnnnnnnnnnnnnnnnnnnnnnnnnccgaaccactttcaactctccaacgtcgccacacgattcatcgcgtttcgcaggctgcaatggcgacgttcgaactgtaccgcagtacgacgatcggaatgtgcctgacggagacgctggacgagatggttcagacggcactctcagccccgagctcgcgattcaggttctggtccattc

SEQ ID NO: 28329 - DNA, 261 bp, Glycine max
  Clone ID: 700894648H1
gaaagaagagctcaaaaagtctaaggttattaaaatagactctcaaaaatcatgggaacaccacatctcttatgctaccaatcaaaagtaccctattgtagttcatttctctgctttctggtgtgtcccttctttagttatgaatcctttctttcaagaattggcctccacttatgaagatgttttgtttctgacgttggatgtggatgaggttaggaaattgcctccaagatggaaatcaaagccatgcccacctttctg

SEQ ID NO: 28330 - DNA, 259 bp, Glycine max
  Clone ID: 700894653H1
ctgcttctcactgatctccattcccattccatggcttccactgaatcatcccctttcaagaaaattcagattcaaagggatgacactacatttgacgcatatgtggttggaaaagaggatgctcctggaattgttgtgattcaggagtggtggggtgtggattacgaaattaagaaccatgccgtgaagatttctcagcttggtagtgggtttaagctcttattccagatttatacagaggaaaggttggtctggatgt

SEQ ID NO: 28331 - DNA, 258 bp, Glycine max
  Clone ID: 700894655H1
ttcctgtattaatttttctctccctgagattaccaagctctgcaactttgcttctcaacatggagtatcgtctcctacccatttttactttactcaatcttgcactggtggcaatccatgctgctttacctcctgaagtttactggaagtcggtgcttcctactacgccaatgccaaaagccatcactgatatcctttaccccgattgggtggagagaaaagtacctcagtgaatgttggaggcaagggcgtaaagtg

SEQ ID NO: 28332 - DNA, 260 bp, Glycine max
  Clone ID: 700894656H1
caagaagctcaactcagctgcaacgagtcttcaaaagcaacttcctggtcttaagattgcggttttcgacatttacaagcctctctatgaccttgttcaatccccttcaaaatctggttttgtggaggcaaacagaggatgctgtggtaccgggactgtagagacaacatccttgttgtgtaatccaaaatcaccaggaacttgttctaatgcacacagtatgtgttttgggacagtgtccatccttcacaagctgctaa

SEQ ID NO: 28333 - DNA, 258 bp, Glycine max
  Clone ID: 700894658H1
ggcacaaattatgcttggaatggtgcaagcacctcaagtggtttcaaaagttcggccaatggtttcacagagcaatcagcagtcagtacaactaatacaaaaaccaaatattcagcctgctccattattgcctgggcacggtggtgcacaggatcaagcaggtgtatctcaaacccaaattcctctgaggaaacaccagaaccaaccttcaggccaatttcatctgctgttcctgcaatgagtcatcaatctcagccc

SEQ ID NO: 28334 - DNA, 258 bp, Glycine max
  Clone ID: 700894662H1
ccgcctgctgtatgacaccaaaggccgattccgtcttcactcagtcatagatgacgaggctaagttcaagctttgcaaagttcgctcagtgcagtttgggcaaaaaggtatcccatacttgaacacctacgatggtcgcactatccgctacccagaccctctcatcagagctaatgacaccattaagttggatttggaggagaacaagattgcgatttcatcaagtttgatgttgggaatgtagtcatggtgacaggt

SEQ ID NO: 28335 - DNA, 255 bp, Glycine max
  Clone ID: 700894678H1
tggcattcagaaccaactatgaggattctatagctgaagtagaatccaacgttgaggctcgagaacataacagcaggttatggaatcacagtgcttacaaaagcgtggaccaagaggctgaggcgtttattcagtatgagcataagaggatggaattagccaggcttatgtcaacaagggctgtctgagcctctcttgaaatatatataatatattatcataggggcttcatgtgcattgttacatattattgtg

SEQ ID NO: 28336 - DNA, 265 bp, Glycine max
  Clone ID: 700894681H1
caagtggtgaagaaggagaatccaaagtaacagagcaaaccagcaacaagaatggcaaatccaacgcaaataaaaacaacaacagagaaacaacctctgcggagacttccaaggataattcgaaaggctccgaggttcaaaatcagaagccagagtacattcatgtccgagcgcgtcgtggacaagccacggatagtcatagcttagctgaaagagttggagggagaagattagtgagagaatgaagtatttgcaagatttagta

SEQ ID NO: 28337 - DNA, 260 bp, Glycine max
  Clone ID: 700894683H1
ctggaaggacttgcccacgaagattcaccacaaggtctccgagaattggatcagcgccactcttttgctcggtcccctcgtcggcacctacgcgtatgttcaaaactacctggaaaaggagaagctggctcacaggtactgagctcttgcaagagctgattggataaccttctagtttgttgccttgatcttgtttagccacccaataatgtgcactgttgaaacttgctctaccgtttggttttgatatgtctgagttt

SEQ ID NO: 28338 - DNA, 255 bp, Glycine max
  Clone ID: 700894690H1
ggccaacaagagactgcaaatacagcaaagacaaaggagagccagttcttttcctactgctatagttaccggcagatgcaaagacaaggtttacagttttgttcgcttggctgagctatattatgctggaagccatggcatggatattcaagggccaacaagagactgcaaatacagcaaagacaaaggagagccagttctttttcaactgccagtgaatttcttcccatgattgatgaggtgcaccatcaatta

SEQ ID NO: 28339 - DNA, 260 bp, Glycine max
  Clone ID: 700894696H1
ctgaggttactgatgctacgctgtttgcatgcttttctgtctatcccacttgttcagatgctagggttatgtgggatcagaagactgggcgttcaaggggatttggatttgtttcattccgtaatcaacaggatgcacaaagtgctataaatgatttgactggtaagtggcttggaagtagacaaatacgctgtaactgggcaacaaaaggtgtggtggtactgaagagaagcaaaactcagatgcaaaaagtgtggtgg

SEQ ID NO: 28340 - DNA, 260 bp, Glycine max
  Clone ID: 700894704H1
ctctgctcgtgcctctagggttatcatatctccatttccatttcctctctctcagtttccaagaatcttaagctatgggaaagtcttacccaaccgtgagcgctgattaccagaaggccgttgagaaggcgaagaagaagctcagaggcttcatcgctgagaagagatgcgctcctctaatgctccgtttggcatggcactctgctggaacttacgacgtgagctcgaagaccggtggtcccttcggaaccataaagcac

SEQ ID NO: 28341 - DNA, 257 bp, Glycine max
  Clone ID: 700894709H1
atggaatccatggttccactccccggaatctatgacccggatttcattgctgccaaccaaggagaccgtgccactaacgtaatcaggggcacaaagaaagaacaagttcaacaaatcatcaaagacattaaggagttcaaagaaagcactaaggttgacaaggtggttgtcctgtggacagccaacacagagaggtacagcaacgtagttgtgggactaaacgacaccatggaaaacctctttgcttccttggacag

SEQ ID NO: 28342 - DNA, 257 bp, Glycine max
  Clone ID: 700894714H1
gagggacccaagggtggtccgggaatgcctgagatgttaacaccaacaagtgcaataatgggtgcaggtcttggaaaggaagttgcattattgactgatggaagattttcaggaggttcacatggatttgtggttggccatatatgtcctgaagcacaggaaggtggtccaattggcttgattcaaaatggagacgtaatcaatgttgacatcaagaataggagaattgatgttttggtatcagatgaggagatgga

SEQ ID NO: 28343 - DNA, 264 bp, Glycine max
  Clone ID: 700894716H1
tttcttcgcttcttctgtacagcacccaagattgaagatgatagaccttgcgcgcgtgcagaaggagctcgtggaatgcagcaaggacgcggagggatcgggcatcaaagtctgccccaaaagcgacaaccttgttctcttgatcggcaccattcctggccctgtcggaactccttatgaagggggcattttccagattgatatcacattgccagatgggtacccgtttgaaccccccaagatgaagtttaaaaccaaagtttg

SEQ ID NO: 28344 - DNA, 258 bp, Glycine max
  Clone ID: 700894719H1
gtggaaagggaggcaagggtttgggtaagggaggagccaagaggcacaggaaggtgctccgcgataacatccagggaatcacaaaacccgccattcgccgtttggctcgcagaggcggcgtcaagagaatcagtggcctcatctatgaagaaacccgcggcgtccttaagatcttcctcgagaacgttattcgcgacgctgttacctacaccgagcatgctaggaggaagactgttaccgctatggatgttgtttatg

SEQ ID NO: 28345 - DNA, 253 bp, Glycine max
  Clone ID: 700894722H1
actacctctgccaattcttggtcaaaatgggggtcacctaatggtaattttgattggccagttggtgcttctgatgaaataggtaagctaagaaggtcatcatcatttgagcttgggaacaatggtgaggagcctgatttatcttgggtgcagtcacttgttaaggaatcaccagctgacgttaaaggtaaatttgcaaccactgtctcaaatgtttcagcagcagcagctggatcctccagtgagggatcaa

SEQ ID NO: 28346 - DNA, 139 bp, Glycine max
  unsure (1)..(139): unsure at all n locations
  Clone ID: 700894732H1
ctagggngaattattttggcacacgttagcctncngcacctngttgagnaacngttgggggtcnttgnaaccctnnttttaaaaatgttnaaggggagcaaggaaccataaggtnccccgntgggnccacaaacccttt

SEQ ID NO: 28347 - DNA, 251 bp, Glycine max
  Clone ID: 700894738H1
agcagaagcatgttgaagagttagttcgattaccggattgcttcctttgtcacactccttcccctgaggctggtcctgtttgtccaactcctgctctttccaatggcttcgttacatttggtagttttaacaatcttgccaagattacacccaaggtactgcaggtctgggcaaagatactatgtgcaattccaaattctcgtcttgtggtgaaatgtaaaccgttttgctgtgatagtgtgagacagagg

SEQ ID NO: 28348 - DNA, 193 bp, Glycine max
  unsure (1)..(193): unsure at all n locations
  Clone ID: 700894740H1
gccgtcgccgccggctacgcctccgccgacgacgccgctcctcagaactccgggcgccaccgcgagcgcgagcgaanagcgaggagttccgtggacggaggaagaacacaagttgtttttggttggattgcagaaagtagggaaaggtgattggagaggaatctccaaaaactacgtcaaaacgcgaactccg

SEQ ID NO: 28349 - DNA, 252 bp, Glycine max
  Clone ID: 700894751H1
ctctgctccgaagactccgaagcggagaacctgcttacaccgaagtccacgagggtctctatgtcggtggctggccatcgtcgcctcagaagctgccacctggcgatcccgccatcgttgattgcacgtgcgagttcccgcgtgtgaaggatttcactacggggttgccttaccggtgctttccgacgtgggacacgaggtcgcctcaacccgctgatatcgaatccgctgttaagtgggcatctcgacaga

SEQ ID NO: 28350 - DNA, 248 bp, Glycine max
  Clone ID: 700894757H1
attttgcgaggcaatcccattctcatcttccatttccaccatcaatactattttcttgtcgttgagaagcttcgcgaacgaaagcaaagaaccctagaccgtcacagaaccattccatagccatgtctggtgttggccctctttctcaggattgggaacctgtcgtcctccgcaagaaggctcccaccgccgccgccaagaaggacgagaaagccgtcaacgccgcccgccgctctggcgccgaaatc

SEQ ID NO: 28351 - DNA, 247 bp, Glycine max
  Clone ID: 700894758H1
cagaaggttggaacaatgcctaataaaataaagcattgtttagatctcgtaaagcttacgaggtttaatattttatctttattaaccttacagtatgtggcgtgagagtttgagaatcatgctgcagaagggtttagagtgatagttgcatgagtattttaatttctcaagatactgaattggaagaaagtttccaacataggctgttgaatctttatgtatcatgcatgcttaataatctattcaa

SEQ ID NO: 28352 - DNA, 256 bp, Glycine max
  Clone ID: 700894765H1
cgattcctcagttttgaagaaaattggatgctgctcaaactagatgcatcatctatggcagttggtttttgtagactgtttcatcttgtaaatgcctacactggaatcgtgatatcatgtagaataaggctagtcttgcatattgttttgaatttacaatttacaagcatcatccatacataggattatgtttccgtgaaacggtcattctaaagacgtgcttgaaacaaataggtctacatcaaagttcatatag

SEQ ID NO: 28353 - DNA, 251 bp, Glycine max
  Clone ID: 700894766H1
atctgatctgagagaatggctcctcggtctagcagcaaggacgcccaagaccttttccgcgctctttggtctgcttatgctgcaacccccactaatctcaagatcattgatctctatgtcatctatgccgtattcaccgctttcatccaggttgtttacatggctttggttggatcatttccatttaactccttcctatcaggagtactttcttgtgtaggaactgctgttcttgctgtttgtctcaggat

SEQ ID NO: 28354 - DNA, 245 bp, Glycine max
  Clone ID: 700894771H1
ctgtagcgacccgagggggcttcttttagtctacgattacatccctaacggaaccctagcggaacacctgcataaccgtaagggctcgctgacgtggcaggtgaggctcgacatcgcgttgcaaacggcgttagcgatggagtatcttcacttctcggtggtgccgccgattgtgcacagggacataacgtcgtcgaatattttcgtggagagggatatgaggattaaggttggggattttggac

SEQ ID NO: 28355 - DNA, 247 bp, Glycine max
  Clone ID: 700894777H1
atgatttgttgctgtaacaagatggatgctactacaccaaagtactccaaggccaggtatgatgaaattgtgaaggaagtttcttcctatttgaagaaagtaggatacaaccctgacaagattccttttgttcctatatctggttttgagggagacaacatgattgagaggtccacaaaccttgactggtacaagggtcctactctgctagatgcacttgaccagatctctgagcccaagaggcctt

SEQ ID NO: 28356 - DNA, 246 bp, Glycine max
  Clone ID: 700894783H1
ggatttgctattggtaatggattaaccaatcctgaaattcagtaccaggcgtatacagactacgcattagacaggggactaattaaaaaggctgaatataacagtatcaacaagttgatcccaccatgcaagcaggccatagaagcttgcggaactgaaggtggagaaacatgcgtatcttcattatatgtttgcaataagatattcaatcggatcatgaccattgctgatgatgttaattactat

SEQ ID NO: 28357 - DNA, 241 bp, Glycine max
  Clone ID: 700894788H1
cgagtacctagctgctgaggtgcttgagttggctgggaatgctgcacgtgacaacaagaagaacaggattattccgagacatgtgctattggctgtgaggaacgatgaggagttggggaaattgcttgctggtgtcaccattgcacatggtggtgtgcttccaaacattaaccctgttttgttgcctaagaagacggagagggctgccaaggagcctaagtctccatccaaggctactaaa

SEQ ID NO: 28358 - DNA, 249 bp, Glycine max
  Clone ID: 700894795H1
gttgtgaacaagttcaaacccaagaccccttacgttggtagatgcctgctcaacacaaagatcactggggatgatgctccaggagaaacttggcacatggtcttcagcaccgagggagagattccttacagagaaggacaatcaattggggtaattcctgatggtgttgacaagaatggcaaacctcataaactgagattgtattctattgctagcagtgccattggtgattttggagattccaagact

SEQ ID NO: 28359 - DNA, 251 bp, Glycine max
  Clone ID: 700894808H1
gttgtaactcgttcttcttcttttgttgttctgtgtttgtgtttgttttttctctcacctgaaaatgtcttgctgcggtggtaactgtggttgcggaagctcctgcaagtgcggcaacggctgcggaggctgcaagatgtacccagacttgagctacactgagtcaaccaccaccgagaccttggtcatgggagtggcacctgttaaggctcaatttgagggtgctgaaatgggtgtgcccgctgagaacg

SEQ ID NO: 28360 - DNA, 250 bp, Glycine max
  Clone ID: 700894836H1
aagagagagaaagagatacatagttagagagagagcagagacaccgttcggtgctccgctgaattcggttgtggcccctgcgctccgctgcaattttacactcaaaaggacctcatgtctaacatagaggagaacaaagatctgggacagatggacgtggatgcatctgatgagtcagctaacatgccatcaccccaaaagcaggaggagtctgtaaagaaaaagtatggaggaatgctgcccaaaaagc

SEQ ID NO: 28361 - DNA, 245 bp, Glycine max
  Clone ID: 700894857H1
aaccgagttaactcactaacaatcacatggcttctgaactcaccaaactgatccttccatggaaagttcgcttactcatttccctcctttccaccctcgccgacacctctcgccgctccaacgccaccatcaaccgccgcctctttaacctcgctgaccgccagtcactgccaaaccccacccccgtcgacggcgtttcctcctccgacgtcaccgtcgatcccgcccgcaacctctggttccgc

SEQ ID NO: 28362 - DNA, 241 bp, Glycine max
  Clone ID: 700894873H1
attgatgatcatcacacaaatgaagacgttgcccttgctattggaacagctttgctgcatgcccttggtgataggaagggtattaaccggtttggtaacttctctgctcctcttgatgaagcattgatacatgtttcactggatttgtctggccgaccacatctaagttataatttggacatacccactcagagggttgggacatatgatactcagttggtggagcatttcttccaatccc

SEQ ID NO: 28363 - DNA, 243 bp, Glycine max
  Clone ID: 700894881H1
tgctgagatgggtaccatgttccctgaaaacagtggttatgtggtttgggtttcatctgctttgggtcccttttgggggtttcagcaaggttggatgaaatggcttagtggggtgatagacaacgcattataccccgttttatttcttgactatctgaagtcaggaatcccggctttaggtggtgggtttcctagagttgttgcaacatggggtctgactatagttctcacttacttgaacta

SEQ ID NO: 28364 - DNA, 241 bp, Glycine max
  Clone ID: 700894883H1
aaaaaaagtaaagaatttgctttgcgaggaagtaagtaggagatgctctgaactttcaaatttgtacaacccctaggaagagaagaagaaggttcaaaatcaatccatttttcatttcgaaagatcgtgatcgcaatgtccctctccaccgtgaggcagcggcgctcggagccgtctgatccgtcgccatcagaaccgtacacgaagctggacaagcccgagaaagcggaggagaaagacg

SEQ ID NO: 28365 - DNA, 238 bp, Glycine max
  Clone ID: 700894887H1
gccaaatatggcattgatgggtcagcttttcctgaataaaaccatagagtggtcagagtttcaggatgcagtggttgaaggtcaccaaaatagacaaggcgaaccaaggctgaggaagccaaaacaatcaatatatacatatccagctcctgattgcatgtgccaagcttagtgactagtagtatacttaaattattattgctcacgatgtagcctgtgtattttatagttcggtgtc

SEQ ID NO: 28366 - DNA, 239 bp, Glycine max
  Clone ID: 700894894H1
cttctgtagttaatttgcttcccttttttcacactcactctcactaaatggcttcctctgttgctttagttttgggtctatgtctagcactcaacatggttctgccgacacgtgcagctacccacacagtgggagacacctcaggttgggcactcggtgctgattacagtacatgggccagtggcttgaaattgaaagtcggagatagtcttgttttcaattatggggctggtcacaca

SEQ ID NO: 28367 - DNA, 261 bp, Glycine max
  Clone ID: 700894906H1
cttgtttattatcgtgtatatattgagaagatacatgcctatctatcatcatttcgttagcaaatttctcaaactttctctcaagatctgaaaccactctgatggagcaaagtaaggagaaaaatgctccttggttatcagtgccacagtttggggactgggatcagaagggacaagtgccagactactctctagatttctctaaaattcgggaaatgaggaagcaaaacaagacaaatatttcaagggcaagtcttggta

SEQ ID NO: 28368 - DNA, 261 bp, Glycine max
  Clone ID: 700894907H1
ggtgaaccaaacacaaaattccatccaccacttctcttttcaatccccaactcaaatctgtgaagaaaatctcaatttctaaattgtaattcttagcactactgctagtagtagtaaaaaaaaacaattagaaagtagtagagtgtttttttttctttttttcgtttgttttacttttaagatgggtgagaagagcaacgttggcggcgacgcgattaacacgacactgcttcacgggaagtacgagctgggccggctgtt

SEQ ID NO: 28369 - DNA, 259 bp, Glycine max
  Clone ID: 700894910H1
agggaattgatttctactccactgttactcgtgccagatttgaggagctcaacatggatctcttcaggaaatgtatggagccggtggagaaatgtttgagggatgctaagatggacaaaagaagtgttgatgatgttgtccttgttggtggttctaccagaattcccaaggttcaacaactgctgcaggacttctttaatggaaaagagctttgcaagagcattaatcccgatgaggctgttgcatatggtgcggctgt

SEQ ID NO: 28370 - DNA, 259 bp, Glycine max
  Clone ID: 700894918H1
cttaaggtttcaaacctaggaagttggaagtcatggcagcaacattgatggcagcaacaacaagttctggtactcttaaagcaactcctttccttggccaaggcaagggtgccaatgccaatgctcttagggatgttgtctccatgggaactgggaagtacaccatgggcaatgatttgtggtatggaccagacagagtgaaatacttgggacccttctcagctcagaccccttcatacttgaaaggagaattccctgg

SEQ ID NO: 28371 - DNA, 257 bp, Glycine max
  Clone ID: 700894922H1
tttctcctttcgtttagcaacaacaacaatggttgcagccaagaaaaccaagaagacccatgagagcatcaacaacaggctcgctcttgtcatgaagagtggaaaattcaccctcggttacaagacggttctcaaatcacttaggagctccaaagggaaattgattatcattgctaacaactgcccccctttgaggaaatcagagattgaatactatgctatgttggccaaggttggagttcatcattacaatggga

SEQ ID NO: 28372 - DNA, 257 bp, Glycine max
  Clone ID: 700894924H1
cataactgaacaaacaaagcaaccctatgtcgaaggtggtttgtgtcaccggagccagtggcgccattggatcatgggtggccctcctcctcctccagcgtggttatacggtccatgccaccgtccaagacatcaaggatgaaaatgagacgaaacatttggaggaaatggaaggagcaaagagtcgtctccatttttttgaaatggatcttcttgacatcgactccattgccgctgccataaagggttgctccggc

SEQ ID NO: 28373 - DNA, 256 bp, Glycine max
  Clone ID: 700894935H1
tgttggtgctggggtttttgagaggaaggaccaggatgcaatttttgccgctgttgaaaccattgcgcaaaaagcaaatgttgtcagacctgactggaatggccttaatgttttacttctccatgctgcccaggctgctgcccttgaccttggacttgttccacaatctgagaaaagccttgagtctgcaaaatttgtatatttgatgggtgctgatgatgtaaacttagacaagatcccagatgatgcttttgtt

SEQ ID NO: 28374 - DNA, 247 bp, Glycine max
  Clone ID: 700894968H1
agacacatcacatatatcattttagcataatacatggcagatcttcaacaaaaactggatgctctgaagggtcttgttggtgtgctaaatagcatggatgagggtgaaactcacaacaatgcaacttcacccaataacccccataatcctactcctatgcctggaaggaatcactcaattggaaaatacaacaacagtggcactcagaagatcaaaggtctgagtaaccaaacgggcttcaccgaag

SEQ ID NO: 28375 - DNA, 248 bp, Glycine max
  Clone ID: 700894970H1
caggagaggaacgctgcattgcttgcaaactttgtgaagctatatgtcctgcacaagcaatcacaattgaggctgaggagcgagaagatggaagccgcaggacaactcggtatgatattgacatgaccaagtgcatttattgtggattttgtcaagaggcatgccctgttgatgcgattgttgaagggccaaactttgaatttgctacagagactcatgaggagcttttatatgacaaggagaagctg

SEQ ID NO: 28376 - DNA, 256 bp, Glycine max
  Clone ID: 700894978H1
tatggaaggccttccaagaatatagtaattcgaaaccttgttgttcgctctaacgtcagtgctggcatctcaataggcagtgagatgtctggtggggtatccaatgtcctggtggagaacattcttgtatgggaatcaaggcgtgccatgagaatcaagactgctccaggaagaggcggatatgtgcggcaaataacatacaaaaatctaatgttaaaaaatgtgcgcgttggaattgtgatcaagacagattaca

SEQ ID NO: 28377 - DNA, 249 bp, Glycine max
  Clone ID: 700894991H1
ccgaggagacacaccttcagcagcagcagccatggttctcaaaaccgaactatgccgattcagcggtgccaagatctacccagggaaaggcatcagatttgttcgtggtgattctcaggttttcctgtttgctaactcgaaatgtaagaggtatttccacaacaggttgaagccatcaaagctcacctggactgcaatgtacagaaagcaacacaagaaggacattgctcaagaagctgtgaagaaaag

SEQ ID NO: 28378 - DNA, 253 bp, Glycine max
  unsure (1)..(253): unsure at all n locations
  Clone ID: 700895010H1
cctttctctctcctctctttcctctctcttggaacaaacgacaagttatggtagtatttgtcattcatttcacaaaactggttcacntttggacccatggcttctaaaaactccacgttgttccagtctcgcttcttcctcttcggcttctattgctgggactgggagtttctcaccgctcttctcctctttagttcttcttcctaatcaaataaccttctccaccatacataaacctttttttttttgtctt

SEQ ID NO: 28379 - DNA, 252 bp, Glycine max
  Clone ID: 700895020H1
tgtgaaaagacttggttgaaccggccagaccttgtgtctgaaatctggagtgttcttgaaccattcaaagcaacttgcattgacacgccaccacatttgatttctaagaagcttcgtcggattccttcccattttgtctgccccattgtccaggaagtaatggaagatccatacatagctgcagatggctttacgtacgaagaagaggcaataagaggatggttgaatagtggccacgacacttcccccatg

SEQ ID NO: 28380 - DNA, 252 bp, Glycine max
  Clone ID: 700895022H1
gtgttttccttgtttcccctattattatctcgctctcacaaaatcatggcattctctagtgctttgattctgtggtcgttgctagcaatcaacatggccctgccaaccctcgcaaccgtctacaccgtgggagatacttcaggttgggcaattggtactgattatagcacttggactggcgacaagatcttttcagtgggtgatagtctcgcgttcaactatggagctgggcacacagtggatgaagttaaa

SEQ ID NO: 28381 - DNA, 254 bp, Glycine max
  Clone ID: 700895024H1
atcagtttgggtttggttcttctggagtgatttcagtccaaggtggcaatggaaacccaatggaagaactcactctgggacaaggaaacgtggaaaaacataatgtgccaaacaaggtctctacagtgtctgatatcatcaccccgagttcttctagttctgccgttgacccaccgacactgtccctggggctatccttttcatctgaccaaagacagacatcatcaagacattcagctttacatgccatacaa

SEQ ID NO: 28382 - DNA, 251 bp, Glycine max
  Clone ID: 700895034H1
ggtgatttatggaaaaagaagagccacctgctggtagatacaatggctatgtggggtctcccggtatggctgatgtcttggatgatggttttggaggtggtaagaggaagggttctgggattagaatgtttggtgatttatggaaaaagaagagccaaaagtgatttatggcttatatattcagtgagtgaattagtagtactttaactaaggtcatgttttgatggtagcagaaacttccaaagcagtta

SEQ ID NO: 28383 - DNA, 252 bp, Glycine max
  Clone ID: 700895040H1
cgaagttttgaacaaagcaaaacgcgcatcggatagacgtcgtttcgagacgaattccattgaacgcagttcaacgcagatctcttgaaattgctcaatttttttcagactaaaaaattgatgtgcccgacaagtgatatattgaagctctatattcaaaatcgtcactgagcacaaaactcgcacatgtggcaacagtcaggaagggaaagaaataaatgacaaaatgcatcagtaagaagaccatctcgg

SEQ ID NO: 28384 - DNA, 251 bp, Glycine max
  Clone ID: 700895041H1
tgcaccttcagctaagccaagtgcaactcctacttcaacttctgtgtctactgcacctcaagctcctgcttcaactggagcatcggctacacctgttactgccccaacagctgctcctgcacctgcacctgcaccagctgctccagctccagctcctgctcctatattttcaggctcttctgtcaggccagagtctgatatatatgggcaggcagcatccaatcttgttgctggaagtaacttggagggaa

SEQ ID NO: 28385 - DNA, 250 bp, Glycine max
  Clone ID: 700895056H1
aattactacatcgtattctgcaaattcaaactgggtcttggttttctgaaagatgggaggtggcaaggacaagcaccatgatgaatctgacaaaggaattttttcacagcttgctcatggggtagctggtgcagcacatggtggacatgggtacccacctggggcttacccaccaccacctggggcataccctccgcaccaagggtaccctccacaacatgggtatcctccggctgggtaccctccacat

SEQ ID NO: 28386 - DNA, 249 bp, Glycine max
  Clone ID: 700895065H1
gctgccactgccgctgcaggcatagcttccttgttttcttcttctattaacagtgtcaaatgtcttcgttcctccaagaactgctccattatagacccccttataaccacagtgccctcaaaccgtggcatgtttgtgtcacacttggtggaacctttgtccattgggggtgccattaattcgcacaagttgtgggggcctagaatttctgctgctgttgcacaagaagaggctgttgttgtggctgat

SEQ ID NO: 28387 - DNA, 140 bp, Glycine max
  Clone ID: 700895068H1
gagatgcaccatgaggctctcacagaggctcttccaggtgacaatgttggctttaatgtgaagaatgttgcagtcaaggatctcaagcgtggttttgttgcatccaactccaaggatgaccctgccaaggaagctgccaa

SEQ ID NO: 28388 - DNA, 141 bp, Glycine max
  Clone ID: 700895071H1
gtttctgcaagccattggatcattccctaattcgaagccttgcaaaatcgcacgaggttttgatcaccgtggaagaaggatcaataggaggatttgggtctcatgttgctcagttcatggcccttgatggccttcttgatg

SEQ ID NO: 28389 - DNA, 245 bp, Glycine max
  Clone ID: 700895087H1
gaaagagacattctaacgactattaaaccagaattactacaatcactaaaaggtggactaactagcgaaagaaaaatagaactagaaaaattcttaaaagaaaaaggtggaacttactatatatgatgatgatgaaaaaaattaaacaatatctaatcatcttgtttttttcctgcttagtgaagtattcgttttcatcattttttgatattgatacgctccttgcttttttcacgcccgccttt

SEQ ID NO: 28390 - DNA, 140 bp, Glycine max
  Clone ID: 700895088H1
aaaaaagttgatgctcatgtgcaccagttaaagggtagcagttcaaggtgcacaaagggtgaaaaatgcctgcattgctttccgcaacttctgtgaggagcagaacacagatgcgtgcgtcagatgtctgcaacaagtga

SEQ ID NO: 28391 - DNA, 240 bp, Glycine max
  Clone ID: 700895091H1
aaagctcaagtgatcttttatgagggcgaatcatcgttcaatcatgcaaggtccagtgccaaaaccacaagaagtgttcgacagagctccagagcagactcctcagattctgagtaacctgcatttcctgatgagtttgttttatttacctgcaccctgagcgaccgggttatacactctaaacttggtctcagtgactgctttgtggtgtgtctctatctgtaagaatttatcaggatt

SEQ ID NO: 28392 - DNA, 241 bp, Glycine max
  Clone ID: 700895093H1
atacatctgatgacttggagaaaaatgatacatgtgttactagtgagcatgtggaagataagagtgattcagcaaaacaatcactagaggagtcaacacatgtggttaacaaggattcaagtgaagttacaccctctcaaccagaaaatactgatgtaaagatatctccaaagttggtcatgagcaatggtgttgtagaagataatgttttagctgactccaagtccattaaaaaacaaga

SEQ ID NO: 28393 - DNA, 250 bp, Glycine max
  Clone ID: 700895112H1
gaattttcagtaggctgaattctccagctgccttgaacatgagagcaattagttcttctgcgcttatccggcctgttcagtctcaaaacatcaactgctccttaaacacacttggaaacattcagccatctgtttttcctgcaaatcatagctcaagtttattacagggaattccgacatcaattgagcttaaccaatctaagcaaagcaactgtacaactggaatatcacagttaagtcaagttgattc

SEQ ID NO: 28394 - DNA, 249 bp, Glycine max
  Clone ID: 700895123H1
ctcactcactccgcagtacttttatctcggtcaatttgcttgaggaatctgttgccaaaggcaacgtcttctgaagagcgatccactggaggaagtcaatttttcaatgagaaacgcgatggtgtcataatcctggagaatgttaaagaggataataagaatgagttcgataaaacggtgattgaagacacaaaagaagaagagttgtctgatgatggacagggtctgtcatttgatttgatggataag

SEQ ID NO: 28395 - DNA, 251 bp, Glycine max
  Clone ID: 700895125H1
caaatattattattcaatagaaaagaaagatgagtccaacatgggtttttgtgttaggtgttgcagcaatgttggtggttgtgagtggacaatcatcagtgaagcctttggtgaagacagtgaaggggaagaaggtgtgtgacaaagggtgggagtgcaaaggttggtctgcatattgctgcaatgagactatctccgactacttccagacataccagtttgagaacctcttcgcgaagccaattcgccgg

SEQ ID NO: 28396 - DNA, 254 bp, Glycine max
  Clone ID: 700895162H1
caaatcatattaagccatggccacctccaacttctcaattgttctctctctctccctagccttctttctagtgctactcaccaaggcaaactcaaccaacaccgtttctttcaccgtcagcaagttttccccacgccaacaaaaccttatcttccaaggagatgctgctatctcaccctccggggtgttacgactcaccaaggttgacagcaacgacgtgccaacgacgggatccctaggacgtgccctttatg

SEQ ID NO: 28397 - DNA, 247 bp, Glycine max
  Clone ID: 700895171H1
ttccattctctctgtgtatttccctacctctcccttcaagatgcagatcttcgtcaagaccctcaccggcaagaccatcacccttgaggtggaaagctctgacaccatcgacaacgtcaaggccaagatccaggacaaggaaggaatccccccggaccagcaacgtctcattttcgccggaaagcaacttgaggacggccgtacccttgctgactacaacattcagaaggagagtactcttcacctc

SEQ ID NO: 28398 - DNA, 246 bp, Glycine max
  Clone ID: 700895185H1
acggactgaagctactataccaggtggtcaaatgccacctaatattggtccagtgttgaagaaccacatgagtgagatgtttgcataccatgcaaccatgatgtctaacactcttggaacctcaactgttgtcttcactagaacgggtttcatggctgtccttctgagccattatcgtccttcgggcaccatatttgcttttacagatgagaagagggtacaacagaggctggctttgtatcaagg

SEQ ID NO: 28399 - DNA, 248 bp, Glycine max
  Clone ID: 700895187H1
gttgtgtttgggggatgggatatcagtaacttgaacctggcagatgccatggccagggccaaggtgtttgatatcgacctgcagaaacagttgaggccttacatggaatctatggttccactccccggaatctatgaccccgatttcattgctgccaaccaaggagaccgtgccaacaacgtgatcaagggcacaaagaaagaacaagttcaacaaatcatcaaagacattaaggagtttaaggaaag

SEQ ID NO: 28400 - DNA, 250 bp, Glycine max
  Clone ID: 700895193H1
cacacttaactaccaactacctaagaaactaacaaaaatcttagtggttgtgataacatggctcttacacttcaacgtgcattatctgaactactcaccctaatagctattctctcaatattcctagtgatcccttccttttgtttcaaccccaaaaagctttataatgcttcatattattctccatctagttcagattggtcacctgcagtggccacttggtatggacctgccaatggagatggaagtg

SEQ ID NO: 28401 - DNA, 255 bp, Glycine max
  Clone ID: 700895196H1
tttacttcatcacaagcccaatatcaaacggcaaaatttgaagagaaacccaactgccccaatactctattaaacaagctcaagagagaagaatcaccagacgcagcgaagaaaaattctcctgagcctgcattcaagaggcaaagaattgagactccatctccattaccaacttttaaggttaggaaagaaaagctgggggaccgcatcactgctcttcagcaattggtttcacctttcggaaagacggataca

SEQ ID NO: 28402 - DNA, 253 bp, Glycine max
  Clone ID: 700895217H1
gccattgagttgctctcaggaaaggaaggaatcatatctcaaatggttgagaccaaaccagacaagctctacagcttgaccttctcattgggtcatgctgatgacaagtgcaaggagcctcttgctgttatggcctttgctggtgaccaggctcagaacattcactacactcccaattccaattccaccttccaaactgctaacgtcaatttcactgccaaggctgagaggactagaattgcattctatagca

SEQ ID NO: 28403 - DNA, 250 bp, Glycine max
  Clone ID: 700895223H1
ctcctttttggtgaaagagttcggaaggggcactcagagcgtgcagttcagcagagagcccaacaatctctacaacctcaacactttcaagtactccggtttggcgaaccagaaaactgtcactgttcaacctgctggtaaagaccagtccgtgttgctcgcaacaaccaagacaaagaagcaaaacaagcctgctgctttgcttcacaaatctgtcatgaaaaaggagttccgtaggatggcaaaggct

SEQ ID NO: 28404 - DNA, 252 bp, Glycine max
  Clone ID: 700895233H1
gcgactacggctgggacactgctgggctttccgcagacccagaaaccttcgccaagaaccgtgaactcgaagtgatccactccaggtgggccatgctcggagccttgggctgcgtcttcccggagttgctgtcccgcaacggggtgaagttcggagaagccgtgtggttcaaggccgggtcccagatcttcagcgagggtgggctcgactacttgggcaacccaagcctgatccacgcccagagcatcctcg

SEQ ID NO: 28405 - DNA, 249 bp, Glycine max
  Clone ID: 700895256H1
gagcgccaaacaggccttgcaggaggctgtgattttgcctgtaaagttccctcagttctttactgggaaaagacgaccctggagagctttcttgttgtatggacctcctggaacgggaaaatcatatttagccaaggcagttgcaacggaagccgagtccacgtttttcagtgtttcttcatcagaccttgtttcaaagtggatgggtgaaagtgaaaagctggtttcaaaccttttcgaaatggctcg

SEQ ID NO: 28406 - DNA, 252 bp, Glycine max
  Clone ID: 700895261H1
tgtgatatttaggttggagagaagaaaagatgccgttgaaggtgttagaggcgacagtgtcgagtttcgatgtggtttttgagaagttccgatcagaggctccacaaaacaaggccaatctcatcctcttcttggcggacaatgacccggctacctctctcagctggtgccctgattgtgtgagagcagaacctgtgatatacaagaagctggaggcttcacctgatgacattgcactattgagagcttatg

SEQ ID NO: 28407 - DNA, 246 bp, Glycine max
  Clone ID: 700895271H1
gtctactcgtttggggtggtgctcttggaggtattgtctgggaggcagcccttgatccgcactgcagagaagcaaaagatgtcactggttgattgggcaaagcatcgctacgcaaagggatctctgggtgagattgtggatcctgcactgaagggccagatagcaactgagtgtatacacaaatttggtgaggttgcgctgagttgtttgcttgaggatgggactcaaaggccctccatgaaggac

SEQ ID NO: 28408 - DNA, 249 bp, Glycine max
  Clone ID: 700895291H1
gtcgctccgcaccagtttcaccgcacgaatatcttgttgtttggagcgatccgagaaaaactctgtaaacatgttggtttaccaggacctccttacaggtgatgagcttctctctgactccttccgttacaaggaaattgagaatggaatgctgtgggaagttgaggggaagtgggttgttaaaggagcagttgatgtagacattggtgcaaacccttctgctgagggtggaggagaagatgagggagt

SEQ ID NO: 28409 - DNA, 272 bp, Glycine max
  Clone ID: 700808401H1
tccaaagggtggcttttttgagcttgtgatttgcccccactacttctttgagattactgtgttttatgggatcttcttcatttctcagacattatattcattcgctttcgctgtaggcactactatgtacttggtgggtaggagttactcaactaggaaatggtatctttctaagtttgaagatttccctaagcatgttaaggctgtcatcccatttgtcttctaaatgttgtaatgaacatctaattctacttgagttgtaagtgtgctgc

SEQ ID NO: 28410 - DNA, 266 bp, Glycine max
  Clone ID: 700808404H1
aaacaaagctagcatagcatttttcttttacaaagcaagacacccttttccttttcattccatcatctctttagctttgtccaaagaccatgtctgtggtggctgataattctgcaaacaatggaagccaccaagtggttttaaatgtaaacggtgatgcccccaagaagtgtgatgactcagccaaccaagactgtgtacctcttctgcagaagttggtagcagaggtggtggggacgtacttcttgatatttgcagggtgtgct

SEQ ID NO: 28411 - DNA, 263 bp, Glycine max
  Clone ID: 700808409H1
gtggaatccacaggtttcaaatcttcgtcccccaacttacccacttgagcatttcctggatgggaatgaatgaaatgtttgattctgattgtgttgttgagcttttcacgccaaagcttcaatattttagataccatgactctgatctgtatgatttttctattgagggcaaccttccttttatagaacaagtggatattgatgtgggttgtttgaccaacgacactgattcactgcttttgctgattcaattgtttgaaatg

SEQ ID NO: 28412 - DNA, 267 bp, Glycine max
  Clone ID: 700808413H1
cgttgggccatgttgggtgttgcaggaatgttgcttcctgaggttttcaccaagtttggaatcatcaatgcccctcaatggtatgatgctgggaaatcagagtactttgcatcttcctcaaccctcttcgtgatcgagttcatcttgttccactacgtcgagatccgaagatggcaggacatcaagaaccctggctgtgtcaaccaagaccccatcttcaagcaatacagcttgcccccacatgagtgtggataccctggtagtgtg

SEQ ID NO: 28413 - DNA, 265 bp, Glycine max
  Clone ID: 700808420H1
gcaagaatggcacttcgttgcttggtgatgtccctttctgttctcttcactcttggtcttgcgagagaaagccatgccagagacgaagatttttggcatgctgtttggccaaacactcccattccaagttcattgcgagatcttctaaagcctggccctgcaagtgttgaaatcgatgatcaccctatgcaaattgaagaaacacagtacccgaaaaccttcttctataaagaagaccttcatccaggcaaaacaatgaaagtac

SEQ ID NO: 28414 - DNA, 264 bp, Glycine max
  Clone ID: 700808428H1
gttgagtaagatcagaatggcagacttgatgaaaagaatcctccaaatgattgaggctgaacaagcaagcaaagggtccaaccatggttcttcaaactcacataacagctatggcagcggaagccagaatggatcaaccatcaacagtggcaatcatcttaacaacggcaacaggtatgacgactcataccactacggtgaacgccctatttataacagtggcactttcaatggtaatggcaacgggtcacatatcaagggtgg

SEQ ID NO: 28415 - DNA, 266 bp, Glycine max
  Clone ID: 700808429H1
tttctttcgtcttaatttgttctcttcagccatggcgatggtgcaagatgaacgatgcgttcagaaaagctactggattgaacatacgacggacttgtccgtagagtcaatgatgctcgattccaacgcctctgatctcgacaaggaggagagacccgaagttttgtccctactaccaccatatgaaggaaaatcagttgtagaacttggagcaggtattggaagattcacagttgaattggccaagaaagctggccagttacttg

SEQ ID NO: 28416 - DNA, 265 bp, Glycine max
  Clone ID: 700808434H1
agcacagaagagggaaaacggcaccgccgccgtagaagaaaacaaccatggtgcacgtctccttttacaggaactatgggaagacattcaagaagccgcgtcgtccgtacgagaaggagcgtctcgacgcggagttgaagctggttggtgagtacgggcttcggtgcaagagagagctgtggagggtgcagtacgcgctcagccgcatccgcaacaacgcgcggaacctcctcaccctcgacgagaagaacccgcgccggatctt

SEQ ID NO: 28417 - DNA, 262 bp, Glycine max
  Clone ID: 700808436H1
cttgtttctttttcttctatagagacacacggagagagtctcagagcaataaacacccttcaatggctaccactaaagtttacattgtttactattctacgtacggacatgttgagaagttagctgaagagattaaaaagggagctggttccgttgaaggtgtggaagcaaagctatggcaggtacctgaaacactttctgaagaggtccttgggaagatgggtgcacctccaaagagtgatgtaccgattattacacccaa

SEQ ID NO: 28418 - DNA, 259 bp, Glycine max
  Clone ID: 700808439H1
gtttgttgttgtaactcgttcttcttcttttgttgttctgtgtttgtgtttgttttttctctcacctgaaaatgtcttgctgcggtggtaactgtggttgcggaagctcctgcaagtgcggcaacggctgcggaggctgcaagatgtacccagacttgagctacactgagtcaaccaccaccgagaccttggtcatgggagtggcacctgttaaggctcaatttgagggtgctgaaatgggtgtgcccgctgagaacga

SEQ ID NO: 28419 - DNA, 259 bp, Glycine max
  Clone ID: 700808442H1
ctattccataacttttatagcacactttcacactggaagaattttctaatttcagtttatattgagtgttatattgctattgggaaagtaatggtgatctcataggtgcaatcaatctattaagtgacagagctagaggagaatattctttgggggtaggtcatgcttgagaaatgaaaaacaataaaaattatcttttattcacttttaaacctttaaaaaaggggctaaacttttattatctattaactattatgcc

SEQ ID NO: 28420 - DNA, 267 bp, Glycine max
  Clone ID: 700808447H1
cttgcagtggccagggtaccatatccttggagattctggaacaagcaccacaaatagatacgctagtagtacccataagtggtttgttcacttttttttctgacaaattgtgaaccaaaatgttgtaaaaatcgcataaattccaaaatctgcttcttgattttccaacaaatgaaactgcaggtggtggtttgatatcaggaatagcattggctgccaagtccattaacccagctattcgtatttttgctgctgaacctaaaggtg

SEQ ID NO: 28421 - DNA, 263 bp, Glycine max
  Clone ID: 700808449H1
gtcataatttgattatatgaatggatttatttcataacaaatataagattttcttctgctttgctttttcagttactagggagtctgaattgatataggttgaaaatcaaaagcataatctgcagaaatctttgtccagagttagttatttagtttctgaactaaaactgaagtgaaattttgatgggctaattgcttcatactttatatcacacatctcatagcatgttgtaaagtccggatttgttttgcaaaatgatttt

SEQ ID NO: 28422 - DNA, 259 bp, Glycine max
  Clone ID: 700808452H1
ggttatttcaataatgtttcagaatatctcagaattggacctcctgtgtattttgttgtgaaaaactataactacagctcagaatcaacgcatacaaatcagctttgctccattagccattgcaattcagactctcttttaaatgagattgctagagcggcccttgtaccagacacaagttatattgccaagccagctgcctcatggcttgatgattttcttgtgtgggtgtctccagaagcatttgggtgctgcagga

SEQ ID NO: 28423 - DNA, 258 bp, Glycine max
  Clone ID: 700808456H1
gcgatctgcttcgtgttgtagctagctcctcgaaaatgctggcacgcctcgccgcgagtcgcttcaacgagatccgtcagattttccgtcagccttctagggctttctcgaccgctctgaactaccaccttgacacaccggacaacaaccctaaacttccatgggaattcaccgaggccaatcaagcaaaggttaaggagattttgtctcactatccatccaactataagcaatctgctacaattcctcttttggatc

SEQ ID NO: 28424 - DNA, 261 bp, Glycine max
  Clone ID: 700808460H1
ggaattcaaatatttctttctttcatattcaagtactttgtactatttgttgtgaggagcaagagaaaacaatgggtttccgcatacctgctattgtcacgcaagcatcgttttctacaacccaagcagcctccaagagggttgaagtacaaaaaggatatcttgcggtctatgttggagataagatgaggcggttcatgattccagtatcatacttgaacaaaccttcatttcaagaattacttagtcaagcagaagaag

SEQ ID NO: 28425 - DNA, 265 bp, Glycine max
  Clone ID: 700808463H1
cgagtacccattttctcttctcaatttctcagagagaaaatcatggtggacgcagcagaacgtaggtacttggaggatgacgattcatcactcatgaaaactattaagggggcaacaactggtttagttgctggcactatctgggggaccgtagttgccacctggtatgatgtccctcgtgtagagagaaatgttgctcttccagggctgattaggactttcaagatgatgggcaactatggtttgacctttgctgccataggag

SEQ ID NO: 28426 - DNA, 263 bp, Glycine max
  Clone ID: 700808465H1
ttcatccctaacgcgtgcatagcagagtcagagacagagacgcagccatggggcggagacctgcgaggtgttataggcaaattaagaacaagccataccccaagtcacgtttctgccgtggtgttcctgatcccaagatcaggatttatgatgttggtatgaagaagaagggtgttgatgagtttcctttctgtgtccatctggttagttgggagaaggaaaatgtttcaagtgaggccctggaagctgctcgcattgcttgc

SEQ ID NO: 28427 - DNA, 261 bp, Glycine max
  Clone ID: 700808466H1
tgacatcataacaacatgcaacttgtatttaggattcagccagctcttagttaagagcttcacctctgagttccctcacgttgaacgatacttttggaccttggtcaaccagcctaacttcagaaagattctaggtcaggttaagcaaactgaggctgttccacctattccatcggcaaagaagccttcccagtctaaggaatctaagcccaagcctaaggatgaaccaaagaaagtggctaaaccagagcccaaagaagt

SEQ ID NO: 28428 - DNA, 256 bp, Glycine max
  Clone ID: 700808469H1
ggaaagagtgctgataacagtctgtatgttgttgaggggatgcaattcgaccgtggttatatttctccatacttcgttactgacagtgagaaaatggctgttgagtatgagaactgtaagttgctgttagttgacaaaaagataaccaatgcacgggatcttatcaacatactggaggatgctattagaagtggacaccctatattgattattgctgaggatattgaacaagaggctttagcaactcttgtggtga

SEQ ID NO: 28429 - DNA, 259 bp, Glycine max
  Clone ID: 700808482H1
catctcaccactctcagcccccaaacttcgtgcttttctctttttcccatcgatctcgtttctcccaaattcgagtcttccttcgtttccaagtcagcgttaagggtttagtttggcgcgtgcgatgaagatcgaggaattggacgatggagagtgtagtagggaccatgaagagaagtttgagaggcagattgtgagcgttgatgccaagagagcgttggttggagcaggtgctcggatcctgttctatcccacactc

SEQ ID NO: 28430 - DNA, 254 bp, Glycine max
  Clone ID: 700808486H1
gtccttcttcaaataccgtaaaaccttcaagaatccaccacttccaccaggtcctagaggccttcccataatagggaatcttcatcaactagatagtccttctcttcatgagcagctatggcatctctcaaagaaatatggtcctttattttcccttcaatttggattaaggccagccatagttgtttcctctccaaaattggccaaagaggtaatgaaagacaatgaccttgagtgctgtggacgacctaaat

SEQ ID NO: 28431 - DNA, 255 bp, Glycine max
  Clone ID: 700808488H1
attccaagtttctaattttgctcatggcatggctaccaactgctgtaactttcgttttcttaccagttatcaggcaccacaggggagttcaacagccaaatgattccaaggctttctataatttcctctacaccactcttgtccttgcagggttcctcatggtggtgatcatattgcaaaaaagtttcacctttacaaagagtgagtattatatcactactagtcttatgcttctcttgctcatcctgccacttg

SEQ ID NO: 28432 - DNA, 256 bp, Glycine max
  Clone ID: 700808491H1
cccgcaggaaagtcacctgttggtgatacacgcgtacagttccattccgatcaacttcgcttattggtagttcatgagactcaattggcaatatatgatgcctctaagatggaacgcattcggcagtgggttccccaagatgttctgtctgcccccatatcatatgcagcttattcctgcaacagtcagttaatatatgctacattttgtgatgccaacattggtgtttttgatgctgatagcttgaggctcagat

SEQ ID NO: 28433 - DNA, 263 bp, Glycine max
  Clone ID: 700808495H1
gtgcaggctgcgattctcagtggcgagggtaatgagaaagtgcaggatcttcttttgttggatgttactcctctatccactggtttggagactgcaggaggagtcatgactgtgttgattcccagaaacacaaccattcccaccaagaaggagcaggtgttctcaacctactctgacaaccagcccggtgtgttgattcaggtctatgaaggtgaacgaacgaggactcgtgacaacaatttgcttggcaaatttgagttatc

SEQ ID NO: 28434 - DNA, 127 bp, Glycine max
  Clone ID: 700940905H1
gtgatctgcaagctacgatgggtaagggaacggggagtttcggtaagagaaggaacaagacccacaccctctgtgtgaggtgtggccgccgcagtttccacctccagaagagtcgttgcgccgcgtg

SEQ ID NO: 28435 - DNA, 120 bp, Glycine max
  Clone ID: 700940944H1
caattctcagcttgcttgggatgcacagattagccaagtggccgggaggagggacccttatgatgatctctccaacatttctctaccccacctaagtgagtgttgctgaacttgccacaa

SEQ ID NO: 28436 - DNA, 243 bp, Glycine max
  Clone ID: 700940981H1
cccactttcctaagtttccttctcgctcccgtctctgaaatctcgagggtttcatcgttgctgaatcaacaattcggaaccagttagcaatgttcagattctggggatcacaagagcaacaatcgcaggatggttcttcgcagtcacagtcgtggtatccgccatcggtggtgagttcacctacttcatcgaggcctgttacaccgactgcatcttcttcttcattatcgcagaggccttcgt

SEQ ID NO: 28437 - DNA, 263 bp, Glycine max
  Clone ID: 700941018H1
gaacagagcttggtagattgggcacggccgaagctcaatgacaagagaaagctccttcaaataattgatcctagattggagaatcaatactcagtgagggcagcacaaaaagcatgtagcttggcttattactgtttgagtcaaaatcccaaagcaaggccactaatgagtgatgtggttgagacattggagcccttgcaaagttcaagtgttggtccaggtgaagtctcattatctggatcaaatagtgggagtgctgggcc

SEQ ID NO: 28438 - DNA, 262 bp, Glycine max
  Clone ID: 700941034H1
ccttcttctccgcttcctcttcgatcatcgcttcagaatgccgccgaagttcgacccctcccagatcgtcgacgtcttcgtacgcgtcaccggcggtgaggtcggcgcggcgagttccctcgccccgaagatcggtcccctcggcctctcccccaagaagatcggagaagatatcgccaaggaaaccgccaaggactggaagggcctccgcgtcaccgtcaagctcaccgtgcagaaccgtcaggccaaggtcacggtggtc

SEQ ID NO: 28439 - DNA, 260 bp, Glycine max
  Clone ID: 700941049H1
agtgagtctacgtgtttgagagaaaggttgagctatagcctaaagggagagacacataaatagtttctactttctattcatagatagatggctggcccaattatgagacctcagattgtgctatttggctcctccataattcaaatgagcttcgacaatggtggttggggtgctattctagctaacttgtacgctaggaaggcggacatcatcttaagaggatactctggttggaattcaaggcgggctttggaggtttt

SEQ ID NO: 28440 - DNA, 249 bp, Glycine max
  Clone ID: 700941054H1
gttacacggcaatgctcaacatatatgggagtcagggagatgttgacaaggcgatgaaattgtttgacgagatgtgtaagttgggtgttgaactcaatgtgatggggtttacctgtttgattcagtgcttgggaagggcaatggaatttgatgatttggtgagagtttttgacatttcggttgagagaggaattaagccagatgataggctatgtggttgcttgctatctgttgtgtctctgtctcagg

SEQ ID NO: 28441 - DNA, 243 bp, Glycine max
  Clone ID: 700941060H1
ggtatccattctcatccactatcttagagactccaatggaggatccgtttagcaatttgccagatgaaattctaagctgcatagtttcttttctgccactagaaaccagcctcatatctactaggtggagagacctgtggaaccaagcccttgttagacatggaagcacacaagacgacgtagctagtgttgttgctggttttctgtctcgttttgaagagcttgatccattaaaacatcctc

SEQ ID NO: 28442 - DNA, 255 bp, Glycine max
  Clone ID: 700941066H1
gcttcttaagatttttcttacccagaggctggatgcatacttagactatcatgctgccaattccaccttgttgaaaagttatggccttgtgcatgaagaatgcattgccaaaatgaggcttttgtcattggtggatcttagctctgatggatctggccaaattccatatgaacttattagggacacacttcagatcagtgatgatgaggtggaactatgggtagttagaggattaactgctaacttaattgactg

SEQ ID NO: 28443 - DNA, 247 bp, Glycine max
  Clone ID: 700941071H1
gtttaatagtgaaaaagtagcctcacttgcctatgcccgaattcaaggaaaagcttctcttattgctcattttcagaactcaagcctgatgaacgaagacaaacgttgccgtcctattctcttccatacagatggcccaaatgctggtgatccggagccttttcccatgggtgccaatattagactgagacctggaaaatctcgcactgctggcaatgaggagaatcgaagccaagggagcccttca

SEQ ID NO: 28444 - DNA, 241 bp, Glycine max
  Clone ID: 700941078H1
ctaaaaatggcactgctttctttaagtgccatggccatgagcaatttgagatgacaggtttggaccctgagtataatagattgttcaatgagggcatggtgtgcactgctagggttgtgtccaaggctgtgatcactgggtacaaagatgggttcaaccagattaagtccttggttgatgttggaggtggcattggagggtctctttctgagattgttagggcttatcctcacatcaatgc

SEQ ID NO: 28445 - DNA, 257 bp, Glycine max
  Clone ID: 700941124H1
ccacactcttattgttttcttcatatcttccttgtcactgcccgtgtgtcgccgccatggccaccgtcaccacccaagcctccgccgcaattttccggccatgtacctcgaaatcgaggtttttgaccggctcttccggtaaacttaaccgggaagtgactatgcggccaatggggtgccctccttctgcctctttcaaggttgaagccaagaagggagagtggttacctggcttggcctccccaacttacctcaat

SEQ ID NO: 28446 - DNA, 255 bp, Glycine max
  Clone ID: 700941138H1
caaatacatggatttctctgaagtctttccaatttattccctgcacgagcttctttatatagtaggattgtgtcttccttcatcacactaaacaagttaaaagaagagcatcactgaactaacaaagcaaccctatgtcgaaggtggtttgtgtcaccggagccagcggcgccatcggatcatgggtggtcctactcctcctccagcgtggttacaccgtccatgccaccgtccaagatatcaaggatgaaaatg

SEQ ID NO: 28447 - DNA, 252 bp, Glycine max
  Clone ID: 700941165H1
agcaggggtcctaggagaatgcattgtgtcatggattccattcctgccactgcaattgaacctggaggtgtagcacctacacagactgagttttctcttaacaacatagacatgtttccttcattccccttttttcgatcaaaatcaaatcgtgcggaaaattccatgtctggaccattggttgatcaaaaggatgggatgctagtgttgaaaaacaaggcccctaggtggcatgagcagctgcaatgttgg

SEQ ID NO: 28448 - DNA, 250 bp, Glycine max
  Clone ID: 700941167H1
gttttcaactattgtagctgttgaaggtattaaccaaatcaagacacataagctagttcccttgtctgagcaagaacttgtagattgtgacactacacaaaatcaaggatgcaatggtgggttaatggaatctgcgttcgagtttatcaagcaatacggtataactacagcaagcaattacccttatgaagcaaaagatggaacttgtgatgcatcaaaggtgaatgaacctgcagtgtcaattgatggc

SEQ ID NO: 28449 - DNA, 250 bp, Glycine max
  Clone ID: 700941171H1
cgttagtaattttttggtgtttgaattgaagttaaagggccatggcttcaggatccaaatcagtagcctctatcctcttggcactgaatctagtgctgtacttcattgtgcttgtaattgcttcttgggcagtgaatcatgggattcaaaggtctggcgaaacagcatctgttttgtccattccggctcgcatatttccaatatatttcccaatgggaaacatgacaactggttttttcgtaattttgtc

SEQ ID NO: 28450 - DNA, 253 bp, Glycine max
  Clone ID: 700941193H1
ctagggtttctctttctgaattgcaaccatgcaaccaacagcagcattgaccatggcggaggaccttactcagatcgctcacttgctcgaccaaacactcagccccgacgccatcgccgtcccagccgccaccgatgcgctcgatcgcctctcccttactccgcacttccctttctatctcctctccatttccaccggagcaggaaatcaaggtcagaaaatcgctgctgctacctacctcaagaacctcatt

SEQ ID NO: 28451 - DNA, 270 bp, Glycine max
  Clone ID: 700941201H1
tgctgattctttactgtacagctgctctctttctattccaactcttagagagacccaggcagggttgggggacattgagaaaaggattgctctggatagggattgtagctttgatcacatatctgttgatgaggacatgaccaagagcaagggcaaggatccacttgaaggacttggaggacctatgacaagggctagagaaaggaaatccaaggaagctcttcaacaagtgttgtccatactatttgaatacaagcccaagtttcaagg

SEQ ID NO: 28452 - DNA, 264 bp, Glycine max
  Clone ID: 700941213H1
ggtgatgatgacgaggaggtagaattagatgaattctatgattatagcagcagttatgtggatgatcaaggcaagcagcttgttgcatcttgtgatgcatctaacaatgtagaacttgttggtgggtctgagctcataatcaccacgaaatctggtgaaagagcatcaaccaaaacactaggttcccgtgaatttttgcgttattatcgtcaaaaacctcggccatcactagcaaatatggctatcactgctgcgttggcttca

SEQ ID NO: 28453 - DNA, 266 bp, Glycine max
  Clone ID: 700941216H1
tagctatgatgtttccattcttcaatgacttcctaggcctgattggttcactgtcattttggccattaacggtttacttccccatagagatgtacattaagcagtcaaagatgcaaaagttttccttcacttggacatggctcaagatattgagctgggcttgcttgatcgtttctattatctcagctgctggctccatccaaggcctcgctcaagatctcaagaaatatcagcccttcaaagcccagcaataattaaatttgttc

SEQ ID NO: 28454 - DNA, 267 bp, Glycine max
  Clone ID: 700941217H1
attcgtttgaggagaagaatggcgtgaagcttccgagttacagaggggataacattaacggagactctttcgacgagaagtcgaggattccggatccgcagaggatgattagggcttattgccaagccgcggccacgctgaatcttctcagagcttttgccaccggtggttatgctgctatgcagagggttactcagtggaatttggacttcacggatcacagcgaacagggagataggtaccgagagcttgctaaccgagttgatg

SEQ ID NO: 28455 - DNA, 265 bp, Glycine max
  Clone ID: 700941221H1
cttcttctcttaaaagagcctttgctttttctttaggcctttccgaattaagtacttgtttcattttctctcgaagcaagaaaaatgttcatcgagagtttcaaggttgagagtcctaacgtgaagtacacagagactgagattcagtccgtgtacaactatgaaaccactgaacttgttcacgagaacaagaatggcacttatcagtgggttgtcaagcccaaaactgtcaaatatgaatttaaaaccaacacccatgtcccta

SEQ ID NO: 28456 - DNA, 265 bp, Glycine max
  Clone ID: 700941223H1
cacttcacaatctctgtttcagctttctctcttttctacaatggcttgcaccaccgtcgtgttgacgctagtcgccgcattgttggtaacctccgtcgtggctcagtctccggcgtcctcaccagctctgtctccaaagcgcacccccgtcgccacacctcagaagtctccctcgccggcgatttctccctccgccgtgtcgccgtcgtcctctcctcccgctccggtggtgaacactccgtctccgtcaccaaactcagtcgac

SEQ ID NO: 28457 - DNA, 263 bp, Glycine max
  Clone ID: 700941227H1
ggaaaatggaaggcaccattgattgataacccagatttcaaggatgaccccgacctatatgttttccccaacttgaagtacgtgggcattgaattgtggcaggtgaaatctggtactttgtttgacaatgtcttaattactgatgatcctgaatatgccaagcaactggctgaagaaacatggggcaagcacaaggatgttgagaagacagcatttgaagaggctgagaagaagagggaagaggaggaatcaaaggatgaccc

SEQ ID NO: 28458 - DNA, 261 bp, Glycine max
  Clone ID: 700941249H1
ctaacccatccgtcacagtttccacatttctcctacgccaacgaccttacattccgaaaagtcaaaactacccatccacccaggcaacgatggacgtaggaaccgccgacgatcattccccggaagccgccatatcgcggtggaaattcgcggtgtcgcggcagtaccagcacatgctggacaaaacgacgccgcacgtgctccgacggtggatcgggtgcctggtggttgccgccgtgtacgtgctccgcgtgtacttgg

SEQ ID NO: 28459 - DNA, 259 bp, Glycine max
  Clone ID: 700941252H1
atcacatgtctggtggatctcaaatcagtgaggatggtgacatagctatggatggtgggaactcacacaatgggataaattttgctgcgaggctacaacagtttcagaaaatgcagcacctgcatcgtgtgcacttgaaaacacaggcacagtcacggaaaaattcctccacattatcaaaggaggcacagagacaggaagaaccaaagcgacctcagtcgagtgaggttaatgttattccatcaagatcatctaaaag

SEQ ID NO: 28460 - DNA, 258 bp, Glycine max
  Clone ID: 700941255H1
gagcgagcgagcgagcagtttcaaagagaggatttgggattgggaaggcgagggattgcgctgcgtctcttcctcttctctttcgattcatccctcattcataatcttccaatccaacaacctcagcctcacactcacacatacacacatctgaacgcgtatcgtccctcccatggcttcaaagcgcatcctcaaggagctcaaggacttgcagaaagacccaccaacttcttgcagcgctggtccagtagctgagga

SEQ ID NO: 28461 - DNA, 262 bp, Glycine max
  Clone ID: 700941314H1
aaattaaattagtggttaaggttgttggaggagctctaacaagagatggagacacaaaattggttcgaaagagtgaagcctttagcagctgtggtatcaatgcagtttggatatgcagctatggatgttctatccaaggctgcaatgaacaaagggatgagcaactatgtgtttgtcgtttatcgtcatgctgttgcattctttgttatggcccctttggcatggttttttgacaagaaagtaaggccaaagatgacattat

SEQ ID NO: 28462 - DNA, 265 bp, Glycine max
  Clone ID: 700941316H1
caccaagcaggcctcctccggaagcccatggtacggcccagaccgcgtcaagtacttgggcccattctctggcgagcccccgtcctacctcactggcgagttcccaggtgactacggctgggacactgctgggctttcggccgacccagaaaccttcgccagaaaccgtgagctcgaagtgatccactccaggtgggccatgctcggggccttgggctgcgtcttccccgaactgttgtcccgcaacggggtcaagtttggagaa

SEQ ID NO: 28463 - DNA, 265 bp, Glycine max
  Clone ID: 700941322H1
catgctctcacctatctcatcaaagaattcacagccaaactctcctttttcatcaagaaagactttgcaacatgacaagaagaactatgatgatgaagataattggtctgtcgcctcctctgctatgtctatgcgcacagctagatctaaggtaactcatggttcagcccctacatttagatgctccgaacgtgcagagaaacgtagggagttttatctgaagttggaggagaaacaccgagctcttcgagaagagaaaaaccag

SEQ ID NO: 28464 - DNA, 262 bp, Glycine max
  Clone ID: 700941326H1
agaatgagccgttcacaggatccacacccttcccgatctttcttcccttttggaaatccttttcggatgatatcacctaaaggctctcgcatgtctccacaacttcttgcagtgttgcaagcttttgaggcaacattggcagagaggctgaaaaatcttatgcctaaaagcaaggatgaaatcctcaccttgtcttggatgactttagctatgaagtcactttgtgaaagtcacaatgacatacggacccttatgactgccc

SEQ ID NO: 28465 - DNA, 264 bp, Glycine max
  Clone ID: 700941331H1
ggaaattcaaatgctagagcaaaatgttctgaatgaatatccacaagttcattcaatttcagcattcaacaatatttacaatggcactggcatttttggtatccaagttacaacaggctcagattttgtatcaaaagccattgatatagctgctaatgagattcttggtgttgctactcctggacaagttgaccaggcacagcttaatcgagccaaacaggctaccaaatctgcaattttgatgaatttggaatcaagaatggt

SEQ ID NO: 28466 - DNA, 266 bp, Glycine max
  Clone ID: 700941332H1
attccgattcgattgattctcttctctctcacacgaagtagaaacacgaaactcagaatccatggcgacaccagcgacgacgaagcgaaaaccggtgttcgtgaaggtggatcagttaaaacctggcaccaacggccacacactgacggtgaaggtggtcagttccaagccggtgaagacggtgagcacccgcggcggtcgaccgacggtgctagccgcgcgcccgtcgcgcattgccgagtgcctcgtcggcgacgaaaccggaa

SEQ ID NO: 28467 - DNA, 260 bp, Glycine max
  Clone ID: 700941342H1
aattaaagctgctactaataactttgacccagcaaataagataggtgaagggggctttggaccagtatacaagggtgtactatcagatggtgctgtgattgctgttaagcagctctcctccaaatcaaagcaagggaatcgcgaattcatcaatgaaataggcatgatatctgctttgcagcatccaaatcttgtgaaactttatggctgttgcattgaaggaaaccagttgctgctagtatatgagtacatggagaaca

SEQ ID NO: 28468 - DNA, 260 bp, Glycine max
  Clone ID: 700941359H1
cagacctagggatttcggccgtttgctccccaaaaaggaaagaagcagattctgtcctttgaaatcaacaagaaaagatgtcaggtgaagaggtagctgttgcagttgaggtacctgctacttcaattccaggtgagccaatggacatcatgactgctctacagcttgtgctgagaaaatctctggcctatggtggtcttgcacgaggtcttcatgaaggtgccaaggtgatcgagaagcatgctgcacagctctgtgtt

SEQ ID NO: 28469 - DNA, 243 bp, Glycine max
  Clone ID: 700941503H1
gttcatgacactaatttggtcaggatctctcatctagacaaagattgatgatatgtttttaactttcttaatttatgttatgttctatttgagagattcctgtacaagtcaaaatctatataatagatgtgtgaagaataatctaagtgagaatgattattctgctatgtacgctttctgttcatgatggagtgaaacaaatgatggttagcttattcttatgctaccgatagccattgttga

SEQ ID NO: 28470 - DNA, 241 bp, Glycine max
  Clone ID: 700941534H1
caaagggcactttcctcagctaactgcaagccttcagctagttgatgtgattaagggtgttcttggatgataattctcagtttcattccttttgtttagttttatacctgtttctcatttcatttataggttgatgtagttgtgtgatgattttatggttttcttgatgtggaaatagtgtggtatgtgttaattaattcattgtttgtacttgtgaaatagtgatgttaattagccttgt

SEQ ID NO: 28471 - DNA, 214 bp, Glycine max
  Clone ID: 700941550H1
agggattggtctttataattagatagtcagcaaaatgtcagactcgttgctactttttcatcctttttttttataatataaataggtgccctattgacggaatgatgtctgattcccctacgcggtttagctattgtacgtaaaggggatgaagtctcggaaatgaattttgtgattctgaattttgtatcaaatctgaatatcctttctaact

SEQ ID NO: 28472 - DNA, 237 bp, Glycine max
  Clone ID: 700941566H1
gacaggaatcattcacattaagccacgatgcaaccttttggtttctaatgcaaagaggtttgttgatggtcttctctttgattgcttgtgtgccttgaattacacactgaggatagtttggttccatagttgcagcaatttgtggtttgtaagaaatttccaatttgctgactcatgcaagttcattgatgctattcatgctggaaatggggagattgaccctacacttctctctaa

SEQ ID NO: 28473 - DNA, 225 bp, Glycine max
  Clone ID: 700941594H1
aaattttgacgggaagaggctactcggacttagtggttcagatgcaacgaaagtgctcaacactttgatattcaactcctttgtattttgccaggtgtttaatgagataaacagcagagatattgataagataaacatattcagaggcatgtttgacagccggatatttttggcgataattttcgccaccgtggcatttcaagtggtgatagttgaattccttgg

SEQ ID NO: 28474 - DNA, 247 bp, Glycine max
  Clone ID: 700941677H1
gtacttaacaatttgccaggttattctagttgatgttattttggtatatgtgcagcacttgtctgtttagtggacatttatttggagcaaaattttgagaaagtttgccatctggtgatggttcaagtgcttcttgttcaggcctttgctttgttaaacaaatttgacattgtctcatgtacaagctgtttgtgttgtggacacccttctagctgaatcatatggatcaaattctgctttgtcgtac

SEQ ID NO: 28475 - DNA, 270 bp, Glycine max
  Clone ID: 700941681H1
acttggcatcgcttctcctctctcccaagaaagaatcatcaatggcgattgaacacgaagacgatctcaaagacgagaagaaccctcgacctctcgacgaggatgacatcgccctcctcaagacctacggtttgggaccttactccacaagcataaaaaaggcggagaaggaaatcaaagatatggccaagaaagtgaatgacttatgtggtataaaggagtctgatactggtttagctgcaccaagccagtgggatcttgtttctgata

SEQ ID NO: 28476 - DNA, 263 bp, Glycine max
  Clone ID: 700941683H1
aagtactgtcaggcgtgatgctcctcctggacagaaggttggtctcattgctgttaggaggactggtcgtcttagaggacaagctgctgcaactgctgccaaggctgataaggcttaaagagaacgttgttagggttattatatttgattgcaagtttttcagttttgtttttcttttttctgatagtttgtttgttaaactatttgggcaccttcttcagaaccattttcttcccaacatatggagttttcaatagacggtc

SEQ ID NO: 28477 - DNA, 244 bp, Glycine max
  Clone ID: 700941775H1
caacacttcatttcttactctcactgaaaaaaaatagcttgttcacaccatcctattttttcaactcatatatacaaatatatataacatggcttctaccttctctcgaagcctagcacttgtaagcttttacattgtcgtttgtgctgccggtaacttgaaccaagactttcagcttacgtggggagatggtcgtgctaaaatactcaacaacgaaaatcttctcactctctcccttgacaag

SEQ ID NO: 28478 - DNA, 255 bp, Glycine max
  Clone ID: 700941925H1
gagctacactgagtcaaccaccaccgagaccttggtcatgggagtggcacctgttaaggctcaatttgagggtgctgaaatgggtgtgcccgctgagaacgatggctgcaaatgtggaccaaactgctcctgcaacccctgcacttgcaagtgaggtgttgggagagcaagcttcaagcagagatagcccttaattaggaataatgataaactattaatgtgtagctaaaaacttatgtattatgtctgtgatgg

SEQ ID NO: 28479 - DNA, 253 bp, Glycine max
  Clone ID: 700941942H1
tcccttcacaccattctcacaaaacaactttcaaactctgagaaagaatggctgccaacacattgatgagtactgctatctcagccttcccatctctcctttcttcctcaaaatccagatttgccaccgcagttcctctttctagctttggtgtcaccaatgcctcttcttctcgcttttctatgagtgctgactggatgccaggccagcctagacctccttaccttgatggttcagcacctggtgactttgg

SEQ ID NO: 28480 - DNA, 248 bp, Glycine max
  Clone ID: 700941972H1
gggaatgttacaataaagttatgggatcttggagggcaacctaggttccgcagcatgtgggaacgttactgtcgtgccgtttctgctattgtttatgttgttgatgctgccgatccagataaccttagcatatcaagaagtgagcttcatgatttgctgagcaaaccatcattgggtggcatccctctgttggtattggggaacaagattgacaaagcgggggctctgtctaaacaagcattgactga

SEQ ID NO: 28481 - DNA, 246 bp, Glycine max
  Clone ID: 700941994H1
aagaaacctgaggactgggacgaaagagccaaaatcccggacccaagtgctgtgaagccagatgactgggatgaggatgcacccatggaaattttagatgaagaagcagagaaacctgaaggatggttggatgacgagccagaggaaattgatgacccagaggcgacaaaacccgaagactgggatgatgaggaggatggaatggggaaagccccaaagattgaaaacccgaagtgtgaggcagcc

SEQ ID NO: 28482 - DNA, 262 bp, Glycine max
  Clone ID: 700942040H1
cgaagaagtcccattcattgcactgatagcagcgatggggatcgatcttaaggctgggggtaagagcaaaaagaccaaaagaacagcaccaaagtccaatgacatctacctcaaattacttgtcaagctttatcgattccttgtcgaaggacagacagcaatttcaatgctgtgatactcaagcgcttgttcatgagcaaggttaacaagcctccaatttctttgtcaaggttaattaagtatacgaaggggaaggaggata

SEQ ID NO: 28483 - DNA, 259 bp, Glycine max
  Clone ID: 700942053H1
gggcctcaatggagtcccagatgttgtcgagtgctctttcgtgcaatccactgttactgaacttcccttctttgcttccaaggtgaggcttgggacggttggtgtggaggaagttctgggcttggggcacctctcagatttgagcaacaaggcctcgaaagccttaagcctgaactcaaatcatcaattgagaagggaatcaaatttgccaaccagtaattgaacatgttatcacatacatgtctggtaggttactgga

SEQ ID NO: 28484 - DNA, 251 bp, Glycine max
  Clone ID: 700942094H1
gtgggtaatgaatgttgttccatctcacaagccaataactcttgatgcaatctttgacagaggtcttattggagtttatcatgattggtgtgaacctttctcaacatatcctcgcacctatgacctgatacatgggcaagcatggaatcacttgtaaaggatccagcctctggcagaaacagatgtacccttcttgatttgatggtggaactcgatcgaattttacgcccagaaggcactgttgtggtgag

SEQ ID NO: 28485 - DNA, 271 bp, Glycine max
  Clone ID: 700942117H1
caactatgctgacaaatgagcatggtctgagtttgaacctcaaggagactgagctttgcctcggtttgcctggcgggggctctgaagtggaaactccaagggccactgggaagagagggttctctgagaccgttgatctgaagcttaatcttcagaccaaggaagatctgaatgagaatctgaagaatgtctcaaaggagaagactctccttaaagatcctgctaagccgccggctaaggctcaagtggttggttggccaccagtgagatc

SEQ ID NO: 28486 - DNA, 257 bp, Glycine max
  Clone ID: 700942141H1
gctgagtatgaaaaacttatcaaagcttatgagaaaaagcaggcaagctctgcagatgatgatgaatcagacaagtccaaatctgaagtgaatgatgaagatgatgccagtggagaggaggaccaccaagaggacgaggatgatgaggaggaagaggacgatgaagatgatgactgagattgatgtccaaaaccttggttatgatattttgtttatgagggaggctattatatattctgactgtgcatactaggcta

SEQ ID NO: 28487 - DNA, 258 bp, Glycine max
  Clone ID: 700942169H1
gcaacaagttggtgcctttcatcagctatccgggagttgccatgtggcaatttatgcctccggccgccgtggatacctcacaggatcatgtactccgtccaccggttgcctaagttggcattgtacaattatttgggcttccattttggctcaaaagttgtaatcattttcctatagctttttagttattatcttctaagtgttccaagtaactggattcagtggtggctttgactgtatttggcatctgatactatt

SEQ ID NO: 28488 - DNA, 251 bp, Glycine max
  Clone ID: 700942173H1
gctccggtctggaataatgatgttaggttcttctgtgttaaggattcttctggtagtccaattgcgtatttttattttgatccttatagtcgtcctgctgaaaaaaggcaaggtgcatggatggatgaagtctttgctcgtagtcgtgtgttatcgcgcgatggtacctcagcaagattgcctgttgctcacatggtgtgcaatcaaactcctccagtaggaaacaagccaagtctaatgacattccgtga

SEQ ID NO: 28489 - DNA, 125 bp, Glycine max
  Clone ID: 700942186H1
cttccaagtccaccagcagaggattaattttgtcccttgtatctctattaattttcgtttaacattactcggactcccatcattactttttcttttacttttaaaaaataaaaagaatcttctgc

SEQ ID NO: 28490 - DNA, 48 bp, Glycine max
  unsure (1)..(48): unsure at all n locations
  Clone ID: 700942317H1
taagatacaggaaatatgatttgnncgacgtgaatnctttttgttact

SEQ ID NO: 28491 - DNA, 237 bp, Glycine max
  Clone ID: 700942592H1
gtcggcggggaaatcgtgaccgttccgccggagacttttgccgttgatcaatccggcgccggaggtgtgattgtggattctggaaccgcgataactcggttgcggactcaggcctacaactcggtgcgcgacgctttcaagaggaagacttcgaacctgcgtcccgcggagggggttgcgcttttcgacacgtgctacgacctgtcgtctctgcagagcgtgcgggtgccgacggtg

SEQ ID NO: 28492 - DNA, 82 bp, Glycine max
  unsure (1)..(82): unsure at all n locations
  Clone ID: 700942594H1
ctttcccaagtnttcctctctgcaacacccttcatttgncacacaancacacnnaacgcgncctgtgctggctaacaacttg

SEQ ID NO: 28493 - DNA, 283 bp, Glycine max
  Clone ID: 700942614H1
ctcaacaacaacatcaccagggtcagggacagtgacaggaaccggaaccggaacaggatccgaaggggcagtggtatacacgggtgcggacaacggcgttgcgtataatacagttacggattccgggtcaagttcaggatccggaggagaaacaatgctcgcagatgggtcatatttagctggtttagccatgggagactcccctgaaagaacagtttccatcgcgtttgtttactctgctagctttttgcttattctcttcctgctttagctgcaccagcat

SEQ ID NO: 28494 - DNA, 286 bp, Glycine max
  Clone ID: 700942616H1
gttttctatatcactctcaactttactcctcttcaatcagttgcatattctttgctattccaatggccactgttgaggttgtgtcagccaaggttgccctcccagaggacacaaaagaggcatcattgaaggttgacgaggagaagaacacagaagaagttgttgagactccaacaccagaaactgtggtcactgagcaaaccaaggaggaaagtactgaggccccacgacctgcagcttcagaagacaagccctcggttgaagttcagactaaagaggtggcaga

SEQ ID NO: 28495 - DNA, 285 bp, Glycine max
  Clone ID: 700942618H1
cttgtggtgcttaataattgtgacattattcagaaatatatgagctgcaagggatcttgcttggcaagtgtcggagcagatcaacccgctgaagttgtttatgatgccccagtgcatctgaatccaggatcatgtttgtacactgaaacacagtctatactttcttgtgatggtttacatcagcacacaaggagactgtgcccctgtgcataatgttagctgggtaagtcttggttacttttgacattgttgaattttgtgtacattatgtcaaacatcaaaata

SEQ ID NO: 28496 - DNA, 284 bp, Glycine max
  Clone ID: 700942623H1
ggccattttcggccgtcacttgaaaggccgccagtaagcactgtaggttttcagcgaccaatttcaggcaacctacctgttgctccaatagcaggacatggtgtacctcagatgatgccctgtaggccagacattcctgctgttaatagttggagacccacttgaagttgatttgagtcttcttattagtagtagtggtgttgctggtggatcaacatgcaaggttaaattgtgtctcaaagttagattcgcctgtgtagtacatacaacttacccatgaagaa

SEQ ID NO: 28497 - DNA, 280 bp, Glycine max
  Clone ID: 700942629H1
gcgcaattgaaagctcagaagcattgttccgataaatcttcgcaggaaaacaaaacaaaagggaaaggatgattagcattctgagccaggaacggcttctgggagcttcgttgggagtggtattaacgggggtggttgtgtttgagcaacgcagatacatctacgcttctatttccgattcccaatctcaggttaaagaacctatatttgggaagaagtcgcgttctgaattttcacatttatggaacaaaactgtggatcagacatttggacctttgat

SEQ ID NO: 28498 - DNA, 280 bp, Glycine max
  Clone ID: 700942654H1
gagaatgagtggcggaggagaagagggagcaactctggagttcactccgacgttggttgtggccgccttttgcacagtcatcgtcgccatttccctcgccgctgagcgcctccttcattatggcggaaagtttctcaaagccaaggaccagaagccgctctacgaagctctccagaagatcaaagaagagctgatgcttttggggttcatttccctgcttttgacggttacacaaaacggcattaccaaaatctgcgttcgaccctctttgacgctccac

SEQ ID NO: 28499 - DNA, 277 bp, Glycine max
  Clone ID: 700942668H1
gaaaagaaaatcctcaattttctgagcagccaaacactctctctctgtctctcgaaaattctcagtttgcagagaaaatctgaatcatgtcgtggcaagcgtatgtcgacgatcaccttctgtgtgacatcgaaggtaaccacctcactcacgctgctatcatcggccaagacggcagcgtttgggctcagagtaccgacttccctcagttcaaacctgaggagataactgccatcatgaatgactttaatgagcctggatcacttgctccaactgg

SEQ ID NO: 28500 - DNA, 277 bp, Glycine max
  Clone ID: 700942670H1
gctgaacacgtgttaacgtattcagtgcagaatttcattcaaggaaatgattggattccatctattggtagcccatcgtcgtaaattttgaggcatcagtagatggggagttttatttagggtacccccttgtaaattaccaataactaatgcaataccaatatatcaatccagattaggaagaaatttcaaatcaatttgagtcgtgctggtaaataccaagggttgatcacacttcactttattggggtgacacttgtttggataatttacaacg

SEQ ID NO: 28501 - DNA, 277 bp, Glycine max
  Clone ID: 700942672H1
gtagtgcgattttcgattctcttctctgcaactatgcctaaccctaaggtcttcttcgacatgaccatcggcggtcaacctgccggccgcatcgtgatggagctctacgccgacgtgactccgagcaccgccgagaacttccgcgcgctctgcaccggcgagaagggcgccgggcggagcggcaagcccctccactacaaaggctcgtccttccaccgcgtgatcccgaacttcatgtgccagggcggcgacttcaccgccggaaacggcaccggag

SEQ ID NO: 28502 - DNA, 273 bp, Glycine max
  Clone ID: 700942689H1
gcgacgaagaaacgccacttgtgggcgatatttcgggccttgaagggcgcaagagccaccacaccagggatgttcatatcctgagcttggcctttctcttggtctttctcgccttcggtgccgctcagaatttgcagagcactctcaacactgaggatgacttgggtaccacctcacttgggatcctgtatttgtctttcacattcttctccgtggttgcttctttggtggtgcgagttctcggctccaagaacgctttgcttattgggacta

SEQ ID NO: 28503 - DNA, 263 bp, Glycine max
  Clone ID: 700942701H1
gacccctcaaccaatttcattgcatataaaatatgagaacacatattgatgatagtgcatctgggaagaatcaccatcttccaatgctttggttttttgattcttctctgaggctttgtgctattcctctatctgtggaaccatgtggatcactgtgactaacaaggaggacaacagcagctatggaatgctgaaatataacaacctctctgctctaaagtatatggttttagtcagtgccctctgtgcttgctatgctcttc

SEQ ID NO: 28504 - DNA, 258 bp, Glycine max
  Clone ID: 700942733H1
gctgctgaggttttgggaaggcataatgatactattatcaaaagagccactgagtatcagtctaaacttcctccaacaaaagttgctagagatggttccattatggaatgggcagaagattttaaggacccaatgtacatcatcgacatgtttcacatctgtttggactgtttccggggcacacaattagtgttgagaacactccagacctctgtaaagctgtggaagttagtctaattaaaagaggagatgacggtc

SEQ ID NO: 28505 - DNA, 255 bp, Glycine max
  Clone ID: 700942734H1
gcgagcgcagttctagctagcaacgccatggccattgaagtgttactgggcactgatgacgggtctctggttttctctcccaactctttctccgtggcccctggggaaaagatcgtgttcaagaacaacgcagtttcccccacaacgttgtgttcgacgaggacgagattcctagcggcgtggatgcagggaaaatctccatgagcgaagaagaccttctcaatgcggctggtgagacttacagcgttactttgg

SEQ ID NO: 28506 - DNA, 257 bp, Glycine max
  Clone ID: 700942740H1
aaaaaaagtagcccaaaaccgcaactcaccgcttcgcacgtttcttcgatcattatccacattcctcttctcctcataggatggaacagcaggatatggctgatacaaccacccttagttattggttaaattggggttctatctgtgtgcagtttgtgttttgctgtctattgtcctttcatttcttgtaatatggaaggataagggttcaaggaaattcagatctggaaaaggagaaaatcaggaagatgggactt

SEQ ID NO: 28507 - DNA, 259 bp, Glycine max
  Clone ID: 700942758H1
gttgatttggttgtggtgcagccaaagaacaaggatcagaatcgtttaatcaagttgaggaagatggcactagtctccggaggaagatcaacactgaaccctaacgcccctctttacattcccgccgcgttccgcaagtggaggatttttctccagaatggtggcagctggtgacgacactgacatggtaccatgactactggctaagccagcagcacgatgatggagccttctatggcgaggatgggtttgatggcaa

SEQ ID NO: 28508 - DNA, 261 bp, Glycine max
  Clone ID: 700942761H1
ggatccttggtttcaagttgggttcatgagaccaattgcgttttctattaaggagtctaacgttgttgaagacaacgaggggaaacctgcgaggccgttttacaatgcgtttgagataatctcgtccttgtcgcagggtttgatcttaggagtttgtttgagacgaggaagcggtcgccatcgatgtttatatctaaattctcggcttcgacggtgttggccaaggtggaggcggtggcgaagaaactgaactttagggtg

SEQ ID NO: 28509 - DNA, 262 bp, Glycine max
  Clone ID: 700942762H1
gaatgggaaaaggatggtggaagaaggggacttgaggaagtacttggagaagtgggacaagacttattggccaacttacaaggtcttggatattcttcagaaggtgttttataggtccaaccctgcaagggaagcgttgtggagatgtgtgctgatgagtatgtgcagaagatgacctttgatagctacttgtacaagacagtggtgcctggcaatccattggaggatctgaaattggccattaacaccattgggagcttag

SEQ ID NO: 28510 - DNA, 258 bp, Glycine max
  Clone ID: 700942775H1
ctttccaatcctcctgatttcctcttctacgattctaaaatatcgcgaatggcatccaagagaatactgaaggagctcaaggacttacagagagatccaccaacttcatgcagtgcaggccctgtgggcgaggacatgttccattggcaagcaaccatcattggtccaaatgacagtccctatgctggtggtgttttccttgtgaccatccatttccctcccgattatcccttcaaacctcccaaggtagcattcagg

SEQ ID NO: 28511 - DNA, 262 bp, Glycine max
  Clone ID: 700942779H1
cttgttggttgattatatgaagtgtggaaagagtaataaacaacaccaataaaatacaactacaaaaaagcaaaaccaaccgaccaacaacctaccatctcttctagcttcattcttttctttctcgccttaaactacaaccttagttcttcattattgtgattgtttccataatggagttcagatcaaaatcatgcaggaatgagagtctgcagattgaaaactactgtggaggaagagtggcaccaacaagcatgcaaga

SEQ ID NO: 28512 - DNA, 251 bp, Glycine max
  Clone ID: 700942785H1
gtgctttggacaatgaccagatccatattccttttcgtggaagcaagcttacagaagtgctccgggactcctttgttggaaattcaaaaactgttatgatctcttgtatatccccaaatgctgggtctgtgaacacacacttaataccttgagatatgcagaccgagttaaaagtctatccaagagtggaaatcctagaaaggaccaggccccaaatcctataccaccaccagcaattaaagaggtttcat

SEQ ID NO: 28513 - DNA, 253 bp, Glycine max
  Clone ID: 700942789H1
gaaaatcatagagacatcaccaatgcaaacaccattgtctcaaggcccttcagttccattaatctttccttcatcacagggatcatcacttctaataagtgattccagttactatgatggagggctaaagaagcctcaagagaaattttcatgaccaagccagcattggaccctttgtcctactatgattttccaatgggtgttgcacagtctggttttaacttacctgttagtcagtatcagacaagcctta

SEQ ID NO: 28514 - DNA, 259 bp, Glycine max
  Clone ID: 700942795H1
tgatgatcggctgcagcgtgttacaactacaaagaataatgagcttgttgatcctgcacagctggactcacctgagtttttgctcaagataactaggtctgattatgttttgaaatctcttggtaaagcaggatagttttgtggactatgaacgtggcagaatttaaggctagattaatttgccaacataatgaaaatccttctggaagggattcgtttgatgcagaggatgggtatgttgtagaccgtggcttagatt

SEQ ID NO: 28515 - DNA, 258 bp, Glycine max
  Clone ID: 700942839H1
ctttggagaacatgctgagaaagcaaatgtggcagaaactaattcaggggagaaggacactattttactaggtacaggtttaaaccaacaagatcgcgaagagatgtcggactacggttaaggcacgtaaatcaacaggtgggctgaattgtattttcaggtaggaaggccactttgtaggttgtgatgcctcgtgatggtttatgaatcactgatgtatactctacacttgtgttgggttagttataacacattgtc

SEQ ID NO: 28516 - DNA, 277 bp, Glycine max
  Clone ID: 700942903H1
tgtgaatcaaataatacattactccattctgatactctactgttgttttctgtttacactgcaatcttccattacattttctcaatccctggccttatcttttcacatatttatactgtctctttagtctctaggtgccatattgatcagatctaagtatctttctgacaaacctctgcagggtttcatgtttgttatggtacaagtccagtactgaattaatttatcaacagctatgattagatcaacaatgcaccaatttcttcttcatttatgc

SEQ ID NO: 28517 - DNA, 53 bp, Glycine max
  Clone ID: 700942944H1
actagtacatgttgacatgttttgagttctctaataagataaatttttacgtt

SEQ ID NO: 28518 - DNA, 267 bp, Glycine max
  Clone ID: 700942945H1
atggtatgatgctgggaaatcggagtactttgcttcatcgtcgaccctctttgtgatcgagttcatcttgttccactacgtcgagatccggagatggcaggacatcaagaaccctggctctgtcaaccaagaccccatcttcaagcaatacagcttgccccaacatgagtgtggataccctggtagtgtgtttaaccccttgaactttgcacctactttggaggccaaggagaaggaacttgccaatgggagattggctatgttggc

SEQ ID NO: 28519 - DNA, 283 bp, Glycine max
  Clone ID: 700943004H1
gaacagttgattgttggtagccatggctgcagcagccaccgcgaaaccgcttctgtcactgtggtttatgcttctgctaccgtcgtttcttcggatcgccgtcgcttaccgacccggcgacatcgttcccatgagctgcatgggtcaataccactcctcgcgaaccgtgtggcaggacctcattggccgccactgccccatcttcgccgtgaatcgcgaggtgttgatgcccatacccaagcccacgggttacactggtgctgatgcttataaaatattgttt

SEQ ID NO: 28520 - DNA, 278 bp, Glycine max
  Clone ID: 700943010H1
gtgagattgaaccgaaaagatgggttgggtaaggtggcgggaacagtgctatgtgtggttggagccaccgtgatcacactatacaaaggtccaacaatatatagcccaacaactggtgtgaacataaacaacacaagagtgacacaagtgtttgaattggggtcagtgtcactgggagatgcaaaggggaagaactggaccctagggtgcttatacctcattggacactgcttgtcgtggtctggttggcttgtgttgcaagcaccggttctcaagaa

SEQ ID NO: 28521 - DNA, 278 bp, Glycine max
  Clone ID: 700943011H1
ttggaatcggatcgtgtcgtagccaccgctcctacctggcgccgtctttcactttctgcttctcccatctcccactaaacaaccatggacctggatcctcgccaatacgaaaaccttgctgtaaatgataatgacatccacaacattgttctgtcatatcttatacataattgctacaaagaatcggtagaatcattcattgcttgcacgggagcaaagcagccgacagattatttggaggacatggataaaaggaaaagaatttttcactttgcact

SEQ ID NO: 28522 - DNA, 276 bp, Glycine max
  Clone ID: 700943012H1
aatagctttaggagctggaagaggcttgctatatttgcatgaacagtgtgacccaaagattattcacagggatgtgaaggcagcaaatatcttgcttgatgattattgtgaggctgtggtgggagattttgggttggcaaagctgttggaccacagggattctcatgtgacaacagcagtgagaggcactgtggggcacatagcccctgagtatctctctacaggccaatcttctgagaaaacagatgtgtttgggtttggcattcttcttcttga

SEQ ID NO: 28523 - DNA, 285 bp, Glycine max
  Clone ID: 700943017H1
attcaaggtagggctaggaattgagcatcctcaagaactaataaacaacatacagtgacaagctgaaacaataaccttgtcctaaatctggagctgaagttcctttgaactttctagttttcctttctggcactaaataccagagagccttctttatggaatccgaaacctctaaatttaaatgatcttcacgttgcagaattgaccgtcagagaaaaccttgccttctcagcatgagtccatggagttggagctcgttatgacttgctagcggaattgccaaaa

SEQ ID NO: 28524 - DNA, 282 bp, Glycine max
  Clone ID: 700943018H1
gtgctagattccctctctgatctctccggtgctgatgttggaaacttagcagatgatggattttttgagtgcaagcacttgcttcgacttgatgatggtgctgagattgtgaggggcaggaccgaatggaggccaaaacccttaaacagaaactttggtcatgttttgagtcaggttcctgttccagcagaaagcacctgaatctcattgattgacatcaatggaagagtggcataattcatgttcccacttgcagattggagagctttgcttgttgcctta

SEQ ID NO: 28525 - DNA, 278 bp, Glycine max
  Clone ID: 700943021H1
cgcaacaaaaagaaagaatcccaggcgaggagaaagatggaggggaaggagcaggatgtgtcgttgggagcgaacaagttccccgagagacagccgattgggacggcggcgcagagccaagacgacggcaaggactaccaggagccggcgccggcgccgctggttgacccgacggagtttacgtcatggtcgttttacagagcagggatagcagagtttgtggccacttttctgtttctctacatcaccgtcttaaccgttatgggagtcgccggggc

SEQ ID NO: 28526 - DNA, 278 bp, Glycine max
  Clone ID: 700943025H1
ctaaactccataaactcacaagaccaaatgcagttgatatagttccacattctccccactctctacaccatctcacagttccaaaccgcaagcaaccctttgcacacgcaagctgggaacagtgatgatggagagtaccctttaaatgtcaccacctcagggaaccaagtgaatgtaacaactggggtggttgatactacagtgtccaatactatctacagtgataaccagcttgcagtgtatcaggtagataaggtacttcttccaatgaagctttt

SEQ ID NO: 28527 - DNA, 274 bp, Glycine max
  Clone ID: 700943027H1
gaggaaaccaagaggctacgaactgagagggctggaggatggagtggagatattagtaggaaaagggcacttgaagaagcctttggaagcatctgggtttgctgagacaataataatcatgcaaggctggacatgcttattttaaaatggtgtttagatactttctaaatcctaagggcatgcaaattccagtgtcacagaagctattttggcatggatattgcgatgtaaatggtgtagaatgtagatttgttgaattttgttctgtgaacca

SEQ ID NO: 28528 - DNA, 274 bp, Glycine max
  Clone ID: 700943047H1
gctggaactgataaattggcatagtggtgtggtgtccttatggagcaagatagtttcaatgttgtgcatcaacttttgtggcttacgtttacacttgttaaaaacatgcataagcacttcaagaaatcattttgaaatggaaaataatgtatatatagataatttgcacgtagcattagcacttcgagaaagatgcaatggaataagttggcacaatggtgtgtctttgtggagcaagattagtaatgtttgttaactttagtggctcatgtgt

SEQ ID NO: 28529 - DNA, 277 bp, Glycine max
  Clone ID: 700943066H1
actgtgtcaagagtaactctaaacgtatcaacatggtggggattcacactccaaagaaagacaatgaaccattgctacaatgcactcatcatatgtgcccaataagggtacactggcacgtgaagctcaactataaggactattggcgagtcaaggttgccgtgacaaatttcaactacaggatgaattactccctctggactcttgctgttcagcatccaaatcttaacaatgtcacccaagttttcagctttgattacaagcctttacttcccta

SEQ ID NO: 28530 - DNA, 274 bp, Glycine max
  Clone ID: 700943081H1
gtcaaagtatttggtgatcttcatggtcagtttggtgatttgatgcggctatttgatgaatatggatttccttctactgcaggagacatcacctatattgactacctgttttttggagattacgttgatcgaggacagcatagcttggaaaccattaccttgctacttgctcttaagatcgaatatcctgagaatgttcacttgatacggggaaaccacgaagctgctgacataaatgcactatttggttttcggattgagtgcattgaaagaa

SEQ ID NO: 28531 - DNA, 266 bp, Glycine max
  Clone ID: 700943093H1
gtcaggctgaacgatatagttgggcagcaacaaggggagtgaatgaagaaatacttctggagaatttgccagaagatctccagacagacataagacgtcatctcttcaaatttgttaaaaaagttcgaatcttttccctgatggatgagcctatcttagatgccatttgtgagagactaaaacaaaagacgtacatcaaaggaagtaaagttttgagtcagggtggtcttgtagagaagatggtctttgttgtacgtgggaaattg

SEQ ID NO: 28532 - DNA, 270 bp, Glycine max
  Clone ID: 700943095H1
ggacgctggtgtcatttctgggctcaacgtgatgcgaattatcaacgagcctaccgcggctgccattgcttatgggctcgacaaaaaggccactagctctggggagaagaatgttctcatttttgatctcggtggtgggacttttgatgtctctcttctcaccatcgaggagggtattttcgaggtgaaggccactgctggtgatactcacttgggaggtgaagattttgataacagaatggtgaaccattttgttcaggaattcaagag

SEQ ID NO: 28533 - DNA, 251 bp, Glycine max
  Clone ID: 700943108H1
gcaatcacagctagccactcctccaacacgggccattggtcctagtgctggaaccagttctggaatgccccccgctgttactaatgctgataggcatacaggaggggaagaaggtagacctcctgctttggtttcagtggattcctcgaggcgcagaatgtcagggcccattttaaatactttatcaagtgccaatgccttgggtcagtcaagtggatcatctaggagggttgctgtctctagtagccgtg

SEQ ID NO: 28534 - DNA, 249 bp, Glycine max
  Clone ID: 700943113H1
ggcatgaaggtgtctattaggcaccttggtccttctatgattcagcagatgcagcatccttgcaatgagtgtaagggtactggagagacaatcaatgacagagacaggtgccaacagtgcaaaggagagaaagttgttcaggagaagaaagtacttgaagttgttgtggagaagggaatgcagaatggacagaagattacattccctggtgaagctgatgaagcacctgatacagtcactggggatatt

SEQ ID NO: 28535 - DNA, 248 bp, Glycine max
  Clone ID: 700943127H1
aaattggtgagtggagatttgataaaaggtcacatctacgaggacctccaccaaaaaacttgcccttgcccccaccaggggttcctgaaagtgtggtaacccttgtaaagatggtgaacgaggctagtgctaacattccaaattgggactcatcttccacctcatcatgatgatatcccaagtgcacatttcgaaaaggaaaaaaaaatagacatttgagtctttttttttgtcacgagtttagtctt

SEQ ID NO: 28536 - DNA, 247 bp, Glycine max
  Clone ID: 700943139H1
gtgagaattaaaccaagtgtcttctgtatcattcatttgttgcaacttgatatctataaacacccggccattgttttgtgattcatgtttgtcctaagacctaaagttagcatgtgttaaaaagtggaataaaatctcagtttaagtcctctggtttcatagaatgtagaaaacaaaagatgaagaggattgatgtggtgtctttctagctgtcgtgtattcataaatcatgtatgatttgggaaat

SEQ ID NO: 28537 - DNA, 247 bp, Glycine max
  Clone ID: 700943141H1
gagaaaccctaggtaagaagaaaagatgccggctggtcatggtttgagatcccgcaccagagattccttctctcgtcctttcaggaagaagggaaccatcgccctcaccacatacctgagaacctaccacgtcggcgactatgttgacgtcaaggttaacggtgccgttcacaagggaatgcccacaaattctaccatggccgcaccggacgcgtctggaatgtcaccaaacgtgctgttggcgtcg

SEQ ID NO: 28538 - DNA, 66 bp, Glycine max
  Clone ID: 700943155H1
caaaatatgccctttcttatgttggaaatttcaataacctaagttgtgtttacggaatgcaatatg

SEQ ID NO: 28539 - DNA, 245 bp, Glycine max
  Clone ID: 700943156H1
gagcaagatgatttatgcaagctccaaagacagattcaagagggagctggatggaattcaagtagagttgcaagcaactgatcctactgagatgggtcttgatgtgttcaaaagccgtgccaactaaaatgattatataaaatagtaggctttctggtgggagcagcacccctgaagccttagttactcatatggaaaatatcctagtttgtgggatggtcaacttgggtagttatggtcccaaa

SEQ ID NO: 28540 - DNA, 246 bp, Glycine max
  Clone ID: 700943157H1
gggaaaagaaaaaccagctttcttcaagcacctagatttcctctctctctaaatggcgttctcttcttttctcggcagagtcctcttcgcctccgttttcatcctctccgcttaccaagaatttaattcttatggagttgatgggggacccgcagcaaaagcactcagaccgaagtttgatgcctttgcacatcaagtacattctaaagttggctttcaacttccagatattgatatgaaattttt

SEQ ID NO: 28541 - DNA, 247 bp, Glycine max
  Clone ID: 700943164H1
agagaatcgatgtaaataaatttgcatctgagaataggctacatggggcacaaaagtgcattttgcatggcttctgctcgggcttatggagttcattaatgtctcagcattaaactttctgacaatttgttcatatcaagcaatcaactaacaaatgctcacttgttcgaaaagaggaacttgttgtatgtaacatatttaaagcatcaacgcatgaggggtttctctcctgcacttaagatactag

SEQ ID NO: 28542 - DNA, 242 bp, Glycine max
  Clone ID: 700943178H1
gttctgttctacttgctctcaagtttcatcttgggctgtaggctgtagcataccatgaccaccaaggatccaaaatccgtgtacgactttgttgtcaaggatgctaagggagatgatgtagatctctccttttacaagggaaaagtccttctgattgtcaatgttgcttctcaatgcggcttgaccaactccaattatacggagctgaatcaattgtatgacaagtataaagaccaaggcct

SEQ ID NO: 28543 - DNA, 96 bp, Glycine max
  Clone ID: 700943181H1
ctgagttgtggttgaaatgtcagtttttctgccgcttgattaattcggcctgtactagcagatacgatttctgaaattgtttctatggatcaatgt

SEQ ID NO: 28544 - DNA, 241 bp, Glycine max
  Clone ID: 700943186H1
cgaacagagagagaaaaaaaaagaaaggtatcgtataggaagaagaagaagctctggattccacctcttcccgtccttcgagacggttgttaggctgcttgctcttcaggttggcctgggtttcaatctaaaggatcttgatttacattttgagacatggagggtgtttgtttctggacaaattgctaccagtatcggttttttgcattccaagaagtgcttgattggcgagttttcatcc

SEQ ID NO: 28545 - DNA, 241 bp, Glycine max
  Clone ID: 700943188H1
ctggaggcatgtgaatctgggagtatctttgaaggtcttcttcccgaagatatcaatatttatgcaaccacagcttccaatgcagaagaaagtagttggggaacatattgccctggggagtatcctagtcctcccccagaatattcaacctgcttgggtgatctgtacagtgttgcttggatggaagacagtgacagacacaatttacgaacagaaactctgcatcaacaatataaattgg

SEQ ID NO: 28546 - DNA, 241 bp, Glycine max
  Clone ID: 700943189H1
gaaacttaatcgatcatcacttcacttcactaatacatcatggcagacgagacccagaacaagtatgagagctctgaggttgaggtccaggatcgtggtgtttttgactttctcggtaagaaaaaggatgaagaagacaagcctcatcctcaggaggaggtcatcgccaccgagtttcaaaaagtcactgtctcagaccaaggagagaacaagcacagcctcttagaaaagcttcaccgat

SEQ ID NO: 28547 - DNA, 239 bp, Glycine max
  Clone ID: 700943190H1
gtttctttctctctcatgttgtagtatctcactagtgtttttcattcgtttctgaaccacacaaacatcaccaccgaacaatgccgacggggttaccggcggcgaattccttagtggcgccggacgaagaggggtgggtgtgggggcagatcaaggcggaggcgcgccgcgacgccgagtcggagcctgctttggcgagctacctctactcgacgatcctctcgcactcgtcgctcgag

SEQ ID NO: 28548 - DNA, 273 bp, Glycine max
  Clone ID: 700943221H1
ccgacgaccagatagcggataatgttattggcgtcattttcgcagctcgtgacaccaccgccagtgtgctgacgtggatcgtcaagtacctcggtgaaaaccccagtgtcctagaagtgttaatgaggagcaagagtgcatattgaagagcaaggaagaaaggggagaagataagggtctaaattgggaagatgccaaaaagatgccaataacttcaagggtcattcaggagactctaagagttgcttcaattttgtcttttactttcagaga

SEQ ID NO: 28549 - DNA, 270 bp, Glycine max
  Clone ID: 700943231H1
cacaaggcagaaagcaagctcatcctagagttttaaaaatggcagcagcctcctccatggctctctcttccccatccttggctggcaaggccgtgaagctgggcccatcagccccgaagtcgggagggtcagcatgaggaagaccgtcaccaagcaggcctcctccggaagcccatggtacggcccagaccgcgtcaagtacttgggcccattctctggcgagcccccgtcctacctcactggcgagttcccaggtgactacggctggga

SEQ ID NO: 28550 - DNA, 252 bp, Glycine max
  Clone ID: 700943301H1
gaagaaaatggcaaccatctctgctgctatcacaaccccatcgatctcccgcgcaactcttgtgcaaaagcgggtctcatctcccgttcttggtttgccagcaatgggtaaggtgggaagagtgagttgctccatggaggaaaaaccttattctgtgaaggaaagcagctctagcatgttggggatgggggcatctctgatggcagctgccagcgctgcagccatgtcaggcccagccatggccttggtaga

SEQ ID NO: 28551 - DNA, 243 bp, Glycine max
  Clone ID: 700943304H1
gtagccgtcgcactttgcgttttctgcgtcatctccgattccccgacaatggccacccaaatgagcaagaagagaaagttcgtagctgatggagtgttcttcgctgaactgaacgaggttctgacaagggagttagccgaggacggatactccggcgtggaagttagggttacgccgatgcgcaccgaaatcatcatcagagccaccagaacccaagccgttctcggtgagaagggaaggaga

SEQ ID NO: 28552 - DNA, 242 bp, Glycine max
  Clone ID: 700943305H1
aaactcttgtctttctctctctcccgaagataaggcagagaagagaaggagagaggcttgtacctggagagaaaagaggagacaataatacatggggaagcagggtctaaacacggtggagcaacaatctgtggcaccgacagcatccaagtttccgttgagcttttgggaagccacggtggcttcaacggtggcgctggtttttgcggtgggtcttctcggcgtgtacctcaccatgcccg

SEQ ID NO: 28553 - DNA, 241 bp, Glycine max
  Clone ID: 700943306H1
tggaaaaggaagttatggaacagcatacaaggctgttttggaggagggaacaacagtggtagttaaaaggttgaaggaagttgtggtaggaaagaaggagtttgagcagcagttgcagattgtggggagaattggaaaccaccccaatgtgatgccactaagggcttattactattccaaagatgagaaacttctggtttacaactacatgccaggtggcagcttgtttttcttgttgcat

SEQ ID NO: 28554 - DNA, 241 bp, Glycine max
  Clone ID: 700943309H1
ctcagtctctgtgtttgcggctgaggattccgaacgagtgaccttcttcgtttctcgcaaagtttaagtaatcatgggtaaggaaaaggttcacatcaacattgtcgtcattggacatgtcgactctgggaagtcaactaccactggtcacttgatctacaagcttggaggtattgacaagcgtgtgattgagaggttcgagaaggaggctgccgagatgaacaagaggtcattcaagtat

SEQ ID NO: 28555 - DNA, 238 bp, Glycine max
  Clone ID: 700943311H1
cttaatggtaagcctgaccctgacgatcatattatcaatggaatgaaacaggaggctgatccagaagattctcatcatgcgcaacgttttcattcggagacaggtgctgagtatatggctgcgacatacacatccattgataatttagaaagatccacaaaatctattgctccagttctagaacccgatcccaatgatgtggtttccacaccaattttatctactctgcaaaccgatg

SEQ ID NO: 28556 - DNA, 237 bp, Glycine max
  Clone ID: 700943313H1
gtctctctgagattgtggtgagtagcataatggaggcaccgaagctgaaggtagtgacactgaaagccatcgaagcaactccgtcaaccttcaaagagttcggtcaggtcgtggaggcttcgcgagacggccaggaattcggtccccacgatgctcaactcgacctttcccaaggaactccaaggttctacattatcaagcttgaaaaatgcccgcttaagttttctagtattacac

SEQ ID NO: 28557 - DNA, 240 bp, Glycine max
  Clone ID: 700943315H1
gctgctatgatcttggcactcattgccatttccatgcttcaaacagtggttatggctgctaatgagcaaggaggccacttgtatgacaacaagagcaaatatggaagtgggagtgtcaagagataccaatgcccatcacaatgctcgaggagatgtagccagacccaataccacaagccctgcatgtttttctgtcagaagtgctgcaggaaatgcctgtgtgtgcccccggggtattat

SEQ ID NO: 28558 - DNA, 176 bp, Glycine max
  Clone ID: 700943323H1
gagaaattctaggagttgtgtattgaagtgagcaagctgctgctggtgctggagtttagggatgagggtttattttattggcagggttacatgagtttgtgatgatgtgttattgtgtttctttaggtttgaataaatgatatttactttataacttgcttaatttcttcctcatt

SEQ ID NO: 28559 - DNA, 234 bp, Glycine max
  Clone ID: 700943328H1
atttgtgaatccataacgtcaggtccttgtcatgctattgacataacgagagaggctataagggagggggctgatgccgtcattgctgttggaggtgatggaactcttcatgaggttgttaatgggtttttctgggctggaaaacctgttgttagtcaagtgaaagagtctacgcattcaactgctcttggtctcatccccttgggaactggttctgattttgcaagaacattt

SEQ ID NO: 28560 - DNA, 234 bp, Glycine max
  Clone ID: 700943329H1
ggcggcgaaggaagcgggggtggagcgcgtggtggcgacttcgtcgatctcatccattatgccaagccctaactggccagctgataagattaaggcagaagagtgttggacagaccttgaatactgcaaacagaaggggttgtactatcccattgcaaagactctagcagagaaagcgggttgggaatttgcaaaggagacaggttttgatgttgtcatgataaaccctggtac

SEQ ID NO: 28561 - DNA, 238 bp, Glycine max
  Clone ID: 700943331H1
tgcttttctttctgcgcgcttttcccaattaagtagttcttccttttctcaaagcaaaaaaaatgttcatcgagagtttcaaggttgagagtcctaacgtgaagtacacagagactgagattcagtccgtgtacaactatgaaaccactgaacttgttcacgagaacaataatggcacttatcagtgggttgtcaagcccaaaactgtcaaatatgaatttaaaaccaacacccatgt

SEQ ID NO: 28562 - DNA, 240 bp, Glycine max
  Clone ID: 700943335H1
gataaaactgattggggaagtgagataggatggatttatggttctgtcacagaagatattcttaccggatttaagatgcatgcccggggttggcggtctatatactgcatgcctaagcgcccagcgtttaaaggttctgctcccatcaatctttcggatcgtctaaaccaagtgcttcgatgggctttaggttccgtggaaattcttttcagccgacactgtcccatctggtatggttat

SEQ ID NO: 28563 - DNA, 240 bp, Glycine max
  Clone ID: 700943336H1
caacacaacaaacatacatagagaaattcactcatataaaaatcatcacttcaaataaagctagacctagaaagatccagaggtagctacggagagaaacaaagctcatggctggtttgcaaagatctgaggtgtctttcaggagacagggttcatcagggcttgtttgggacgacaagttattatcaggggaattgaacaagaacgaagacccaaagggtgctcatggtggtgacctta

SEQ ID NO: 28564 - DNA, 237 bp, Glycine max
  Clone ID: 700943339H1
cagatctatactgatgacaagaggattaagcaagtggtgcagcatgcgaccaaattgaatgatgcaatttcagcagcaagaggtgttcctatgagcagagctcacataagcgttggtggttactatgatggtctttgaaagcattgattaggtgccttcgtgaagcaattgtagtctacaatggatcaaccatgctataagatctattaatctggccctatcctatgttgctgtaaa

SEQ ID NO: 28565 - DNA, 235 bp, Glycine max
  Clone ID: 700943346H1
tggaaatgcaatagcctgtaaattccttttttatacccccaaaagcccaaaatggcgataacaaactgagcccaaaagcctaatcccagatgcagcactgcaggtgattgaaggcacaaagttcacagaaaatagcgcgctgaatagtgtgcatcggttcagacttcagagcatatgaaatactgcaaattttccctcgtctgtgacgctaaggaaaaatcgacctagatttatt

SEQ ID NO: 28566 - DNA, 238 bp, Glycine max
  Clone ID: 700943351H1
aacccttctgctgagggtggaggagaagatgagggagttgatgatgcagctgttaaggttgttgacattgttgacacattcagacttcaggagcaacccgcattcgataagaagcagtttgttaccttcatgaagaggtttatcaagaatttgactcccaagctcgatgcagagcaacaggagttgtttaagaagcacatcgagggagcaactaaatacctgctctctaagattaaag

SEQ ID NO: 28567 - DNA, 232 bp, Glycine max
  Clone ID: 700943358H1
cttggaggataaggcggtgccatcactcgccgctaagtggaagggtaaaacttcagaggagttagttcacaccctccacttctacagggatatcatttcagggccgtttgaaaagctaattagagggtcgaagattctgccattggctggcgctgaatactcaaagaaggtgatggaaaactgcgtggcacacatgaagtctgttgggacttacggtgatgctgaagccgca

SEQ ID NO: 28568 - DNA, 231 bp, Glycine max
  Clone ID: 700943360H1
aagcgacttgctggccttgaacctgaggtactgcctgctgaaagagctcttgaatattcgactagaaaatcatgcaaagaagaaccaactgcaactgctactttaactaatggagtgtctgaccatcacgatgctggggaagaaaccaagcttactcctcaagcttctgacagtttgaaaacagaagtactaggagaatcattaaaccagagtgagaagtcatatgatgcc

SEQ ID NO: 28569 - DNA, 235 bp, Glycine max
  Clone ID: 700943364H1
tcccctctttcgaatttcgatactttgatcagatccacaacacttcttcatccatgacgcttggttcttcaggatccagtgtcgtggttccaaggaacttcagattgctggaggagcttgagaagggagaaaaaggaataggagatggcacagttagttatggaatggatgatggtgatgacatttacatgcgctcttggactggaaccattattggtccctataatactgtaca

SEQ ID NO: 28570 - DNA, 230 bp, Glycine max
  Clone ID: 700943374H1
gtggttttgatgatggggccagccagttacatatcaacgccctgttgactcttgtaattattttgtttctcaaatttccctcccaggttgcaactagtggtagatttggctggaagttgggaccatttactttgccttgccatccccgcctccacaccaaccactcaagatgtctctccttaagctgctgagcaatgatggttgatatgatatgatatgatatcaggtca

SEQ ID NO: 28571 - DNA, 228 bp, Glycine max
  Clone ID: 700943377H1
aaccaccaaattaatccatatatagagagagttaggaaaacaatggaagccatttctcctaagcatcttatgacatcccttgtaataattatagcttctagtttgaccgcacactgtggctgtgccaagagagggggtgaaagaccatacaaagaagccaacacactgttcataagaacatcttgcagctccacaacatatccaagactctgctacagctccttagtg

SEQ ID NO: 28572 - DNA, 155 bp, Glycine max
  Clone ID: 700943379H1
attaatttgaatttcagagatggaattcttaacctagaaactagaatgcgtattctcggatttgggggaaaatcgtaaaccctattttaggcttgaaattgaaagtgtcgtctcattataatgccttaatatagatataagactttgttttgtgc

SEQ ID NO: 28573 - DNA, 237 bp, Glycine max
  Clone ID: 700943381H1
gtagaatcaacaacagattttcctcagaagttcttctactgcttttggtggggtttgcgcaatttaagttctcttggacaaaatctcaagactagtactgatgtctcagaaatagcctttgcaatcttcattgccatctttggattggtcttattctcgttacttattggaaacatgcagaaatatctgcaatctacaactgttagagtggaggagatgagagtgaagagacaggac

SEQ ID NO: 28574 - DNA, 236 bp, Glycine max
  Clone ID: 700943382H1
gtgaagtagcaaataccaagttgtttcaagttaagccttattacagttagtaccaaatatgggacacacatggttgggttcattagtgatttttatgacaatttcggccgtacaagcccaactcaaaactgggttttactcctcttcgtgcccaaacgcagaagccacagttcgatccactgttgaatcctacttcaataaagatcctacaattgctcctggcctgctccgacttc

SEQ ID NO: 28575 - DNA, 233 bp, Glycine max
  Clone ID: 700943383H1
accaccttaggatcctccatgttcttcacggatgataggtctaatgacccaagtatggttaattcctctatttgctgtacattgatatggggctgatgctattcctggggacccaccatgtcagcatgctggtccgcggtaagtcatgtgggccacaaagtaagaaaaaaaagctaatgaattcaaacttgaagttctaaaccaaaaaattcttgctgatgatgatgctttag

SEQ ID NO: 28576 - DNA, 232 bp, Glycine max
  Clone ID: 700943384H1
ttggctttgtggcaaatgaggaaaccttatatgatggaaaaagacaaaatgaacaacaacattaagagcaagctaaggaagggattgtggtcacctgaggaagatgaaaaactcctaaggtacatgatcactaagggacaagggtgttggagtgacattgctaggaatgctggccttcaaaggtgcggcaagagttgccggcttcgttggattaactacttgagacctgatc

SEQ ID NO: 28577 - DNA, 229 bp, Glycine max
  Clone ID: 700943385H1
ccaattgctgttacattgagtggtgcatattcatcatccatttgaatgaattgctgtggagacacgtctttctcaggctatggatcattggatttagtctctttgtaatttttatcatgtttgcttattgtacaaacgacagaataacgacttcgaagtagttgatgaagggcttctgataatttggggaaatcagatgtgatttttaagatagttggatcagattatt

SEQ ID NO: 28578 - DNA, 230 bp, Glycine max
  Clone ID: 700943387H1
cttaactttcccacaacactacccatccatcattcgttttctctctagattttttcagttagttattgctgtcttctttttgtgtgtgccaacaacacagaaagagagagaaagacatggctctgaaccaatcaaaggccgtgttgttgagggtgagtttggtggtggtggcgctgtgtatagcaggatacatagtgggtccccctctctactggcatttcgttgcagtg

SEQ ID NO: 28579 - DNA, 230 bp, Glycine max
  Clone ID: 700943388H1
ggccatccaagctgtcctctccctatatgcaagtggtcgcacaactggtattgttttggactctggcgatggtgttagtcacactgtgccaatctatgagggctatgcactccctcatgccattcttcgtttggatcttgctggccgtgatctgactgactctttgatgaagatcctcactgagagagggtacatgttcaccacctctgccgagcgggaaattgttcgtg

SEQ ID NO: 28580 - DNA, 229 bp, Glycine max
  Clone ID: 700943394H1
tgatttgttttagcaatacaagttctcacacttacaaaacacgcatcttaagcgcttgaagaatgaaagtctcaagggtgtatggctttcaaagagatcaattcatgaagtttcataggaaaactagattgacctcttcagtgacacttggtagtgtccaaagaagggcatcacaagggtcattagggtgtttccctccatcatgcattttcaggcaagtgttttacaa

SEQ ID NO: 28581 - DNA, 255 bp, Glycine max
  Clone ID: 700943405H1
gaacctttcaagtgttgggtaattcacaagcaaaaatagctttgataccttcattattgatgtttcccgctgcgttttctctattcaagggtgctcattccaagcgactaatgttaccgaccgagcactgtatatataatggaagtttttcaattccgagagcttgtttcttattcactaagcagagatgggttagcagaagtttctgtcgcgtaattctagtgagccccgtcttaaatgctgtgaaaggtctta

SEQ ID NO: 28582 - DNA, 255 bp, Glycine max
  Clone ID: 700943412H1
cttgataactcagtttttggcagagttaaagaagtcagattatcttctttcttgaagaatacactacatgcttcctcaccttctcctgctcctgctccatctccacagttaattgatcactctgagccatcaacttcaccacatcgtgctagtccttacactccaatatcaccagcagctgctgaacaacctccttgtttcgattgtgaagtaccctcacctgcaccttctatggtgcctgcgcatcctccagat

SEQ ID NO: 28583 - DNA, 255 bp, Glycine max
  Clone ID: 700943417H1
ctcaaacacaactcaccaacacagttgttgcattatttcttttttccagatccaacttcaaaattgcaatgggagtggaagatacagatatttgtatcatcaaggagccagatcatgttgtagtctattcagatggcatttctcatgattcgggtcatgaagctggaagtggtcatcacaatattacagagtcgtatgaacaaatcaatgagactactgaacatcatagttcagaggatagtgcaaaggaatatg

SEQ ID NO: 28584 - DNA, 254 bp, Glycine max
  Clone ID: 700943433H1
gttcttcgtccccttcccaatcttcaactttagggttcctttaatctcgttattcctcttcactcccaaactccgttcactccaacaacactctgatttagaaatggatggaccggctggtcgaggtggtgctggactggacatgtttctgccaaattataaattgggaaaaacacttgggattggatcttttggcaaggtcaaaattgcagaacatgtattgactggccataaggttgcgatcaagattctta

SEQ ID NO: 28585 - DNA, 252 bp, Glycine max
  Clone ID: 700943450H1
gcatttacagcttttgaagaaggaaatggaagtgcttagaaataatgttctgaagtcagatacagaaactaaagccgcaaagaagaaatataatgatgaatgtgataaactgaatgagttgctagctcgatttagggccgctgatgattctcgtcaagaggcatatgctaagttactggctttgaaaaaacaattgcatgagaagagcaaaaatttctgggaatacagagatgctgcaaataaagcacagga

SEQ ID NO: 28586 - DNA, 253 bp, Glycine max
  Clone ID: 700943458H1
gaagaaggaagcacaggaagagtaacgtgctcgattttatccatagaccacaccaatatgttttacagagtctgcgccgtttgcgaaagaactatttccgaccccactttcgtctgccacccctccaaccctccctccaaacgactctttcgcatcctcatgtcggttgccacagacacacaggttctcactgtcgtctgcttcgacagggttgccaggctcctcttcggctgctccgccgatgagttcttcc

SEQ ID NO: 28587 - DNA, 253 bp, Glycine max
  Clone ID: 700943460H1
gtcacctggggcttcaatagccctattcagattcagttcctctttgcttctctctccaaacaaaacaacagaaccaaactcagaaccaaactcagaaccaaactcgccaaaactagggttttgcattgatggcactgtgcaaccgcgtcagatcgggaatctctctcttcaccaaatccacgttccttacttcccagcgatccagtctccaacgatccctcgttgcccctttcatttccctcgcctccagaaa

SEQ ID NO: 28588 - DNA, 250 bp, Glycine max
  Clone ID: 700943467H1
gcaatttgagatgacaggtttggaccctgagtataatagattgttcaatgagggcatggtgtgcactgctagggttgtgtccaaggctgtgatcactgggtacaaagatgggttcaaccagattaagtccttggttgatgttggaggtggcattggagggtctctttctgagattgttagggcttatcctcacatcaatgccatcaactttgacttgcctcatgtggttgccactgctcctaagtatgat

SEQ ID NO: 28589 - DNA, 251 bp, Glycine max
  Clone ID: 700943475H1
tggtgaatgcgtagaaaaggaaaataaagaaattagcgtgaaaaatgttgggtgtgttcagcagctccatagtgtcgccgccggaggagctcgttgccgccggcagccgtacaccgtcgccgaagatgacggcggcggcgctgcggaagtggttcgaggagaagaacccctccgcagtgtcggtggaggtcggagagcatgtccagctcgcttatacccaccagaacgagtcgccgtttcagcccagatcc

SEQ ID NO: 28590 - DNA, 250 bp, Glycine max
  Clone ID: 700943481H1
gattcattggtttactttaggtattcttggttggcagttgctacccaaaggggcgaaataagcataaataaagtgaagcttagtgcagagaaagcaagagttgttttggtgtttggtgtggtcttagggtatgaagttattgcagattcgagtgttcagttgttcatagattgttttattcgggctttattgttgggaaggttaactttcttagttggtaatggtgacgatgattgcatgtaatgaaata

SEQ ID NO: 28591 - DNA, 250 bp, Glycine max
  Clone ID: 700943485H1
ggatgctcggtcttcagcaaagcgccttactgaagaagcagttaacaggaaaagcaccgatgatatctcctgcatcgttgtgaaatttcagtgatctcaaggctcgcatgatagactttgatccagcaacttgcaagtgtaacataaacttcggtgtaatgaataaaacgataatgcttcatagccatcaggtggtgttattatgttgagtcattcatgcaaattaaatgggacaactgtgttatttaaa

SEQ ID NO: 28592 - DNA, 250 bp, Glycine max
  Clone ID: 700943489H1
ccttttgacctctttgacacaaggaagaagcctaacaatattaagctttatgtccgccgtgtctttatcatggacaactgtgaggagttgattcctgagtatttgggctttgtcaagggtattgtggattccgaagatctaccactcaacatttcaagagaaatgttgcaacagaacaagatcttgaaggtcatcagaaagaacttggttaagaagtgccttgagctcttctttgaaattgcagagaaca

SEQ ID NO: 28593 - DNA, 249 bp, Glycine max
  Clone ID: 700943491H1
gtcctggaagctgatattgttgtcgttggtgttggaggaaggcctcaaacagccttagtcaaagggcaggttgaagaggagaagggtggaatcaagaccgatgctttcttcaaaactaatctttccgatgtatatgctgttggtgatgttgctactttccctttgaaattatacggtgaattgagaagagttgaacatgttgatcattctcgcaaatcagctgaacaggctgtgaaggccatcaaggca

SEQ ID NO: 28594 - DNA, 265 bp, Glycine max
  Clone ID: 700943519H1
ggattcccttattgctgttcagttgaccgttgaccttaagccaaatcttccaagggaagaagagaggatcaagcttcgtagaggaagggttttttcccttcagaatgaacctgatgtggctcgagtttggctgcctaactctgatttccctggtcttgctatggctcgggcatttggagatttttgccttaaggactttggattgattgctgttccagatatctcatatcaccgccttaccgagaaggatgaatttgttgtgtta

SEQ ID NO: 28595 - DNA, 261 bp, Glycine max
  Clone ID: 700943521H1
cgcaaatggagactggtgcagggtttgctttgtctgtttctggggtgaccttatgttcttctgtgttggtttctattgtggcatttatgatgcagtgaattgcaaggcatattggctcctattcatgtttgattggtcttatcatgtacgtgttgaaattatattttatgatgaatttaaagggttgtttttgtttctttactatgcttgcttcttgaacacggtcctgtcgtttttggcattgtaacctagtactagctt

SEQ ID NO: 28596 - DNA, 262 bp, Glycine max
  Clone ID: 700943528H1
gtcactttcaatttatggttagctgcttgtgcctcacagaatgatgttgaaactgcagaaagagttctgcttgagttaaagaaggcaaaaatagatccggactgggtaacatacagtacattgaccaatttatacataaaaaatgctagccttgaaaaagctggagctactgttaaagaaatggagaacagaacctcgaggaaaactcgagttgcatattcctctcttcttagcttgcatacaaacatggggaacaaagatg

SEQ ID NO: 28597 - DNA, 265 bp, Glycine max
  Clone ID: 700943531H1
caagttatacagatcatcaaaaaacaccaatcagcggatactgtttgatattgacccttctggaaagtatcttggtacaggtggccaggatggtttagtacatatatataatctccaaactgggcagtgggtgtcaagtttcgaggctgctttagacacagttaatggtttctcattccatccatttctaccccatgctgtatcatcctcaggccaccgaagatttgtaattccagatgatggcaatgaagaattttgcttgact

SEQ ID NO: 28598 - DNA, 258 bp, Glycine max
  Clone ID: 700943538H1
tgtagatccatccactccctcgcacaggcatcaggtgagtttgttgtgatttgaatggagggaagtggaggtggcggtggcagtggcggtggttcaccttctgcacctgtgaagcaatacttgcaggaattctcgaagctttttcagtactatctggataaatccactccccatgccctctacagatggattgggactttcgtgattgcatccatctacgttctgcgtgttgtttatttgcaggggttttacattgtc

SEQ ID NO: 28599 - DNA, 256 bp, Glycine max
  Clone ID: 700943577H1
gggttgtggcggtgcattctcagtgtggctgccagtgtttgtgtcttgttttacagcaatagcattggctgggactgggtgcgataaggcaccggtggtgttcgtgttcggcgattcgaactcggacacgggtggactcgcttccggtctgggtttccctatcaatcttcccaatggccgcaatttctttcacagatccactggccgcttgtccgatggacgcctcgtcatcgacctactctgccaaagtttgaat

SEQ ID NO: 28600 - DNA, 260 bp, Glycine max
  Clone ID: 700943579H1
gcacaaagcattatcattactactataagcttatagttgaaatctttgagcatagaaaaaagatgccgatttctagaattgccattggaaatccttcagagtttggccaagcggatgcgcttaaggctgctcttgctgagttcatctcaatgctaatatttgtctttgcaggagaaggctctggcatggcatataacaaactcacagacaatggttcggcaacaccagctggggtggtggcagcatccctgtctcatgca

SEQ ID NO: 28601 - DNA, 255 bp, Glycine max
  Clone ID: 700943590H1
cttcgccggaaagcagctcgaggacggccgtaccctcgccgactacaacatccagaaggagtcaacccttcaccttgtccttcgtctccgtggtggcatgcagatcttcgtcaagactctcactggcaaaaccataaccctagaggtcgaaagctctgacaccattgacaacgtcaaggccaagatccaggacaaggagggaatccccccagaccagcaacgtctcatcttcgccggaaagcaacttgaggacgg

SEQ ID NO: 28602 - DNA, 255 bp, Glycine max
  Clone ID: 700943592H1
cttgaaggtgactttaatgaggaagtagacgatgattggacaagagagcactttgaaagccacgaagtaaaggaacgtgggggaaaaggccacttctaactggagatttgcaggttagcctaaaggaaggagtaggaacctttggtgatcttactttcacggacaattctagctggataagaagcagaaaattccggcttggggttaaggtggcttgtggttattgtgaggagattcgtattcgtgagggaaaaa

SEQ ID NO: 28603 - DNA, 274 bp, Glycine max
  Clone ID: 700943602H1
gaacctcttaactggtccaattccatggtcatttgggtgcttgaagaaagtggagcagcttaacctagctaggaacttcttgtacggacaggttccggaagtggtgtgtgcgttggggaatttggcgaacttttcgttgtcttataattattttactaaagtgggaccattgtgtaagatgctgattcaaaggggtgttcttgatgtgaggaagaactgcattttcgggcttccggatcagagatcggtgagggagtgcatggcattctttttg

SEQ ID NO: 28604 - DNA, 273 bp, Glycine max
  Clone ID: 700943611H1
gttagttaatcacaaaggggaggtgaagattactgattttggtgttagcgccatgctagcaagctcaatgggccaaagggatacatttgttggaacttacaattacatgtcgccagaaagaatcagtgggagtacttatgattatagcagtgacatctggagtttgggtatggtagtgcttgagtgtgccataggacggtttccttatatacagtccgaagatcagcaaagctggcctagtttttatgagcttctggcagcaattgtggaaag

SEQ ID NO: 28605 - DNA, 273 bp, Glycine max
  Clone ID: 700943618H1
gaattttctagagcaagagatttcggcgtaatgggtccaaacgctgcggcggcgaaacaagcggaaaagctccgaattgacggcaacacttacttcaaaaaagaccgtttcggtgccgccatcgacgcttacaccgaggcgattacgctgtgccctaatgttccggtttattggacgaatcgcgcgctgtgccatctcaagcgcaatgattgggagagagtagaggaagattctcggaaggcaattcagttggacagcaattcagttaaggcc

SEQ ID NO: 28606 - DNA, 273 bp, Glycine max
  Clone ID: 700943623H1
ttgagcatttgagagagatcatcatatggagaataataagatgatgggtgtgaagaaagaggactatgctgccaatataggatcttcatccctcccttcttgtaataattatccattctttgatttctctgaagataagggctctttagggtttatggagctattgggtgtgcaagactacaatcatctccttgatttccctctatcgtcacacgtgtcagtgcctcaaacctctgcggttaaggaaccacctgagactaagaaagagtgttc

SEQ ID NO: 28607 - DNA, 276 bp, Glycine max
  Clone ID: 700943624H1
gaaaaagaaaacatttgaaatatcgagagattagagacagcgccgcctccgaagatcaaacttggttgagaaaatgatgtgccgtaggacggagttgtatagagagttgaagcagcgtatcacacatcttcgacatttctgcgacacgcaacaaaaacatcttcaagatctcgaattgctcaagtgcttcaaatctgagattcaattcgagcttgcctctaatcactttcagaatgctcgaagtgattcctccttaggggactttgtggtggaccc

SEQ ID NO: 28608 - DNA, 272 bp, Glycine max
  Clone ID: 700943626H1
ctctcggtgtctggaacagagattgcgtttgtttcgcgaattgtgaagccgctggtgaaatagcaccaaatatgaggggaagaagctgcagttacagcccatcaccttcacctccaaggcgttacagccgaagaaggcacagccttagccctaggggccgatatagaggatgtgatagggatttgccaacaagtcttctggttcgaaacctcaacagagattgcaggccagaagatctgcatggtccatttggccaatttggtcctcttaag

SEQ ID NO: 28609 - DNA, 274 bp, Glycine max
  Clone ID: 700943627H1
gaaccattcacattcttccagaatcatcaaagccatcaacgggcttgacttggcaactagctggaagatgaagcaagcaactcttttcttcttctcactcttcctactcctttcctccaccaccatggccatttcaccagcacctgcagcagcaccaaaagccacagcaaaaactcctcctaccccaaaggcaacagcaccatcaccaaaaccattagttcccacaatacctcagtctccagactctcctgactcggtccccgacgacatcacc

SEQ ID NO: 28610 - DNA, 269 bp, Glycine max
  Clone ID: 700943632H1
gacatttgggctcttcttggctcgcaaggtgtctttgattagagcaataatgtacatggtggctcagtgcttgggagccatatgtggagttgggttggttaaggccttccaaaaggcttactacaacaggtatggtggtggggccaatgagctcagtgaagggtacagcacgggtgttggattgggtgctgagatcattggaacctttgttttggtttacactgtgttctctgcaactgatcccaagaggaatgctagagattctcatg

SEQ ID NO: 28611 - DNA, 271 bp, Glycine max
  Clone ID: 700943637H1
ctaagctgcagataagatctccctcgctgatgactacagagtggtgatttaccagatctcacatatgaccggaatttgtctcatcaggtttcagtacatgacgtgggaatattaacattagtgtctcgttatttcgttgtgggtatatgttctacttggggctttaaggatgtatcacaacctgcctgttgtgtaagttatctttttggttccttaataaaagatatatattaaattgttctttacctgtatatgcaacttcaaaattagc

SEQ ID NO: 28612 - DNA, 272 bp, Glycine max
  Clone ID: 700943639H1
agatgatggtgcattttcagaactcaaagcaggttactttaactccctaggagataggcaacaaaaagcactgatacagtatcatgttcttcccgtttatgtgtccagctccaactttgatgctctgagcaaccctgtgctgacattggccagtgacagccccacagggtatcagataaacgtgacagcatatggtaacagtgtgaacatatcaactggggtggtgaatgccacactcacaggcattgtgtacactgataagacacttgcca

SEQ ID NO: 28613 - DNA, 270 bp, Glycine max
  Clone ID: 700943650H1
cacaaggcagaaagcaagctcatcctagagttttaaaaatggcagcagcctcctccatggctctctcttccccatccttggctggcaaggccgtgaagctgggcccatcagcccccgaagtcgggagggtcagcatgaggaagaccgtcaccaagcaggcctcctccggaagcccatggtacggcccagaccgcgtcaagtacttgggcccattctctggcgagcccccgtcctacctcactggcgagttcccaggtgactacggctggg

SEQ ID NO: 28614 - DNA, 270 bp, Glycine max
  Clone ID: 700943651H1
aagaaagaagccattgagggagaagagaagttttgtgcaaaatccttgggaacagtaattggttttgccatttcaaagctgggaaagaacattcaagtactttcaagttcctttgtcaataagcaagaccaatacactgtggaaggagtgcagaatcttggagacaaagcagtgatgtgtcataggctaaatttcagaactgcagtattttactgccatgaagtccgtgaaacaacagctttcatggttccattggtggctggtgatgga

SEQ ID NO: 28615 - DNA, 264 bp, Glycine max
  Clone ID: 700943663H1
tcctcacggtgatgctggtctcaccggccgcaagatcatcatcgatacttacggaggatggggtgctcatggtggtggtgccttctccgggaaggatcccaccaaggttgataggagtggtgcttacattgtgagacaggctgctaagagcattgtggcaagtggactagccagaaggtgcattgtgcaagtgtcttatgccattggtgtgcccgagcctttgtctgtctttgttgacacctatggcaccgggaagatccatga

SEQ ID NO: 28616 - DNA, 268 bp, Glycine max
  Clone ID: 700943669H1
cctgaaacccaattccttaacagtttctcacccttctcttctcttctcttcatctactcttttcaaaaagaatagatgcatgaagtctggtgacctctgatctgattccctcttgatgtcaaacaacagaagagaacgaaactatcaattatttatttcattaagtaaaaagaattagtggaaaatgggaggttgctgttgttctgccagaaaacctcatctgcaaggggcaccagtatattactattgcccaccaacttttgaagag

SEQ ID NO: 28617 - DNA, 266 bp, Glycine max
  Clone ID: 700943675H1
cactgatctccattcccattccatggcttccactgaatcatcccctttcaagaaaattcagattcaaagggatgacactacatttgacgcatatgtggttggaaaagaggatgctcctggaattgttgtgattcaggagtggtggggtgtggattacgaaattaagaaccatgccgtgaagatttctcagcttggtagtgggtttaaagctcttattccagatttatacagaggaaaggttggtctggatgttgctgaagctcagc

SEQ ID NO: 28618 - DNA, 267 bp, Glycine max
  Clone ID: 700943686H1
gaaaaattttttcgaaatctgagaatgcaggggtatcttttaatggcaggaaagtacaagaacataccaatattgcggcatctacgtacaactaccaccaagaggatggaagcaattgaaagagagatacgagattcaattgagggtatcataaaaaaacgagagaaagccatggagaatggtgaaacctctaatgaagatttattaagcatacttttggaatcaaatcacaaggaaatccagggacatggaaacagtagggctgtt

SEQ ID NO: 28619 - DNA, 265 bp, Glycine max
  Clone ID: 700943690H1
tgaatctgttgaccaataattataaaaaaagcatcaagaaggaagcttgttggaccatatcaaacatcacagctggtaataaacagcagattcaggctgtgattgaggctaatctaattgctcctttggtcaatctgcttcaaaatgctgagtttgatatcaagaaagaagctgcttgggctatctcaaatgctacatccggtggttctcatgaacaaatcaagttcctagtaagtcaagggtgtatcaaacccttgtgtgatct

SEQ ID NO: 28620 - DNA, 265 bp, Glycine max
  Clone ID: 700943692H1
tctgaatctgcgtgtgtttgtgaattgttgttgagatctgaatcaaaatcagaaacgataatggctacaccggaccacctcttcaacctccgcaacaacttctacctcggcgcttaccaagccgccatcaacagcagcgacgttgccaacctctcccaagaagataccctcgagcgcgacaccctcgtccaccgctgctacatcgccctcggccagctccagttcgtcatctccgagatccacgacgatgctcccacaccactcc

SEQ ID NO: 28621 - DNA, 251 bp, Glycine max
  Clone ID: 700943704H1
gaagcagagggagtagcggcattaaaaatgcagatcttcgtgaaaactctgacagggaagactataaccctcgaggtcgagagcagcgacaccatcgacaatgtcaaggccaagattcaagacaaggaaggcattcctccggatcagcagcgtttgattttcgccggaaagcagcttgaagatggaaggaccctggccgattacaacatccagaaggaatcaacccttcatctcgtcctcaggcttcgtgg

SEQ ID NO: 28622 - DNA, 231 bp, Glycine max
  Clone ID: 700943776H1
cctgattaaggagagtatggcacagtttagtggcaaaactttggtgcagtggttggtagcaacactgctgattgccttgttgggtggtgcacaagctgttgtgttatgtaacatcgactcaagtcaactaaacttgtgtcgtgctgcagttactggtcaaaaccctccaccaccagatgagaaatgttgtgcagttattcgccaagccaatttaccttgcctctgcagata

SEQ ID NO: 28623 - DNA, 271 bp, Glycine max
  Clone ID: 700943804H1
aaaagcttctttggaagtcgccaaagtcggcaagacatatcagctcttaaactccgacgaccatgccaatttcctccgcaaaaataacaagaatcccggagattacaggcctgacattactcatcagtcccttttatctattttggatagcccactaaataaagctgggagattgcggtcggtatacataaggactgaaaaaggtgttcttatagaggttaagccctttgttcgtattccaagaacattcaaacgctttgctggtgtcatg

SEQ ID NO: 28624 - DNA, 267 bp, Glycine max
  Clone ID: 700943808H1
ttaacatatacaaattctctgtgttgtgttgtgtacttgtgttaattgtgttgttgttgtaggaaatttaagtgaagagagaatgatgatgaagtctgctatgtgtgcattggtgcttgtggcactggttgtggttgaagtggggcccatggctgaggctgcggtgacttgcaacccaacacagttgactccttgtcttccggcaattaattcaggttctgcaccttcgagtgcttgttgccagaagctgaaggagcaaaagccatg

SEQ ID NO: 28625 - DNA, 266 bp, Glycine max
  Clone ID: 700943810H1
gttgttgttagatcgtggggagagaaaagagtggagcctaagctgaagaatcatgtggatctagttgagcttctcggtattgcagatacaaagaaaggagctgatgtagctggaggtagaggtttctatctcaaaggagatggtgttcgccttaatcaagctctaataaactttgggcttgattttttggataaaagggagtatactttattgcatactcctttcttcatgagaaaagatataatgtcaaagtgtgctcaactagc

SEQ ID NO: 28626 - DNA, 212 bp, Glycine max
  Clone ID: 700943814H1
gacaaacggtgccggccaattctctttcattcagagggccaagatactggtgaccaggaacattttctatccagcaatttgaatatttgcattcgccaaccagatggatcctattcaagtgatttgttggagagcccaaagggcaatttggatcagaagctagagaaagattaaccatttattagacatattgttcctagcccacaataaat

SEQ ID NO: 28627 - DNA, 267 bp, Glycine max
  Clone ID: 700943816H1
aaagaatcgagtgattttcgtttgcgttgctgttgcgactgagtgagtgaagatggcgtgcttgcacgaccacagttgcgaagaccatgactgttcctctaactggtctctctacaaacacatcgacctctccaaggtaactgctttgaatgaggcaaatccaggaagtgttaagtcagttttcaaagcttgggaagagcgtctggattcttctggggttcacttggaaagcaatgagggtgatcctgagttacttgtcttcattcc

SEQ ID NO: 28628 - DNA, 265 bp, Glycine max
  Clone ID: 700943825H1
attttgtcccgcctttgtaaatacaattgggacactactaggattgggaagaagggtctttacatttttagtttggcaaatagatattgcaactacctttgtataaatctatttctgaagaagcaattacaactttcaagggatgatagcattttgtggcataaggattaaggaggcataaaggaccaattgctttggaatattcactcatgacaaggcacaaggtcatgcgtgtatgccaacacatagtaatgatgtgtgtttt

SEQ ID NO: 28629 - DNA, 206 bp, Glycine max
  Clone ID: 700943862H1
gaacgtgaagcgtgaaagaaagataatgggtgcttattgcaacggagacgtttcgttgccaccatcctacgacgtcgcttcaggagaagatcccaggttctgcaagcacgttcgcgacaacgtccatggcaacatttatctcgattccctcagtttgaagttcattgacactgagcagtttcagaggcttcgcgagttgaaacaac

SEQ ID NO: 28630 - DNA, 177 bp, Glycine max
  Clone ID: 700943867H1
cttctcagctgcagcaacagttgccagaatcaatgattgagttaatttcacaagataaaccgttgccagaaaagggtaagcttttgcaagcagtgatgaaagctggtcctttgcttcagacactgcttcttgcaggaccacttcctcaatggagacaccctccaccccctcttgagt

SEQ ID NO: 28631 - DNA, 176 bp, Glycine max
  Clone ID: 700943870H1
ttctgcgatgcattagcagaggagagtgcaagatcagtgacaggcatagtagccaactcaacaactcaaccaactgaagcagcaggagtagtgatctcttcatcctctcttcatcaagacatgatccatgctagtaataataatttcccattgaagaaagagcaacaaggttgcat

SEQ ID NO: 28632 - DNA, 251 bp, Glycine max
  Clone ID: 700943901H1
gatgacagagacatgttcttcattgacattcctgacactctatgagccaatgcatgaaacaacaagccagtcccttcaagcatttggtgtggcaggatcaaagctcattcaccagcaacaaggtgtttgtgttggcaaggctgcaccacatatagaactaaagataagtgcagatgcttctggtcacattgggagaattctaactagaggaccacatataatgctaaggtattgggaccaaactctcacaa

SEQ ID NO: 28633 - DNA, 246 bp, Glycine max
  Clone ID: 700943905H1
gctataaaaaatataccttttcagtttccactcattgatctaaagccttactcttgcaatcaatacaattaagtattattcaaagtcccaaccatgtcaccaacaaacacttttgcaattttggtcttcttctgctgtgccatttcctttaccttcgcttctgaccctgacacacttcaagacctttgtgtggcacttccctcttcaggtgtgaaggtgaatggatttgcttgcaaggctgagtca

SEQ ID NO: 28634 - DNA, 246 bp, Glycine max
  Clone ID: 700943908H1
gagagaaaaaagagaaagtgaaaattagaaactcttgtacttggttttatgccaaattagggactcttttggttgtcaattagatcacaaagatatggaggttgccatggaactggaagatgatctattttttgctgatttgagcaaggaaattgctctactaattatggatgaagatgaagatccacttgcttcttgtcctcctgactctcttcaggctttttctggggcaattcatcctcctcc

SEQ ID NO: 28635 - DNA, 246 bp, Glycine max
  Clone ID: 700943919H1
caaaattgactttgacttccaagattttgatatccctcctaccaaaggtaaaaatggcaagggtgggaataatggtaaaaacaataatgacaagggtcatggtagcaataatggcaatgtgggccaccacatgggccccatgggtcagatgggcccaatggttcagagaggtccaatgaatcagatgggcccaatggaccatatgaggaatatgaacatcaatatgccggcggtgcaaggattacc

SEQ ID NO: 28636 - DNA, 239 bp, Glycine max
  Clone ID: 700943983H1
caactgctgatcatcaaggacagggttattttcagtgcctgttttcttgtattgagacgctacttggatctttaaatgtgaaaaaccttgtcctaccagctgccgatgaagctgagtcaatatggactggtaaatttgggtttacaaagctaccccaagatgagataaacaaatataagaaattttatcgcatgatgatatttcaagggacctcagtgttacagaagcctgttcctgaa

SEQ ID NO: 28637 - DNA, 240 bp, Glycine max
  Clone ID: 700943988H1
gctgctggaattcacgagaccacctacaactccatcatgaagtgtgatgtggatattaggaaggatctgtatggtaacattgttcttagtggtggctcaactatgttccctggtattgctgaccgtatgagcaaagaaatcactgcacttgctcctagcagcatgaagattaaggttgtggctccaccagagagaaagtatagtgtttggattggaggatcaatccttgcatccctcagc

SEQ ID NO: 28638 - DNA, 263 bp, Glycine max
  Clone ID: 700944010H1
ctctgtcttcaattgcaggtctgcttcaactaaaagaccctctaaaattaatttcatttccaaaatccgcaatccaaggtgcaaagcctgtaatctctcagaacttgtggccacgcaaagcttcaaagaactcatcagatccattggtaaagcttgttcatgaactgcagagagatttggaattagtatatgttgggcaagtttgcctctcttgggaaatcctttgttggcaacacaagaaagcccttgagttacaacaatat

SEQ ID NO: 28639 - DNA, 261 bp, Glycine max
  Clone ID: 700944013H1
gccaactgcatgatctgctcttcctcctccaagatgccgggttcccctcgcgggatcgcatctttgtcttcaatggggattacgtggatcggggagcgtgggggcttgaaaccttcttgctcttgttggcttggaaggtattcatgccacataacatatatttgctacgagggaatcacgaatcaaaatactgtacatcagtttatggttttgagaaagaagtaatggtaaagtatggcgataaaggtaagcatgtgtacc

SEQ ID NO: 28640 - DNA, 267 bp, Glycine max
  Clone ID: 700944018H1
aaacattgataaaaattctttagaggacttttccactgagtgcccacgtgttgtagtaaatcctaagtcatcaccctttgggtttaagggaactgaggttcctcgggaagcattacaaaatatcatattggatgatgaagttgtcaaggacattgatcccagaacatggacaatgcatgggtttgcattgaagcccatctctccatcttcaagttccactgaattatcagtagccgaaaaattcagacttgcatttgtggaaaggga

SEQ ID NO: 28641 - DNA, 266 bp, Glycine max
  Clone ID: 700944019H1
cagtttccgttaacgctctccaatacaaaataaccactcactgaatattcggtcgaagatgtccgccgccgaagaagctaaagttcccgccgtcgaaaagccggtggaggaggtgaaggcgccgaagcttgccaaggagaagaaacctaaggctccgaaggaaaagaagccgaaacaggccaaaactgcttctcatcctccatatctccagatgattaaggacgctttgattgctctgaacgagaaaggaggatcgagtccatatg

SEQ ID NO: 28642 - DNA, 149 bp, Glycine max
  Clone ID: 700944021H1
cctgattcagttgtagtatctgtttctcttgttctactttgtataaaactgtaatacgttcgaagtgatggaagtgacccaattaaccatatactttgtattcagataaattttgttgctaaatgttaaaggcttgttcttgtggtatc

SEQ ID NO: 28643 - DNA, 260 bp, Glycine max
  Clone ID: 700944028H1
caaggcagaaagcaagctcatcctagagttttaaaaatggcagcagcctcctccatggctctctcttccccatccttggctggcaaggccgtgaagctgggcccatcagcccccgaagtcgggagggtcagcatgaggaagaccgtcaccaagcaggcctcctccggaagcccatggtacggcccagaccgcgtcaagtacttgggcccattctctggcgagcccccgtcctacctcactggcgagttcccaggtgacta

SEQ ID NO: 28644 - DNA, 259 bp, Glycine max
  Clone ID: 700944037H1
gggttgctcttcagaggaatgacgttgaacttgttgctgtcaacgatcctttcatcaccactgattacatgacatacatgttcaagtacgacaccgttcatgggcagtggaagcattttgatgtgaagctgaaggactctaagacccttctcttcggtgagaagcccgtcaccgtttttggattcaggaaccctgaggaaattccatggggtgaggttggtgctgattatgttgttgagtcaactggcgtattcactga

SEQ ID NO: 28645 - DNA, 257 bp, Glycine max
  Clone ID: 700944045H1
ggcaaactctcttaagttggtcagccactgaagtttgaacgtcatggttagtaatgcagtgctgtgtatgatggcatctatggattaataaaaggcagcggctgtgcattttgtgctgctgcaaatgtgcttcatggagtcatttatttagacgatagtgatacaatgtaaatgggaaaaattgtccgcttcaagtcaagcgttttgttttttccccactatacaatggttgtgcgtttatgtttaaaagtcttaca

SEQ ID NO: 28646 - DNA, 264 bp, Glycine max
  Clone ID: 700944051H1
gatgcaaacatctctacctagcattcagcacaatcaacagtccaataatcaacaacaatcaacacagtccgtgcttcagcaacactcccaagttatcaggcaacagcaaccacaacagacttcgatcattcatcaacaacaaacaccgatgactcaacagtcaatattacctcaacaacaacaaaacaacaacaattagttaagagagttgagtaagatcagaatggcagacttgatgaaaagaatcctccaaatgattgaggc

SEQ ID NO: 28647 - DNA, 257 bp, Glycine max
  Clone ID: 700944059H1
gcaagaggtcttgcaaagattcatgcagagtacagtgcagccaaagtgcctcacgggaatgtgaaatcctccaacgtgcttctagacaagaacggtgttgcatgcatctccgattttgggttatcactcctattaaacccggttcacgccattgcccgattgggagggtacagggccccggagcaagaacagaacaagaggctatctcagcaggctgatgtgtatagtttcggagtattgttgttagaagttctcac

SEQ ID NO: 28648 - DNA, 257 bp, Glycine max
  Clone ID: 700944060H1
aacgacaactgtgccagcattcattatagagagacgtagtactacacttcttgagatcgatcataataaacactcaaaccaaacaagcaaaactaaacttaccaatgaagttgaagcagcagaaaatgagagtagtagtagggtcagtgtggctgtgcctctttctgttggctgtcggggagtcggagggagcggatttggcggcgaagtgcaacctgctggttcagaaagtgctgccgtgcctgaacttcgcgacg

SEQ ID NO: 28649 - DNA, 264 bp, Glycine max
  Clone ID: 700944065H1
agctgaaatagaggacttgaggtccaagctggatgcatctgagagggatattttggagctgactgaggctgttaaagttaaagatgctgaggcagaggcatatatatctgaaattgagactattggtcaagcatatgaagatatgcagacacagaaccaaaatctgttgaaccaggtgatcgagagggatgactataatattaagcttgtatcagatagtgtgaagacaaaacaggcgcacaacactttaatgtcccagaagca

SEQ ID NO: 28650 - DNA, 262 bp, Glycine max
  Clone ID: 700944066H1
aagaactcgactcaagaagacagcaaaagtactgagccatgggtaccgtcatcgagtcccatttcttagccttcactgcccttgtcactattgcctatcagtttctgtttttcgtcgtcactgcgctcctcaaattcgacaaagtcactgattttgctggaagtacgaatttcatcataattgctgcattgaccctggtcatcaaagcctcctggtattttcgacagataatcctcactttgtttgttgggacatggggact

SEQ ID NO: 28651 - DNA, 259 bp, Glycine max
  Clone ID: 700944068H1
gtgaatcctgctgcagaagcaaatatccatggggacccggaagccgcagatattgtgtttacctctggggcagatgttgttgttgttggaataaacattacaacccaagtccaattcacagatgctgatctccttgatctgaaggaatccaaaggaaagtatgctcccttcttgagtgacatatgcaaattctatagggactttcatgtaaaatctgaccgtgtccatggaattttcctccatgatcctgtcagttttg

SEQ ID NO: 28652 - DNA, 152 bp, Glycine max
  Clone ID: 700944070H1
ctagaatttcactccggaactcctagtccttttaagttgtaactgtttgtttcaactctattacaatttctcttataattatttatacagaaactagtttttgctgcacaataaaattagtttatgcataaattaaaataagtattttatac

SEQ ID NO: 28653 - DNA, 257 bp, Glycine max
  Clone ID: 700944072H1
ctccttcaccgtcgctctctccaacgatcacaacaacatcgtcatcccatggcaaacgccgcatctggtatggcagtccatgatgactgcaagttaaggtttttggagctgaagacaaagaggacacaccgtttcatagtttttaagattgaggagcagcagaagcaggtcattgtggagaagcttggtgagccagcccaaggctatgaagatttcactgccagccttcctgctgatgagtgccgttatgctgttta

SEQ ID NO: 28654 - DNA, 255 bp, Glycine max
  Clone ID: 700944075H1
aggccttcatcttcagagcccatttctctgtgcctagccaccaatcatggctcatccatttttggaacgggaaggcaggaacgccgtcagtatgccccaccgccacagccagccatgtctgccactgcattgctgcagaaagccgcccaaatgggtgcagctgcaacaaatgcctcttttcttcgtgggttaggcattgtatcatcttctgcatcaacgtcatcagttcagcaagataatttgcaatggggccat

SEQ ID NO: 28655 - DNA, 257 bp, Glycine max
  Clone ID: 700944078H1
agagaattgaagctggatcgaccatctggtccaccaaagccagaggaaattggtgatctttcttcccttagcagtaagcagtcaggagctgtgaatcagaatgctaggccacagacaaaacccatactttctccaaatcaacccaaaaaagatgaaaaggattttaactatgcaaagcaagcagttattctaggaggatctatggaatccagcaacagacttgtgcagcctcttaagagaatcttacccaagcccga

SEQ ID NO: 28656 - DNA, 262 bp, Glycine max
  Clone ID: 700944082H1
agaaaatggagataattggagtgtaggacagcgacaacttgttgctctgggccgagctctgttgcagcagtcaagaatacttgtactagatgaagcaacagcatcagttgataccgccacagataatcttatacagaagattatccgaagtgagttcaaagaatgcactgtttgcaccattgcacatcgaatacctactgtcattgacagtgatctagttcttgtgctcagtgatggtcgagttgcagagttcaacactcct

SEQ ID NO: 28657 - DNA, 261 bp, Glycine max
  Clone ID: 700944083H1
gtgctgttatagacatgtggattaaggcaaaagagctagaggcaaatactgagtattacattgagctgttggcaaaagggacagggaaatcaaaggaagaaattgctaaagatgtccagaggcctaagtatcttcaagcacaggatgctatagactatggaattgctgacaaaataattgattccagttcaagggatgttgcatttgagaagaggaattatgatgaaatgcttgctcaatcaagagctatgaggagacaag

SEQ ID NO: 28658 - DNA, 258 bp, Glycine max
  Clone ID: 700944087H1
tttgtaaagggtctcacagcgtaacagacttgaactacccttcaatcacattaccaaatcttggcctaaaacccgtaaccattactcgcacagtcacaaatgttggaccaccagccacatacactgcaaatgtccactcgcctgctggatataccattgtcgttgtgccaagatccttgactttcacgaaaattggggaaaagaagaaattccaagttattgtgcaggcaagcagtgtaactacgcggagaaagtatc

SEQ ID NO: 28659 - DNA, 255 bp, Glycine max
  Clone ID: 700944091H1
atcgagttatataagaatggcatgcatagagagagcatctccagcactgaagcaaatactgctcaaactttgctgtgctgagaagcccctggagattgatcatcacttatatgaatttgggtcagtggagtaccatattcagtctcaagcctctaatccacaagtagcttacttgtcaatatcaatgccacctctatgccatggagtcatacaaaatgaactttcttcttacaccattgaaatggtaaagggtct

SEQ ID NO: 28660 - DNA, 251 bp, Glycine max
  Clone ID: 700944122H1
gagaaaggagggcaatttagcttgcacatactcaagcattccaccattgtggcaaagccaaggtcattttagactccaccacatgatcatgatcatatgatcaatccccttaattttttcttttttcttttcccttttctttactctgtattgtatcaatgcttgaaaatggggttgttccaaaaatgtcatatatatttggcctgctaatgggtattgtaaatctctgaacttgaagtgatgcacggttt

SEQ ID NO: 28661 - DNA, 251 bp, Glycine max
  Clone ID: 700944123H1
tttgaatttagcttatgccatgcattgcaatgaagaaataaggtattgttgcttttccattctatagttggcatgttattgtacttcaaagtcttttaggtttagttgcgtgcaacagaaattgaacttcaaacatttgatatgcccatggcttgtcggaaatcttcaataattcttctgtactttacactttttttcactttctttatcacaggttccgctgttgaacttttgtgcatcctcaattggtt

SEQ ID NO: 28662 - DNA, 250 bp, Glycine max
  Clone ID: 700944126H1
gtcggtagctgaagcattttataagcctccactttcctgaactagttttaacatacaatctttcaagtacacctccccagcttccatttaagaatggagatcactagaataggccaatggttaagtcttctgatatgtgtactactattactgcagacagaaggggttcctgtgggaatcacttttgttgaaaatgcagtggcaaaaggggctgtttgtttggatgggagtcctccagcttaccacttcc

SEQ ID NO: 28663 - DNA, 249 bp, Glycine max
  Clone ID: 700944154H1
caccagagaagcacctaccatcaccccatgatgtctttgttggcaactggaaacccacaaaaaatgacacattgtccaaaagggtacccggatttggtgccacaataaacttgctctatggggatcaaacttgtggtcagggatcagataatgaggccatgaacaacatcatttcacactatctttattatcttgatctcttgggtgttggcagagaagaggcagggcctaatgaagttctctcctgtg

SEQ ID NO: 28664 - DNA, 248 bp, Glycine max
  Clone ID: 700944159H1
aacactcattaattgcaagaatggcacttcgttgcttggtgatgtccctttctgttctcttcactcttggtcttgcgagagaaagccatgccagagacgaagatttttggcatgctgtttggccaaacactcccattccaagttcattgcgagatcttctaaagcctggccctgcaagtgttgaaatcgatgatcaccctatgcaaattgaagaaacacagtacccgaaaaccttcttctataaagaa

SEQ ID NO: 28665 - DNA, 259 bp, Glycine max
  Clone ID: 700944218H1
tctgaggctaagtgtttcaccaagagcattgagataattaaaaacaatccctcttcatctgttgctatgaataatgaaaaagagaaccttctaactaggggtaattcttcggcctccaagatagggcccaatgccacaatggaaggctatggattcaaggttcgagaccttggaaaatttttgcgtcttgcttgggctcaagaacaaggttacttggaagagttttgctgtgccaatgtgaaaaattgctgtggacaaa

SEQ ID NO: 28666 - DNA, 256 bp, Glycine max
  Clone ID: 700944223H1
gtgagcttcaacaagttggttggagaactgcctgagtcattgggaagaatgaagaagttggagcagctgaatgtggcgaataacgagttgtctggtgagattcctgagagtgtttgcatgttgccgaggttggagaatttcacgtactcttataactacttctgcagtgagtcaccaacgtgtctcaagttgaaggataaggatgataccaagaattgtattccttataggccattgcaaaggtcactggatgagt

SEQ ID NO: 28667 - DNA, 253 bp, Glycine max
  Clone ID: 700944226H1
cccaatcaaaaacaacaactcatcttcccaaattcaaatcacacacacttttctctctctgtctctcagattagggttggggttagggtttggttcgatcatggcttcgtcttcctccgatccgggaaagtccgcggagacgtcggaggccgcggcgttggcggtggcgaacgaccagctcttgctctacagaggattgaagaaggccaagaaggaaagaggttgcacggcgaaagagcgcatcagcaaaatg

SEQ ID NO: 28668 - DNA, 254 bp, Glycine max
  Clone ID: 700944251H1
ggcacattgcatctcattgggctactgagtgatggtggagttcactccagacttgatcagttgcagttgttgcttaaaggagttagtgagcgaggtgttaaaagagtccgtgtccatattcttacagatggccgtgatgttttggatggctcaagtgtggggtttgtggaaacccttgaaaatgatcttgcaaacttgcgcgcaaaaggtgtcgatgctaggatagcatcaggtggaggtcgtatgaatgtcac

SEQ ID NO: 28669 - DNA, 245 bp, Glycine max
  Clone ID: 700944276H1
ctcttacaccatgagtgcatcaaccaaagcttggattgtggcatcaagcataggggcagtggaggccttgaaagaccaattaggtgtatgcagatggaactatgctttaaggtcactacaacaacatgcaaagaacaacatcagatcttatagtcaagctaggaaattgtcctctgcatcctctgctgcggtttccaacaaggtcaagagaaccaaagaagagcatatggggaaagtcatcgaat

SEQ ID NO: 28670 - DNA, 246 bp, Glycine max
  Clone ID: 700944287H1
ggtgggccatgctcggagccttgggctgcgtcttcccggagttgctgtcccgcaacggggtgaagttcggagaagccgtgtggttcaaggccgggtcccagatcttcagcgagggtgggctcgactacttgggcaacccaagcctgatccacgcccagagcatcctcgccatctgggccacacaagttatcctaatgggtgccgttgaaggttaccgtattgctggtggccccctcggtgaggtca

SEQ ID NO: 28671 - DNA, 259 bp, Glycine max
  Clone ID: 700944351H1
aaaaaaatctaagtccctttggtcttcatcttctgttctgatccaggtatggcttctaaacgcatcttgaaggagctcaaggatttgcagaaggatcctcctacctcatgcagtgcaggccctgtggctgaggacatgtttcactggcaagccacaatcatgggacctgctgatagcccatatgcaggtggtgttttcctagtttcaattcattttcctcctgactatcccttcaagccaccaaaggttgcttttcgga

SEQ ID NO: 28672 - DNA, 246 bp, Glycine max
  Clone ID: 700944374H1
ccttgtcaaccttattggttattgtgctgatggagatcaaaggcttctagtttatgaatatatgccattaggatgcttggaagaccacttgcatgacattcctcctggcaagaaacgacttgactggaacacgcggatgaaaatagctgctggggcagcaaagggattggaatatctacatgacaaagctaatcctcctgtcatataccgagacttaaagtgctccaacattttgcttggtgaagg

SEQ ID NO: 28673 - DNA, 253 bp, Glycine max
  Clone ID: 700944381H1
tatccctctaatcactctagctgttgcaaatttctactatttttcaatggcttctgcagatgttgagttccgttgctttgttggtgggcttgcttgggtcaccggcaacgatgccctcgagaaagccttttcaatctacggcgacatcgttgaatcgaaggttatcaacgaccgtgagactggaaggtccagaggattcggatttgtgaccttcgcctcagagcagtcaatgaaagatgcgatcgcaggaatg

SEQ ID NO: 28674 - DNA, 264 bp, Glycine max
  Clone ID: 700944411H1
tttgctttgacatttataagaacatcaacaaaataaagaaggtcaagtgccctgtacttgtaatacatggtacagaagatgatgttgtcaattggttacatggtaatggactttggaagatggcaagggagtcatatgaccccttgtggatcaaaggaggtggtcactgcaacttagagctttaccccgattacatccgccatctttgcaaatttatccaagaaatggagagcatgacaactgagaagcgcctcaaaaagattc

SEQ ID NO: 28675 - DNA, 264 bp, Glycine max
  Clone ID: 700944412H1
gagatgaatggcaaaatggtggtaagcaaacctctgtatgtgactctagcccaacggaaagaagataggagagctagactgcaggctcagtttgctcaaatgcgacctgttggaatgccaccatctgtcggtcctcgtgtgccaatgtatcccccaggtggtccaggtattggtcaacaaatattttatgcccaaggccctcctgctatcattccttcccagcctggatttgggtatcaacaacaacttgttcctggtatgagg

SEQ ID NO: 28676 - DNA, 74 bp, Glycine max
  Clone ID: 700944418H1
cacatacaaaggtgtccatttttaattaaaacaacaaagggtaaattaattccacctccaagtttattgtgtct

SEQ ID NO: 28677 - DNA, 264 bp, Glycine max
  Clone ID: 700944427H1
gaacgaagaagaagaagcatcacagaaccgaacccattcagaagcaaatccgaaaacccctcacttaatattactggtattcagctgttcatgacaaaagcctgaaccaatcatgtcagaaggtgcagaaattgatgagcgtgtggaccttgatgaggaaaattatatggaagagatggatgatgatgttgaagaacaaatagacgatgatggagtggatggagttgaagaagaaaatgctgaaggtagttttgaagaagatga

SEQ ID NO: 28678 - DNA, 272 bp, Glycine max
  Clone ID: 700944433H1
taaaattctctcttcctttttgggttctcctattccaagcttcaatcttttctctcttctcacagccttcttcactcacaggaggtgaagatgtcgactccggctaggaagagactgatgagggattttaaaagattgcaacaagatcctcctgctggcatcagtggggctccccaagacaataatattatgctttggaatgctgttatctttggcccagatgacaccccttgggatggaggtacgtttaagttgacacttcagtttacaga

SEQ ID NO: 28679 - DNA, 264 bp, Glycine max
  Clone ID: 700944455H1
aattaagcaacacacacttcaatttatcagcatggcctccgttcagtgccacaaaacctgcaaagtgagctgccaacaggaaaaccagcacgcctcgtttgggcagaaagtttctgacttgttcaaagggcatcaacataatgaccacagctccaattatgccacccaaaccaaagtgctttcccagtcagggtcagggttaggccccttcaccaccaaaactcaaacacaatgcggttgcccccaaacacatctcagtaccac

SEQ ID NO: 28680 - DNA, 268 bp, Glycine max
  Clone ID: 700944465H1
gaagaaatctgatcctgattctgatggggctgtaagttctttggacagtgaacatgtttgtcctagttctcagcatgtaactcctactactgatgcctcttctggggaagtatggagcacacctgttttgcctgtccagctttctcctaaaaaggctcttcgtgctgctatgcttaaaagccgctttgcagataccattttgaaagcacagcaaaagacccttcttgatcatggtgataaaggtaatcctcaaaaaatgcagcaggaa

SEQ ID NO: 28681 - DNA, 266 bp, Glycine max
  Clone ID: 700944482H1
gcaacgacaacgagagggttttaaggatcctccaaaacctcttccaaggtttgtgttttgttgggtgagattcgattctatcatcgtttcatcaaatggcttttttgtatggagctcagcgtctgcttcgccacaccccacttgttcattcccactatgcttccattcgtctcagctcaactctcacttcccccaaacttttcgtcagcggtctttctagactgacaaaagatgaaaaccttaaggaagcattttcttcttttggg

SEQ ID NO: 28682 - DNA, 265 bp, Glycine max
  Clone ID: 700944483H1
ctgatgcaactttggttaacaccggcgacactggtgcgatctgactccagcaaacaacaccggtgcgactctgtctctagcgaacaactccggtttgactccactcaacactgttctgatgaatcaagatatttccactttgtcgttccctatgaattttatttttttttgcatcaaatcacaaaaaagttaaatgataagaacttcttgctgtggcgacagcaaatcaagtcagcgatcactatgcgtggactcaatcgcttcg

SEQ ID NO: 28683 - DNA, 262 bp, Glycine max
  Clone ID: 700944484H1
caacaggatccttttctcgatcagctgttaactataatgctggagcacagacaacagtttcaaatataatcatggctgcagctgttctagtgaccctcctgtttttcatgcctctgttctactatacaccaaatgttgtcttagcggccattatcatcactgctgtgattggtctaatagattatcaatctgcatacaaattatggaaggttgacaaacttgatttcttggcctgtttgtgctccttttttggggttctgtt

SEQ ID NO: 28684 - DNA, 259 bp, Glycine max
  Clone ID: 700944489H1
catcatcatccatggctgcctccgtctccactgtcggagctgtcaacagagctcttttgaacctgaatgggtctggacctggggtttcagctcccagttcatccttctttgggagcagcttgaagaaggttattggctcaagggtccccaacacaaagatttcctctggaagcttcaagattgttgctgtagaagagaagaaagagattgaagagacccagcagaccgacaaggacagatggaagggtcttgcctatga

SEQ ID NO: 28685 - DNA, 258 bp, Glycine max
  Clone ID: 700944491H1
gtcctttgtatgttgatcctttatgatgggtttagtaaaccaagtcgtcgatgttttgtgctgctttctttttttttttgcaattttaaggtgcttttgttgtctctacgaagacgtgttgagatgatgatgccctttaaattgttctcgcttctggagtccggggaagtagatagtggtaattaagtgccaccaccctgccgccaactactactctagaagatatcttatcatatttgtactcaaattaatatataa

SEQ ID NO: 28686 - DNA, 259 bp, Glycine max
  Clone ID: 700944492H1
ggtagttttgtggtctgtgaaagatcacttaacaacactcagaatggtcctgctatgcccccagtgcagcattttgttagagcagacatgctgccaagcgggtatttgataagaccctgcgaaggagggggatccattattcatattgtcgatcatatggttctagagccctggagtgtacctgaagttttgcgcccactgtatgagtcatcaatgctgctagctcaaaggacaactatggcggccttacgtcatttga

SEQ ID NO: 28687 - DNA, 203 bp, Glycine max
  Clone ID: 700944496H1
gtgctagtgtgtgttgtcttcctttccattgattgtaatagagagtagtttcttttatgagacaaatattgttgagcaattttggtttcatttatttgagccaatactgtattttaagatctgtgtgccgaatttttttccttgtttttgtaccatcaggctagccaaatggtactatgctaataattttaagtttcttttcc

SEQ ID NO: 28688 - DNA, 273 bp, Glycine max
  Clone ID: 700944507H1
agcaaacgatccaaactcttttttcatttgcagcatcaaaatgagtggtagcaacgatggtagcggcagctggagctctaggtttttgaaggtggctagtgcagctgccgctacagccgccgttgccggcggtttatatgccattctttcatcctcaacctctgctagctctgagatggaagtgccgtttggcagcgcacggcgtgagagcaaagaacgtgacgatggtggctccgggtctcatcctcgcgagggtgccaccacggtcagtcg

SEQ ID NO: 28689 - DNA, 273 bp, Glycine max
  Clone ID: 700944510H1
gttcgagggattgggcttgatactgcacttcattttgttaaagcttttagtgaagatgatatattgaatagattacatgagatcggcaaagggaatacttcacaaattcccatctgcattaaagttgaggacaatgtggatgggaactccccaaatagaaaactatctcattgttcattctgtgggcatccaggcagcaaaaaagatcatatgaaatttccctgtgaatattgtgtcacaaaggatgatgaaggttgccagagaaaaccagag

SEQ ID NO: 28690 - DNA, 269 bp, Glycine max
  Clone ID: 700944531H1
aggataccggtgtggcgaggtcctcggagtaccctgaggttcagaggattaccaataagttgcttgagacattggaggagtttgtgagggatagggccaagaggccaaagagtccggagaggaaagaggaggttccgccggtggagaaggtagaggaggagccggccccggatatgaatgaaatcaaggcactgccaccaccagagaattatatcccacctcctccgcctgagccagagcctaagccgcagccacaggttacggaggat

SEQ ID NO: 28691 - DNA, 265 bp, Glycine max
  Clone ID: 700944544H1
agcacactatttatacaagatccccaatttctctatttttcctccgtttctattgcaatttctcaattactacatcgtattctgcaaattcaaactgggtcttggttttctgaaagatgggaggtggcaaggacaagcaccatgatgaatctgacaaaggaattttttcacagcttgctcatggggtagctggtgcagcacatggtggacatgggtacccacctggggcttacccaccaccacctggggcataccctccgcacca

SEQ ID NO: 28692 - DNA, 266 bp, Glycine max
  Clone ID: 700944545H1
cgataatcatccatagttactgaagaaaatggcaaccatctccgctgctatcacaaccccatcgatcacccgcgcatgtctagtgcaaaaacgttctcttgggttctcatctcccgttcttggtttgccagcaatgggtaaggtgggaagagtgagttgctccatggaggaaaagccttcttctgtgaaggaaagcagctcaagcatgttggggatgggggcatctttgatggcagcggccagcgccgcagccatgtcaggcccag

SEQ ID NO: 28693 - DNA, 256 bp, Glycine max
  Clone ID: 700944613H1
caaggcagcactgtgtttggaaatgtgcatcttttcttgggcccaaatgcaataattgttgtcctgttttctaccgttgaggcttctttctatcagctaagctaagcagtccaaagggcacaacacaacagagaaagaaaagagtaagagtatgggaggctcatggtcatggcagctcacatgtgccctcttgctactcttctccgccgtagtcaccgccactgaccacattgtgggtgcgaatcgtggctggaac

SEQ ID NO: 28694 - DNA, 257 bp, Glycine max
  Clone ID: 700944621H1
ctcctatgctgatacccagagacacagacttggaccaaattatctgcagcttcctgctaatgcccctaagtgtgcccatcacaacaatcaccatgatggtttcatgaatttcatgcacagggatgaagaggtcaattacttcccttcaaggtatgatcctgtccgtcatgcggaaaaggtccccgttcctcctcgtatcctaggtgggaagcgtgaaaagtgcatgattgagaaggagaacaacttcaagcaacctg

SEQ ID NO: 28695 - DNA, 256 bp, Glycine max
  Clone ID: 700944635H1
gtctgcagagtgcagagccttctctcctctattttggcttccaacctttttgctccattcattctcaacaacaaaccaatctctatattttgcttagacaatgagggggagcttgtggcaacttgggcaatcgatcactcgccgtcttgcccatggagataagaaggctgttgctcgccgatgttttgcctcagaagctgagctgaaaaagacagtgtttcatgacttccatgttgctcatggtgggaagatggtt

SEQ ID NO: 28696 - DNA, 256 bp, Glycine max
  Clone ID: 700944636H1
gccatatgccgaggttattgggatcgtatgggacaggaaattttaagtttcttggagaacagaaaagagaatagatcgtggtacaaaggttcaagggttgctgtttctattctggatgatacatttgcttcacacatgcaacagcttctaggaaatgcattgcatgagaaagacctggagccacctagatccatcatggaagttcgttccatgctatgcaaggatgctcccaatcacaaagacaacacattttact

SEQ ID NO: 28697 - DNA, 251 bp, Glycine max
  Clone ID: 700944682H1
gtaaaattcttctaaatggaaagcctccaagttactcattcaatcagtcttctgaaggaaccaaagacggggaggaaaatgataaatggaaaggaaattccgatgataaaccaaatgacttacctacagttgatacagaggatagtgttccgggagttttgtatgatttgctgcagaaagaggtcttagccttgaggaaagctggtcatgagaaagatcaaagcctaaaagataaagatgatgccattgaa

SEQ ID NO: 28698 - DNA, 244 bp, Glycine max
  Clone ID: 700944691H1
cattcccactctcactttctggttctctcccttcctcttctttttcattcttctatctccgcataccaccaattgtaaaattgaaattcaccctttcaaaattgtacccagattctccgcgtaaagtgcccccttatttgttggtccgatgttaagggaaacatctgagaggctacagattcactgcgtcgattccattctctttccctcttctcatatctttttaaaggtttcagttttcatc

SEQ ID NO: 28699 - DNA, 254 bp, Glycine max
  Clone ID: 700944723H1
cttttccttcggagtgtgtttgcagattgatgacaagcaaccccattacgtggaagcctaagaggagaagacgacgaagaggacaaggttaactgaatcgccgcttctgtgtggcttcgttctttcgtttagttttttcatctttttagctttagagggtaatacattctttaaaaaaatggaggttttggtgggtcccgctttcaccatcgacgttccttcgtctccgccgcgggatggcggttccgaaaatc

SEQ ID NO: 28700 - DNA, 253 bp, Glycine max
  Clone ID: 700944760H1
catggccaccgtcacttctgcagccgttgctattccctcattcactggcctcaaggcaagcgcaggcaaagtgagtgccgcagttaaagtctcagctccccaagccacaaggttgggcatcaaggcttcgtgaaagacgttggagtcgctgttgtggccactgccgcgagtgcagtgctggctagcaacgccatggccattgaagtgttgctgggtggtgatgacgggtctctggctttcgttcccaacaatt

SEQ ID NO: 28701 - DNA, 162 bp, Glycine max
  Clone ID: 700944775H1
aaaacttttaggaagacagtttgggaatgttggagagagagctcagtacaagggtggggaggctttgtattaaaagaaaaattgaagttgctgaaacagagattaaaagtgtggagctaagagcagttggggatattcagcagaagttaaagagggcagagc

SEQ ID NO: 28702 - DNA, 273 bp, Glycine max
  Clone ID: 700944803H1
gaagctaagaattcctctatatggtgaatttaccagccagaatgctattattgctgagcggtttattgaaggaggtagcccgtatgtatccaaaaattgtacatgactattggccgttacgttctgaaaaatgaaaaggctgacgtgtaccggctaccttatttggcaagcagtggacctggatttgctctacttgaagctgcaagaaaagctaacttcaaaggtactttcagtgaaatagcagcaggatttgcaactgacagatgggataaa

SEQ ID NO: 28703 - DNA, 274 bp, Glycine max
  Clone ID: 700944805H1
ggctgctacggcttcagcttccgctgcttctctctcccttcgctcttctcccttcaaactcaaccctccaaaactcaactccgttacgctccgtttccctcaccttaatcgccgttataacagcgccttcagagtcgtcgccgcttccgtttccgtctccaaccccaacgtgcaaaccggccccgacgatctcgttgcttccattctctcaaaggtggtgcaaacggatggaggagtattgctgaaggaggaagagcataaagaggtggccgaa

SEQ ID NO: 28704 - DNA, 271 bp, Glycine max
  Clone ID: 700944811H1
tgaggataaggagatgtcttcctctgtcaccaatggcgatgattccctcactggtcacatcatatctacaactattggaggcaaaaatggggaacccaaacagactattagttacatggcagaacgggttgtaggaactggatcatttggaattgttttccaggcaaaatgcttggaaactggggaagcagtggctattaaaaaggttttacaggacagaagatacaagaatcgcgaactacagttaatgcgtgttttggatcatccaaat

SEQ ID NO: 28705 - DNA, 273 bp, Glycine max
  Clone ID: 700944816H1
caaggtggagcttctctacaccaagttcgtgtcgcttgtcaaatcggatcccgtgattcacaccttgctcccgctttcgccaaagggagagatttgtgatatcaatggtgtgtgtgttgatgctgctgaggatgagttcttcaggttgactaccaaggaaggaaagttgactgtggagagggatgttgtgaggactaaaaccatcgatttttcgccaattttgcagttcgaacaagacccggttcagatccttgatgcactgttgccactgta

SEQ ID NO: 28706 - DNA, 272 bp, Glycine max
  Clone ID: 700944819H1
ggcatctatctgtgacatatgatactcctgataccgaagctgatattaagttgctttgctcacaagttcaaagtgaccttaaacaagggattgcaggtgctgtgcctattccctctgatggtgcttgtaaaagagcagtcattgatgcattggtaactaatgtcgaagctatgattaaagcagatagaaagatcactgccttgaaagaattgcagggtcatatgtggcgcactggttatgagaataatgaattgaagggaatagtttttgat

SEQ ID NO: 28707 - DNA, 270 bp, Glycine max
  Clone ID: 700944821H1
caggctctgcctgttgctttgatgattcatgataactcgtcggatcgcacggcctttgtgccggcgacgcatcattcaaatttctgccctatcaactttcgatggtaggatagtggcctaccatggtggtgacgggtgacggagaattagggttcgattccggagagggagcctgagaaacggctaccacatccaaggaaggcagcaggcgcgcaaattacccaatcctgacacggggaggtagtgacaataaataacaataccgggctc

SEQ ID NO: 28708 - DNA, 272 bp, Glycine max
  Clone ID: 700944824H1
ctcactaccaagagtgatgtgtatagttttggagtagttcttttggaaatgatatcgggaagacgagctatagacaagaatcagccaactggagaacataaccttgttgattgggccaagccttacctatctaataaacgaagagttttccgtgtgatagatccccgtctcgaaggtcaatatttacagagtcgagctcaagccgcagctgcgcttgctattcaatgtctctccatagaggctaggtgcaggccgaatatggatgaggtggt

SEQ ID NO: 28709 - DNA, 270 bp, Glycine max
  Clone ID: 700944831H1
tgcactatttttgcgtatggacagaccgggacagggaagacatacaccatggaaggaggtgcaagaaagaagaatggcgaatttccgagtgatgctggtgtcatcccaagagctgtgaagcagatttttgatatattggaagctcagaatgctgagtataacatgaaagtaacgtttctagagctttacaatgaggaaataacagatcttttggcccctgaggagacttcaaaatttatagatgataagtctaggaaacctattgctcta

SEQ ID NO: 28710 - DNA, 271 bp, Glycine max
  Clone ID: 700944832H1
ctgaactagcctactatgctcatggacagaaactgttggttggttacaaaaagggatatggaattttttgtacctgctgcaatgagcaggtcagtgcctctcagtttgaagctcatgctggctgggcatctcgacgcaaaccttacctgcacatatacacatctaatggaatctctctccatgagttgtccatctctttatcaaaagatcataggaggttttccaacaatgacaatgatgatctctgcatcatatgtgaagatggagggga

SEQ ID NO: 28711 - DNA, 268 bp, Glycine max
  Clone ID: 700944836H1
gatggccttatccgtctcatggaaggatcaaacaccggaccaatcaaccttggaaacccaggtgaatttacaatgactgaacttgctgagacagttaaagagcttattaatccaggtgtggagatcaagatggtggagaacactcctgatgacccacgacaaagaaaaccagacatcacaaaagcaaaggaattgttgggctgggagccaaaggtcaagttgcgtgatggtcttcctcgtatggaagaggatttccgtctgaggcttg

SEQ ID NO: 28712 - DNA, 263 bp, Glycine max
  Clone ID: 700944868H1
aaccataccgtaccagcagaggaaagagagaaaatttcagaacaaaaaagaagcagaggaaaagagagatagagagagaagaaaagctgtgaagagaagagtctgaaatctgaatcataaataattggtttttgagatgaagaactgcgagttgtgcaagcttccggctcggactttctgcgagtcggaccaggctagcttatgctgggactgcgacgccaaggttcatggagccaacttcctcgtggaaagacacacgcgca

SEQ ID NO: 28713 - DNA, 261 bp, Glycine max
  Clone ID: 700944880H1
cctttagggagggaaaaaagaagaacggaagttggatgaatcaagcaagcaaaacccaaggtcccgattatattcatcatgctgttgcccaaatgaaggtttctgattcacaccattatgattcaactagccagaattgtgtggactcctctacatcaaaagagtttgttttgttttctgtaaagttaaagcagggagatgctcaggtcactgactacaaaccaaatgatgagcttgctgctattgttgtcaaatcagcta

SEQ ID NO: 28714 - DNA, 260 bp, Glycine max
  Clone ID: 700944881H1
gcaacctcagctaatttcttgcgaaaatatggacttacaggggaattcaaactcaacatagagtgcaaccatgccaccctctctggccacagttgtcatcatgagctcgaaactgcaaggatcaatggattgctgggtaatattgatgcaaacactggtgatcctcaagttggttgggacactgatcagtttcttgtagatattcaagaggcgacactgattatgctcagtgtgatcagaaatggaggacttgcacccgg

SEQ ID NO: 28715 - DNA, 269 bp, Glycine max
  Clone ID: 700944901H1
gtctaatcttcgtgctgatatgacccttgctggttttgatggcttacgcatccagcgatcggaccaaacatttttgttccttggagagggctatgttgcagaggaaggtaatttaactctgccacctggttctttgattgctctttctcataaggagaaggaaatcacaaatgctttggaaggagctggtacacaaccaacagagtctgaagttgcttatgaagtttccttgatgtctcagacaaatatgtatagaccaggtattgatg

SEQ ID NO: 28716 - DNA, 255 bp, Glycine max
  Clone ID: 700944914H1
atcaactcttcaaaagggagaagaaaaggaaagaaaactctcaaaaaactattatagcaatggcagaacaaaaccaaaaccaaacaactgaagctggaaggcaccaagaggttggtcacaagagccttctccagagtgatgctctttaccagtatattctggagacaagtgtctacccaagagaacctgaatccatgaaagaactgagagagttgacagcaaaacacccatggaacatcatgacaacctctgcag

SEQ ID NO: 28717 - DNA, 259 bp, Glycine max
  Clone ID: 700944920H1
ggaatgggtcccaaacccaaaggctccgtactacacaaacaaaacatgctgggctattcatgagcaccaaaactgcatgaagtatggtagaacagactctgagttcatgaagtggaagtggaagccaaatggatgtgaccttcctgtgttcaaccccttccagtttcttgagataatgaggggaaaatccatggcatttgttggagactcagttggcagaaatcaaatgcagtccatgatttgcctcttatcaagggtg

SEQ ID NO: 28718 - DNA, 258 bp, Glycine max
  Clone ID: 700944922H1
gggaaacaaagtttatcggcttcagaggaccgcggagaagacgattgcaactccaattccaccggcgtttcctattattcacttttctccaccgaattagccgttccggccggtgatttggaggacctagaatgggtttcacactttgtggacgattcactcccggagctgtcacttctatacccggttcgttcggaggaagcaaaccggtttgttgaaccggaaccctcagcgaagaaaacgccttgttttccgtgg

SEQ ID NO: 28719 - DNA, 256 bp, Glycine max
  Clone ID: 700944957H1
ctattctattcttcaatatcttagggttccgacagattccccatcaattcaaccacttgccgtgttagttgatccattcttataaaaagatcaaagactcattatttatagccaaaggccttctgggtcgtcgtgaatctatcttgtgtttgagagattaagacaaaactttttgctttgcaaatggctgctgcaactgctgcaactgcttcttggatgcgattcaaaggcggcaaggaaaggaagctaaccaaga

SEQ ID NO: 28720 - DNA, 89 bp, Glycine max
  Clone ID: 700944959H1
caagattagtggtcttgtttcatggtattattcgatatgactgtgtattaacgatatgtattttgttccattattatgttcatgcatgg

SEQ ID NO: 28721 - DNA, 252 bp, Glycine max
  Clone ID: 700944986H1
gcaactttggccagtttctggccaagacaatgataaaacaaggccacactctcacagcaacttctcgatctgattactctgaactttgtctccaaatgggcatccattttttcagggatgtcagcgcattccttaccgcagacatagatgtcatagtgttgtgcacatcgatattatcgctatccgaggttgtcgggtcaatgccactcacctccctgaagcgaccaacgctctttgttgatgttctttctg

SEQ ID NO: 28722 - DNA, 66 bp, Glycine max
  Clone ID: 700944988H1
ttgaatccaagttgttaccgtattctgttattattgacttagaatccttaaccttttctgctgttt

SEQ ID NO: 28723 - DNA, 281 bp, Glycine max
  Clone ID: 700945015H1
agaaaagagaagaagcttcttcttggttaccttgacagacagagagtggagcaaacgacaaatcagcgagttggaacattttgtgtttggtggagatgcctattcggagcttggtagaagtggagccaccaagcccactgagatacttatcggcgccgccgttatgatgatcggagttgtgttaccagtcggttacatgatgttccgtaacaagcgcgtcccctcctcttcctcctactccaaacagacgtaggaacaaggttttgatttgatatagagaa

SEQ ID NO: 28724 - DNA, 283 bp, Glycine max
  Clone ID: 700945016H1
gagaagcatgtccactgtggcgaaagcggtggaggaaatcaccggcactggcaacaccaagatccgcaaatcttccagcgagctctgcaccttcctcggcatccctcgccaatctcgttccgaaatcgctctcattctctccaagttctcaaactctataatttcaagagtcccggcattaagaaggacaagatttgggagcagaatttgcagacactgttgcgtggcagaaacaatgttggttttcctgagattgcgaagatactgtctccggaattcggtc

SEQ ID NO: 28725 - DNA, 105 bp, Glycine max
  Clone ID: 700945047H1
ctttaggaaaatcgtcagttttgaacgcctgaatcatgctttttccccccaaatcttgtcttagtactaagaacagctgagattaatgatgtgagtttttttact

SEQ ID NO: 28726 - DNA, 257 bp, Glycine max
  Clone ID: 700945101H1
caaaatcaagttatcagtgtgtcaccctgacttttcaaaaacaattatttgttgcttcatatttcactgtgatttcataatagattttcactcatcttacttgactccaagcattctatatatctagtgcctcacgcatctctaccctcaaatcttcaccacacaacactacctcaattactcaactaaagcttcattcattcatcgtgtcgtgttgtgttctttgcaaccatgcttcttagaacagcgtcctcttt

SEQ ID NO: 28727 - DNA, 251 bp, Glycine max
  Clone ID: 700945111H1
gcaatctttgccgagaagttgctaaggcatgtgttcatgcaggagctcttgattttggaatgaaggctttgtggaagcataatgtctatggactgactccaaatattgcatctgttcaccatttactgagtatgctaagaaccacaatgatactaaactgttggtggaagtaatgaagcttctgaagaagaatgatttaccactgcaaccaggcacagcagatataatttttagcatttgttataatacag

SEQ ID NO: 28728 - DNA, 50 bp, Glycine max
  Clone ID: 700945117H1
ctttgttttcttgaaagacaccaccgtgctgtgaatgaggctttgtgttt

SEQ ID NO: 28729 - DNA, 247 bp, Glycine max
  Clone ID: 700945138H1
gtggaaaaagtgggaagtgaaaaatattaagcaaacttggcttggagtggtggttctaaattatatcaaagaacatagccatgagtatagatttctgttattcaatcttgaattggaagtggtgtcctcaaggctactatcatttcttgtcactatagtgtagatttatttcaaaagcattgcacagatcatggttttttgtggttgaagatttctgcacctgtcaatgattatgggataaagagca

SEQ ID NO: 28730 - DNA, 247 bp, Glycine max
  Clone ID: 700945150H1
cgcttgcgtttgtttcacatattgtgcggcaagtgtctcatcacgtctcgcgatctcttcaaaggcgaaggggaaggcttcaggggtttgaaaaaggttgatattgaagccatggttcttgactcattctgacttctcctcgtctcaagtctccatctttcaggaggcagtttacaaaggatgaactgggtagttggtccacactttttcagaggcatcgcttcctcttatctgctcttgttctgct

SEQ ID NO: 28731 - DNA, 246 bp, Glycine max
  Clone ID: 700945172H1
gctgtcaaaggcctgaaacactttatccgtgcatacttgcatgcttcagataataaaggtataagtgatgtgacagcaaagtacctcagtatgttgactgatccaaatgtagctgtaaggagaggatctgcattggcaataggtgttttgccatatgagttattagccagtcaatggagaaatgtgcttttgaagctttgtggctcttgtaaaattgaggaaaaccctgaagacagagatgctgaa

SEQ ID NO: 28732 - DNA, 244 bp, Glycine max
  Clone ID: 700945174H1
gagagagagaaaaaagagaaagtgaaaattagaaactcttgtacttggttttatgccaaattagggactcttttggttgtcaattagatcacaaagatatggaggttgccatggaactggaagtgatctattttttgctgatttgagcaaggaaattgctctactaattatggatgaagatgaagatccacttgcttcttgtcctcctgactctcttcaggctttttctggggcaattcatcct

SEQ ID NO: 28733 - DNA, 110 bp, Glycine max
  Clone ID: 700945175H1
aaaaagcgtttcaagtgtacaaactaattgaggaagtaggtcacttcatgctatcggttttttatgttccttgttttttcatttaaaaattaatactagttatagttttc

SEQ ID NO: 28734 - DNA, 245 bp, Glycine max
  Clone ID: 700945184H1
ccaggagttgcttgaaggcattagaacatgcatacaacaaattaacaaggctagccgtggagacttaagtcctgaggaattgaaggagagacaggccaaggcaatgcaggatcccgaaattcaaacatccttcaagaccctgttatgagacaggtattgattgatttccaagaaaatcccaaggctgcacaggaacacacgaagaatccaatggtgatgaacaagatccaaaagctggtcagtgc

SEQ ID NO: 28735 - DNA, 244 bp, Glycine max
  Clone ID: 700945191H1
ggaagaaaaagtaaaacacagagagcaaccaccaatcgaagaagaaacaaccgtaacagatctccgtttctcgccaaacaaaaaacaaaaaaatggctgccttcagcggtgacgaaaccgctcctttctttggcttcctcggagccgccgctgccctcgttttttcctgtatgggcgcggcgtacggcaccgcgaagagcggcgtcggggttgcgtcgatgggcgtgatgaggccggagctggt

SEQ ID NO: 28736 - DNA, 242 bp, Glycine max
  Clone ID: 700945193H1
gtccatgatgtgaccatatcatctcctggggacagtcctaacacagatggaattcaccttcagaactccaaagatgtgttgatatacagcagctctatggcctgcggagatgactgtatttcgatacaaactggatgctcgaacatatatgtacacaatgtcaactgtggaccagggcatggaatcagcattggaagtctaggaaaggataacaccagagcctgtgtctccaacattactgt

SEQ ID NO: 28737 - DNA, 245 bp, Glycine max
  Clone ID: 700945195H1
caggccgtcggcgccaccactcccttcttcaccgccgttttcgcttacgtcatgaccttcaagcgcgaggcctggctcacctatctcaccctcgtccccgtcgtcaccggcgtcgtcattgccgcgggggtgagccgagcttccatttatttgggttcatagtatgcattgcagctactgccgcacgtgccttaaaatccgtgttacaaggaattttgctttcttctgaaggagagaagttgaat

SEQ ID NO: 28738 - DNA, 263 bp, Glycine max
  Clone ID: 700945235H1
ctgctccactgtacaagtatctaaaatcaagcaaaggtggactctttggggatggtatcaaatggaacttctccaagttccttgttgataaagagggaaatgtggttgatcgctatgcacccacaacttctcctctgagcattgagaaggacttgctgaagttgttggatgcatgaatgaagctatgaatgactggagctgccaataaatgaattgtgattagaatataaattatgaataagaaatgtattgcagatgctgct

SEQ ID NO: 28739 - DNA, 110 bp, Glycine max
  Clone ID: 700945237H1
tagaagttcacgagtatgacatgtctgagaaagatgactttggtggacaaacatgcctacctatctgggagcttagaagtggcattcgagcaattccacacaacatacga

SEQ ID NO: 28740 - DNA, 262 bp, Glycine max
  Clone ID: 700945239H1
atcgtaacagaaacggtcactggaagttgtctctaccaccctctcagccatggcaacaattccccctagccgatcatcatcacacgcgtttgttgccatggcaaccttcacgactctgttgttgtgcacggcggcggcgaaggagagcgtgtacgagatactccccaagtacgggctcccgagtggtctgttaccggataccgtcaccgactacaaactcgacgaggatggccaattcgtcgtcgttttgccgaagccctgc

SEQ ID NO: 28741 - DNA, 260 bp, Glycine max
  Clone ID: 700945249H1
gtttttgatgcaatcaataacgcacaacacttgatatacattacaggatggtctgtttacactgagattacgttggtaagagattctaggaggccaaagcgtaggagatgcaacacttggtgagcttctcaagaaaaaagcacgtgatggtgtcagggttttgatgcttgtttgggatgatagaacttcggttcctttgttaaaagaagatggcttgatggcaactcatgatgaagacaccgagaactacttctacgaca

SEQ ID NO: 28742 - DNA, 240 bp, Glycine max
  Clone ID: 700945263H1
cgctgctatacatgtttctaacaattaaatataaggatggatgcctaaacgtggtaggggcaccagtatagtatgtatgtaaataatttgcacgatgtaatgttatgaaggaggaaactgctaagcacatgtttatgcttttattctgtaattctctatgctagctagtctagccacaaatcattacccactgttatagttattgcaagtaacctgaatgaaattaatttgagttctcac

SEQ ID NO: 28743 - DNA, 255 bp, Glycine max
  Clone ID: 700945267H1
atttgctgagtcccagacagaatctggccatcctacaagccatccatcctcttcatcaaaaattaacagtgaccaggcaaatgtgcttaatttgaatacactatccagtggaatattgtctagtgcttttgactcaagcctttatacttgtatgcatctattaaactccgctgaaactcttgtagttggaactggaaatggttctctgaggttctttgatgttgctcgaggtcaaaagcttcatatctggagagg

SEQ ID NO: 28744 - DNA, 283 bp, Glycine max
  Clone ID: 700945301H1
gaaaataggaatccgattgtaaatggatcaaatgatagcagtaagttctgtgggtcacatgatcatacaaacaactgctacattcataatccagattttgcatccatagtcattaggaggaaagagcccaagctctacagaaatggttgcactcagagaatacatgcatttgaaaggagcctttttgatggaaatatgtctgtttcaggaaacttagataatgtacagaatgaaaatttagtcagtgtacatgaagaaggtaaaacaatgactgtatcaacta

SEQ ID NO: 28745 - DNA, 270 bp, Glycine max
  Clone ID: 700945310H1
aaaaaagtgtagtgggaaatggcaggtgcgggtgcaggaggagggtatggggacgcgaaccagaggatagactacgtgttcaaggtggtgctgataggggactcggcggtggggaagtcgcagatactagctcggtttgcgaggaacgagttcagcttggactccaagtccaccatcggtgttgaatttcagacgaggactttggttatcgatcacaagaccgttaaggctcagatctgggacactgccggccaagaacgatacagagca

SEQ ID NO: 28746 - DNA, 269 bp, Glycine max
  Clone ID: 700945323H1
ctccgatccgagacactcaactctcaagtctgaagatactcgctactcagagttgaattgttgacgagcattctccgatccagaatcgatggatttggaaatggaggttgaagttggaagggaaatttggagcaaaagcttcaagtgtgcaaggaaatgcattaaagatagttgctaagcctgaatttcaggctaagctaaaattcagacagagagcaaaagattcaagcctggctaagcaagaactggtggctgaggaagagttctgt

SEQ ID NO: 28747 - DNA, 264 bp, Glycine max
  Clone ID: 700945341H1
ttttgtagtgaaggagaaaacaaaagcgtttctaaaatctaaatgcacaaaaaatagagaaagatagagagaataacagcacctctttctctctgtctctctcccctcgttgatcccaaatctactagggattctcattcgatgcgattcggccggaagctttcgttttgcggatttttttaattattatttttcctggctatcaggaaagttgaaaaaaagatggaccatgacaagactggatgccaagctcccccagaaggt

SEQ ID NO: 28748 - DNA, 268 bp, Glycine max
  Clone ID: 700945349H1
ctcctgcagaccgtgctagggccattggtgtggagcttgtgaactttgatgaggccattgccactgcggatttcatctctctacatatgcctcttacggctgctacatcaaagatactcaatgacgagacatttgccaagatgaagaaaggagttcgcatagtcaatgttgctcgtggaggggtcattgatgaggatgcgcttgttagggcactggattctggaattgtagctcaggcggctcttgatgttttcactgaggagccacc

SEQ ID NO: 28749 - DNA, 258 bp, Glycine max
  Clone ID: 700945371H1
gtgaacacagtgccgtgttttcctcattgccactggttctcaaatggcttagggacaccctcagttgcttcttccccacttgatgaaaacatgtgctgatcatggtgtctacttcaagaaggcactctttgtacctggtttatcagtgtatcacaaagttggatcccatgctttaccagcgacagattctgatgttgacctgtcgtggcagcttactctacaaagagtgtgggaaaatctcatgcaagggaacaaaga

SEQ ID NO: 28750 - DNA, 256 bp, Glycine max
  Clone ID: 700945387H1
gtttggcagcgacacgtatcttcatcaataatcgcagaagcagtttccggtgcatctcatcgtcttccaaaatgaacgacgcagatgtctcgaagcaaatccagcagatggtgcgtttcatccgccaggaagctgaggagaaagccaacgagatctctgtatctgccgaagaggaattcaatatcgagaagctgcagttggttgaagccgaaaagaagaagatcaggcaagaatacgaacgcaaagagcgccaagt

SEQ ID NO: 28751 - DNA, 253 bp, Glycine max
  Clone ID: 700945391H1
aaaaaattctctcttttctctgagtcgcagcttttacgttttcctaattctttgtccttagcatcaccatctccatggccaacaccaaacacctcacatttactttcaccatcgttctcacgctcctcttctcattcgccacagcaaaatccccaacggctttgggtgtccagaaggagaagctcagccaccttcacttcttcttccacgacatagtgagcggtccaaagcccaccgcggtgagagtggccca

SEQ ID NO: 28752 - DNA, 255 bp, Glycine max
  Clone ID: 700945393H1
agaagagaaagaaagaaaacaaagaggagaaagaaagtagttgaggaagatacaaacaatttttgcagattgttgagaatgcctttcaagaagcctcatcacacctcagacaagaactacataacaggggacgacggaggcaagttcgagatacaacctagaggactcaacattgtgtggggaaatgattctcgatactggaaaattccagaacaaggtcctgcggagctgatccaagtttcatggttggaggta

SEQ ID NO: 28753 - DNA, 267 bp, Glycine max
  Clone ID: 700945431H1
gataagcaactttgccagtatgtggttcattcttctctttgtctccatttttaccacttcaattcttgagcttaggtggagtggggtcagtatagaagactggtggagaaatgaacagttctgggttatcggtgggacatctgcgcatctctttgctgtgttccaggggcttctaaaagtgcttgctgggatcgatacaaattttactgttacatcgaaggcatcggacgaggatggggactttgccgagctttatgtgtttaaatg

SEQ ID NO: 28754 - DNA, 264 bp, Glycine max
  Clone ID: 700945446H1
cacacacttcaatttatcagcatggcctccgttcagtgccacaaaacctgcaaagtgagctgccaacaggaaaaccagcacgcctcgtttgggcagaaagtttctgacttgttcaaagggcatcaacataatgaccacagctccaattatgccacccaaaccaaagtgctttcccagtcagggtcagggttaggccccttcaccaccaaaactcaaacacaatgcggttgcccccaaacacatctcagtaccactcatggctcc

SEQ ID NO: 28755 - DNA, 278 bp, Glycine max
  Clone ID: 700945508H1
tagaaatggaagcggtgaagatggtaggtttgaggcgactgatacgacagcgttcaagtctcagagactccttagccgagaaggtccatagtccagttccctcgcagcatttggcacgcctcacccccaaacgcttcttcgatcttcatcagcttggaaataaggaagcaattgagaaggagcgcgctcgacttgtagatgaaatgactaggggatacttcgctgatatggctgagttcaaaaagcatgctggtaagattgctgtagctaataaattg

SEQ ID NO: 28756 - DNA, 276 bp, Glycine max
  Clone ID: 700945524H1
aacaaactcatttagcatagacagtgaagcaggctttctctagcagctagagatggcagagggaagagggtccactctcgtgcacctcttggtcgtggttctgtgcttggtcgctttcgggttcgccattgccgccgagagaagaagaagcgtcggaaccatgcacaaaattgaaggaacaaatgaaacattctgcagctatagttcagatgttgccactggttatggagtgggcgctttcctgtttcttctttctggtgaatcactgctaatggg

SEQ ID NO: 28757 - DNA, 274 bp, Glycine max
  Clone ID: 700945526H1
gtcaaatttttcaagctacagaaaagaggccaacgcctgacgcgttcaaactctttacaggttcaccatgggtcatcttgagccggccctttctggagttctgcatttttggttgggacaatttacctcggaccctactgatgtattttacaaatgtgaaattatctcaagaagggtattttcactcagttgtttgcaatgtgccagaatttaagaacacgacagtaaatggtgacttacgatatatgatctgggacaatcctccaaagatgga

SEQ ID NO: 28758 - DNA, 275 bp, Glycine max
  Clone ID: 700945529H1
cagaaaacagcatcgaacccgtcgtagcagaaaaacttgtcaccatggtttcttccgacaaggatccacgagaggatgtccttcaagcctggtacatggatgatagtgatgaagatcaaagactcccccaccacaaagaacccaaggagtttgtctcgttggaccaacttgctgaatttggagtccttagctggaaactagatgctgataaccatgaaaatgatccagagctgaagaagattcgtgaagagcgtggttacacctacatggatgtt

SEQ ID NO: 28759 - DNA, 130 bp, Glycine max
  Clone ID: 700945544H1
cgaggcggaccttcgggcgttgctcgctctcgacaccagcactctctctgtgagaaggaacacaaggaatcaacaaccatggattcacagggccagacaacttcattgcagagacttcagaatgtagaag

SEQ ID NO: 28760 - DNA, 129 bp, Glycine max
  Clone ID: 700945553H1
gccaaagctgtccaagttgtttgaatcttatgcatctaacttgtgcgaatcttctgctgagttgagctcttctgatcccagatccgaagcttgatgtactgtttctttaatcatagttagatccaagtt

SEQ ID NO: 28761 - DNA, 270 bp, Glycine max
  Clone ID: 700945557H1
gtgtaatccttctactaagtcagaagtatcatgtgattcattttcacatggggtacttgatatccttcaacgtgccattagtcaggctgagaatgatttcttgtacatggttgagcaggaaatggaggaacgtcctgatttagtttctattggatcttgtgttttacttgtgcttcttcacggtaatgatttgtatacacttaatctaggtgacagcagagcagtattggcaacatgcggtacagctgatcggatggataagagtgagag

SEQ ID NO: 28762 - DNA, 270 bp, Glycine max
  Clone ID: 700945559H1
ttttaagttaaatagtttttcattgtttcatttaatctacaatggctgcttcaacaatggctctctcttcatcattattggctggccaagctatcaagcttgccccctccacccctcagcttggtgttggtagggttagcatgaggaaaacagcctccaagactgtttcttctggaagcccatggtacggcccagaccgtgtcaagtacttgggcccattctctggtgagcccccatcctacctcactggtgaattcccaggtgactatg

SEQ ID NO: 28763 - DNA, 267 bp, Glycine max
  Clone ID: 700945575H1
gtcggagctgtgtctggggaaatttgcgttgtttttcgcggtacagctcacacacactgaacggtaagtatggcggacaaggctgttacaatccgaacccgaaagttcatgaccaacaggcttctttccaggaagcagtttgtcgttgatgttcttcatccagggagggcaaatgtttccaaggctgaacttaaggagaagctagctaggatgtatgatgtgaaagaccctaatactgtatttgtcttcaaattccgaacacatttt

SEQ ID NO: 28764 - DNA, 269 bp, Glycine max
  Clone ID: 700945593H1
ccgaaaatgaacgacgcagacgtctcaaagcaaatccagcagatggttcggttcatccgccaggaagctgaggaaaaagccaatgagatctctgtctccgccgaagaggaattcaatatcgagaagctgcagttagtcgaagccgagaagaagaagaccaggcaagagtacgaacgcaaagaacgccaagtcgaaattcgcaagaagattgagtactcaatgcagctgaatgcttctcggatcaaagttcttcaagctcaagatgacgt

SEQ ID NO: 28765 - DNA, 268 bp, Glycine max
  Clone ID: 700945594H1
gtccaagcagcctccaattcgtgccactctcttcaaaatggccgttaccttctcaaatctccacacagaatcaggtctcaagtccctcgacgacttcctctctgggaaggtctacgtttctggggatcagttcacaaaggacgacatcaaagtgtatggtgctgttttggagaagccaggtgactcttttcccaatgctgccaagtggtacgaggttgtctcatctcagcttgctgcaagcttccccggcaatgctcaaggggtgaga

SEQ ID NO: 28766 - DNA, 263 bp, Glycine max
  Clone ID: 700945658H1
ctcacgctcacactcactcatttgcaaagaaagagagagaaatggcactgagggcagccgtgctccgccacgttcgtgtgccactccaagccgctccaaaactgcagccatggcgtgccatgtcatcacacggcgacgatcatctctccaaagaggaggtcgtcgaaagagtcctcgccgtcgtcaaagatttccccaaagtcgatccttccagggtggtccagatgtacatttccagaaggatttgggtttggatagcttgg

SEQ ID NO: 28767 - DNA, 258 bp, Glycine max
  Clone ID: 700945674H1
cttttgttgtttgtgtgtttgttttttctctcacctgaaaatgtcttgctgcggtggtaactgtggttgcggaagcgcctgcaagtgcggcaacggctgcggaggctgcaagatgtacccagacttgagctacaccgagtcaaccaccaccgagaccttggtcatgggagtggcaccagttaaggctcaattcgagagtgctgaaatgggtgtcccgctgagaacgatggctgcaaatgtggagctaactgcacctgc

SEQ ID NO: 28768 - DNA, 263 bp, Glycine max
  Clone ID: 700945716H1
catcactgaactaacaaagcaaccctatgtcgaaggtggtttgtgtcaccggagccagcggcgccatcggatcatgggtggtcctactcctcctccagcgtggttacaccgtccatgccaccgtccaagatatcaaggatgaaaatgagacgaaacatttggaggaaatggaaggagcaaagagtcatctccatttttttgaaatggatcttcttgacatcgactccattgccgctgccataaagggttgttccggcgtaatc

SEQ ID NO: 28769 - DNA, 250 bp, Glycine max
  Clone ID: 700945943H1
gtatcttttcgcttcaaatttcatttagatccaaaatttctgaatcagtgaagaatcttagattctgtgggaaaagcttctcaatctttgacgaagataaacaacaatgtcttcacttgcggctgctagagcagacaacttttactatcccccagaatgggaaccgaatcagggttcgctgaacaagtttcatggtcaacatgccttgcgagagagggcgagaaaattagatcagggtatcctgattata

SEQ ID NO: 28770 - DNA, 246 bp, Glycine max
  Clone ID: 700945973H1
gcaattaatgcttatgagcaatgtcttaagattgatcctgattctcgaaatgctggccagaaccgtttacttgcgatgaattacatagatgaaggaaatgatgacaaactttttgaggctcacagggactggggtaggcgatttatgagactatattcacagttcacatcatgggacaactcaaaagatcctgaacggcctcttgtgataggatatgtctctcctgattattttacacattctgtg

SEQ ID NO: 28771 - DNA, 63 bp, Glycine max
  unsure (1)..(63): unsure at all n locations
  Clone ID: 700945981H1
ggaacacacgcagttgcatttgcnttaccattcgcaatggcgaatntnnctncactttcanga

SEQ ID NO: 28772 - DNA, 256 bp, Glycine max
  Clone ID: 700946095H1
ggtaaagcacttccccagttttgatcttgtaacactttttcgggtttgttgaatctgcttctttttatttcaatttgggattgactcatatgacaagtatgtatagtggtggttacactgctctagttacaaacttatccccaagagcaacagaggatgatgtgcgcaattttttcacatactgtggtttgattgagcatattgaaatattaagatctggtgaaaatgcgcctactgcatatgtgacttaccggga

SEQ ID NO: 28773 - DNA, 266 bp, Glycine max
  Clone ID: 700946104H1
ctggagtgaagcacattgtgttagtagggtctatgggtggaacggaccttaaccatcctttgaacagcttgggtaatgggaatatattggtttggaaaaggaaggctgagcaatatctggctgattccggcatcccatatacaattataagggctggtggcttgcaagacaaagatggaggtcttcgggaactacttgtagggaaggatgatgagcttctccagactgaaaccagaaccataagtagatctgatgttgcagaagtc

SEQ ID NO: 28774 - DNA, 261 bp, Glycine max
  Clone ID: 700946134H1
aaaatttgtactactctattactccttccaaattttctctcaccttatctcccacctaatccattaagatgacttcatacggtaccacaattttggcacacttgtttggccttcttgctctcatcctcttgcttgtttggttgctgaattatcgcgagggcattgaatatgattctgaaaatccacttcgtgttttcaatgttcacccttttatgatgttctttggattcattttccttattggtcaagcaatactgtcat

SEQ ID NO: 28775 - DNA, 255 bp, Glycine max
  Clone ID: 700946153H1
ggcccagttccattagttctgtcttgcggatcacgatcctcagttactagaaaatcagatatctctttccattggacctaatgacctatagggctacattgggattgtacaaatttaaatcttatcatccttcattcttccaatatgtactaccacaaacatgaaatgatcatcaacaaagacacatgtattccaatcaatcaattacaatacaaaagataaaagtaaaaccgtgtctgtggccgcaaagtaaaa

SEQ ID NO: 28776 - DNA, 266 bp, Glycine max
  Clone ID: 700946230H1
ctcagaaacaggtcctccccgtctctctttctcccatgatctctctgaactacaagttttaccaatgaaacaaggtgttccttgtagtgacacactgttgcatgactcaaattctgactttgagttcagcacaagcacctgccttgagttcgaatcatcttcagcagatgaactcttctctaatggggtgatccttccaattcagatgcaagacaaaaccacagctagaaaactcactcatcatgtgaaatatcctcacacaaaac

SEQ ID NO: 28777 - DNA, 269 bp, Glycine max
  Clone ID: 700946236H1
cgtcaacgttagtgctttatttaggtgacaaaactactcacagagaaagacactcggagaccttgcaagacttcatcaatggctgtcaaagtttatattgtgtactactccatgtatgggcatgttgagaaactagcagaagaaataaagaaaggggcttcctctgtggaaggtgttgaggccaaattatggcaggtacctgagacgctgcaggatgaggtgctcggtaagatgagtgcaccacccaagagcgatgtaccagtcattac

SEQ ID NO: 28778 - DNA, 264 bp, Glycine max
  Clone ID: 700946246H1
cttggtgctaggaagatttccctaggagggttacctcccatgggatgcttgccacttgaaagaaccacaaatattgttggtgggaatgactgtgttgccagatacaataacatagcattggagttcaatgataagctcaagaatttgaccattaagctaaaccaagagctccctggactcaaattggtgttttctaatccttattacattatgttgaacatcataaaaagacctcaactttatggatttgaatcgacctcagtg

SEQ ID NO: 28779 - DNA, 269 bp, Glycine max
  Clone ID: 700946249H1
catctttgaaatcgttggatctgagtgggaacaacatttatcctccactgcctgactttaagactggattgaaacctgttgttgtggggaatcctctgttaaatggtggagcgaaaactactccttcggggaacaataacccgtcaactggatctgggaatgttgacccttcagggaacactaactcgaattctagttcaagtgattctcatgaaactaagaaatccaaaaggaaacagttggtttcgattgttgctccgattgcgggt

SEQ ID NO: 28780 - DNA, 265 bp, Glycine max
  Clone ID: 700946255H1
ggtggcttatattgcatatgttatccggaatattgaaactttccaaacattgaacatgagaatggtgaacataatcatgaatatgctattgacaaatctgatggtggatgcaaagcaatttataatgatggtagtagtagcctgtcaaaggaagcaccggtggcttatattgcatatgttatccggaatattgaaactttcaactattttctctccctagggaaacaggctaaccttgatattgtggaccttactgattcattga

SEQ ID NO: 28781 - DNA, 137 bp, Glycine max
  Clone ID: 700946263H1
aaaaatagagcatccacttgatatactttggatttttgagtttgatttgttttgttttgcattcactctcatctgtaagttgtatatattctagctttttacaggctctacaattgagtgatttgggttccaaggtc

SEQ ID NO: 28782 - DNA, 269 bp, Glycine max
  Clone ID: 700946265H1
cgtactttatgatcaagtgtctggggaccttaaaactgattcagcaaatggaagtattgtatttgggtgtggtgcaagacaatctggagatctaagttcttcgaatgaagaggcacttggtggaatacttggatttggaaaagctaattcatcaatgatttcacaacttgcttcttctggcaaagtgaaaaagatgtttgctcattgcttaaatggagtaaatggaggtggtatatttgctattgggcatgttgtgcaacctaaagtaa

SEQ ID NO: 28783 - DNA, 265 bp, Glycine max
  Clone ID: 700946271H1
ctaatcttcttctatgggttggcttagtcggttcataactgccgtggctttcttagccatcggagtgatattctcaccggagacactggggtcaaaatcaaccacactttccacctacctcaaactcgctcacctcctctgcttctccaccgccttcggcgccgctctgtgggtaacattcatcggcggcatcatcatgtttaaaaatctgccgcggcatcagtttgggaacctgcaaagcaagatgtttccggcgtatttctcg

SEQ ID NO: 28784 - DNA, 264 bp, Glycine max
  Clone ID: 700946280H1
aagacacactcgttcatatatctctctgctcttctcttctcttctacctctcaagtttttgaagtataaagatggcagagacattcctattcacctcggagtcagtgaacgagggacaccctgataagctctgcgaccaaatctccgatgctgtcctcgacgcttgcctcgaacaggacccagacagcaaggttgcctgcgaaacatgcaccaagaccaacttggtcatggtcttcggagagatcaccaccaaggccaacgttg

SEQ ID NO: 28785 - DNA, 263 bp, Glycine max
  Clone ID: 700946287H1
cttcttcgctcccacccttcgttgacctcctattctcccctcatcggagctcaaatctccgatcccttcatccatatcgcttcaccgcaactttctcttcatccatcgcaagatctagttgaatctcaaccgcgctcctccgattcgaagctccactcactcaaatcctcttcagatctggggggtttgattgcgattctcactctgctgctcggatttgttcgtctgagatgtcgattttaccgaaaggcgattcggttcaa

SEQ ID NO: 28786 - DNA, 259 bp, Glycine max
  Clone ID: 700946292H1
agagcagccgttgggttccaattgaaaaaagggaaagatggccttcccgggctaacttgaacaacaacgagttggcaatctacgtcttgcagcctgatgaacttaccgaggactctgacagctggaaaatagcagtccagaattattggtcactcatgtcacctttaatattttctgatcatccgaagaggcccggtgatgaggacccttcaccgccttacaacatgttcagaaatgtgctagacatgaatgctcattt

SEQ ID NO: 28787 - DNA, 259 bp, Glycine max
  Clone ID: 700946293H1
aaccctcttgccgcacttcgtgtggggcccactcccgcacttcctccagacgtggcttcgcaattacctcggcggcgtcctcctctacctcctctccggcctcctgtggtgcttctacatttattattggaagcgcaacgtttatgttcccaaagatgctattccctctcgaagagccatgctcttgcaaatatctgttgctatgaaagccatgccttggtacactttgcttccaactgtttcggagtacctggtagaa

SEQ ID NO: 28788 - DNA, 258 bp, Glycine max
  Clone ID: 700946302H1
gaatacaccaaattctaccactctcttgccaaggatttcagtgatgagaaacctttagcatggagtcatttcactgctgagggtgatgttgagttcaaggcagtcctgtttgtaccacctaaggcacctcaagatttattgagagctattataacgcaaacaaatcgaacctgaagttgtatgttagacgtgtgttcatttcagatgaatttaatgaactgttgcccaagtacctaaactttttgctgggtcttgttg

SEQ ID NO: 28789 - DNA, 255 bp, Glycine max
  Clone ID: 700946319H1
gtctcttctcttctcttcgctcctccacttgtttgcccttcatggcggcatctcaggcaagccttctccttcaaaagcagctcaaagatctttgcaaaaaccccgtcgacggcttctctgccggtttggtcgatgaaccaacattttcgaatggagtgtcaccataattggaccgcccgatactctttacgagggggatttttcaatgctattatgagtttcccatccaattacccaaatagtccaccttcagtt

SEQ ID NO: 28790 - DNA, 255 bp, Glycine max
  Clone ID: 700946322H1
aagacacttgttttctacagaggcaagcctcctcatggatccagaactgattggatcatgcatgagtatcgcctcaacatccttaacgcctctcagagccatgttcccatggaaaattgggttctatgtcgcatattttgaagaagagaagcggtgctaaaaatggggaggagagcaacaaggtgaggaactctaaggtggttttctatgacttcctagcgcagaacaagactgattcctcatcctcggccgcca

SEQ ID NO: 28791 - DNA, 255 bp, Glycine max
  Clone ID: 700946325H1
tttctctcttctctctccacccaaaccctaactcccgaccctgttcccctctcgtatccgtcatgaaaggaggaaagtccaagaccgaatctaagagagccgatcccaaacttgctgtgaataagaagggagccgcaccaaggctaggaaacccgccggcaaggggaaggcagcgaaagaccctaacaagccaaagaggcctccaagtgctttcttcgttttcatggaggagttcaggaaggtattcaacaaaga

SEQ ID NO: 28792 - DNA, 255 bp, Glycine max
  Clone ID: 700946326H1
atgggttcaacaggtgagactcagattactccaacccatgtatctgatgaagaggcaaaccttttcgccatgcaactagccagtgcctcagtactccctatggttctcaaatcagctcttgagcttgatctgttggaatcatagccaaggctggccctggtgttcacctttccccctccgacattgcttctcggctcccaacacacaaccctgatgcacccgttatgttggaccgtatattgcgcctcttggctt

SEQ ID NO: 28793 - DNA, 255 bp, Glycine max
  Clone ID: 700946328H1
gaaattattttggctgatggcactcttgtgagagccaccaaggacaatgagtactctgatctatactatgccattccgtggtctcagggaacactcggccttcttgttgctgctgagatcaggcttatacccgttaagagtacatgaagctaacctataaacctgttgttggcaccctgcaagatcttgctcaggcatattgtgattcttttgctcccagagatggagaccaggataatgaggagaaggttccag

SEQ ID NO: 28794 - DNA, 256 bp, Glycine max
  Clone ID: 700946329H1
agccgcctcggctagggttcggaaacgaagaagggttctgttttcttttcgcgatgagggccaagtggaagaagaagcgtatgaggaggctgaagaggaagcgccgaaagatgagacagagatccaagtagtgcgttaacctagtttgtttccgttgcttttacaattgcttatgttgtcaaataggacacccagttgttagtggcactggtctctcctttttgatgttttgatacattttgttggattttatttc

SEQ ID NO: 28795 - DNA, 253 bp, Glycine max
  Clone ID: 700946340H1
aaatcatccaagagaaaaaggaagcctcaatctggccctagccgttatgatcttccaatatatgtcacctgtgcagtctggttggataaacttagtgacttacctgtaaaggatgttgccgattcaattaaaagttggcgacagatactgcccagttcttaccacaccaagacaagaaccaaggaaaaggtgctcatcctcatatgtcaacatggaaggctgatattggtggtgaatcagcagatggtttatt

SEQ ID NO: 28796 - DNA, 253 bp, Glycine max
  Clone ID: 700946341H1
gcagaaagcaagctcatcctagagttttaaaaatggcagcagcctcctccatggctctctcttccccatccttggctggcaaggccgtgaagctgggcccatcagcccccgaagtcgggagggtcagcatgaggagaccgtcaccaagcaggcctcctccggaagcccatggtacggcccagaccgcgtcaagtacttgggcccattctctggcgagcccccgtcctacctcactggcgagttcccaggtgac

SEQ ID NO: 28797 - DNA, 253 bp, Glycine max
  Clone ID: 700946342H1
gtgatttatgaaataggtttttggtgctgcatggaaatccgttttcacagctgatgagaaagagcgtgagaagaatgttgaggaagcaattgaggctctgcagtttcttgagaatgagataaaggacaagaagtctttggaggagaggagattgggttggtagatattgctgctgtctacatagcattttgggtccctatggttcaagaaattgcagggttggagttattcacaagtgagaaatttcctaagc

SEQ ID NO: 28798 - DNA, 254 bp, Glycine max
  Clone ID: 700946343H1
gcggaatcagctagaattttctaataatggccaaagacgttgagcaggttacagagcaaggtgaatactccgcgaaggattaccatgacccacctccggcgccgttgatcgacccagatgagctcactaagtggtcttgtacagagccgccatagctgagttcatagcaacactccttttcctttacatcaccgtgttgaccattattggctacaagagacagagtgacaccaaaatccccggtaacaccgagt

SEQ ID NO: 28799 - DNA, 254 bp, Glycine max
  Clone ID: 700946345H1
gagacgcaacagaatagaacgacgaataggcgtgcagggaaaccatttcattttcgagcgcgtcgctttcgaatccaatggccttcaacaacgcactgagatctgccgcgaagtcgtcgcttcttccgaatcttcttctctaactcagtgagcagaggttttcattcaactggcatgaagaggatgggaggtggacatggtcatgatgagccctactatcttcatgcaaagcacatgtacaacttggacaagat

SEQ ID NO: 28800 - DNA, 252 bp, Glycine max
  Clone ID: 700946349H1
caaggaggtgattttacacatggcaatggtatgggtggagaatcaatttatggagagaagtttgctgatgagaacttcaagttaaagcatactggaccaggacttctatcaatggcaaatgctggtcctgacacaatggctcacaatttttcattacaaccgtgacaactagctggttggacggaaggcatgttgtttttggtagagttctttctggattggatgttgtttacaatattgaagctgaaggaa

SEQ ID NO: 28801 - DNA, 251 bp, Glycine max
  Clone ID: 700946353H1
aatttttgaaccatccaattgtcaaagaaagtctgccccctagagatcctgttttctcctttttcaagggtctctatgaaagcctttttggttcaaaatagatttgatgatgtggtgtgagacttagtatttcaagaattatgtgtttgttaaaggcttctatgaaagcctcactgcttcaaaatagattcatgtatgtgagactcagaatctctggggaaaattgtgtgtggtgtggactacttgttttg

SEQ ID NO: 28802 - DNA, 251 bp, Glycine max
  Clone ID: 700946354H1
ggaagttggaagctccgacttcccaaaccctcgttctgcaatgaactctcccctcgccaaatcgctcttcgcaatcgacggcgttactcgcgttttctttggatctgatttcgttaccgttacgaaatcggagaggctgcgtgggaattcctcaagcctgaagtcttcgccgccattatggatttctactcctccgctcagcctctctttttagattctcaagccgccgcggccatggatacagctattca

SEQ ID NO: 28803 - DNA, 250 bp, Glycine max
  Clone ID: 700946355H1
gagcgagtcaacgtctattacaatgaagcgagttgcggaaggttcgtgccgagggcggtgctcatggatctagagccagggaccatggacagcgtcagatctggtccctacggtcagattttccgacctgatacttcgtcttcggccagtccggcgccggaaacaactgggccaaaggtcactacaccgaaggcgctgagttgattgactctgttctcgatgttgtcaggaaggaggcagaaaactgtga

SEQ ID NO: 28804 - DNA, 251 bp, Glycine max
  Clone ID: 700946360H1
tggccagcaaaattgctccaagtgttatttttgttgatgaggttgatagtatgttaggaagacgtgaaaatcctggtgaacatgaggctatgcgtaaaatgaagaatgaattcatggttaattgggatggtttagaacaaaagataaagagcgtatacttgttcttgctgctacaaatagaccttttgatcttgatgaggctgttattaggagacttccacgaagattgatggttaatttgccagatgctc

SEQ ID NO: 28805 - DNA, 254 bp, Glycine max
  Clone ID: 700946364H1
aaaagttcctcctcgcacttcagtatctcttccccattttcgactgggccccaaactacaatcttacccttctccgctctgacctcatctctggcctcaccattgccagcctcgccattcctcagggaatcagtatgccaagcttgccaacttgccacctattcttggattatattcgagttttgttcccccattgatatactcgctgcttggaagttctagacatcttggtgttggacctgtttccattgcgt

SEQ ID NO: 28806 - DNA, 250 bp, Glycine max
  Clone ID: 700946371H1
ctctgtctcgtttacacatctctccaacctttcactttcgtttctcagttttattcgaatccctctctcaatctcctttccaaatggccagcgttgaggttgcacagcaaacaccaacaacagttccagaaatgaaacaaccgaggtaagcaagacccaggaaacaaccccagtcactgaggctcctgcaacagaacaaccagcagctgaggttcctgcaacagaacaaccagccgctgaggctcctgcc

SEQ ID NO: 28807 - DNA, 249 bp, Glycine max
  Clone ID: 700946372H1
atgctaacagcactgaatttgagccccataccaaaagcccatacatcatatttatgcctgagggatcaaaaacacacatgggaggcaccatgcgccttggatctaggaggacatatttccagaccaaggaatcaaatctgcaaaattatatggctgcaaaagcttcattgatgagagacatcggcatagatatgaggtgaatccggatttagtagcctgccttgaaaatgctggtctttcttttactgg

SEQ ID NO: 28808 - DNA, 251 bp, Glycine max
  Clone ID: 700946374H1
gaaaatcaagcaaattctcttgttctcactcctactacttgccccctttttctcaatcaccactttagctcaatcaccagctgcagcccccaaagccccagcaaaacctgcaccttcaaaacctgctcctgcacaccggctccagcgcccgcaaaaccattagtcccttcattaccccagtcaccctcttcaggtgttgattcttctggcagccaagacattgtgaagatcctaaggaaggccaagtcatt

SEQ ID NO: 28809 - DNA, 251 bp, Glycine max
  Clone ID: 700946375H1
ggaagaggaaccctagctagggtttggaagaagctgatccgagaagatggtgcagcgtctcacctaccgcaaacgccacagctatgctaccaaatccaaccagcacagagtcgtcaagactcccggtggcaacttgtttatcagaccacgaagaagagggccagcggacccaagtgccctgtcactggaaagaggattcaagggattccacatttaaggccagcagagtataatagatcaaggttacacag

SEQ ID NO: 28810 - DNA, 250 bp, Glycine max
  Clone ID: 700946378H1
gccttgggctgcgtcttcccggagttgctgtcccgcaacggggtgaagttcggagaagccgtgtggttcaaggccgggtcccagatcttcagcgagggtgggctcgactacttgggcaacccaagcctgatcacgcccagagcatcctcgccatctgggccacacaagttatcctaatgggtgccgttgaaggttaccgtattgctggtggccccctcggtgaggtcactgacccaatctacccaggtgg

SEQ ID NO: 28811 - DNA, 247 bp, Glycine max
  Clone ID: 700946387H1
gagaatcgtaacaaaagcggtaaccggaataagttgtctctacgatttgagccatggcaacaacaacaccctcaaaccgatcatcagaggcgtttgctctcatggcaatcctcagcactctgctttgcaggcggtggcggcgaaggagagcgtgtacgagatactccccaagtacggcctcccgagcggtctgttaccggacaccgtcaccgactacacgctcgacgaggacgggcaattcgtcgtc

SEQ ID NO: 28812 - DNA, 249 bp, Glycine max
  Clone ID: 700946388H1
aataacatagcatagagtgagaagtgagaagagaaaaatggcaatctccatacccagtagacaacttttcatagatggagagtggaaagtccctcttctcaacaatcggtttccgatcatcaaccccgctatgaagacatcatagggcatattccagccgctactaaggaagatgttgaccttgcggtggatgctgctaaaagagccttttcccataacaaaggcaaagattggtcttcagctcctggc

SEQ ID NO: 28813 - DNA, 248 bp, Glycine max
  Clone ID: 700946389H1
cagataataagagtactaaagaatgaagtaaaggaaataaaaggagcaatgatagaggacaacggattctgcctctctgtacatttccggcaggtccaagaaaaggtaacctttaatttctaatttcttacattcttttctttcttggcatttctcttttcctcattgcttgacaatatttaatttagtgagcaatatttattctcctattttttttaaaagtatctctagatttaaaggtaatgaat

SEQ ID NO: 28814 - DNA, 247 bp, Glycine max
  Clone ID: 700946393H1
aattgctaaggcccggaaatcaggacaaagggtaattggagagcccgttgcctctgggttagcccttgatgaatcttggctttggcatcctgactttgagactgctgcaaagtatgtcatgagtccccctttaggaaacgaggacatgataaggcccttcaagctgccctttcaacaggagttttgcagctggtaggaactgatcattgtgcctttaattccacccagaaagctcttggaattgatg

SEQ ID NO: 28815 - DNA, 238 bp, Glycine max
  Clone ID: 700946412H1
cactaatagagagacataagcataatattgagaaataatggagggttgtacttattgtgtgaagttgctatgccttgttgggtttgtggtgcttgtgagtactattgcaggggtggagagtgctggtgaatgtgggaaatctaccaccccagataatgaggcttataagcttgcaccatgtgcctcagcagcacaagatgagaatgctagtgtttctcagagttgctgtgctcaggtg

SEQ ID NO: 28816 - DNA, 239 bp, Glycine max
  Clone ID: 700946413H1
acggaagctaaggtgtttgaggggtttaaaaatgccttgaccaacaaaactagtccctcctcagtccctggtgctaataacgcgactgctaatggaacaagcacgagcgcgaacaacaacagcagtagtgggtggggaaagaggtggttggtgacagaggtgctttgtgggattttaccgtttgttttcatttcccatttattcctcttcgtagtttgaaccgagatcaagagtactag

SEQ ID NO: 28817 - DNA, 238 bp, Glycine max
  Clone ID: 700946414H1
gagagtttgttaaagaactgtgaagaagagggtaactgcaaacaaagcaagcaaaacaaaagacgcagtgatggagaggatgaagagggtgcttctgctgcttctggccttcactgttcttctcatgttgccagaagcttctgctacaaagtttactgttggaaacaaccagttttggaaccccaatattaactacactgagtgggctaaaggcaaacatttctaccttggtgactgg

SEQ ID NO: 28818 - DNA, 237 bp, Glycine max
  Clone ID: 700946444H1
tggtgtttttgtgaagcttgagatcaggaattaatttcagtggttcagagaatggcaacggattcttcaaatggtaatggacatcaccagacaacaacaaagcagcctcctttgccatctcccctgcgcttttccaaattttttcagtccaacatgagaatcttggttactggaggagctggattcattgggtctcacttagttgacagattgatggaaaatgaaaaaaatgaggtc

SEQ ID NO: 28819 - DNA, 235 bp, Glycine max
  Clone ID: 700946447H1
ggtatttgtacgtcaaaggctatggagttgaccagaagaactacaccaaggccaaagagtattttgagaaggctgctgataatgacgaggttggcggccactataaccttggcgtcatgtatctcaaggggattggagtcaatagggatgttaagctcgcctgtaagttctttgttttcgccgctaaccatggccaaccaaaggccttctaccagctcgctaagattttccatac

SEQ ID NO: 28820 - DNA, 235 bp, Glycine max
  Clone ID: 700946464H1
agatattttagttgcaggaattggaaccggtggaactgtttctggagctggccaattcctaaaacaacaaaatccgaaaatacaggttattggcgtagagcctctggaaagcaacatacttacaggtggaaagccaggacctcacaaaattcagggtattggggctggttttgtgcccaggaatttggatcaagatgtgcttgatgaagttatagcgatatcaagtgatgaagca

SEQ ID NO: 28821 - DNA, 235 bp, Glycine max
  Clone ID: 700946476H1
gcttggagctctttgcatgcaatggctaaaggacaaggtatactcaatccgtgatgcagccgctaataacatcaaacgcttggcagaagaatttggaccggattgggcaatgcagcacattattccccaggttttggacatggttactgatccacattatctgtatcggatgacaatcttacaagcaatttctctactagctcctgttctgggctcggagattacttcttcaaaa

SEQ ID NO: 28822 - DNA, 234 bp, Glycine max
  Clone ID: 700946477H1
gtcgtgaactctctcccttcatctagctcgagtttttttcttgcttccgggagctctgaacttgaccgacgtcgttttcacatcaaaacccttcaacaaaaaaatggcgttcttcttgaaccaaactagtatcgcttcccattttcgatctcactctcagaagactgaagatttggcttcttttcctcgccgtcgattccacgtcgaaccaggggctcgtgaaaaagctctctt

SEQ ID NO: 28823 - DNA, 233 bp, Glycine max
  Clone ID: 700946479H1
ttcatttcctctgtgtcaggcatagctgaaggtgctcgattgctactttcccaaacatatcatggtgatagagttattgcggtctatgacaatgattactctagcataatatcctatgcccttagttccaaggaatatgaagattgggtgtctggtaagtcagatatgcaagagagtaggattgctcgtgagagaagcaaagaagatttagctacttctggcttttctgcatg

SEQ ID NO: 28824 - DNA, 240 bp, Glycine max
  Clone ID: 700946488H1
gagaaagttctctctctttgactcacaaccctattgcgtgctttgcaatcgaccccgcttatggccaacagtaacctccctcgaagaatcatcaaggaaacgcagcgtttgctcagtgagccagcgcctggaattagtgcgtccccttcggaggacaatatgcggtatttcaatgtgatgatccttggcccgactcagtcgccatatgaagggggagttttcaagttggaattatttttg

SEQ ID NO: 28825 - DNA, 234 bp, Glycine max
  Clone ID: 700946491H1
ctgatttgtctggcagggaaacccttgtccgaatcactggtggtatgaaagttaaagctgacagagatgaatcatctccttatgctgctatgcttgcagctcaggatgttgctgccagatgcaaggaactgggcataactgctcttcatatcaagctccgtgctactggtggaaacaagaccaaaacacctggtcctggtgctcaatcagctcttcgagcccttgctcgttcag

SEQ ID NO: 28826 - DNA, 251 bp, Glycine max
  Clone ID: 700941104H1
gttgaacaagggtttctctgtctgcttcttcactttctctcgtttcaatcgaaaccataacaaaaacatgggcagaaaattcttcgtcggtggcaactggaaatgcaatgggaccactgaggaggtaaagaagattgttactactttgaatgaggctaaagtccctggagaagatgtcgtagaagttgttgtgagccctccttttgtgttccttcctgttgtaaaaagtttgctgcgctctgatttccatg

SEQ ID NO: 28827 - DNA, 249 bp, Glycine max
  Clone ID: 700941174H1
gttgaacaagggtttctctgtctgcttcttcactttctctcgtttcaatcgaaaccaaaacaaaaacatgggcagaaaattcttcgtcggtggcaactggaaatgcaatgggaccactgaggaggtaaagaagattgttactactttgaatgaggctaaagtccctggagaagatgtcgtagaagttgttgtgagccctccttttgtgttccttcctgttgtaaaaagtttgctgcgccctgatttcca

SEQ ID NO: 28828 - DNA, 227 bp, Glycine max
  Clone ID: 700890283H1
tgcttcttcactttctctcgtttcaatcgaaaccaaaacaaaaacatgggcagaaaattcttcgtcggtggcaactggaaatgcaatgggaccactgaggaggtaaagaagattgttactactttgaatgaggctaaagtcccgggggaagatgtcgtagaagttgttgtgagccctccttttgtgttccttcctgttgtaaaaagtttgctgcgccctgatttcca

SEQ ID NO: 28829 - DNA, 258 bp, Glycine max
  Clone ID: 700892544H1
gttgaacaagggtttctctgtctgcttcttcactttctctcgtttcaatcgaaaccaaaacaaaaacatgggcagaaaattcttcgtcggtggcaactggaaatgcaatgggaccactgaggaggtaaagaagattgttactactttgaatgaggctaaagtccctggagaagatgtcgtagaagttgttgtgagccctccttttgtgttccttcctgttgtaaaaagtttgctgcgccctgatttccatgtttcggc

SEQ ID NO: 28830 - DNA, 221 bp, Glycine max
  Clone ID: 700893935H1
tgttgaacaagggtttctctgtctgcttcttcactttctctcgtttcaatcgaaaccaaaacaaaaacatgggcagaaaattcttcgtcggtggcaactggaaatgcaatgggaccactgaggaggtaaagaagattgttactactttgaatgaggctaaagtccctggagaagatgtcgtagaagttgttgtgagccctccttttgtgttccttcctgtt

SEQ ID NO: 28831 - DNA, 240 bp, Glycine max
  Clone ID: 700945665H1
aggctgtattgtagaactgaacaagggtttctctttctctttctctgtctgcttcttcactttctctcgtttcaatcgaaaaaaatcatgggcagaaaattcttcgtcggtggcaactggaaatgcaatgggaccactgaggaggtgaagaagattgttactactttaaatgaagctaaagtccctggagaagatgttgtagaagttgttgtgagcctccttttgtgttccttcttttgt

SEQ ID NO: 28832 - DNA, 180 bp, Glycine max
  Clone ID: 700893711H1
agaaaagggtttctctgtctgcttcttcactttctctcgtttcaatcgaaaccaaaacaaaaacatgggcagaaaattcttcgtcggtggcaactggaaatgcaatgggaccactgaggaggtaaagaagattgttactactttgaatgaggctaaagtccctggagaagatgtcgtaga

SEQ ID NO: 28833 - DNA, 261 bp, Glycine max
  Clone ID: 700943855H1
ggacgagaacatccccaaggcgcaaagcgcgttgctggtgaggtgcaaggcgaattctgaggctactcttggaacttacaagggggatgccacgcttggggaaggggcttctgagtctcttcatgttaaggattataagtactaagagagaggtgtgagattggttcttttggaatggaattgtttgtttctttgggcctgttttggatattcaagagtgtttttcaaaaaatttctactgaaaaggaaagaaattctcca

SEQ ID NO: 28834 - DNA, 248 bp, Glycine max
  Clone ID: 700941053H1
agggcaagtaccatgatgagcttatcgccaatgctgcgtacattggcactcctggaaagggtattcttgctgctgatgagtcaacagggacaattggcaagcgtttggccagcatcagtgtagagaacattgaatccaacaggcgagctcttagggagctgcttttcactgctcctggtgttcttcaatatctcagtggtgtcatcctctttgaggaaaccctctaccagagcacagctgcaggcaag

SEQ ID NO: 28835 - DNA, 268 bp, Glycine max
  Clone ID: 700889170H1
gtccaacctacccctttttcttctcccaccaacttcaccgtcttcttcctcgatcatgtctcacttcaagggcaagtaccatgatgagcttattgccaatgctgcttacattggcactcctggaaagggtattcttgctgctgatgagtcaacagggacaattggcaagcgtttggccagcatcagtgtagagaatgttgaatccaacaggcgtgctcttagggagctgcttttcaccgctcccggtgctcttaaatatctcagtggt

SEQ ID NO: 28836 - DNA, 253 bp, Glycine max
  Clone ID: 700894957H1
gccgtcaccgagcgtgtccttgcagcatgctacaaggctttgaatgatcaccatgtccttcttgagggtaccctattgaagccaaacatggtcacccctggatcccaatctgctaaggtttcccctcaggtggttgccgagcacactgtcagagcccttcagagaaccgtgcctgctgcagttcctgctgtcgttttcttgtctggtggccagagtgaggaggaggcatccgtcaacctcaacgccattaacc

SEQ ID NO: 28837 - DNA, 261 bp, Glycine max
  Clone ID: 700808315H1
gtcaccgagcgtgtccttgcagcatgctacaaggctttgaatgatcaccatgtccttcttgagggtaccctattgaagccaaacatggtcaccctggatcccaatctgctaaggtttcccctcaggtggttgcgagcacactgtcagagcccttcagagaaccgtgcctgctgcagttcctgctgtcgttttcttgtctggtggccagagtgaggaggaggcatccgtcaacctcaacgccattaaccagtcaatgggaag

SEQ ID NO: 28838 - DNA, 247 bp, Glycine max
  Clone ID: 700894146H1
ctctaacctacctctttttcttctctctcaacaacttcaccttcttcctcctcgatcatgtctcacttcaagggcaagtaccatgatgagcttatcgccaatgctgcgtacattggcactcctggaaagggtattcttgctgctgatgagtcaacagggacaattggcaagcgtttggccagcatcagtgtagagaacattgaatccaacaggcgagctcttagggagctgcttttcactgctcctg

SEQ ID NO: 28839 - DNA, 242 bp, Glycine max
  Clone ID: 700942532H1
cctctaacctacctctttagcttctctctcaacaacttcaccttcttcctcctcgatcatgtctcacttcaagggcaagtaccatgatgagcttatcgccaatgctgcgtacattggcactcctggaaagggtattcttgctgctgatgagtcaacagggacaattggcaagcgtttggccagcatcagtgtagagaacattcaatccaacaggcgagcttagggagctgcttttcactgct

SEQ ID NO: 28840 - DNA, 238 bp, Glycine max
  Clone ID: 700890349H1
tccaacctctcaagtccaacctacccctttttctgctcccaccaacttcaccgtcttcttcctcgatcatgtctcacttcaagggcaagtaccatgatgagcttattgccaatgctgcttacattggcactcctggaaagggtattcttgctgctgatgagtcaacagggacaattggcaagcgtttggccagcatcagtgtagagaatgttgaatccaacaggcgtgctcttaggga

SEQ ID NO: 28841 - DNA, 232 bp, Glycine max
  Clone ID: 700889072H1
ggctaactcagaggcaactctgggaacctacaagggtaactcacagcttgctgatggtgcctcagagagcctccatgtttcgaactacagctactgatcaatcgaagttggtgttgtttgaagagactagtgcgagtaggaatcggtattatgggtacaacaaccgaatttcttgttgataagtattattgtggtttgactcttcccagaataatcgtttggaattttgctt

SEQ ID NO: 28842 - DNA, 240 bp, Glycine max
  Clone ID: 700889668H1
cctccccaattctcaagccaaccatgtcttccttcaagagcaagtaccaagatgaactcattgccaatgctgcttacattggcaccccagggaagggtatccttgctgctgatgagtcaactggtacaattggcaagcgattggccagcattaatgtcgagaatgttgaagcaaataggcgtgctcttcgtgaactcctattcaccacacctggtgcttttgagtgcctcagtggtgtga

SEQ ID NO: 28843 - DNA, 246 bp, Glycine max
  Clone ID: 700890647H1
gcattattgtctgtttgattactactctctttgcaactgatttctttgagatcaaggctgtcaaggaaattgaaccagctttgaaaaagcagcttatcatctctacagtactcatgactgttggaattgcaattattagttggattgctctgccaacatccttcacaattttcaactttggcgctcagaaggaagtaaagagctggcagctgttcctctgtgtgggtgttggtctatgggctggac

SEQ ID NO: 28844 - DNA, 259 bp, Glycine max
  Clone ID: 700942978H1
caacactggcggtgcttgggataatgctaagaagtacatagaggctggtgcgtctgagcatgcaaggaccctgggccagcaaggatctgaaccacataaggcagctgttattggagataccattggagaccctcttaaagatacttcaggtccttcactcaacatcctcatcaagctcatggccgttgagtcgctcgtcttcgcaccatttttcgccactcacggtggcctgcttttcaagatcttttgatttgagggt

SEQ ID NO: 28845 - DNA, 188 bp, Glycine max
  Clone ID: 700944280H1
gcctctgttccgccaagcgcagataagacccaccgttcaggccaccggctgagttaggtttccggcgaggatcggtgctgctctgctgtcggagcttgcgacggagatagtcgtgccagtgtgcgccgtcatcgggatcgggtcctggctggtgcagtggttcctcgtgtcgcgcgtcaagctcactc

SEQ ID NO: 28846 - DNA, 236 bp, Glycine max
  Clone ID: 700891764H1
acacgttctctgtgactgcctctgttccgccaagcgcagcattgccccaccgttcaggccaccggctgagttaggtttccggcgaggatgggtgctgctctgctgtcggagcttgcgacggagatagtcgtgccagtgtgcgccgtcatcgggatcgtgttctcgctggtgcagtggttcctcgtgtcgcgcgtcaagctcactcccgaccgcaacggaacgacgtcgtcgccgcg

SEQ ID NO: 28847 - DNA, 249 bp, Glycine max
  Clone ID: 700895231H1
gtcaccacctctgaactctctctctcatctataagtcaacatggctcatcatgaagattcaagtgcatggaattcgagtaaacctcaccctaagctcaatgaaagaattctgtcttctctgtcacggagaactgttgctgctcacccctggcacgacttagagattgggccaggagctccagcagttttcaactgtgtggttgaaattggcaaaggaataacgtaagtatgagctggcagacaagtgga

SEQ ID NO: 28848 - DNA, 222 bp, Glycine max
  unsure (1)..(222): unsure at all n locations
  Clone ID: 700890526H1
cgtgtgaagaacatcacaggactcgtggagtggtacggtaagaacgcgaagtagagggagttggtgaaccttgtggttgttgccggagacaggaggaaggagtcgaaggacttggaagagaaggccgagatgaagaagatgtacggcctgatcgagaccaaagtgttgaacgggcaactcagantganttcagtatagagtaaccgatctaggaacggagag

SEQ ID NO: 28849 - DNA, 220 bp, Glycine max
  Clone ID: 700893784H1
ctttgagcagagcaaggctgatccatctcactgggcaaaaatctcccccggtggactcaagggtatcatgaggcatacacatggccaatttactcggacaggctcttgacactcactggtgtgtatcgcttctggaagcacgtgaccaatcttgaacgccgtgcgagcaaacgttacctcgagatgttctatgctctccagtaacgcaaattggctgagt

SEQ ID NO: 28850 - DNA, 258 bp, Glycine max
  unsure (1)..(258): unsure at all n locations
  Clone ID: 700944438H1
ggttactttgcccaagataatgtctgagtcgtancctgacacgtggtgggcaggttgtgtacatcttaggtcaagttcgtgccttggagaatgagatgctcaaccgcatcaagacacaaggccttgatatcacgcctcgtattctcattattactcgtcttcgccctgatgcagtaggaactacctgtggccaacgtctagagaccgtatatgatactgaatattgtgacattctccgagttccttgcagaaccgaaa

SEQ ID NO: 28851 - DNA, 265 bp, Glycine max
  Clone ID: 700945733H1
gcagacagataaaggaatcctgcatcaatggatttctcgcttcgacatttacccctatcttgagaggtttactcaggatgcaacagccaagattcttgagttcatggaagggaaaccagatctagttattggaaattacactgatggaaatttggtagcatcactaatggctagaaaacttgggataactcagggaactatagcacatgctttagagaagaccaagtatgaagactcagatgtcaagtggcaagagttggacccc

SEQ ID NO: 28852 - DNA, 245 bp, Glycine max
  Clone ID: 700891996H1
gaagaaatggcaaatcatcctttgacacactctcactctttccgcgagaggtttgatgaaactctcactggtcacaggaacgaaattttggcccttctgtcaaggcttgaagccaagggcaagggaatcctgcaacatcatcaagtggttgcagagtttgaagaaatccctgaggagagcagaaagaaactccaagatggtgtctttggagaagttttgagatccacacaggaagccatagtgct

SEQ ID NO: 28853 - DNA, 265 bp, Glycine max
  Clone ID: 700945706H1
ctccaacatgtgttgagaaaagcagaagagtatctgatttcagttgctcctgaaacaccctactcggaattcgagaacagattccgggagattggtctggagagggggtggggtgacactgccgagcgtgtcctcgagatgatccagcttctcctggaccttcttgaggcacctgacccttgcaccctcgaatcattccttggaagagtccctatggtcttcaatgttgttatcctttctccccatggttactttgcccaagata

SEQ ID NO: 28854 - DNA, 278 bp, Glycine max
  Clone ID: 700889102H1
atcaaaccatttacttcccccacactgaaaccagccgtaggttgacatccttccaccctgaaatcgaagaactcctttacagctcagtggagaatgaagaacacatatgtgtgctgaaggaccgcagcaagccaattatcttcgccatggcaaggttggatcgagtgaagaacatcacaggacttgtggagtggtacggtaagaacgcgaagctgagggagctggtgaaccttgtggttgttgctggagacaggaggaaggagtcaaaggacttggaa

SEQ ID NO: 28855 - DNA, 262 bp, Glycine max
  Clone ID: 700890311H1
gtggtacggtaagaacgcgaactgagggagctggtgaaccttgtggttgttgctggagacaggaggaaggagtcaaaggacttggaagaaaaggccgagatgaagaagatgtacggcctgatcgagacctacaagttgaacggccaattcagatggatttcatcgcagatgaaccgtgtgaggaatggagagctctaccgcgtgatctgcgacaccaggggtgctttcgtgcagcctgctgtatacgaggcttttggtttga

SEQ ID NO: 28856 - DNA, 263 bp, Glycine max
  Clone ID: 700892212H1
gtggtacggtaagaacgcgaagctgagggagctggtgaaccttgtggttgttgctggagacaggaggaaggagtcaaaggacttggaagaaaaggccgagatgaagaagatgtacggcctgatcgagacctacaagttgaacggccaattcagatggatttcatcgcagatgaaccgtgtgaggaatggagagctctaccgcgtgatctgcgacaccaggggtgctttcgtgcagcctgctgtatacgaggcttttggtttga

SEQ ID NO: 28857 - DNA, 255 bp, Glycine max
  Clone ID: 700943424H1
ctggaaaatattggaagagagataccacttctcttgccaattcacagctgatctatttgccatgaaccacacagatttcattatcaccagtaccttccaggagattgctggaagcaaggacactgttggacagtacgaatctcacacagccttcacccttcctggactctaccgcgttgtgcatggtattgatgtctttgatccaaaattcaacattgtctcccctggagctgatcaaaccatttacttccccca

SEQ ID NO: 28858 - DNA, 255 bp, Glycine max
  Clone ID: 700889648H1
tggaatggagagctctaccgcgtgatctgcgacaccaggggtgctttcgtgcagcctgctgtatacgaggcttttggtttgacagtggttgaggccatgacttgcggcttgccaacattcgccacatgcaatggtggtcctgctgagatcattgtgcacggcaagtctggcctccacattgacgcttaccatggtgaccgtgctgctgatctccttgttgacttctttgagaagtgcacgcttgacccaactcac

SEQ ID NO: 28859 - DNA, 256 bp, Glycine max
  Clone ID: 700945690H1
cgcgtgatctgcgacaccaggggtgctttcgtgcagcctgctgtatacgaggcttttggtttgacagtggttgaggccatgacttgcggcttgccaacattcgccacatgcaatggtggtcctgctgagatcattgtgcacggcaagtctggcttccacattgacccttaccatggtgaccgtgctgctgatctccttgttgacttctttggaagtgcaagcttgacccaactcactgggacaagatctcaaaggc

SEQ ID NO: 28860 - DNA, 250 bp, Glycine max
  Clone ID: 700888245H1
tggagacaggaggaaggagtcaaaggacttggaagaaaaggccgagatgaagaagatgtacggcctgatcgagacctacaagttgaacggccaattcagatggatttcatcgcagatgaaccgtgtgaggatggagagctctaccgcgtgatctgcgacaccaggggtgctttcgtgcagcctgctgtatacgaggcttttggtttgacagtggttgaggccatgacttgcggcttgccaacattcgcca

SEQ ID NO: 28861 - DNA, 263 bp, Glycine max
  Clone ID: 700888950H1
tacaagttgaacggccaattcagatggatatcctctcagatgaaccgtgtgaggaacggagagctctaccgtgtcatcttcgacacaaggggtgcctttgtgcagcctgcagtttatgaggcctttgggttgactgtggttgacgccatgacttgtgggttgccaacgtttgccacatgcaatggtggtcctgctgagatcattgtgcatggaaaatctggttaccacattgatccttaccatggtgaccatgctgctgagat

SEQ ID NO: 28862 - DNA, 252 bp, Glycine max
  Clone ID: 700894112H1
ggaagtaaatggtttgatcagctccaggggagacatccttccaccctgaaatcgaagaactcctttacagctcagtggagaatgaagaacacatatgtgtgctgaaggaccgcagcaagccaattatcttcaccatggcaaggttggatcgagtgaagaacatcacaggacttgtggagtggtacggtaagaacgcgaactcgagggagctggtgaaccttgtggttgttgctggagacaggaggaaggagt

SEQ ID NO: 28863 - DNA, 268 bp, Glycine max
  Clone ID: 700944525H1
tcgagacctacaagttgaacggccaattcagatggatatcctctcagatgaaccgtgtgaggaacggagagctctaccgtgtcatctgtgacacaaggggtgcctttgtgcagcctgcagtttatgaggcctttgggttgactgtggttgaggccatgacgtgtgggttgccaacgtttgccacatgcaatggtggtcctgctgagatcattgtgcatggaaaatctggttaccacattgatccttaccatggtgaccatgctgctga

SEQ ID NO: 28864 - DNA, 250 bp, Glycine max
  unsure (1)..(250): unsure at all n locations
  Clone ID: 700944860H1
tggaaacattgttgcctctttgttggcacataaattaggagtcactcagtgtaccattgctcatgcacttgagaagaccaaataccccgaatccgacatttactggaaaaaattggaagagagataccacttctcttgccaattcacagctgatctatttgccatgaaccacacagatttcatcacaancagtaccttccaggagattgctggactgcaggacactgttggacagtatgagtctcacaca

SEQ ID NO: 28865 - DNA, 259 bp, Glycine max
  Clone ID: 700891092H1
gaagaacatcacggggcttgtcgagtggtacgggaagaacgcacgcctccgcgagttggtgaacctggtggtggtggctggagacaggaggaaggagtcgaaggacttggaagagaaggccgagatgaagaagatgtatggcctcatcgagacctacaagttgaacggccaattcagatggatatcctctcagatgaaccgtgtgaggaacggagagctctaccgtgtcatctgtgacacaaggggtgcctttgtgcag

SEQ ID NO: 28866 - DNA, 231 bp, Glycine max
  Clone ID: 700894436H1
cacagcgtcaagggaaagactttgatgttgaatgacagaattcaaaacccagatgcactccaacatgttctgaggcaagctgaggagtatctgggcacagtgcctcctgaaactccctactcagaatttgagcacaagttccaggagattggtttggcgagagggtgcggtgacaacgcagagctagttcttgagtccattcaacttctctaggatctacttgaggcgcct

SEQ ID NO: 28867 - DNA, 245 bp, Glycine max
  Clone ID: 700894532H1
gaaaagaccaagtaccctgagtctgacatttactggaaaaaatttgaagagaaatatcatttctcatgccaatttactgctgatctttttgcaatgaaccacacagactttatcatcaccagcaccttccaagagattgctggaagcaaggacactgttggacagtatgagagtcacactgccttcacccttccaggactttaccgtgttgttcacggtattgatccatttgatcaaagttcaac

SEQ ID NO: 28868 - DNA, 236 bp, Glycine max
  Clone ID: 700891712H1
cagaccaagtaccctgagtctgacatttactggaaaaaatttgaagagaaatatcatttctcatgccaatttactgctgatctttttgcaatgaaccacacagactttatcatcaccagcaccttccaagagattgctggaagcaaggacactgttggacagtatgagagtcacactgccttcacccttccaggactttaccgtgttgttcacggtattgatccatttgatccaaa

SEQ ID NO: 28869 - DNA, 251 bp, Glycine max
  Clone ID: 700889555H1
tatcacttctcatgccaatttactgctgatctttttgcaatgaaccacacagactttatcatcaccagcaccttccaagagattgctggaagcaaggacactgttggacagtatgagagtcacactgccttcacccttccaggactctaccgtgttgttcacggtattgatccctttgatccagagttcaacatcgtctctcccggtgccgacatgagcatatacttcccatacactgaaactgagcgtag

SEQ ID NO: 28870 - DNA, 239 bp, Glycine max
  Clone ID: 700943746H1
tggcaagaatgcgcgcctccgcgagttggtaaacctcgtggtggtggccggagacaggaggaaggagtccaaggacttggaagagaaggccgagatgaagaagatgtatggcctcatcgagacctacaagttgaacggccaattcagatggatctcctctcagatgaaccgtgtgaggaacggagagctctaccgtgtcatctgtgacacaaggggtgcctttgtgcagcctgcagttt

SEQ ID NO: 28871 - DNA, 230 bp, Glycine max
  Clone ID: 700893512H1
ccgctcgagcggctcgagcagtaccttccaggagattgctggaagcaaggacactgttggacagtatgagtctcacacagcctttacccctcctggactctaccgtgttgtgcacggcattgatgtctttgatccaaaattcaacattgtctcccctggagctgatcaaaccatttacttcccccccaccgaaactagccgtaggttgacctccttccaccccgaaatcg

SEQ ID NO: 28872 - DNA, 239 bp, Glycine max
  Clone ID: 700892442H1
ccatgctgctgagatccttgttgagttctttgagaagagcaaggctgatccatctcactgggacaaaatctcccagggtggactcaagcgtattcatgagaagtacacatggcaaatttactcggacaggctcttgacactcactggtgtgtatggcttctggaaacacgtgaccaatcttgaacgccgtgagagcaaacgttacctcgagatgttctatgctctcaagtaccgcaaat

SEQ ID NO: 28873 - DNA, 219 bp, Glycine max
  Clone ID: 700892632H1
gagatctacaagttgtacggccaattcagatggatatcctctcagatgaaccgtgtgaggaacggagagctctaccgtgtcatctgtgacacaaggggtgcctttgtgcagcctgcagtttatgaggcctttaggttgactttgggtaaggccatgacttgtgggtcgccaacgtttgccacatgcaatggtggtcctgctgagatcattgtgcatgga

SEQ ID NO: 28874 - DNA, 184 bp, Glycine max
  Clone ID: 700890513H1
aactcagtgtaccattgctcatgctctagaaaagaccaagtaccctgagtctgacatttactggaaaaaatttgaagagaaatatcatttctcatgccaatttactgctgatctttttgcaatgaaccacacagactttatcatcaccagcaccttccaagagattgctggaagcaaggacact

SEQ ID NO: 28875 - DNA, 229 bp, Glycine max
  Clone ID: 700890952H1
ggatcaagttcgtgccttggagaatgagatgctcaaccgcatcaagaaacaaggccttgatatcacccctcgtattctcattattactcgtcttctccctgatgcagtaggaactacctgtggcgaacgtctagagagggtatatgatactgaatattgttacattctccgcggtcctgtcagaactgaggagggacttgttcgcaaatggagctgaagattcgaagtc

SEQ ID NO: 28876 - DNA, 235 bp, Glycine max
  Clone ID: 700945284H1
atttgatccaaagttcaacattgtctctcccggtgcagacatgggtatatacttcccatacactgaaactgagcgtaggttaacagaattccactctgacattgacgaagctctttacagctcagtggagaatgaggaacacatatgcgtattgaaggaccgcaacaaaccaataatcttcaccatggcaaggcttgaccgtgtgaagaacatcacggggcttgtcgagtggtac

SEQ ID NO: 28877 - DNA, 227 bp, Glycine max
  unsure (1)..(227): unsure at all n locations
  Clone ID: 700942575H1
cagactttatcatcaccagcaccttccaagagattgctggaataanggacactgttggacagtatgagagtcacactgccttcacccttccaggactttaccgtgttgttcacggtattgatgcctttgatccaaagttcaacattgtctctcccggtgcagacatgggtatatacttcccatacactgaaactgagcgtaggttaacagaattccacactgcatac

SEQ ID NO: 28878 - DNA, 244 bp, Glycine max
  unsure (1)..(244): unsure at all n locations
  Clone ID: 700945125H1
gtatatacttcccatacactgaaactgagcgtaggttaacagaattccactctgacattgaatctcttctttacagctcagtggagaatgaggaacacatatgcgtattgaaggaccgcaacaaaccataatcttcaccatggcaatgcttgacgtgttgaagaacatcacggggcttgtcgagtggtacgggaagaacgcacgcctccgcgagttgngtgaactggtggtggtggctggagac

SEQ ID NO: 28879 - DNA, 239 bp, Glycine max
  Clone ID: 700893154H1
cggacaggctcttgacactcactggtgtgtatggcttctggaagcacgtgaccaatcttgaacgccgtgagagcaaacgttacctcgagatgttctatgctctcaagtaccgcaaattggctgagtctgtgccccttgctattgaagagtaaattcatgtttgaagagaacatcaatggagaaaccggcttttggtcgtttgaagtcttatggagctttcataaataacgccattgatt

SEQ ID NO: 28880 - DNA, 235 bp, Glycine max
  Clone ID: 700893118H1
cggacaggctcttgacactcactggtgtgtatggcttctggaagcacgtgaccaatcttgaacgccgtgagagcaaacgttacctcgagatgttctatgctctcaagtaccgcaaattggctgagtctgtgccccttgctattgaagagtaaattcatgtttgaagagaacatcaatggagaaaccggcttttggtcgtttgaagtcttatggagctttcataaataacgccatt

SEQ ID NO: 28881 - DNA, 142 bp, Glycine max
  Clone ID: 700945968H1
gtcggaaactacagtgatggaaacattgttgcctctttgttggcacataaattaggagtcactcagtgtaccattgctcatgcacttgagaagagcgaataccccgaatccgacatgtactggacaagattgggagagaggt

SEQ ID NO: 28882 - DNA, 254 bp, Glycine max
  Clone ID: 700945788H1
ctcactggtgtgtatggcttctggaagcacgtgaccaatcttgaacgccgtgagagcaaacgttacctcgagatgttctatgctctcaagtaccgcaaattggctgagtctgtgccccttgctattgaagagtaaattcatgtttgaagagaacatcaatggagaaaccggcttttggtcgtttgaagtcttatggagctttcataaataacgccattgattttgattgtgatcagcttttggatttaaagagt

SEQ ID NO: 28883 - DNA, 161 bp, Glycine max
  Clone ID: 700888936H1
tatgagagtcacactgccttcacccttccaggactctaccgtgttgttcacggtattgatccctttgatccaaagttcaacatcgtctctcccggtgccgacatgagcatatacttcccatacactgaaactgaacgtaggttaacagagttccacacaac

SEQ ID NO: 28884 - DNA, 244 bp, Glycine max
  Clone ID: 700893166H1
ttcgacacgcacggccaggctcttgacactcaccggtgtgtatggcacctggaagcccgtgaccaatcgcgaacgccgtgagagcaaacgctacgccgagatgttccaagctactcaagtaccgcaaattggctgagtctgtgccccttgctactgaagagtaacttcatgtttgaagagaacatcaatggagacaccggcttttggtcgtttgaagtcttatggagctttcataaataacgcc

SEQ ID NO: 28885 - DNA, 214 bp, Glycine max
  Clone ID: 700895166H1
tgtgcacgctcttgttgttgaggagttgcaacctgctgagtacctgcacttcaaggaagaacttgttgacggaagttctaatggcaactttgtgcttgagttggactttgaaccattcaatgcagccttcccccgcccaactcttaacaagtcaattggaaatggtgtgcaattcctcaaccgtcacctttctgccaaactcttccacacaaca

SEQ ID NO: 28886 - DNA, 269 bp, Glycine max
  Clone ID: 700889179H1
tctttatatcccccggcgcttgtgtgcggtcattctgttttgctgttgaagtcggtcctagccagtgggcaccgatcgtttgacccgggttcacagtctccgtgagaggcttgatgaaaccctcactgccaacaggaatgaaattttggcccttctgtcaaggatcgaagccaagggcaagggcatcgtgcaacaccaccaggtcattgctgagtttgaggaaatccctgatgagaacagacagaagctcactgatggtgcctttggag

SEQ ID NO: 28887 - DNA, 221 bp, Glycine max
  Clone ID: 700891526H1
tgatttcactccaagaattctaatagttaccaggttaatacctgatgcaaaggggacaacatgcaaccagcggctagaaagagtcagtggtactgaccatactcatattttgcgagttccattcagatcagagtcaggaactctccgtaaatggatttcaaggtttgatgtgtggccttatctagagacttatgcagaggatgttgccagtgaaattgctg

SEQ ID NO: 28888 - DNA, 256 bp, Glycine max
  Clone ID: 700942858H1
ctcttggggaacatggttccagatactacaccaagagtttcaaaggatcggtagatgctttccatgtcaatacagttgatacaactggtgccggtgattcctttgttggtgctttattggccaagattgtcgatgatcagtccatacttgaagatgaaccaaggttaagagaagtactaatgtttgcaaatgcatgtggagctattacaactacccaaaagggagcaattccggcccttcccaaagaggaggctgc

SEQ ID NO: 28889 - DNA, 247 bp, Glycine max
  Clone ID: 700892801H1
ggatcaatcagtttgatcgtggagccatgcagatcagcacacttgaaggcaatggaagtagccaaggaatctgggtgcttgctctcctatgaccccaaccttcgtctacctttgtggccttcggctgaggaagctcgtaagcaaatactgagcatttgggagaaggctgatttgatcaaggtcagtgatgcggacttgagttcctcacaggaagtgacaagattgatgatgaatctgctttgtcatt

SEQ ID NO: 28890 - DNA, 245 bp, Glycine max
  Clone ID: 700891914H1
ggatcaatcagtttgatcgtggagccatgcagatcagcacacttgaaggcaatggaagtagccaaggaatctgggtcttgctctcctatgaccccaaccttcgtctacctttgttgccttcggctgaggaagctcgtaagcaaatactgagcatttgggagaaggctgatttgatcaaggtcagtgatgcggagcttgagttcctcacaggaagtgacaagattgatgatgaatctgctttgtca

SEQ ID NO: 28891 - DNA, 265 bp, Glycine max
  Clone ID: 700942816H1
atcagatctgccagatgtggatatcaccacaacaggtgttacaagctttacaggccctgaaggaccatttgatgttgaggtttttgattcagcaagtgattatataaaattgatgaagtcaatttttgattttgaatctatcaggaaactgctgtcatctcctaaattcacattctgttatgatgcactacatggggttggtggagcatatgcaaagagtatatttgtggatgagcttggggcacaagaaagctctttactgaac

SEQ ID NO: 28892 - DNA, 244 bp, Glycine max
  Clone ID: 700943365H1
tgctcttcaatgtttcacgcgtagagactcatgactggctggctacctgaacaaagcaaaacgaaatccggaaggttcagatttcaatgtgctttgttcaggtagccagccagtcatggtgctcttcaatgtttcacgcgtagagaccactcccttcgatggccagaagcctggaacctctggtctcgcgcaagaaggtgaaagtgttcgtgccacctcattacctccataactttgttcagtc

SEQ ID NO: 28893 - DNA, 255 bp, Glycine max
  Clone ID: 700888547H1
tcctccgtcgctgcattgagccaaatcagtgagaatgagaagaatggattcacaagcctcgttgctcgttacctcagtggcgaagacagcatgttgagtggagtaagatcgagacgcctacggatgaagtagtggtgccttatgactctttggcaccgactcctgacggttctttggaggtgaagaacctcttggacaagcttgtggtgttgaagctcaatggaggcttggggacaactatgggttgtactggcc

SEQ ID NO: 28894 - DNA, 249 bp, Glycine max
  Clone ID: 700895203H1
gggtggcactttgatttcttacgaaggaagggttcagctcctggaaattgcacaagtccccgatgaacatgtcaatgagttcaagtcaatagagaagttcaaaattttcaacacaaataatttgtgggtgaacttaaacgcagttaaaaggcttgttgaagctgatgctcttaagatggaaattattcccaatccaaaggaagttgacggaataaaagttcttcagctggaaactgcagctggtgctgc

SEQ ID NO: 28895 - DNA, 253 bp, Glycine max
  Clone ID: 700889518H1
gacggatttgtcattcggaacaaagctagggaaaatcctgaaaacccttctattgaactgggaccagaatttaagaaggttagcaacttcttgagtcgctacatcaccgttcctagtaacggacatcatgcttccctaaaagttgctaatcatctatagttctgagcctcgttcatcctcaaggggaccatcatcattgtatcaaaacccggtgttaagctataagttcccgacggtgttgccattgtagaca

SEQ ID NO: 28896 - DNA, 243 bp, Glycine max
  Clone ID: 700890552H1
gttagagccatgtgtattaatattcccggatttgcataccacaaagcattcaaggcaaggaaaaatctagtggccatatttcaatctattgtggatgagagaagaaacttaaggaagggatatctgccaggaaaagccaaagatatgatggatgctctgatagatgttgaagatgatgatggaagaaagttgagtgatgaggacatcattgacattatgttgatgtacttgaagtcgggccat

SEQ ID NO: 28897 - DNA, 277 bp, Glycine max
  Clone ID: 700943040H1
gcttcaacggcgtttgatgtcagtgacagtgcgctcaaattcacccacgtcctctacaatctctcccccgctgagctgtatgagcaagcgattaagcacgagaaaggatcattcataacggcaacgggagcgttagctacactttctggagcaaaaacgggacgctctccccgagacaaacgggttgtcagggacgacaccaccgagcatgacctctggtggggaaagggctcgcccaatattgaaatggacgaacataccttcttaatcaacagag

SEQ ID NO: 28898 - DNA, 254 bp, Glycine max
  Clone ID: 700888213H1
cgagggtcgctctccaagggacaagcgcgtcgtcaaggatgatcttactaagaacgacctttggtggggaaagggttctcctaacatcgagatggacgagcacagtttcatggtgaacagagaaagagctgttgttacttgaactccttggacaaggtcttcgtcaatgaccaattcttgaattgggacacagagaacagaatcaaagtccggattgtatctgccagagcttaccattcattgttcatgcacaa

SEQ ID NO: 28899 - DNA, 178 bp, Glycine max
  Clone ID: 700888666H1
tattaccattgatgtgggtacaaacaatgagaagctgctgaatgatgaattatacattgggctaaagcaaagacgagcaactgggcaggaatatgctgacttatgcacgaatttatgacagcagtcaagcaaacttatggggaaaaagttctaattcagtttgaagactttgcaaacc

SEQ ID NO: 28900 - DNA, 240 bp, Glycine max
  Clone ID: 700946436H1
gcatgagcctgttggcagtctcctagaagctgttaaggtaatcaagcctacagttttgattggatcatcaggagtgggaaaaacatttacaaaggaagtaattgaggctgtgacttctatcaatgaaaaacctcttgttttggccctctccaatccaacttcacagtctgagtgtacagctgaagaggcttacgaatggagtgagggtcgtgcgattttcgctagtggaagtccattgat

SEQ ID NO: 28901 - DNA, 233 bp, Glycine max
  Clone ID: 700893193H1
ctcactgatggtgccagcaagggggtgatgcagatattaaatactatcatcagaggtcaagacgatgggattttggttccagtcccacaatacccactctactcagcaacaattgctctgcttggtggtacccttgttccatactaccttgaagagacagcaaattggggtcttgatgttaatgaacttcgtcaatcagttgagcaggctcgctttaaaggaataactgttaa

SEQ ID NO: 28902 - DNA, 181 bp, Glycine max
  Clone ID: 700888645H1
cactgatggtgccagcaaggtggtgatgcagatattaaatactatcatcagacgtcaagacgatgggattttggatacagtcccacaatacccactctactcggcaacaattgctctgcttggtggtacccttgttccatactaccttgaagagacagcaaattggggtcttgatgttaat

SEQ ID NO: 28903 - DNA, 185 bp, Glycine max
  Clone ID: 700888603H1
ctcggggtaactgtcgcttataacaaagatccaagtccagttaagctcaactcgggagttggtgcttaccgaactgaggacagaaaacctcttgttttgaatgtagtacgcgagttgaacagcaactcataaatgacgtgtcacgcaacaaggaatatattccgatcgttgggcttgctgatttt

SEQ ID NO: 28904 - DNA, 250 bp, Glycine max
  Clone ID: 700894006H1
atggcttctcacgacggcatctccgctgcttcttcagattccgtcttcaatcacctcgttcgtgctcccgaagatcctatcctcggggtaactgttgcttataacacagatccaagtccagttaagctcaacttgggagttggtgcttaccgaactgaggaaggaaaacctcttgttttgaatgtagtgaggcgagttgagcagcaactcataaatgacgtgtcacgcaacaaggaatatattccgattg

SEQ ID NO: 28905 - DNA, 241 bp, Glycine max
  Clone ID: 700890192H1
cctctctgttcgcactctgtctttcccctgtttccgcgtcactgagtcattgcgattcgcaactcgctcaccggccaattcctccgccgcagctccgtcgccggagcaaggctcatgtcttcttcgtcctcatggttccggagcatcgagcccgttcccaaggatcctatcctcggagtcactgaagctttcctcgccgatcagagtccaaacaaagtcaacgtcggagtgggtgcgtatc

SEQ ID NO: 28906 - DNA, 248 bp, Glycine max
  Clone ID: 700889346H1
cagactcaggaaaagatgcaggccgtctttctgcggcttgggcgctttacaaggctcaagaagaacttgtgaaggttgctaaggagtatggtgttaaacttacaatgtttcatgggagaggagggactgttggaagaggaggaggtccaactcatcttgctatattgtctcagccaccagacaccattcatggctcacttcgggtaacggttcagggtgaagtcattgagcagtcttttggagaggaa

SEQ ID NO: 28907 - DNA, 250 bp, Glycine max
  Clone ID: 700943121H1
ggatttttgcatggactcagacaaggtttcatcttccagtgtggctaggctttggagcagcatttaaaaaagtcattgaggaaaatgttaagaatctcaatatgctgcaagagatgtacaatcaatggcctttctttagggtcacacttgatttggtggaaatggtgtttgccaaaggagatccgacaattgccgctctgaatgatagactccttgtttcaaaggatctgtggccgtttggggatcaatt

SEQ ID NO: 28908 - DNA, 262 bp, Glycine max
  Clone ID: 700945580H1
gttcttggaacccttgaactctgttacagatcactctgtgcttgtggcgatcgtgcaattgccgatggaagccttctagatttcttgagacaagtctctactttcggactctccctagtgaggcttgacataaggcaagagtcagaccgccacacagacgtcttagacgccatcaccaaacatttagaaataggctcataccaggaatggtaccggagaaaaacggcagcaatggcttttatctgagttgagtggcaaacgg

SEQ ID NO: 28909 - DNA, 266 bp, Glycine max
  Clone ID: 700943287H1
actcgagccgaatcggctcgagttcgaacatgttattgagaaggatactaggaatattcatgacactgcaggagatgtataatcaatggcctttctttagggtcactattatttagtggaaatggtgtttgccaaaggagacccggggatcgctgctctttatgataggctccttgtttcagaggatctgtggtcatttggagagcagttgaggaccaagtatgaagaaaccaaggaattcctccttcaggtggctggccataggg

SEQ ID NO: 28910 - DNA, 234 bp, Glycine max
  Clone ID: 700890236H1
ctagttctagatcgcgatcctagaaactagggatactcagattcagggagagatgctgggaggttctctgcagcatggcagctatgtaaggctcaggaggaacttataaatgttgccaagaaacttggtgttagctaagccatgttccatggtcgcggtggaactgttggaagaggaggtggacctactcatcttgctattctgtctcaacctccagacacaatccatggatca

SEQ ID NO: 28911 - DNA, 262 bp, Glycine max
  Clone ID: 700891079H1
ggtcgaccccgacctcaacctcgtcaaaggccgcggcggcgccctcctccgcgagaagatggtcgaggccgcctccgacaagttcgtcgtggtcgtcgacgacaccaagctcgtggacggcctcggcggaagcgggctggccatgccggtggaggtggtccagatctgctggaagtacaatctggatcggcttcaggagcttttcaaggaagaaggtgtggaagcaaaattgagattggaggagagtgggaaccctacgtca

SEQ ID NO: 28912 - DNA, 218 bp, Glycine max
  Clone ID: 700891544H1
gcctttgaacatcgttttgcagccatggaaacaggcatagcatgctacactcgcgggcctttcctgcctagtgtttcttccaagcactctccaccctccatctctccatcttttggcttgaggagtctgaaatcgagctcttgatttggagaatctctaagagtggcatccaaatcaacactaaaggtttcaaagacaaagaatacttcactcgtgac

SEQ ID NO: 28913 - DNA, 233 bp, Glycine max
  Clone ID: 700888745H1
aaaacaactggtcctgtgctgctccatgttgtcactgaaaaaggccatggatatccatatgcagaaagagcagcagattagtaccatggagttactaagtttgatccattaactggaaaacaattcaaattcaatgctgccacccagttatacacaacatactttgcagaggctttaatttctgaagcggaagcttacaaagacattgtcggaatccatgctgcaatgggagg

SEQ ID NO: 28914 - DNA, 263 bp, Glycine max
  Clone ID: 700943688H1
cagaaacctgtctcaaacaaaccttaatgcccttgcaaaggttcttcccggtctgcttggtggcagtgcagatcttgcttcttccaacatgaccttgctcaaaatgttcggggacttccaaaaggatactccagcagagcgtaatgttagattcggtgttagagaacacggaatgggagctatctgcaatggcattgctcttcacagccctggactgattccatattgtgcaaccttctttgtattcactgactacatgagag

SEQ ID NO: 28915 - DNA, 259 bp, Glycine max
  Clone ID: 700891885H1
cgagtatctttctaacatggctgctgggactggactctttgcagagattttggatggagatgcgtacaagtactatgctgatggagagtggaagaaatctgcttctgggaaaagtgtttccatcatcaaccccactaccagaaagactcaatacaaagttcaagcttgttcacaagaggaggttaataaggtcatggacttagcaaaatctgcacaaaagttatgggcaaagaccccactatggaaacgtgctgagctt

SEQ ID NO: 28916 - DNA, 260 bp, Glycine max
  Clone ID: 700941396H1
cttttctaacatggctgctgggactggactctttgcagagattctggatggagatgtgtacaagtactatgctgatggagaatggaagaaatctgcttctgggaaaagtgttgccatcatcatccccactaccagaaagactctatacaaagttcaagcttgttcacaagaggaggttaacaaggtcatggacttggcaaaatctgcccaaaagttatgggcaaagaccccactatggaaacgtgctgaacttcttcaca

SEQ ID NO: 28917 - DNA, 236 bp, Glycine max
  Clone ID: 700890234H1
ggcaaactgaagggtattttgggatacaccgaagatgatgttgtgtctactgattttgttggtgataacaggtctagcatatttgacgccaaggccggaatttctttgaatgaaaactttgtaaaacttgtttcctggtatgacaacgaatggggttacagttcccgtgtgattgatttaattgcccacattgcatccggggcttaaacagttgaggctgatcttggatatcaccg

SEQ ID NO: 28918 - DNA, 220 bp, Glycine max
  Clone ID: 700893919H1
gtcggaatttctttgaatgacaactttgtaaaacttgtttcctggtatgacaacgaatggggttacagttcccgtgtgattgatttgattgtccacattgcatccgtggcttaaagaattgagtctgagcttggatatcatcgctacaccgttccaaatttttatcttaatcgagtttattttagtgtgaattcggaataaacactttgtgttgctgtga

SEQ ID NO: 28919 - DNA, 254 bp, Glycine max
  Clone ID: 700890465H1
agaaggcaggcatgattcctctgcaaatggagttaggaggaaaagatgcctgcattgtacttgaggatgctgacctggatttggttgctgcaaacattataaagggaggcttttcatacagtggtcagagggcactgctgttaaggttgtcctggtaatggagtccgttgccgatgctttggttgagaaggtgaaggctaaggtggcaaaactaactgttggaccaccagaggatgactgtgatatcaccccgg

SEQ ID NO: 28920 - DNA, 231 bp, Glycine max
  Clone ID: 700890971H1
cagctcacgtgtcattgacctgcttgtattcgttgccaagaagtctttttaaggtggtgtactgcaaagttgcttgtctacacattatgtgcttgtctagttgcgatttagtgtcttgctcgtgcaaaaaatgagaggtctgaataaatcggtttctggaaccagtggatttaccttgttaggagcattagctctattttggactttgcctcttgtggaggaggatggagt

SEQ ID NO: 28921 - DNA, 239 bp, Glycine max
  Clone ID: 700891972H1
caacaacttctgctacttcctactccaaccgcacttctgctccgcaattatcatgggcaaggtcaagatggagacaacggatttggaagaattggccgtttggtagccagagtggctctgcagagagacgatgttgaactcgttgccgttaacgaccctttcatcaccaccgattacatgacatacatgtttaaatacgacagtgttcatggacactggaagcatcacgatgtcaccgt

SEQ ID NO: 28922 - DNA, 256 bp, Glycine max
  Clone ID: 700945352H1
gaaaccagtggtgttacttgttggaggagcattagctcttttttggacttttgatgttttctcttgtggagacaagctactttgaagtaacaccttaaagagacttcttggcaacgaatacaagaagatcaatgacacgtgagctgtatccccactcgttgtcgtaccaagaaacaagcttcacaaagttcttattcaatgcaattccagcctttgcatcaaaaatacttgatctgctatcgccgataaagtcagt

SEQ ID NO: 28923 - DNA, 258 bp, Glycine max
  Clone ID: 700944204H1
cgctcgagcgaatcggctcgagcaacaacttctgctacttcctactccaaccgcacttcagctccgcaattatcatgggcaaggtcaagatcggaatcaacggatttggaagaattggccgtttggtagccagagtggctctgcagagagacgatgttgaactcgttgccgttaacgaccctttcatcaccaccgattacatgacatacatgtttaaatacgacagtgttcatggacactggaagcatcacgatgtca

SEQ ID NO: 28924 - DNA, 257 bp, Glycine max
  Clone ID: 700945903H1
atttctcaacaacttctgctacttcctactccaaccgcacttctgctccgcaattatcatgggcaaggtcaagatcggaatcaacggatttggaagaattggccgtttggtagccagagtggctctgcagagagacgatgttgaactcgttgccgttaacgaccctttcatcaccaccgattacatgacatacatgtttaaatacgacagtgttcatggacactggaagcatcacgatgtcaccgttaaggacgaga

SEQ ID NO: 28925 - DNA, 258 bp, Glycine max
  Clone ID: 700945596H1
tctcaacaacttctgctacttcctactccaaccgcacttctgctccgcaattatcatgggcaaggtcaagatcggaatcaacggatttggaagaattggccgtttggtagccagagtggctctgcagagagacgatgttgaactcgttgccgttaacgaccctttcatcaccaccgattacatgacatacatgtttaaatacgacagtgttcatggacactggaagcatcacgaattcaccgttaaggacgagaagac

SEQ ID NO: 28926 - DNA, 246 bp, Glycine max
  Clone ID: 700944396H1
tttcttttttcccgcagtcatgggcaaggtcaagatcggaatcaacggatttggaagaattggccgtttggtggccagggtggctctgcagagagacgatgttgaactcgttgccgttaacgatcctttcattaccaccgattacatgacatacatgtttaaatacgacagtgttcacgggcactggaagcatcacgatgtcaccgttaaggatgagaagacccttctcttcggtgacaagccagt

SEQ ID NO: 28927 - DNA, 256 bp, Glycine max
  Clone ID: 700808443H1
aacttctgctcttccaactcctagaacgcttttctctgcactcatgggcaaggtcaagatcggaatcaacggatttggaagaattggccgtttggttgccagagtcgctctgcaaagagacgatgttgaactcgttgccgttaacgaccctttcattaccaccgattacatgccatacatgtttaaatacgacattgttcacggacactggaagcatcaggatgtcaccgttaaggacgagaagacccttctcttc

SEQ ID NO: 28928 - DNA, 243 bp, Glycine max
  Clone ID: 700894550H1
gaagacccttctcttcggtgacaaggcagtcactgtttttggacacagaaaccctgaagagatcccatgggggtcaactggagctgacatcattgttgagtccaccggagttttcaccgataaggacaaggctgccgcacatttgaagggtggtgccaagaaggttattatttctgcccccagtaaggatgcccccatgtttgttgttggtgttaatgagcacgagtacaagcagagcttgat

SEQ ID NO: 28929 - DNA, 237 bp, Glycine max
  Clone ID: 700893834H1
caagatcggaatcaacggatttggaagaattggccgtttggtagccagagtggctctgcagagagacgatgttgaactcgttgccgttaacgaccctttcatcaccaccgattacatgacatacatgtttaaatacgacagtgttcatggacactggaagcatcacgatgtcaccgttaaggacgagaagacccttctcttcggtgacaagccagtcactatttttggacacagaaa

SEQ ID NO: 28930 - DNA, 252 bp, Glycine max
  Clone ID: 700890650H1
ccagaagactgttgatgggccatcagccaaagactggagaggtggaagagctgcttcatttaacatcattcctagcagcactggagctgccaaggctgttggaaaagtcctccctgctttgaatggaaaattgactggtatggcattccgtgttcccactgtggatgtctctgttgttgacctcacagtgaggctggagaaggaagctcctacgtggaaattaaaaatgtatcaaggaggaatcagagggca

SEQ ID NO: 28931 - DNA, 265 bp, Glycine max
  Clone ID: 700944452H1
gaaaccctgaagagatcccatgggggtcaactggagctgacatcattgttgagtccaccggagttttcacccataaggacaaggccgccgcacatttgaagggtggtgcaaagaaggttattatttctgcccccagtaaggatgcccccatgtttgttgttggtgtcaacgagcacgagtacaagccagagcttgatattatttccaatgctagctgcacaaccaactgccttgccccacttgccaaggttatcaatgacaggtt

SEQ ID NO: 28932 - DNA, 249 bp, Glycine max
  Clone ID: 700892371H1
ccggagttttcaccgataaggacaaggccgccgcacatttgaagggtggtgcgaagaaggttattatttctgcccccagtaaggatgcccccatgtttgttgttggtgttaacgagcacgagtacaagccagagcttgatattatttccaatgctagctgcacaaccaactgccttgctccacttgctaaggttattaatgacaggtttggcattgttgagggtttgatgaccactgttcattccatca

SEQ ID NO: 28933 - DNA, 242 bp, Glycine max
  Clone ID: 700891407H1
atgcgagccaccgtgacctgaggcgtgcaagggcagcagcactcaacattgtccccacttcaacaggagcagcaaaggcagtggcccttgtcctcccaaccctcaaaggcaaactcaatggcattgcactccgtgtgccaacaccgaacgtctcagtggtggacctcgtcgttcaggtctcaaagaagacctttgcagaagaagtgaatgcagcattcagagagagtgcagacaatgagctc

SEQ ID NO: 28934 - DNA, 248 bp, Glycine max
  Clone ID: 700942783H1
aggtctcaaagaagacctttgcagaagaagtgaatgcagcattcagagagagtgcagacaatgagctccagggaatcctctctgtgtgtgatgagccacttgtgtctgttgacttcaggtgcactgtgtgtcctcaaccgttgactcatcgttgaccatggtcatgggagatgacatggttaaggtgattgcttggtatgacaatgagtggggctactcccaaagggttgtggatttggctgacattg

SEQ ID NO: 28935 - DNA, 242 bp, Glycine max
  Clone ID: 700890177H1
agcccttcaggcaaatgggaaaggcttctctgaattctctggcctccgcagctcatcaggcttccttcccttttctagaaaatcttcagaggatttccattctgtcattgccttccagacctatgcagttggaagcagtggaggatacaagaagggtgtgacagaagcaaaactgaaggttgccataaacggatttggaaggattggaaggaacttcttgaggtgctggcacggtcgcaaag

SEQ ID NO: 28936 - DNA, 228 bp, Glycine max
  Clone ID: 700891638H1
ccgaagcgcttattagctgtgtgacaggaaagggttccgagattggtgattttcttacaatgcatccgggggtgaactgcataagtttcactggtggggacactggaatagcaatatcaaagaaggccggcatggttcctcttcaaatggaattgggtggaaaagatgcctgcattgttcttgaagatgctgacttggatttggcagctgctaacattgtaaaaggag

SEQ ID NO: 28937 - DNA, 243 bp, Glycine max
  Clone ID: 700890918H1
ccggcatcaagcatcccagatgggtggatggggttggatattggtcctgattccatcaagacatttggtgaagcattggatacgactcagaccattatttggaatggaccaatgggtgtttttgagtttgataagtttgccacaggaacagaggctatagccaagaaactggcagagctgagtgggaagggagtgacaaccatcattggaggaggtgactccgttgccgctgtggagaaggtt

SEQ ID NO: 28938 - DNA, 233 bp, Glycine max
  Clone ID: 700891730H1
agttgggtcatctcttgtggaggaagacaagcttagccttgcaactacacttcttgaaaaggccaaggctaaaggggtttctttgttgcttccaactgatgttgtcatagcagacaagtttgctgctgatgctaacagcaagactgtgccggcatcaagcatcccagatgggtggatggggttggatattggtcctgattccatcaagacatttggtgaagcattggatacga

SEQ ID NO: 28939 - DNA, 147 bp, Glycine max
  Clone ID: 700940911H1
cattacttgaaggcctctgttgcaggattcctaatgcagaaggcgcttgattatctagttagggctgtgtcaaatcccaagagaccatttgctgctattatcggtggatcgaaggtgtcttccaagattggagttattgacatcctt

SEQ ID NO: 28940 - DNA, 242 bp, Glycine max
  Clone ID: 700894074H1
tgcagacaagatgagccacatctccactggtggtggtgccagcttagagcttcttgaggggaagcaactccctggtgtccttgcccttgatgatgcttgagtaaacatcactagttcctctgtaatttgtgctttatattattattatggttggatttcagccaacagtggattgaggtacaatgagagagctcttgttgctcctgtagaggcttaatataggttaggtttcgaaataagag

SEQ ID NO: 28941 - DNA, 239 bp, Glycine max
  Clone ID: 700945115H1
caccagaatccgcgccgccattcccaccatcaaacatctcatccaaaacggcgccaaagtcattctctccagccacttggggcggccgaagggtgtcactcccaaatacagcttggcgcctcttgtaccccggctttctgagctcattggtatccagattgtcaaggccgaggacagtattggtccagaagtagaaaagttggtggcttctcttccagatggaggtgttctccttctag

SEQ ID NO: 28942 - DNA, 266 bp, Glycine max
  Clone ID: 700946208H1
tgcaactacacttcttgaaaaggccaaggctaaaggggtttctttgttgcttccaactgatgttgtcatagcagacaagtttgctgctgatgctaacagcaagactgtgccggcatcaagcatcccagatgggtggatggggttggatattggtcctgattccatcaagacatttggtgaagcattggatacgactcagaccattatttggaatggaccaatgggtgtttttgagtttgataagtatgccacaggaacagaggcta

SEQ ID NO: 28943 - DNA, 256 bp, Glycine max
  Clone ID: 700894670H1
ttgccacactacaccgagattccccctaaacccgtttgcgttgttgtttgcgaagaaatgccgactaagaggagcgtgggaacgttgaaggagggtgatttgaaagggaagagggtgttcgtgagggtcgatctgaacgtgcctttggatgacaaccttaacatcaccgatgacactagagtccgtgctgctgttcccaccatcaagtactaactggtcatggagccaaagtgatcctttctagccacttgggacg

SEQ ID NO: 28944 - DNA, 245 bp, Glycine max
  Clone ID: 700808471H1
ctacattcccatttgtttttgctttttgagatttcatcatcctgtatttttggtttctgttttcggacttcaatggaaattaatggatgagaactaatgaataagctattgtgttgtgttgctttgtttcaaaataacttcaataacccatcgtccttgcatttctctctaaaaaaaaaaaaaaaaaaaaaaaaaaaaaaaaaaaaaaaaaaagaaaaaaagagagaaaagaagagaaaagaaac

SEQ ID NO: 28945 - DNA, 170 bp, Glycine max
  Clone ID: 700894434H1
aagcaaatggcttcctcaatgatctcttccccagctgttaccactgtcaaccgtgccggtgccggcatggttgctccattcactggcctcaagtccatggctggcttccccaccagaaagagcatcaatgacattacctccattgctagcaacggtggaagattgcaatg

SEQ ID NO: 28946 - DNA, 247 bp, Glycine max
  Clone ID: 700946185H1
gcagaagaacaagtagttgagaacaaagaaggagaagcaaatggcatcctcaatgatctcttccccagctgttaccactgtcaaccgtgccggtgccggcatggttgctccattcactggcctcaagtccatggctggcttccccaccagaaagaccaacaatgacattacctccattgctagcaacggtggaagagtgcaatgcatgcaggtgtggccaccagttgggcaagaagaagtttgagac

SEQ ID NO: 28947 - DNA, 249 bp, Glycine max
  Clone ID: 700894533H1
caagtagttgagaactaagaaggagaagcaaatggcttcctcaatgatctcttccccagctgttaccactgtcaaccgtgccggtgccggcatggttgctccattcactggcctcaagtccatggctggcttccccaccagaaagaccaacaatgacattacctccattgctagcaacggtggaagagtgcaatgcatgcaggtgtggccaccagttggcaagaagaagtttgagatctttcctacctg

SEQ ID NO: 28948 - DNA, 250 bp, Glycine max
  Clone ID: 700945939H1
gaacaagtagttgagaactaagaaggagaagcaaatggcttcctcaatgatctcttccccagctgttaccactgtcaaccgtgccggtgccggcatggttgctccattcactggcctcaagtccatggctggcttccccaccagaaagaccaacaatgacattacctccattgctagcaacggtggaagagtgcaatgcatgcaggtgtggccaccagttggcaagaagccgtttgagactctttcctac

SEQ ID NO: 28949 - DNA, 253 bp, Glycine max
  Clone ID: 700946365H1
tgcataagaacatgtagttgagaactaagaaggagaagcaaatggcttcctcaatgatctcttccccagctgttaccactgtcaaccgtgccggtgccggcatggttgctccattcactggcctcaagtccatgctggcttccccaccagaaagaccaacaatgacattacctccattgctagcaacggtggaagagtgcaatgcatgcaggtgtggccaccagttggcaagaagaagtttgagactctttcc

SEQ ID NO: 28950 - DNA, 243 bp, Glycine max
  Clone ID: 700894558H1
caagtagttgagaactaagaaggagaagcaaatggcttcctcaatgatctcttccccagctgttaccactgtcaaccgtgccggtgccggcatggttgctccattcactggcctcaagtccatggctggcttccccaccagaaagaccaacaatgacattacctccattgctagcaacggtggaagagtgcaatgcatgcaggtgtggccaccagttggcaagaagaagttgagactctttcc

SEQ ID NO: 28951 - DNA, 240 bp, Glycine max
  Clone ID: 700945189H1
aattggcaaaggaagtagaataccttcttaggaagggatggattccttgcttggaattcgagttggagcacggtttcgtgtaccgtgagcacaacaggtcaccaggatactacgatggacgtactggaccatgtggaagctgcctatgtttggttgcactgatgcttctcaggtgttgaaggagcttcaagaggctaagactgcataccccaacggcttcatccgtatcatcggattcga

SEQ ID NO: 28952 - DNA, 263 bp, Glycine max
  Clone ID: 700943511H1
caagtagttgagaactaagaaggagaagcaaatggcttcctcaatgatctcttccccagctgttaccactgtcaaccgtgccggtgccggcatggttgctccattcactggcctcaagtccatggctggcttccccaccagaaagaccaacaatgacattacctccattgctagcaacggtggaagagtgcaatgcatgcaggtgtggccaccagttggcaaggtgaagtttgagactctttcctacctgccagaccttgatg

SEQ ID NO: 28953 - DNA, 261 bp, Glycine max
  Clone ID: 700941416H1
aagtagttgagagctaagaaggagaagcaaatggcttcctcaatgatctcttccccagctgttaccactgtcaaccgtgccggtgccggcatggttgctccattcactggcctcaagtccatggctggcttccccaccaggaagaccaacaatgacattacctccattgctagcaacggtggaagagtgcaatgcatgcaggtgtggccaccagttggcaagaagaagtttgagactctttcctacctgccagaccttgat

SEQ ID NO: 28954 - DNA, 255 bp, Glycine max
  Clone ID: 700892594H1
ataggagattgagcctgcattgaagaaacagctcatcatttccactgccttgatgactattgggattgcaattgttagttggattgcactcccaacttccttcactatcttcaattttggagtgcagaaagatgtcaagaattggcagctattcttgtgtgttgctgttggtctttgggcagggcttattattggatttgtaactgagtactatactagctatgcatatagtccggtgcaagacgttgcagactc

SEQ ID NO: 28955 - DNA, 256 bp, Glycine max
  Clone ID: 700888545H1
ggcggttgagtctcttgtgtttgctcccttctttgctacacatggtggcctactcttcaagatctaaaggatttgatagaaaaagagtatcgtccatcatttttctacaacgacagaacaaggaaaagccgtccctttaccaatgccttctcgtttttgtgttagtctttaactcatctgtcatgtcaattccattgtttttgaaaccttttcctcccccaccttgaaacaaagtatattttgtctcatgtagttt

SEQ ID NO: 28956 - DNA, 248 bp, Glycine max
  Clone ID: 700941185H1
cgacagggttggctattgatgcctatgggccaatcagtgacaatgcaggaggtattgctgagatggcaggcatgagccatcgtattcgtgagagaactgatgcccttgatgctgctggcaacactactgctgccataggcaagggatttgctattgggtctgctgctttggtgtctttggccctatttggtgcatttgtgagcagagctggaattttgactgttgatgtcttgactcccaaggtcttt

SEQ ID NO: 28957 - DNA, 264 bp, Glycine max
  Clone ID: 700946269H1
tgccgttgctgcacttggcatgctgagtaccattgccaccggattggccattgatgcatatggtccaatcagtgacaatgctggaggtattgctgagatggccggtatgagtcacagaattagagagagaactgatgcccttgatgctgccggaaacacaactgccgcaattgggaagggatttgccatcggttctgctgcccttgtatctctggccctctttggtgcctttgtgagccgagctgctattacaactgttgatgt

SEQ ID NO: 28958 - DNA, 244 bp, Glycine max
  Clone ID: 700888375H1
gaaggcctcaacgaccacaacgtcgtcctcaaatgcgccgaaatccataacgccatttccgaaggagcaacctctttccttttcactgagtataagtacgtgggaatcttcatggtggcttttgccattttgatattcctcttccttggctctgtggaaggattcagcacaagctaccagccctgcacctatgaccaaactaaaatgtgtaagccagctcttgccactgctgttttcagcacca

SEQ ID NO: 28959 - DNA, 254 bp, Glycine max
  Clone ID: 700888553H1
ctcacacctcatcgtttctctctctagatctctgtttcttctttttctccaaccttcgtttcaccaccacacttacattactacatcgaaatggctccaccaattgagaccccaaacaaggtttccagctatcaacagtccccaaaccctcgtcttaacgagaggattctttcatccatttccaggagacacgttgctgcacacccgtggcacgatcttgagataggacccgaagctccaaagatcttcaactg

SEQ ID NO: 28960 - DNA, 251 bp, Glycine max
  Clone ID: 700889521H1
cattccactcacacctcatcgtttctctctctagatctctgtttcttctttttctccaaccttcgtttcaccaccacacttacattactttgtcgaaatggctccaccaattgagaccccaaacaaggtttccagctatcaacagtccccaaaccctcgtcttaacgagaggattctttcatccatttccaggagacacgttgctgcacacccgtggcacgatcttgagataggacccgaagctccaaaga

SEQ ID NO: 28961 - DNA, 240 bp, Glycine max
  Clone ID: 700891749H1
tttgtttttttgttgagaagagagaatggctgtggcgtcgtcatcatcccttatcacgttgaaggtgaaaccttgcattttcgggtctcctcggagatccgcggtggttcggaattgtgcgaagtcaacggcggggacaatatcgacgagttggagcctggacagctggagggcgaagaaggcgcttcagcttccggagtacccagatgcgaatgaattggacctagtcctccaaaccct

SEQ ID NO: 28962 - DNA, 224 bp, Glycine max
  Clone ID: 700891658H1
ccactaaagtctgtactgttagatattggtaaagagcgtaaggaagcatggaccagttggttgaaagcttatatacatgaggtctctaccagtgggatacctgatgacgaaaggaagatctcgatggattcagtgaatcctaaatatatactgaggaactatctctgccagactgcaattgatgctgcagaaataggtgattttggagaggttcgcagcctgct

SEQ ID NO: 28963 - DNA, 234 bp, Glycine max
  Clone ID: 700891187H1
tgctgtacagcgaggatattcattacatgcttggtgcattaaggacccttggactgcgtgtggaagacgaccaaacaaccaaacaagcaattgtggaaggctgtgggggattgtttcccactattaaagaatctaaagatgaaatcaatttattccttggaagtgctggtactgcgatgcgtcctttgacagcagctgtagttgctgcaggtggaaatgcaagctacgtacttg

SEQ ID NO: 28964 - DNA, 255 bp, Glycine max
  Clone ID: 700942983H1
ctgcaatgcgtcctttgacagcagctgtggttgctgcaggtggaaatgcaagctacgtacttgatggggtgccccgaatgagagagaggccaattggggatttggttgctggtcttaagcaacttggtgcagatgttgattgctttcttggcacaaactgtccacctgttcgtgtaaatgggaagggaggacttcctggcggaaaggtgaaactgtctggatcagttagcagtcaatacttgactgctttgctta

SEQ ID NO: 28965 - DNA, 247 bp, Glycine max
  Clone ID: 700941055H1
ccggttcaaaacgaggaaattctagccaagaagtataggattcggttaaggggaattgatgcaccagaaagtgcaatgccatatggaaaggaagctaaaactgaactgaccaagattgttcaaggcaagcctttgaggatccttgtttatgaggaagatcgttatggtcgttctgtaggtgatatctattgtaatggcatttttgtacaggaaatgatgttaaagaaaggtttagcatggcactacg

SEQ ID NO: 28966 - DNA, 319 bp, Glycine max
  Clone ID: jC-gmst02400001a01d1
ccgccctttttttttttttttttttgtaacaagaatatattagttatttacattagaaccaaaagttacattgcaaagttgaaaaaaaaaaaataaaaaagctggcaagaaaccaccattgggaacaaaccactagagtgccatttgttctttgggttattattaactaacccttttctaccaaaagatctctagattgaacagaagaacttgagagaagaaggtatagacatgctctatatgctatagagaaaaatctgtgaggccaaaagcaaatggcttgaacttgctccggaattgcaaaattacaagaaccatg

SEQ ID NO: 28967 - DNA, 462 bp, Glycine max
  Clone ID: jC-gmst02400001a09a1
ctgggaattgggatttgccctcaacatatgtggagaagtgtgacatttacagtggggagtgggtgccaaatccaaaggcaccatactacacaaacaagacatgtagggcaattcatgagcaccaaaattgcatcaagtatgggaggcctgactctgagttcatgaagtggaggtggaagccaagtgagtgtgagcttcccatattcaacccttttcaattccttgaaatagttaagggaaaatccatggcttttgttggtgactcatctggaagagattataggcaatccatgattggccttctttcaagggtagaatggccaatagaggtatcatacactacctgagaatattttaagcgatggaagtacccaagttgtaactttaccatgtgcagctttaggacactgcatttggctagatccagaattggctgatcacatggaccaagactgactagcc

SEQ ID NO: 28968 - DNA, 532 bp, Glycine max
  Clone ID: jC-gmst02400001a09d1
ataaaagaaataattttattatggcacgcataacaaattttatctttataaaattacaaaaaaatattaccaatgatagtttacaagaaaaattagttaataatacttataaatttagcttattgcagatctcatgccctccatcttcaacatttctagcaagaaatcactccatgtgtctatgggtcctggcaggcaccaatgcacacaatcattatataatgttacgttctcttgtggccaatgtccatatctacttggatgaccatctggtctcaataacattgcttgtgtggtgtcaagtaacttcaatttcaaacccttctttctaccttccttttcagctttcttgaattcctccaattggatcatatatagctccaaattagtgctctctaatcttgtctcattgctcctaaacggcttagttctgacacaattcccaccttgattccattttccattctcaaaatgagatggtgcaaatgttctaaggaatactattcccttgaaattttctaaactatcgata

SEQ ID NO: 28969 - DNA, 519 bp, Glycine max
  unsure (1)..(519): unsure at all n locations
  Clone ID: jC-gmst02400001a10d1
aatgtaaattttcttgatgagtctgacgattaaagattctcagtaaatttacagctttctgtttggctataaaccacctgtcactagactaaacttctatttcgcgatctttatcattgagatttggggtgtttccttcccacaactcaagtagttcccttttcatccaagagatcacaactacaggtcccaaagtagaaggcaccagataaagaagtgcaggttgaggtgagtgagtcaagacaccagcagccaaagcagttaccaggccaatggcatacccgggtagcgcataccatatgtatttgtgcccctttgaggaatgtaactctaagagatttactggatccctgctcttgcgataatcaaagcagaggactaaagccagtagcatgcctgggatagccatgtctcctaaaccaagcatcatgaagtctgtcgcattctctccaggaacaacaccacccaacaaatttctaggaaaaacaatctttacaggcaactctaanttcttagtta

SEQ ID NO: 28970 - DNA, 501 bp, Glycine max
  Clone ID: jC-gmst02400001a11d1
aagttggaaatctctcaattgatatttttaataaaaataacaaactaatatctgctcataaaaaaaaagtaaaattggcatgactaagcttataatataatacgatttcttattctttccactgtatgtaccactattgtaatccagaccttgcaatttgcaattctaattaattaattgacccttctgcaattgcatctgatctctcccttcttcccagtgagaggcttcatgttccccatcttgatcatggaagctttaaaatctctagcaaaaaccaaagggcttctactatacagttgcaccaatttgtcactttctgtgccttttcccttgaacagctcttgatcagaatggagaagaccctttttgtgcagcaaattcgtgtaatatgcagtgtcaactctcgcaggagtagcatcaaatggatgcaagttgttgtctcctccgcttcgcggacatgtcttcctcgcagatgcttgcaaatttgggtctattatg

SEQ ID NO: 28971 - DNA, 527 bp, Glycine max
  unsure (1)..(527): unsure at all n locations
  Clone ID: jC-gmst02400001a12d1
aaatataagtataaaatttatttagagcaagatagtacaaaatatagatgctggcaacgtcaggttttttcattttccttctctagaacatctttccaataccatcctgcctaggaacagattcattgacatccattcgttgccaattcccaacaaaagaagccaactgatcgaccttgtcatacaatcctaggaggccacccgtatgtatgaagaggatctttctcctttcccacttctttggattttcagacatatctttcagcattgcataagcagccttaccactgtatactgggtcaagaacaacaccagtagtggcagcaacttcttttacaaaattaagctcctccgatgtattcattgcatagccaagacccttggcgttttgaatgtggacaatatctcttgagctaacgccagccttgagtccatcaagcaagccttgagcaaagttgtggaagtaatctgggtcatcacanacagagaatgcatgtaccctngctttcaatgcactcaatgacgat

SEQ ID NO: 28972 - DNA, 417 bp, Glycine max
  Clone ID: jC-gmst02400001b01d1
cgtccttttttgctttgttttttttttttttttttggagactttcaaatatatacactaaatgaatcaataaagtacaataaacgttgattatgacttgttttatgaattgatcctttacagtaaatagcaacttgattaagtacaatatatatacactgtcacagaatatttcctataagaagtggattttgacatatacataaaaaattaagcagtgaaaataccgctgttattggagcaccttgaactccattctataaaggcagtccagtttcaaacttttatctgaagggctggacttacaataagtaaattattgaggcactccacaggaactcttgttccccacacattcattgatttgagcttcaaacattgatcaactagcgcaaaaagcccattctttcgtacatga

SEQ ID NO: 28973 - DNA, 547 bp, Glycine max
  Clone ID: jC-gmst02400001b09d1
gataaaatagtttattaacttcgtgataggaatacacacataaaaagtacacgagagtactttgtagatgtttaggcagtgctacttcatggcattattatcagcattgcagattacagtggctggatgctttatttatattggtagatattatttccagcagattatttaattactcatggcaccaaattgggaaatcaaccatcaactttcatgtctgtctctggaagccaggggaatggcagtgttggtttagttgcttccagaagaacctcaatgggaatctttggtgcagatggcttcaatggtgttatggcgtgattatacttttgagggtttgcacagtaatcctgatctgcatgcatctttagcacaaattttttgaatatattaaaatttgatttttgcagtagatcatctgatagacgaaggtatgttactccgaacatgcttagttttggagggccattgttgttgacaccttgcggtcttgcattcagtatgatttggttgtaagctgtggcatcataccttggaagtgcatttt

SEQ ID NO: 28974 - DNA, 389 bp, Glycine max
  Clone ID: jC-gmst02400001b10d1
aaagaaaaaacttccttaaaagggaaggccatgttttgaattttgcacccaaagcttcggaaaacaaagggaatttttttccctttggaattccaagttccttgcagggcatacttaagggaaaacggggaagttgttgaatggggatggattgcccacagccttttttagccaaaccaaaggcttaatttaaccccaaacccgtgtccagaaaaaaacccatttttaaagaaacccgaaattaaaaaaacttaccatttgggaagaggggccccattccactccccaggggtttccaaaaggggatcaaggatcttccttgggcacaaagcagggaacacttgtgaacactttttacccggggggaaaaccttttaaccagttagcaa

SEQ ID NO: 28975 - DNA, 531 bp, Glycine max
  Clone ID: jC-gmst02400001b11d1
caagaaagtattttagttaatttaagtcataagacattagtaagatggcaactggcaacattacatcaatacctggtcccaaattttcgttcaatcacacaaagaacagttacaaaattaactactaggaataggactaagattacacccaaacacgggttatatgtcgcaaaccacaagatacactggaacaagagaagctttgttgaagctgcaatagacctcatgtcaaaacttggaaaattgagtccaaattagccaagttgaccatccccatcacaactcctatttatgaataatcggaatcatttaattggcacggcttttgaacacatcaagacccatctcagtaggatcagttgcttgcagctcaatctgaattccatcaagctccctcttgaatctatctttggagctggcataaatcatcttgctcctaaccctagatgtatcaggggaccaagcaatgaagaaaattctgctcttttggcaattctcttcagtgacaaaatcaaaatcataaacagcata

SEQ ID NO: 28976 - DNA, 432 bp, Glycine max
  Clone ID: jC-gmst02400001b12d1
aaggaattcattcattaaagcgtgtttgtttggtagaacaaaactactagcttacccaggaatgagtccactcatttaagtatacttaaaaaaattgaacgaggtatacacgtatccaaaccataaaagaaaaactagtttgataacatcatttttccaaacgaaattaactaacatattcagtttgatttggcattgagattagcaccaactttcaagattgatcgcaaaggcttcattttctttggagcatgaggtaaatttcccaccaccaccactttttcatcaatgctggtcctgcatggaatattcttctttacacatggtatctctggctgcactactttgtctgcattagcgccaaaaccttttggtgtaatcttcaccttagttgagcttgaatcgtaatgtgaagatcttcctaaagttacc

SEQ ID NO: 28977 - DNA, 394 bp, Glycine max
  Clone ID: jC-gmst02400001c01d1
cgtcctttttttttttttttttttttttttttttttttttttttttttaaaaaattttgactatttttataatatatagcaccacaaaatacaatttgctaaaaatataggtttccctttggaaactgaagggaacataactaaatgtggtcccaggtgctattaactaaaccattaaaacagcattgcttatctatgtagagatttaaaattggtcatgaagagttatataggattacattgcttattaaaatatttatatattaggcaattaaggggtttaagggcatttgggtccttcttccttgggctttcagctggtgtaacaagggcgaatttgtttgttgccatatgtaccccgaggaacgcattggcattttgcccaacacttttg

SEQ ID NO: 28978 - DNA, 526 bp, Glycine max
  Clone ID: jC-gmst02400001c09d1
aaaggtaccaaagcatagttgagtcccaatattttacaaataataaatacaatgtcgccattaatattaaacaataactttgacatcataaattcttccaaaataattatacaaaagtgacaagggaaaacccgatctgccagttgcctactgaataaaaacacacatcattactatgtgttggcatacacgcatgaccttgtgccttgtcatgagtgaatattccaaagcaattggtcctttatgcctccttaatccttatgccacaaaatgctatcatcccttgaaagttgtaattgcttcttcagaaatagatttatacaaaggtagttgcaatatctatttgccaaactaaaaatgtaaagacccttcttcccaatcctagtagtgtcccaattgtatttacaaaggcgggacaaaatatgtatatacaagtacaatcatatagcataatgtaacaataatcatactttggtctttactggtgcacattacaggaattattatgcactgaaacccctttgca

SEQ ID NO: 28979 - DNA, 527 bp, Glycine max
  Clone ID: jC-gmst02400001c10d1
gagatgatcaatcttagttatcgtctcaaatatgagaggtgttgcgtaaacacagaatccctaaaaacccaaagccaatggaaagaaaggagcataaacgtgaaaaagaaaaacaaattgacaatcacggtttttcctaagcttcaacaaactgtacagaatactgggacaaacgtgctgctgtcaaatcagatacacagatacatagatcaagaatattaacaccatggactgcacaatttggttggcactgataaagacaactaaatctgcagaatatcagtattatcttatggctaactgttaagcctgcaaccattgtccatacaacttattcatctaactcctctatctgtgcccgcttctcagcggctatcttcctgataaagaagccccacctcattgctgccttgatcttcagccatcccacaacagctctgcctgggcgagagcgatcctcatcatagttcggtatactgggagatggcatgaatgatgggaatgaaaagccatccttagcactcatg

SEQ ID NO: 28980 - DNA, 543 bp, Glycine max
  Clone ID: jC-gmst02400001d09d1
gctatgtcagggattttgacaattcataatctgttattgtttaccatacaaagtaggtcaatgagatcttccctagctagttatttcctctctgtaagttaaagaacaaaatcctacaatgaagtaaattaatcaaatatgtattctctatttacattttctattccactcactagagggatacatacccaaatacaacaaaaaaccatatttgaaaaccaaattcattgctgaactaagaatttggcgatcaaactcacccaagagtgacagcggctggaaatatgaatgctacacagacagcagctgttgctccagtaaactggaaaatatcccaaatgctgggtataaaatttgctcccaggaagataacaccaataagtgaaatagtaattgatgcaaatctgaagttatcttgacgcaaaggcctatatgatgaaaatacgagaccatctaggttgacccgcactgcatagaagacaactggaaatacaagcacaagatgcgcaacatagctaaatcgaacagcgtcattgagcacag

SEQ ID NO: 28981 - DNA, 435 bp, Glycine max
  Clone ID: jC-gmst02400001d10d1
ggggagaatacaagggaacttggaatcacaaaagattttaccattattttcaaaggagacttttttggacaatatggttctgcactcactagacatttcccatttggtatggccctaccggacacataaatacatgcagcatttaattagaagaagaaagtacgtacgtactgggccattttgatgaagatttggttttggtttgctatcaattttgggttttggttggcgaggaaccttacaaggggaaacgttcaccttccacctttcgagagaaacatttttggaaaatactagggagataaaattcaaccccaagaacctaaatttgagcccgtggtattttggcacatttatagattggaaatcttacccttaaatttctttgatggacaattaaattcccgtgctaatgcccctcttccttcattccta

SEQ ID NO: 28982 - DNA, 527 bp, Glycine max
  unsure (1)..(527): unsure at all n locations
  Clone ID: jC-gmst02400001d12d1
agactaacaaagatgtaatttgaacagttttaaagactaaggtatatttagctgaaactgttgctaacacaaatactacaacaaacctttgataaacctcatgaattatgtagttgggtctctgcccattattctttggaaaatcttaacaagaaatctacattaaaatatcaaaaaaatttctcgacgaagtactcctatgtttatataagtttgatccatcagatgatatcctcgatcgtgctagtattactgaacttatctgttggaacctgacagaacatcaaacagtccacagcaactcaaccaggaagtcttttgcaccacaggtggaactgatgctacaagtggctgattatcagagcattctggagtatcagaatctttaacatgttctgcatcaatagtagattcagggataggactctgagacactgatgctgatacttcactgtcaaattcccttggcttaggttcctccaaacttattgatcttacattntcatcagaggaggaatgttctttat

SEQ ID NO: 28983 - DNA, 350 bp, Glycine max
  Clone ID: jC-gmst02400001e01d1
ggagtgcttacatctttatttaataatcttcgttggaagagtacaatcattaattattttattttatttttttcagcagtagttaccacttttggattttacatatagcacttggccacaacacacagaggattcttcttatgctgggtaactcctggcaacacttcagtatcaatgtcttcctttttcattccttgaggcaattcccagtcaaaggaattaagaagattagcaagtataagatccaatgcactaaatgccatattcataccagggcacaatttacgaccagcaccgaatggaataaactcaaaatcttgtccataaagatctatgtcgcaatttaaaaa

SEQ ID NO: 28984 - DNA, 516 bp, Glycine max
  Clone ID: jC-gmst02400001e10d1
aatccgacatgagttaggaccaatttccatttcattgtaattctaatgttggttgaacgcttgcaaccatgaatacacatcgttggtgaaattttcacctgatatatatactggtcttattgtgagaaaggaaaaagaaaaaaggacagtgcctagcactatccactgtacatgccaaccacctaagtataccttttcacaacccgtatcctctagagtatgtaacagctccttcaacaggttgaataaagggaaaacggtaaaaggaaaataaatatggaaaccatgttaaaaagaagtccaaatgatttaagagagttgtagaaatcctccgcctaactcctgttaccagagccaaggctttcatagaacaaaatgtacccatggtctgtattacttgaatactcctgtgatgatccaaagaacgtctgcacagcagactcgtcaatcatctctacattttcgtcatcaaaaaataaccagtggttatggcttttcacaagactgacataatgc

SEQ ID NO: 28985 - DNA, 435 bp, Glycine max
  Clone ID: jC-gmst02400001e11d1
ggataaaaaaaaaccccctcgctatatcactttaaattggcaacccgcaaagaatcatacaagaaacttgaagctggcctgatcttcgggctcctaggggttatcctaggaatgaaagatcaagttccaaaagaataatttgacaaaagaatttgttttgaccaaaaataaacaacagctttttacccgggggggaatataaaaaatccaaaaatttttttccagcttgatctttaatggtccaatttgaaagctggatgggatcatttgttagacccctgaaattctatttctagattccggggggggccacttttactttggggcaacaaagcatactctccagcttctgagccaagctttaccactcgatcaatctggattggaactttcccaaatttactttttcccactttgctcttatttttgcaagaa

SEQ ID NO: 28986 - DNA, 379 bp, Glycine max
  Clone ID: jC-gmst02400001f01d1
agtaagaaaagacatcaaatggacatttattcgatttctcactcttctatcatccgaaagatttctttacccttgaaagtcaagtctagagaatggcccccctaaatatttttttataaattaaataaatcaataaaacgtaagtccaaaaaaaaaaaaatcaaaacagtgagatggggactgcattcccatccttttaaaatacaggaaactccttaggccggcttaaaaggaaacaaatgaaaaaaagaaaaataaaaaagaaaagaaaattcattaccccaacgaatttatgagggctttaaaactgaaaactagccaatcagcttttgcagcaacagacttttgaagttgaacacccgggtagcaaacgaacatg

SEQ ID NO: 28987 - DNA, 539 bp, Glycine max
  unsure (1)..(539): unsure at all n locations
  Clone ID: jC-gmst02400001f08d1
aaaatcaaaaaagaaaaaataggcattatattgacatacaaaatatttacttctcatcatcatcatcaaagaaatgcagaatttgtcttatcaaagtcacaaaaaataaaagcaaaatccaatttcagtggttactctttctgccattcttgccaacatggtgcaaccacccaatgcctttgagggccttggaaaatttgagaaggttaggcctccccattcctaaattcatcttccctgtggagaatttcaaggcctgtaagcagcacaacttagcctccatgtcctcttcttcctcttcctcatcctcctcactattctcaacctcacccttcttcttccctttcttggtgttgctcttcttcagaaccttgttgttggactctgtctcatatgtctcccaaagcatgtccattccttcactcccatctgcattgtgcctctcctcaaaaagcttacaagccaaggtcctcctncactctntctccactctcattgaaccaaaactaccaagtgcgtgattattattccccatgcct

SEQ ID NO: 28988 - DNA, 431 bp, Glycine max
  Clone ID: jC-gmst02400001f09d1
agataaaaaaaaaggacatggggaaaaaaaaacaccaaacaaaggggggaaaaaaagggggggaaaaaaaaaaaaaaggggggggaaaaggaaccaagaaaaaaaaaaaaaaaaaaaaaaaaaaaaggggaaaaaccggccccgagaaaaaaaaaaaagggggggggaaaaaaaaagacaggaaggagaaaagggggaaaaaaaaaaaacccccccagaggaaaaaagggggggggaaaaaaaaaaaccgcgaaaaacacaaaggaaagaagaaagggggggcaaaaaaaaaagcgcccgggaaaaaaaaggggggccaccataaaaaaagaggggagcccctatgggggggggaaaaaaaacaacaacaaaaactgggaagaaaaaaggaccccccacgggggaaaaaaaaaaaacacctaagggggggg

SEQ ID NO: 28989 - DNA, 525 bp, Glycine max
  unsure (1)..(525): unsure at all n locations
  Clone ID: jC-gmst02400001f12d1
accctcgcaatgagtatttccttagttccttaaattgtgatttcatatgtagttacataaacacaaagataaaagtagtgccacaaggcatttttcttaatgcaacaaagagtagtccaagggaaagaaaagaaagattagatctcagcaggcacacgtttgtataaatgtgaggggagcctaggagaaaccacagcttgtattggagtcctcatgtatgtgactagccctggattctctcccatgtcaatttcctcaggcttcattccttcaggtggggtccaacagaaatggtgcaagaggtggcccaacatggatgctgccaagttgataccaagttgggcacccgggcatactcgtcgacccgacccgaatggaagtagcctaaagtcatggcccttcatgtctacatcctcctcaaggaacctttcgggtcggaactccaatggatccttccacacggtcgggtcgcgggccaccgnccacacattcacatgcacattggaccctttgggaatgtcatag

SEQ ID NO: 28990 - DNA, 549 bp, Glycine max
  Clone ID: jC-gmst02400001g09d1
acacaactaaaacaacatagttcaatattgccattcagtttaggtacgtaacaggagcagcgaagcataaaagcaatgcatccaaattaaaaccacatcggtactggtacacatctgaacatcaaacacaacagaaaacagaccacaagaacaagaatctgaagtagattctagtagtcttcatcctcttcctggccctcaccagactcagcacccacttcttcataatccttctcaagggctgcaaggtcctcacgggcttcagaaaattcaccttcttccataccctcacccacgtaccagtggacaaaagcacgcttggcatacatgagatcaaacttgtgatcaatgcggccaaacacttcagccacactggtggagtttgaaatcatgcaaactgccctctgcaccttggcaaggtcgccttcaggaacaacggtaggtggctggtagttaataccacacttgaaaccagtagggcaccaatccacaaactgaatggtcctcttggtcttgatggtggcaacagcagcgtttacatctttgggc

SEQ ID NO: 28991 - DNA, 378 bp, Glycine max
  Clone ID: jC-gmst02400001g10d1
aagaaatggggaaagaatattaggggaagggcccaaaaaaaacaatgaaccacaaacaaaaaatacacaataccccaagaaccaaaaactggcctaagggcaaaaacaatacggacccttccagggccctcaacacacaaatccaccactacgacacatgcaagccaaggcctgaaaggtccaaaagggcaaccaaaactaaatcacagggccgaccctaacaaacagaccaacgggcaaaaccaggcgtggcccaaacaaaatcccccgggcgaacaaccccgtcaaacagttgggccacaaaggaaaaaggccgaacccggcaccccaaccaaagaaatttccaaccgaaaggtcaaaggcaaccgccccggacac

SEQ ID NO: 28992 - DNA, 553 bp, Glycine max
  Clone ID: jC-gmst02400001g11d1
ggatgataagtcaattatattgatacaaacttaaccagatttcaacaagaaaactctaaatcaaactaaaagctctacaagagataaccatcccttaactaaacagttggatttagaaatacaaataaagagaactcccttctttaaactattcacgttttggaaagacgagcaatttacggaaggaggagcagggaaatattttttggaaagagaaatatgtttataaggaaatgaccagaccacctacacggatgatcaaaatcatcagaacctacataaatgctattatcatcagtccattctctaatcgtcatcctcctcctcgccactgccttcctcgtcatcatcctcatcattcacctcagatacagacttctcagattcttcttcatccccaccagtaggaccttccgcctgtttcttgttataagctctcatgttcttctcgtactccactttccttttctcagactttgccacataaggtgctgtttcagcatcagacatcgtcttccagtttgctccagcagctttgcccacagcagacact

SEQ ID NO: 28993 - DNA, 516 bp, Glycine max
  Clone ID: jC-gmst02400001g12d1
cttcaaacacgcaatctttattgtatacgagagaataataaagccaattctcaactcaaattgttcgttgcaaacgttgcaatgtttatgtgcgtaacggggtaatacaaaagataggaacaagtattgtttcagcttaacacgaaaggacaacacacacaaactttcctcattcaacaaattgcaacatccactgcaacatgtaacactcttacaaagcatttccttcacgaagattagaaaagaaaaaaaaaaatacttgcaagctcagaaaaacaaaactcaatatatttcaagactaaaaaatcggtaatgattttcaagcaatattgtggtatggtttaataataatagtataatctatatatatgaaggcaaacattatgcagcttgcttgagcttctttgtgatgccggcaatgtacttgccttggtggaatgcttgctgtaactcgagctcacttggctgtcttgagccgtcacccgcataagttccggcaccatatggacttccacc

SEQ ID NO: 28994 - DNA, 469 bp, Glycine max
  Clone ID: jC-gmst02400001h01d1
gccgcccttcgtcttttttttttaatcgacaaaaataaaatgtatagaattctattctataaaattatataacatgcactgatgatcagtcttggtagaagaaattagcttaatctgaaagattatgatcggacatagatactataccgtttacaagaacttttataagagatataacaatattacagtatcttgtccgccatgaaacagcattattcacttcacatcttgccttcggcttagggcctgccccgcctcaagctgcacgaaggacatttgtattgctttatgctttcagcttttgcaggagtaatcttcacacatttcccatggaaccacctctcacatatatcacagccaatccaaaattcatcggcattgtagtttccgccgcagttaccacaaagggtttcactgtgctcatcctcctcttcataaccttcatctgcgaattatgggttgcttttaa

SEQ ID NO: 28995 - DNA, 535 bp, Glycine max
  Clone ID: jC-gmst02400001h09d1
aaaaaaaacatgtaatcatcatcatatatatcaactcttctgcacttgctttctcacataccagattcacaaatttggttctatgaggtttacaggcggaggttgtaaattgtaatcatacaaaagtagaccaaatcagaaacccaaaagtaaaaaaaaaaaaaaaaaaaaactagagaaaacaaaagaaaagaatgcaggaaggaaatcataggaaaatatacatcctaactattaaagaaatgaccgtagttaatttaataaggtcattctctttccccttccctccccccttgattcttgattccattccatttttttggaattaatggagcggcctgcagatacagttgcttgctggaggggtcataatcagcagcgggaacccttcctacaggtgagtgcacccgcaccagtggttatggaccccaccagtgaagatggccttgcactcaagctagaagctcttgcataactagaggaggctccagcccccgatgccgtgaaaaacgcaccgtttactaacaagtcccct

SEQ ID NO: 28996 - DNA, 490 bp, Glycine max
  Clone ID: jC-gmst02400001h11d1
gagtaaatgtaaatattattatctgcctcacaatctgggtacaaaccataacattaccttcctcgcagaaaataccaaaagcctatcaaaactggccttgcaagcttaaatataaccccatatataatatagacaatttggggaatatttaaccaaaccgcctaaccaacacaaaaaaaaaaaaaaaaaaaaagcaaattcaccaaactcaattggacctttactacgggctaccatttttaaaccttccccaaactcaatgtaaacacactggacatagaacaagttaaaactggcactatgatgccagtgccccgatcgcaaatcagggcattcgttgacagcattacctgtggcatggaaagtgatgatgtaaaaaattaacccaagctccaaaagcccttttaccctttaggggaatttaccccctggtcttggccctcttcataccaaggctgttgtggaagggtgaaacagaaccagacttggg

SEQ ID NO: 28997 - DNA, 497 bp, Glycine max
  Clone ID: jC-gmst02400001h12d1
gaaaggaaatacaaatattatttaaaccaaaaatagagaattagttctattcttggaataatacatacaaatcaatttacaacggcaatgctgagaagattattgaggcaaatgaactgcatatattctaatacaatgcacaagagtacgataggatttctacagaaaccccgttgatgttttagaacaaacgtagctatattggaaatagaatgggataacgttctaagtacaataattttataggacacggccaaatcatcttatggagttgaaattgtaggaattgtattgtgaattggaaaatgtagaagaccgtgctttatcagatttgggtgaagtttaggaataggttttctgaagaaagtctctggcttaaaaaatgactttggcttaagggataggtttaacaattggaaatggtttaggtatgggtacacaaactggaataggaatagggttaacaataggaacaggctttggtataggcttaaaaa

SEQ ID NO: 28998 - DNA, 348 bp, Glycine max
  Clone ID: jC-gmst02400002a01d1
gggtataaacattactttaaaatggggcatggtgaaaacagggtttaactcctatgaaaattggacattacattatcagtggcaatggaaacaaatagcatttgccacccccaaaacattcattcactaatcataatccactaacagcaaaagctttctattcaactcatttcattaatcctcaaaatgtttttacctggacaacaagggcaaattataggcccctaaaacaattctggttttggtgtcaaagggcaccactgggggcacattttcaaacccaaacttggaaggttggatcaggtatttagccctgaatatttcactcttaaaacaaatattcctttt

SEQ ID NO: 28999 - DNA, 489 bp, Glycine max
  Clone ID: jC-gmst02400002a03d1
aaaaaaacatgatgctacattattcacctgtttgacgatcaaatcaatacttatatggctagtgttatacaaaatactctttaaaaagaaaagaaacatcaatctataactaacactagaatagcttggagcgtcaccatggtacgacaggggtgtgaggaaaaaacccatctgaaatttttaggacaaacagacagacaacacttttctccatattacaaatattggtcgaaaaacaatctgcaaaaatttctaatcatttcctgaaaactaccttcagtaacagcttttaataacaatcgatgtgaaagctgcagacacagcaagaaattgtagaagcacatatcaaaaccctgcacctgaaatctagagatggcaacagtctgtgtacattgataggaggatcagcaatcactactgcaagatgctaatcacatgaaaaatttccaaaatcagcaaaaagatatctggtaactttttaacttagtc

SEQ ID NO: 29000 - DNA, 531 bp, Glycine max
  Clone ID: jC-gmst02400002a05d1
aatatcaaatcaactgttgttaaagttcgtttacgtttacagattataaaaatttacaacacttaatgtagtccatataaaactgaaaggagtcccattaacagttgcataccgtttgtcaaaagcatcgacagataacaaaggtacgaggggaaagaaaaccccacctagaaacattgtggcgttccatatggcttgaaggcaatgattcttcaaatgtcatacaagaaatccttaaacagcttcatatggtcaggctgaagagctatggccacagataggctcccatcattggttgagcttggaattatgaaagatagcccctcgtatgcaattccaccaggtcccatgaatattggccttccccaaccaaagtcagcatcatggattggaagcctagtccagctagtgataccaaggtttggacacttgaaagtatgagccccacgaaccagcgcttttagatcgggttgcagttctagatagtcaagagccgatctcaaataatcgttgtccattcgtaacaatgca

SEQ ID NO: 29001 - DNA, 496 bp, Glycine max
  Clone ID: jC-gmst02400002a06d1
aaagaaaggcagcacgtattatttcaattgttaaataagaaaaaaaatatgatatcaatcaggctaacaaaattaaacatgaaatcaaagacaaagaaacttcaaacttttgaattgaaacaccatggcgataaaccctatcactcccaggaaaggaagacacatatttcctttttctccatttctgcactttgtgtcgaacttgagtgacacaatttagtagaaagtggtatggttgaacctaatccttgtacttcatttcagataccaggaagccaggcatgtcaaacaaggcagagaacttctcaacatcagctttgagatcttcaatagccttgttgttgacgagacccttgttgaaatccttgagaagtttgccatgctccttctggatctccagtgtgagagtcacagcacggtgaaggaactcaccaatctgctcaaagtctttttcaaccaaacccctagaagtcatggcaggggcaccaattcgcac

SEQ ID NO: 29002 - DNA, 366 bp, Glycine max
  Clone ID: jC-gmst02400002b01a1
ctggtcgagagcaaaaggccatataatttttttttatttgaaataatgtccgggatcatccacaagattgaggagaccctgcatgtgggagggcacaagaaagaggagcacaaaggagaacaccatggtgagcacaaaggtgaacacaaaggagaacaccatggtgagcccaaaagtgaacacaaaggagaacaaccccatggggagcacaaggagggactagtggataagatcaaaggcaagatccatggggaagggcatgacaagggtgagaaaaagaagaagaatgacaagaagaagaaagagcatgggcatgaccatcatgggcatagcagcagcagtgacagcgattagatcttatatgtt

SEQ ID NO: 29003 - DNA, 433 bp, Glycine max
  Clone ID: jC-gmst02400002b02d1
cacaaaatgcaatgagtacataaattcaaaatcaaaatacattacctaactagattgactgccaactaaatgaaatatttgctcctgtccaaactgtcccaaatcccacatcccaagtagcaacaaaaactcaaaaaaatatcaatgatgtaagagctttattactctactttgaaacttgatgctttaattgctttacatgattatcatgtgaccctggtagtcttccaccagagaagtaaccatctgctgataatatgatgagaaaagaaactgcaagccaagaagaaaccacaaaatagcatgcgtcatagcttacatcattgaggattattggtctacgtctgtcccaaggtcaccccaccggacattgtgtctggctgcaagatagtgagcaccaacaggacccctactaccataaggatagtactct

SEQ ID NO: 29004 - DNA, 439 bp, Glycine max
  Clone ID: jC-gmst02400002b03d1
aaagtatcaacccaaatatatatcatgttatctgttaaattgagttattatacaggaatccctactaaaatggacatcgcactacctcttacgaaaaaagagtaaccttagtgcaagcaccccaacaaaatacacaattcaaaatacatggcagccaatcacgaccagctggcagtgatagcactaccttaaattatcattccctcatctatgcgtagaattattagacaagcaaaacaacactgcacaatgcggtccccgccgacaagatgcgatctccagcacatacaggcacattccacacgagcgatacatacaatacaccccctcaaaaaccaacaaacaatcaaataaactacaaaccggatatcaaactcaatccttgctggttgaagtaggtctctgggcacccgggggggcggttggcctagggaaatta

SEQ ID NO: 29005 - DNA, 498 bp, Glycine max
  Clone ID: jC-gmst02400002b04d1
aaagtattaacccaaatatatatcatgttatctgttaaattgagttattatacaggaatccctactaaaatggacatcggactacctcttacgaaaaaagagtaaccttagtgcaagcaccccatcaaaatacacaattcaaaatacatggcagccaatcacgaccagctggcagtgatagcactaccttaaattatcattccctcatctatgcgtagaattattagacaagcaaaacaacactgcacaatgcggtccccgtcgacaagatgcgatctccagcacatacaggcacattccacacgagcgatacatacaatacactgcctcaaagaccaacaaacaatcaaataagctacaaaccggatatcaaactcaatccttgctggctgaagtaggtctctgggcacccgggggggcggatggcctagggaaattataatcaaattgcatgccagcaaagcgcggagccttcacataggggctctgagaccaaaa

SEQ ID NO: 29006 - DNA, 512 bp, Glycine max
  Clone ID: jC-gmst02400002b05d1
agatggataaaccaaagtagcatttcatttatataatgtttcgtacgggacaacggggaagtgagatactgaattgtgtataatacataactatttgattgtcatcatataccaaactcatgtagatgtttgataacttcctactttgctttacctttaccctttccttgaccttttttggcttctaacttggcttgcacacgtgcggcagccgctgcttttgcttcttctctcttctttttctcctcctctttggcagcagcagctagctctctctgcttcttcagttcatcaagcctagccctctcctctgaaacacttcccaaactggagcccttccttggccgacaggcaactagctcaacttcaaaaacaagtgttgcatctggaggaatatctggaggagatcctgcactaccatatgcatattctggcttgcaagttatttttgcaacttcttcaacctttatggttttcactgcaatttcccaagccttgataacactgccctt

SEQ ID NO: 29007 - DNA, 538 bp, Glycine max
  unsure (1)..(538): unsure at all n locations
  Clone ID: jC-gmst02400002b06d1
gaaattatggtgtcatatttttttaagagttttaaaacgttataatactagaatagttcactttttagcaatatcaacgtctaactcaattgattaaactaaacattatttcaaactcttgttacctttgtttaattcctatatataaataaaaattatatagattatttactcttttgtttatcttcaacttttatttatttgtcataaatggagacatttgctcttgtgtaaattaaaaagtttcttagtacaatttgtcttttttttttttgaggatgggtggtgttatgaaaaggtgagatgttcattaaatggacgtgcacaacgtattccttcacgatgagttgcaagaagtgttcatgaaattgcgtctcagtttccatgttttctaattaaccatgtatggtttacaagttgagtaagccattatacagattaaaacaacctccctattattttntgttcacattgcatcattctaatttaaagggacttctgtttcaacttagtatttcctatcattcctagaaatatc

SEQ ID NO: 29008 - DNA, 475 bp, Glycine max
  unsure (1)..(475): unsure at all n locations
  Clone ID: jC-gmst02400002c01a1
tcgatcttcttctttttccactctaccaccaccttagcccagtccccggacgcggcaccgaccgacccggccacgcccttcaccgcagccgccccggccccagcaccctccgcacccccgacagacatcataagaatcctcaaaaaggcaggagggttcacaaccctaatccgactcctgcaggccacacaagtctccaaccaaatcaactcccaactcctcaccacaagcggaggcctaaccctatttgcaccaaacgacaatgccttctccagcctcaaaccgggtttcctcaactccctcaacgaccaacagatgaacgagctcatccagttgcactagcttcccacgtacgtttccgtctctaaattcgacactgtatgcaaccctgtgagaacacaggcacgtgaaaaccctgataggtttgcgcatgacataacangcttctgacggaaccaagtgaacatgacaacgg

SEQ ID NO: 29009 - DNA, 558 bp, Glycine max
  Clone ID: jC-gmst02400002c01d1
aaacaaaacttctgtatcattttctattagatcaaatatcttcgtttgcaagttatacacaaatttctcataagtaatacacgagatatgaagtttttcttataggggggttgaagagaactagtagaacgaagaaagccttcataaaatcaaatacaatttccaccaaaacctgaaacttgaatcattagagagtaaagagaaattaagaaaaaaaacaattatttaaaatcatatctgcaaaatgttgatcattcacctttcaatccacccaatatgataagccttcaatatgcttcatattacattctcaaacccctcattgtcaccacgtaaatgctgccactaaaagtacaacacttgcaacccacataacatgccactgtttcacgctgacagcatctgattcagcatcatctgcaggagtagcagtgctgtccacagatttcttcttagatcctttagccttttctggcgctcgaagccgagcgggaggcttagcttcgaagaagtccgaggaagaagcaccttgtccacctgatacaccgcgagctggtg

SEQ ID NO: 29010 - DNA, 491 bp, Glycine max
  Clone ID: jC-gmst02400002c02d1
attagaattacagatataccctttattgataataaaaatgttatgtttacatggtagacaattatcatcctttatcaggttgcctacccttacactttggaaccttttaaatcatcaatcacagcttgttttttgttgatgcaacaatcgaacccatactttgatggtttgagatctcaaaccacaaagccatgagtgcaagtgacacatctcgttcaataaaaactagataactaataaagtatagtttgtagtaataaataaataagcatactcttttaaatgaatctatacgtctggacgctcattctgatcaaaaatacgattatggcaagtagggttgcaagggtaggcacaatctatctcacggaagggccttcgatcataaaaccaatcacccactgcctttgcaattgatgtcttggccaccactggggagtcatttctcagccatgtctcttgtattccagtttggcagtgtgcatagcaac

SEQ ID NO: 29011 - DNA, 451 bp, Glycine max
  Clone ID: jC-gmst02400002c03d1
ggcaaacgatatggccttttgcatttgacccaatttattactcataaaaatgaggctaagcaagagagattagtttcaagaggcatagagtggatgaaagtacaattacaaaaacgagtagtattctctcctttactatttgatatgtattatgactaaagctgttaagaaaaacgaatgaaaagaattccattttcacccatttactatcttggctgtgggtgggacaaggcttgggttgtgatggttgattctgctgttgatgaagttgagggcagcacgccttttgtttacgacaatttagtttgggttggatccttcaaggctgtctattgacttcatgtattctgatgcattgttttctatgatgagagcatcctctaactcccggacaatgtcaaccatgtttggcctctacgctgaaaaaggtcttgactttggctggaaactt

SEQ ID NO: 29012 - DNA, 474 bp, Glycine max
  Clone ID: jC-gmst02400002c04d1
cattgaaattctccatagagttcccatgtataccctgcaagaacttatataccataattcaaacataagttgcacacaatgtgcaaaaaaataatggaccaagcaatctgaagtctgaacaaagttcagagtcaacatcaacatctagatataaaagtagtggcatgaaattaaaggcactctgttttatattcagcatagactatattgcggcttagaaagagatgagatcatctttcgatgacggctgcttctttgtctcgtgtcccccatctgatgcttccccacctttctttccaaaaatcatctcatcgagatcatccatcatgtcatcattgctccctccctcgacaccagtccttgatccagctggctttcgaatcaaagcatcttctttactatgatagggtgactcgtctggttcaacagcaacaggtatcatagctggttcaggatgaagtgggtagttgcagg

SEQ ID NO: 29013 - DNA, 522 bp, Glycine max
  Clone ID: jC-gmst02400002c05d1
gtgcctaggtttccgttgagcataactccaatccgaacaatattaaaaaatttcataaatgtaaaccaagccttgtcaacttgagttaagaagcgctccttcatcacctaaaccgggagacctttggatttagataatgaataaacaaattcgggggagggaggcagggtaggggaaacctctgtcagtcaggttcgacaatttactaggctagaaacagaagacaaggcaccaagcaccagaatttcctgggtaaattgtgccaattttttttttccttcatggacatggtatttgcctgaggacagagagtcacatacatcatgttgccaagcccgttgtcttacaaatgggacacagattctttagcattagccactgtatgatacagctgctatggaaatcatggtcacaatcaagcgttccaatatcattcccatcaccataatcctactgcatacgacgtatatcaagtgatgagaccaatgtgcacaagcatgcgggggatctaaataagtcagc

SEQ ID NO: 29014 - DNA, 545 bp, Glycine max
  Clone ID: jC-gmst02400002d03d1
tcgcgatctagaactagctttttttttttttttcagaatcagggactaggttttattaacacaaactgctgaaaaaagaataaaatatagagaatacattgacatagacttacatgaaaaatacagaaaactgtatacagaaagcagaaactagcttccgtctaagagatgggacatcaatcttgtgtaaaggaaaattctaaccttaggcaatttcaggattgtcattatcaaccaacactacatgtacatgagacagatgagcaccatttgaaaacaccatcaagaagtcatgcttccctgttttgccttaaggacaagctcttcagtggtggtgccaatgatatcgttagcccgttttagcccgacacattgatatcgaccaacagaatctcgagtaacaattcccaatttctctaatttctcaacagcatcatccacatcaaaattacattcctcatcaaactcttctttgattagttcctcacaccattgatcaagatcctgtcttgtagctttgccctgttccatcagaataaagaatg

SEQ ID NO: 29015 - DNA, 509 bp, Glycine max
  Clone ID: jC-gmst02400002d04d1
gagcaactgcacacaggatatagttcatagagaatagagatcaaaggggtcgataacagagagaatatacagattctttttttgtgacatgaaaaatccttaggctagtagtaactgcgatagcatgacaagtatcaaaattacaattaagttggattcattcgacttccacgatctcatccaaagcatagttgtttgttgatacattggcatagttgactttgttgaatcgaaccacaacagggtagcgagtgttggggtcctgatcaacagcaaccactgaaccggtgcctttgtaccagtaagattccttcctaagaatcttcaccttagcacctctcttggggccaataggtggtggctttggtttagcttcagcttcagctgggggtgtggcggtggcgggtgccgccgctgcaggctcatctgaagcctttacaacaaacctagaagtgttgttcttggtgttgaacatgaccacccttgagtttgttgtggcagctgcaaca

SEQ ID NO: 29016 - DNA, 378 bp, Glycine max
  Clone ID: jC-gmst02400002d05d1
atcggggcaagccaaaacgcattgaaaaacattccaagccaacactcacaaaaaacccaacccaagaatcccccccaaccacccaaaatcaaaaatttacccccgtgaaccgaatataaaaaattaaaagggtacaccgacttaaaaaaccacaaaggcaaaagttccctaaaacccacgaatgccaaagggccccctaaaaaaaggaaagtaaacggaaaccccatgaggctcaaaagaaaaaaaaaccctacgtggaaaaaccgttaatccaacctggcccggaaaaaccccttaaccagtaccgttggggcaaacaaacaaacacgaccccccgaggataacaaaccatgggaaaccgccaaaaaaaactccccc

SEQ ID NO: 29017 - DNA, 520 bp, Glycine max
  Clone ID: jC-gmst02400002e02d1
atgagaaatctaagctatattttctagagcaaaaacaagactttgcaaacgctaaccctgtttccttgcttttaatagcagaggatagaaagtaaagcttacaggtttctatttttgaaatacatgaaaaacattagtataagaaaagtgtgtgacaatacaagaaaacatagaaaagaactaagtagaactggagcatgtttatgggttagtatgttcagtctttcatctctgtgtgtgtctgtggtgacattgaagatgaccttgatgacattgcaagctccttggcaacctgttccatggtagggcgagatcgtgggctttcaggcaagcaagcaattgctatcttgacaattgatatcacctccttatcaatagggcttgttgggtgtggaagacgttcgtacaatttaaccatcaatgacatatgatcaagtgttgaggtcatagtggacgaagatgatagcaatagagaagatgtaacattaccagggtgcttttcaaacaatatttgcaacgc

SEQ ID NO: 29018 - DNA, 499 bp, Glycine max
  Clone ID: jC-gmst02400002e04d1
caatcaagggcacttgggaaataaatactaagggcagccaggtccttatatgaagttatagccaaccataatgataataataatacaagacatcttaataacatggaattcaaatcttgcttattttcatagtttatatcccaaaacatagttttatccttgaagaaatacttaaacgtttccatcccaaagtttttccaaggtcttgcaagacccattttcagatagccatatgtcccctgtgtattgcctgcgttgtggaacctgactgatcctctctaaatccttttcactcagcacaaaatcaaatatgtccaggttctgcttcatcctctcgctgttggtgcttttagccatggcacttgacccttgttggtacacccatttaagtgcaacctgggctatggccttcccttttgcctttgctattgcttggaggattggatttttcatgacagtttcagagccccaaaattattataagcaccaaaacttacca

SEQ ID NO: 29019 - DNA, 502 bp, Glycine max
  Clone ID: jC-gmst02400002e05d1
ccatcatatcattcattcagaatcactttccatgcttcccatagccttcaaccctcttggtctcttcttgttacttttcttctccctaacttcatatctctcttggcacatatcagtcaaccacgccccgggactcaccaaaagtaagcttctttgaatgattttggccctctttttgggtcgctgaggaagcttgcaacccttcatggccagaaaatcttcctctttctccttgcttgagagagtgatgtagagcttgggccaaactagggctcgttcttcgccgttgatgccttcgccgccggtgaccttgccgttctcttccgccgaaccccgcgtcgtgtagtaccggtcctccttctccggcgacgccgatttccttgtctcgccggccgatgaccggagaatcgccccgtcggaattccttgtaaggcgattaagttgttgatgatgatgatggtgatgatgttctttttctggcacagtgaggccagagcgatga

SEQ ID NO: 29020 - DNA, 378 bp, Glycine max
  Clone ID: jC-gmst02400002f01d1
ccattaaactgttttcatattatgtcttcaaagcaaagaacacacaatgttctgaaatccataatcccacatcacatggtaaaacataagaacacatcagatataccacaatcacatacacaactcagattatatatgcccaacacataggcaggcacgtaagacttgacacttgagactccaaccgctcagaaaccatgaatcttgatatgctccttcttcacgataccagcctggaccaggaagggagaaacattcttcctctgatcaccttgaagttgaataacctgtcctaattctgggtcctgaacaactggtccattgcaacagaactctttcttaacatctttaagtatcttggtatagctgaattctttt

SEQ ID NO: 29021 - DNA, 524 bp, Glycine max
  Clone ID: jC-gmst02400002f02d1
ccattaaactgttttcatattatgtcttcaaagcaaagaacacacaatgttctgaaatccataatcccacatcacatggtaaaacataagaacacatcagatataccacaatcacatacacaactcagattatatatgcccaacacataggcaggcacgtaagacttgacacttgagactccaaccgctcagaaaccatgaatcttgatatgctccttcttcacgataccagcctggaccaggaaggtagaaacattcttcctatgatcaccttgaagttgaataacctgtcctagttctgggtcctgaacaactgatccattgcaacagaactctttcttaacatctttaagtatcttgttatagctgaattcttttttcaatccctgaacggttgtcaggcttttccttacatttcgctgctgtacgcgaatatgcacatactcctttgacccagcacccgagtcatcagcatttgcatcagcaaaaggatcgaaggcagtaggaatttgatcgcctaattc

SEQ ID NO: 29022 - DNA, 531 bp, Glycine max
  Clone ID: jC-gmst02400002f03d1
ctgtgtaagcagcaccaaaatagtttttttttttcctttatacaaaatccattaagctagctaaattaaaaatgggcactataatatttagtttatttacaccgaaaccacattattaaataatccaaaacatcacgcatcatcatcatcatcttcttgttcttgttcctcatcatgttctttcagatccgagaggctcctagacttgaagctcccaaatcttgctctcatgtgatcaacataagacttaggaaccaaaacatgatcttgtttattttcttctgatgaataagaagaagaagaagatggtgacacttttttgggcttctcttcctcttccaaaaaattgtcttcatcttcatgaacaggcaaaaggggcatcgattttgggttggaccaagcgtaaaaagaagattttcttgtcaacttcgtggctatttgaaccctacttctcttgttgaaagggttctcttgctcttgaagttcttcactgcgttgagtgagttcacttgtgatagaaccgtgaatgac

SEQ ID NO: 29023 - DNA, 496 bp, Glycine max
  Clone ID: jC-gmst02400002f04d1
aaaaacaaagaaaaaatctttatttattttgatagataatggaatcaaaatatataattacaacatatctattcacatgcaccagttaagtacttggcgaaaattacaaacatgtaactcatcataaagctagtactaggttacaatgccaaaaacgacaggaccgtgttcaagaagcaagcatagtaaagaaacaaaaacaaccctttaaattcatcataaaatataatttcaacacgtacatgataagaccaatcaaacatgaataggagccaatatgccttgcaattcactgcatcataaatgccacaatagaaaccaacacagaagaacataaggtcaccccagaaacagacaaagcaaaccctgcaccagtctccatttgcgatgtgggtgcaatttctgattgtgccacagttttggtcacgtaaaacatgctcaaaaccattgctgcaataaaaaaatgagctgcacagtctccaagttttgccatatt

SEQ ID NO: 29024 - DNA, 273 bp, Glycine max
  Clone ID: jC-gmst02400002f05d1
atgggggacccaaaaaaaaaaaaaaaaaaaaaaaaaggggtcaaaaacaaaattggtggccacaaaggggggaaaacattagggaaaaagggggaaaacccaaggggaccgaaaaagggaccaaaaaaatggaatgcaggggggcctccacaaaggccaggggcaaaggtcggggcataagcccaaaccttgggggaaaacggaacagaaagggggtcaaaaggggtcttaaaagggcccttgccaaggaaaaaagcccgaaaaatgaaacaa

SEQ ID NO: 29025 - DNA, 489 bp, Glycine max
  unsure (1)..(489): unsure at all n locations
  Clone ID: jC-gmst02400002g01d1
ccgccctttttttttttttttactttcctctcatcattactcattgacaattaggatttttaccggggcctccatagtaaaagtaatggccccaatccccattactgcctgtttggacatcataacagttcgattgctcagtgaaggtgccaatgcctttgggagccttgagattattggagctatcaaccacttgaatgtttctgaagtagcttgctttgccaaaaccctcttcagggaaatgaccacttcccatttgagttgatgtgtgctgaccatcaggctcagaatttacaacttcacctccccactcaatcatggaagcactgtcagccaaatatgagaacaggaaagaaggccaataccccaatacatagtcatttccaaattgcatccaccagtgtccctctttaggatccttccagataagtatactgatatcgaatagngagtttcggtatgcagaaactgangaaatggttgcaccca

SEQ ID NO: 29026 - DNA, 535 bp, Glycine max
  Clone ID: jC-gmst02400002g03d1
gataatgaatagagaatactacattgctcatcttcatatccacatttgaaaaagtacccatgctcagttccatatttgtgaagataacaacaattctcaagattccatccctattcttaccggttaccctaatgtaaggaaaacgataatttatagtggtatttgttagaagcaaatgtttatctgcagttggaacttgtcacttgggcggacaaaggtgcagggagcgaattatagacagacaaaacccctagcaacagttgacacgagaaaagatatggcattaaagtaatttctctacataagctttttatatcatggttgagccaattttgccaaaataactaagtctaaaatcttcacatccaatgtgtcatctacctttacaattccatccgtaccatctacaccaatcaacttgccggttgcaccacgcaatgccccacccataatctttattttgtctgattttcttggtaccacagcctccatttcattaggaagggctgtaatcgtttcaccattaccacttgat

SEQ ID NO: 29027 - DNA, 501 bp, Glycine max
  Clone ID: jC-gmst02400002g04d1
ctcaaaaaatcaaaatcaaaatatataataatactgaagaattgcaccgttttgacaaaacaaactcctcgccttctccaaatcattactccagagaataacgtaaacagataacaaaagttagaatagaatgaaagggttacaagcaagcagcacttcttcccgaggaataaaacagctatctttttcttcaataaccctatcaaccaaacaatttagaagcactttctatgaacaattgatggtccagactcgtcgtactctgccttcgcaatccacatctgctggaaggtgctcagggatgccaagatagaacctccaatccagacactgtactttctctcaggaggtgctaccaccttgatcttcatgctacttggggctaaagcagaaatttccttgctcattctatcagcgatgccaggaaacatggttgtaccttctgaaaggacaatgttaccgtacaggtctttcctgatgtcaacatcacatttcattatg

SEQ ID NO: 29028 - DNA, 500 bp, Glycine max
  Clone ID: jC-gmst02400002g05d1
accagacgtttctttttctttcatttatgtattagcatttacaacgagctttgagattctacaaaatgcattatagaacagaggtaaatctcaagtcctatggagagactacttgctcaattaaaagtcaaaaaggaggcaaacgctcgaaccagtcagtttcatctccaagcagaagaggtggccatatgtctgttcatccagccaagataaagagcaccatctctatgttcaagcctataattttgactgaactcctttagaagattttgggtagcaaccatcactgaagaactcaattgacactgtttaaatccagccatggaaagtcttgacctccactttccaaaaagttcatgcctttccaccctctcaaccccctcacaagctatcatgttgaccatgtctcgtgccacgcagtgctgctctgcgctaatcctcttcttatcatctctggggcaagccacatctatagattcaaacattgcagtataataatc

SEQ ID NO: 29029 - DNA, 388 bp, Glycine max
  Clone ID: jC-gmst02400002h01d1
aaatacgctttatggtttttatttattgttttttgggattcgggcgttcatatttttctttactaagctattaatttgatgaaatctgtacaataacaagggccaccagccaagtagtgataccatagtactacactatcagcagagatattgttcaatctcagtaatgagtctgaaagaaacggtataatgcatcccaaggtatatagtggttccgtaaactaaaatgtggtgcccgagaatctaagctaggctacttaaagtcattttatttaaaatagtctgttatcatctgagcactgactccattacagggaagctcatcttcaatagaactgcatatgcataacctatgagcagacgggacacgctaggatggtgggggcat

SEQ ID NO: 29030 - DNA, 476 bp, Glycine max
  Clone ID: jC-gmst02400002h02d1
gagattacatttcattaatcttgagggggaaacattacataaaatcaaatatatcaatcgtctaaaagataccaaattgcattcaacaacactataactttagacagcaaaaccgagcgactacctccaaaaaaatagcaagaaagcacttcaagtactcaataggacacaactctcagtggcttgagaggaaaaatttgactatggcattttcatacaggaatatgttgtactaatgtacataaatcacctaagtaaaagaaaaaggtaaaacaaagatgtgaagccaccaaatcgacttcaaatttaagccaaaaagtggtccagatggtcgaaccataccttcctcaattgaaggaatgaaacatgaaaaccgcaccaataattatggagtgctggggaaaacgatgggttttgtgcatcaccttaatgacccctgatcattgggcttcataaaccatgaggaaagttattga

SEQ ID NO: 29031 - DNA, 540 bp, Glycine max
  Clone ID: jC-gmst02400002h05d1
gtaaaagcactaattgcaaccaattgttccagtttcatagtagtaacccaaaaaacatgaaaagtgaagtacaaatgcatggtgagacacagctaatccaagctactaaaacaagggacagagcaaacaagtagaaaatactaatgagcaataccaataaataaaagcaaacacaaatccgaccaacaaaaactaatgaccccaaatgaagattgtcctaatgaaaatagaattttcatcaaaacttatctgccctgtcccttttctgttcatgtgctttcaaatgtttttgttatggttgattggtcctcacttggccatcatgactttgacaaactcctcgtagttgatctgcccatcaccatcaacgtcagcctcacgaatcatctcatcgacttcctcatcggtcagcttctcaccgagattggtcattacgtggcggagctctgcggcagagatgaaaccattctgatccttgtcaaacacacggaaagcctccttcagctcttcctctgaatcagtgtctttcatcttgcgcgc

SEQ ID NO: 29032 - DNA, 397 bp, Glycine max
  Clone ID: jC-gmst02400003a01a1
ttggaattcggctcgtgccctttaactctacattctctcgacacatgctttgctagatcacaggttgttggttaatagtgttctgtgtcagaaaatgttgtgaatgagagatgtgtattgctagcagtttgactgcacagttgaattagtatgctactaaagggattctgctggatgtcaaatgatgtttaagatttgatatacagtaaaaagaaattggagactatggaagaaatacagtctcaatcagataattatagatcttcgtcatcgtcggcaagcagcccggcaagtaaggtgccatcaagtaactttttttacctgcgtaaacctggttcacttaggcagtccatctcttttgaggattcacctgagtgggaggatactgatattgatg

SEQ ID NO: 29033 - DNA, 493 bp, Glycine max
  Clone ID: jC-gmst02400003a05d1
gtcactctagaacatcattatttctcaatttatatagctctttaaccataattccctggatacaacatgtatactagtgtatacaccatattcaaagatagctaataaatacttgactgtataattaatatcacacaaacgtaaagtggcaatatatagtgtaaatatatataagcttaatttatacacagaaaccatgagtataaagcatctttatacaaaatattcaacaagaatttactttattaccacatcattatagtaaaatgtcatgataaagtggtgaaattctattgaatgcttgtgtcaagatgtttttataggatcaaagtgtgtatataaattaaactatattttttaatcaatatatatatattgatcacacattttatatatatatataagaggtgcttaacaagttggataggcaataccacaagaactaacggtttttttggcattaggagagttaacatactgcttcaagctaggg

SEQ ID NO: 29034 - DNA, 561 bp, Glycine max
  Clone ID: jC-gmst02400003a06d1
caaatcaaaactgagaattcaatctataaataaaacgaaactcaacaacatttgtcttatccgccaccatataacccccccggaatgtccaaccatagtaacagaaaaacacaaggaaaaggctacaacgtatgaagaacaacctaaatttacattttaaggcatagaagtcaaaataataacccttctaattcaggaaatccaattaccaaagtttttttcctgcttttaagtccaaatccaagaacccaaaattgacaaaaaaaggacagggaaatgtcagaagggttcaggaaaacctcacttgccacccaaggatgggaagtgcccaggatcctcaattgatggagctggagcattgctgtatgcatttccactgtaacctcctctagaaccacggccacgtccccgaccacgcccaccagggtagtacctttccccttcagctggcttcagaaactcagtgatgttgacagacttcttggatttctcctccttctccaaagcatctttgcgcttatccttgtcagatcccaatttaataaagatctcatcattttc

SEQ ID NO: 29035 - DNA, 550 bp, Glycine max
  unsure (1)..(550): unsure at all n locations
  Clone ID: jC-gmst02400003a07d1
aacctgaaatgatgtgtttcaatagaatatctccatctgttcaatctatgcaaatataattcacaagagaatgttttgtcctagttcttatacacatgtgctagctaatttaattcattttcagtatttgtaagcaggaaagaatcatacaaaaaagaattaagagtccaattcccaagacaaaagaccagtcttatagcaagcggtaccaaaatctaagacttatctatggtatcattctagcataacacctgcagtaccaaacgagataagttatagaaccagcatagaaagccaatacttctattgattggcgcaagtttaactttaagggacacaaaaaaaataaaggctagcatgggtgtcacactatgcccctataagtcaaggtcactgtcattaaataatcttaagcaacctccaacttctctactgatacaaatcagcaatcaaacttttccctttctcccatagactgcttgggactttcaaattgcacaggtgtcacgtggatattctacagttgaaggattatcaccnatatcataat

SEQ ID NO: 29036 - DNA, 489 bp, Glycine max
  Clone ID: jC-gmst02400003a10d1
agacccatcataataggacatatatatatatatatatatataggaaaacatacatggaggacactggatctagtaaagtgcctgaaaagtataaatactatatatattgttcaaaacaaaacgacttatttctaattatcagcacatcatatcatatggtggatgtgctgtattgacatttttatatatgtacacatcgacatgcagtcattcatagaaagcccaaatggcactttataatgaatgtgcaaacatgaagagatactagtacataaataaaatttcacttgtagttattaatttatttattgtaagaattgatataaaacacgcagtaccacgtactttgcaacgatactatttgtcatctcagttggatggaaagagtcccaaaacacgtatttggaagcatctgtgcaactgaacatttggcccctgctgcatgcataacccatcttaaacattgcagtagcacaacacgccactgag

SEQ ID NO: 29037 - DNA, 479 bp, Glycine max
  Clone ID: jC-gmst02400003a11d1
gacatggaattgtttccattctcaaaccaattagtacaagtacaactactgaattacaacaatatccttgacatcttattagcacaagtagcatcatatttagcatagggcaaagcattaagaaaaagcagtagtagtggtgtaaatcaggactctgatcatagaagttgaattggaccaaattaatctatcagagccgaagatctaagtcaatcttcttaacatctgatgattcttgctttggcaagtccacccgaaagctacctggccaatacaaatccacagcttgttcaagcataaagggtgtccatgatgatgccactgatccaattccaaccccattattggcatcattactactgaatctagccaccatagcagacctttctctgataggtttgtgcacaagagagtgaggctgaattcccagtgacctagatgccagagaagtgtaagcaagccccattctgtgatgatga

SEQ ID NO: 29038 - DNA, 371 bp, Glycine max
  Clone ID: jC-gmst02400003b01d1
gagaaaataaggtggaacattaactcatagagtttgagcaagcacagtgtcaaggactagaaaatcataaaggttctttttgaagtctgctggttattcaatcatatatccttttgacaaccttttgatttgcacagaagccctatcttatctatgatgattagtcagcagtccaactctgtttaacaatctcacgtactcttctgtgtattcacgcttggtttactgaacatccgagcagtttcagaatttgctggtgaatttgggtttggatcacacagcattgactggattgaggtaagaattgcagttccgccataaatagggctcccctgattttgtaaaaggtccaagcttatactgccttcccc

SEQ ID NO: 29039 - DNA, 497 bp, Glycine max
  Clone ID: jC-gmst02400003b04d1
actctctaatctctaaaactatctcattatatcagcttacggtcacattttttaagccatcttataactgttcagcaatggcttggaggaacaccgacacatttctgggaaaaaaaaaaaaaagcggtggattccacgtacagctgtagacagtgggaatcatatccaatacggtagcaaaagactcctaactataagcaacatgcatcaaaactaggtggattcctgatgctcctgaatcctggtgattgaatattgaggacatacattatcacataggacgtatcaccttaaggagaggatctgttctagcatctaatccagacaagtaaactagaatttaggaattcaggtccaaatctacacattaaatgtcaccaagatggcctaacagagaactaggaactacaagtaaaatacaagcacctaccatcatacataaagagtgcaaccacctaaacgagaactagcaggtttataaaatatcgcaatgcatg

SEQ ID NO: 29040 - DNA, 581 bp, Glycine max
  Clone ID: jC-gmst02400003b06d1
ggaccataacataattcattggatggagagctagccatgcacaccccatagatcagattgaaagactacatgccatgtggttcttgtactgagtggttggcattcgcatcactcatcccttccctagctagactttttattagaccactaaacaaagaaaagacatgcatggagcaacaagacacgatgcaactaagaaaaaaataccctctcaaacactcacttaaactgcacatttcccctcttcacgttcttttactctgttggagcctctgtgtccgtgactgtgacctcctccttcttctcagcctcagcttcttcaatcacttcctcctctttcttttcagctgacccttctgtctcaaccttctcctcacttttctctgccggggcctcttcctccttagcttcagcctcagcctcagcttctttctcttccttaatattaacatcttctgcagcttctggtgtcttaatctcagcaggatcggcattttcttttgttccctcagcagcttcttgcttctcaactgtggctctgtgtgatgtctcagcacaacttctttgccactcttagtctg

SEQ ID NO: 29041 - DNA, 437 bp, Glycine max
  Clone ID: jC-gmst02400003b07d1
gtacaataataaatccatatttttataattaaaagtagtagattacagcgatgcacttgagaaacatattaagtggactaattctccctggtcaagcaagaaaaaaaccagctatgacccaaggtagagagagattatacacagaatactagtaattaactaagactggctctgcaattgccaaaaactccattgcagtagcagccacctgagaagacactaagacctagactagaccatacataatgaagattaatacccttacataacaacataggacactaagaaaacacggcttcacagagaatcccagtcgatctcataagaggggtacttctggagattaaaattatccgaatcaccttcccactgcggctcgctgacgtcagcgaaagtcagaaccgaaagcggcgaagaaccttcagaagaggaggaag

SEQ ID NO: 29042 - DNA, 480 bp, Glycine max
  unsure (1)..(480): unsure at all n locations
  Clone ID: jC-gmst02400003b12d1
aagttggaaatctctcaattgatatttttaataaaaataacaaactaatatctgctcataaaaaaaaagtaaaattggcatgactaagcttataatataatacgatttcttattctttccactgtatgtaccactattgtaatccagaccttgcaatttgcaattctaattaattaattgacccttctgcaattgcatctgatctctcccttcttcccagtgagaggcttcatgttccccatcttgatcatggaagctttaaaatctctagcaaaaaccaaagggcttctactatacagttgcaccaatttgtcactttctgtgccttttcccttgaacagctcttgatcagaatggagaagaccctttttgtgcagcaaattcgtgtaatatgcagtgtcaactctcgcaggagtagcatcaaatggatgcaagtagttgtctcctccgcttcgcggacatgtcttnctcgcagatgct

SEQ ID NO: 29043 - DNA, 392 bp, Glycine max
  Clone ID: jC-gmst02400003c04d1
ggggggcaaaaaaccccccaaaataagaggaaaaccccaaaagaaaacgtctcacccccggaaggaaaaccgagggggggccacaaaaggggggggccaccttggggagtgaaaacgcagcccgaattccgaaataacggacccgcgcaggggggcccaaaaattttcaaaaggggcaccaaaaaaaaaaggagggggccagggtaaacaaagtctggacggggaaaaccctgggggaacccaaataaaaagccagggggaaaaaaccccttatgcccaccgggggaaaaaccaaaagggcccaaaccaggggactttccaaaaaggggcccccccataagggaaataggcccacccccggagggggccaaaaacccccggggggggggggg

SEQ ID NO: 29044 - DNA, 354 bp, Glycine max
  Clone ID: jC-gmst02400003c05d1
gtgttgggttttttttttttaatactttatttttttattttttctatcatttaaaaaaaataaccccccaaaatgagaccaaagggggaaaccaaaaggggacaaaaaggggaaaaacaaaccaaacttattttaaaagggcttcaaaaacccaatacaaaacaaaatgaatctctaaaaaggggggggaaaaacccacaaacgacaacccaaaaaaaacacttgcaaataaaaaccccccaaaaaaacccccccccaaagggaaaaaggcccccctctggaaatcaatacccggggggggcttccaaaccccaaaggggctcccaacaaaaaaaacccctgggggggccgggg

SEQ ID NO: 29045 - DNA, 297 bp, Glycine max
  Clone ID: jC-gmst02400003c07d1
atcttgaagcatcaggcctaactttaattcccaatccgaatagttgatcttataaaagttaagtacacccaaactttgctagtttttcgggtaacactcgaagggaaccttaatttagatttgtgaaacacactcaaggtcagaataaacctctatagttataaagttctcagcactcatttaagagatcatggaatgacttatcaacattcaggatgcctgctccaagtggttcagtggatgctcaacacttttggtggccttatacttgcgcaattcgcctggtcaaaaacggct

SEQ ID NO: 29046 - DNA, 358 bp, Glycine max
  Clone ID: jC-gmst02400003c08d1
atcgtgaagtatcaggccttccttagaagcagagtacctactagttgccctcaaaaaccttaagctgaccaacactttactcgtgaatagcatcacccatgtagggaaccttgaaccccatcttcttaagactctcaaggaaaggggaatcctcaacaggtatcaagctttcaccagtaatgtatgagatgacgtactgccctaccatcatcctggatgcatacaccttgaggttgattatatgatcaccacttttggtggactgatacctgcgcaattcaccaggtcttgaattgctctgaagattccatggaataccatgttctagaatcttagataaggcttcatacaactagtt

SEQ ID NO: 29047 - DNA, 401 bp, Glycine max
  Clone ID: jC-gmst02400003c09d1
aacgacaaagcaagagacaacgagttgttggctcattcatttggaaagataaacatcaaacaagagacaacgagttgttggctcatgcatagcctaagatcacagtagattggtctgctattttagctatataagtctgcatctatgtaattgttaccagctatggatatgagataatacagtttcatttatgatataatcgacttttattaaagctaggatcttggctcagcttcacattctagacgaggttaagtccattgcgtatgctacaaaggctgcatgttctttggtgaaacacaacgggggtggaaattctgaagacattctcatagtagccacccttaccaatgagtacttctaattcttgtatatggaccattacatgcagcgattcacct

SEQ ID NO: 29048 - DNA, 357 bp, Glycine max
  Clone ID: jC-gmst02400003c12d1
gggaggaaaccggcccaaaaggaattcaaattgtacaggaaataccatgcccccaaagggcccaccctaaaaaagtgttccctaaaaacaggggggcggaaaataagggggcaagaaaacacgggcagctttttaaaaaaaaacagggtaaaacagatggaagggaaaaaacaaaacataactggggcttaaggttttggcaaaaaggccttcaaagccacctttttttttttgggggcatgccccaaaacttttgcttcacacagtgggggagggggggggcccccccattttgtatcccccccttttgggggttggatgaacctttaccaacgggggttatcttggggaatcccc

SEQ ID NO: 29049 - DNA, 505 bp, Glycine max
  Clone ID: jC-gmst02400003d04d1
acgttataaatgaacacatagctcatgaaagttacgaagtatacagaaaaggaaaagcagcacagtacaatataagttatatatagtgataatgggatacaaggaatactaaatctgtgtcactccatgaaatatatatatatatatatataacagtccttgtaatatcttccaatgtgctatcatctctgtctaaccatgattctatcaagattttcaagaccctttaatcaagttgcaacgaacaacaatcttctggaaatcatcaaggcttagctttccatctccatcactatcgaagtagcgaatcatatcaactaactctttgtctgtccataaaaaatcatgagctgtagctgccctttgtatatcccttacacttatagttccttttcctgcttcatctagctggaagaagtgtacaatgagctcatcctcagtcagttgcagccgactagcatacgattttttgttcttctttcttcccttatcttcttgaacatga

SEQ ID NO: 29050 - DNA, 562 bp, Glycine max
  Clone ID: jC-gmst02400003d05d1
gaagcacaaattctttcatatacgtcattccatagcataacgagaaaataaaaagaacagaaagaaaaattacaaaatctgctgttgctaccaagaaattgtgactataatacacacatcatgtaacgaagggatgtcaactaaaatattaatgacataggctgctgggaagtgtaataaactgatcaagataaaagctaccccatgaaagtcctaatagcagcgtgaattgaactagtacgagcagaatttctcttctgtattagtgagtgtggtccactccagacagactgactattttgggggaagagaattccacataaacttgaaagcttgtggtttttactatataagctctcaaggagcttagctttctgctgtttatcttgtgaccccttgtgtttcttctgttgctggactgtcgcagattgaccttcttgatgctatggtctatattcatcatgtagagctggtgcatcaccaacatttgatttctctttcaggttccaccatgttttaaaggttcattcatctatcccttctggctgttcattcaatctct

SEQ ID NO: 29051 - DNA, 548 bp, Glycine max
  Clone ID: jC-gmst02400003d06d1
gaataaataaacataacatttgcaaaaccaagtttcttaaacaagctaagatatttctcaataagtttttaaagcataaaacaacataaaacttggatgtgatgcatttagttattcatgcccttctttgctttgagggattcaagagccttgttccgcaattcaatctcaagcttcttttgctcagatggtgtaactacactatcactttgatgataatccattcgtttagcctcctcatcacctgaaatatcatctgttttactcttcattttcagcttctccgcacgccgttcttcccttctgcgtcgcttctcttcacatcttcgacgcttctcctccttctgcagcttcttctcctcttttctcctcctcttagcctctttcctgtcctctaactcagaatcatcactataatcctcatcagaagatgtatactttttctcagaccttttatgccttttcctatcctttccctcccgtctatgcttaccactatcctcagaaacagaatcatgtgaagcattgtgattgacacgatcaccttt

SEQ ID NO: 29052 - DNA, 508 bp, Glycine max
  Clone ID: jC-gmst02400003d11d1
cagaaacagatacttttttgaattataaatacagccttttgcaacaactaattaacgttacgtgagatgagaccacaccaaggaactgaaatggaatgacatgaaaccaaagcatcacatatccattaggactaatacttaatctcactaacattaaaacatatatagagaccttaaaccacaccatatatatatatatatgataacaattaacacataattttctttcactctctagtctttggccaaacacttggatagatatcaagatgcataatcaggcagagaaattaaaacctcttccaatttattaacacttagcaccttgggaagggagttccacaagtgctagcaactctccttgcattaggagagtcaacaaacttcttgagattggggttcttgaggtattggcagaggcatggtttctgttctttgatcttggagcagcataagtttgatggaggggttgagaaggtattgcactacacatgcacttagctgcact

SEQ ID NO: 29053 - DNA, 499 bp, Glycine max
  Clone ID: jC-gmst02400003d12d1
agcccaacacttattaggatccagtgatattaatacaacaataatagttctacatattacactcccttacaatttagaaaatgtgtaagggggatccaaaaccatagcaggagaagcatgtaaagaacacgcgaatgaaaatccgaccaaccaaattgcaaatatgaatttgcaggggaagataaggttattaaaaatggaggttctaccctaggatgctacggcattggattcttcatcatcaagaaaggggtagtcagtataaccaagaaccggatcagaagtgtagaatgtctcccggtgatacttgttgagaggggcattgagagcaaatctttttggcaaatctggattagccaagaaccaacggccataagcaacaagatcagccctgttttcagctacagcgttgatcccatcttggcggtcataacctcctgcggctataaaagtgccattgaaggcctttctcataggcaccaggctatgagggcattca

SEQ ID NO: 29054 - DNA, 496 bp, Glycine max
  Clone ID: jC-gmst02400003e04d1
aagtaaagagacacaacataattaaacattcagcagcataatcataattctgtgagcttcaaaaaagatgataaagttttcatcactacatctgttgctagactttaactatccttccatgcaacatgcggaagtgtctatgtatgacttggtaatagtagttttcgtgattgtttcttaaatttattgaacctcgacaaaaaaaaatattgggtaataaacttccaagcaacctaaaaaacatggtttatagagtaacctacgctgcccttctgtacagtttgtaagccacaacaacaactgctacagctccaagcacaccaacagctgtgcgaatatcacgctgctgcagttgaggccaattcgaacagattttgctccccttcttatgtgtttcaggtgtttcttcaatctccttggtttgctcaagacttgcacttttgcaacaagaaacttcattaacaccctggcaacaaccacccacgttttctttgct

SEQ ID NO: 29055 - DNA, 390 bp, Glycine max
  Clone ID: jC-gmst02400003e05d1
gggaaaacccccacaacggttggaaaaatccccctggcccggggcccaaacagggtcccaaaccacctccgggaaacccaaccagaaagaaagggaaaccccaaccaagctgattccccccccccttaaaaaaaaaaaaaaaccatcgaaccttttaaaaaccccacccatttaaaggccccctccccccaccagaccaaaaacagggcccacgggaaaaaaaaaaccccggaattgggcccggggcctttggggaaaaaccggcccgaacagggaaaggggaaacctcttgggccggggcccctggggggggggaaacagcgccaaggccctgggccgccacccaaggccccggggaaaaaaagcccttttgggggccccggggggcct

SEQ ID NO: 29056 - DNA, 432 bp, Glycine max
  Clone ID: jC-gmst02400003e06d1
ggaacaaattattattattgctgggctttgaagggctgatatttcttgagatcttgagcgaggccttggatggaaccagcagctgagataatagaaacgatcaagcaagcccagcttagtatcttgagccatgtccacgtgaaggaaaacctttgcatctttgactgcttaatggacatttctatggggaagtaaacggttaatggccaaaaggacagtgaaccaatcaggcctaggaagtcattgaaaaatggaaacatcatagctatcaaagcagtgatgatgacatatgttggtctccacaccaccctgaaaaagttcacagggaaggttccacatagtggaaagttcaaagcgtgttctccatttacaaaatggctatttggccacctttccttaccccagttctttacgaacccaaatatgggctga

SEQ ID NO: 29057 - DNA, 423 bp, Glycine max
  Clone ID: jC-gmst02400003e08d1
attgaaaaacattatgcacctagaacttgataaaagtctagaacaaaacttatcaaattatacatgtaccaaaaaatcacaagctatatcaaattatactttgttgactaggttccttgtattctaacactatcactggcacacacaattgcaattagcaggtaactctagtttaaaaggaagtccaaaaagttggaagaactatgagcaatcttcaagacttccaagttgagttgagacattaactcttgaatctagtttgtgcaaaacatgtctgtttggacatcagctacatgttgcttccttcatatacttggaggtgcccacttgccagctttgaacttgccataaaagctggatcgcttagaaacaacatagaagactgggatcccaggaatgatgaaattaggctctttgagaaca

SEQ ID NO: 29058 - DNA, 520 bp, Glycine max
  Clone ID: jC-gmst02400003e09d1
cgaagaaaatacataattaaattaaatgattaatatcaagggaagctggtcattactatctccaacaaaaagaaccaagccagtatcccatgattaggttgtctacaaggatcaaacaatgtggtcatcagctaattgatacctttgatattggccaagaccatagcaacctgaacatcgacaagaatcttgcacccaacattcatccatgaccacacgtgtaatgcatgtcaaagcatttctgttgggtggagtgcagtgtttatgactctcagaccgggagagaagaatgcatctatatctacattaatatgtacaaatggattgcgtgaaatttaatttacaaagcatgatttgtattttcttccagaaaaatacactacacattacagtgagacacattgacctacaaatggaacctagttcttactgtccactctcattatcttcatccttttttgtctccaaatcaaattcaaactcagcatcatcatacaagtttggatccaactgaccaaca

SEQ ID NO: 29059 - DNA, 391 bp, Glycine max
  Clone ID: jC-gmst02400003e10d1
gaaacatgaaaggttcaacaaatactattgggggccctttttgttcaaacattaaaccccccttaaactgaaaacaaatttaaaaaaaaaagcccagtaacttttgacaagggttttacccatccggggggtttttacttttgcatatggggctaaatttaatggttacaagggatgggaaaatttttaaaatgaaaattgcataaacttacaaccaacagttaaaaacaaatcctaaaaccctaaatttaagccatttctgcattgatacctgattccaaaaaaaaaaagcccctttgcacaaattaaatccctaccatgtatctttggggatatatgggttgtaataaaaagtaacaaccctgccgtttaaaccattggttttcacact

SEQ ID NO: 29060 - DNA, 505 bp, Glycine max
  Clone ID: jC-gmst02400003e12d1
gtagtctgcaagatgataatttcccacggaaatctttgaaccatatgtcaagttatacacgcacaatttttttgaactttgacagaagaaatgcagtagcatcacacctataatttccttttcacaaaagggaaaaaagccaaaatcactcgtgctaaatgatatagaagcaacaactaaaacaacagagtgacaaaagaatacaaaaaataggattaaattgaatcaccgcacttgccacatgcatctaactgttgaagggcagaaagaaagcagcgcatgctctgaaagaccaaatagtttcaaacacatgttctgaaagacctgatgaaatgacttgattaccaaaaattgtggcctatgcagcagccactgacggttcctttgctgtcaagtttgaaacagccaaatgaaatttttctctagttttagtactagcaacatgtccagcctttgccaccttgctaaaagcaccgttaaaccatgcatgttcagcagtcacata

SEQ ID NO: 29061 - DNA, 438 bp, Glycine max
  Clone ID: jC-gmst02400003f08d1
accatcaaaacaaaaaacagtgcttatcaaaaacaaacagcaacgaaaatgttaccgccgatcaagaacccagttttgaaggctacggctacatgaaatcggcggacactttaaaatataactggtaaaacaaacacctaagactttgcaaagataaactactgtaaaggaacaagtttttttgaaaccacgttgatgatcacatgtgctagcaaaattgccaaaatgcaatcactttttcttggcggcagcctttgtgaccttggctccggtggggtctttcttctcaacactcttgatgactccaacagctacggtctgacgcatgtcccttacagtaaaacaaccaaggggaggatactcagagaaagtttcaaccaccatgggcttggttggaacccatttaaccataccaggatcaccatttttcaaaaattt

SEQ ID NO: 29062 - DNA, 368 bp, Glycine max
  Clone ID: jC-gmst02400003f09d1
gaaacataaaaggtttaccaaaaactattgggggccctttttgttaaaacattaaaccccccataaactgaaaacaaatttaaaaaaaaaagccaagtaacttttgacaagggttttacacatccggggggtttttacttttgcaaatggggctaaatttcatggttacaagggttgtgaaattttttaaaaagaaaattgcataaacttacaaccaacagttaaaaacaaatcctaaaaccataaatataagccatttctgcattgaaacctgataccaaaaaaaaaaagccccattgcacaaattaaacccaaaccatgtatctttggggaaatatgggttgaaaaaaaaagtaacacccctgccg

SEQ ID NO: 29063 - DNA, 496 bp, Glycine max
  Clone ID: jC-gmst02400003f11d1
gacaaaaaaacgacattttatttatcatgcattagacaataacagcagcaaaggccctatcattctctacactcaaactcacaagttttcacaaattcaataatcctaaagggatatatatcatatatgaaatttattttcttcttttcacaaccagaaagagaactcagtcccccaacagggaccatgtcatgtcatcattggtctgatatagatttactcccccattcgaatgatgcatctgatggactcccctttcagcatgtaatcaaaagccttgttaatctctgagaatggaactgtgtgagtgatgaatttctccagttccaattccccattcatgtacttctccacaacagaaggaagatcagtgcggggtttgtagtttccgtagaaggtaccctttagagttctctcgttcaagaaattcactggatgtagtttgaatgcatcatctttgtttggcactccaacaagtacagctacaccccaacca

SEQ ID NO: 29064 - DNA, 468 bp, Glycine max
  Clone ID: jC-gmst02400003f12d1
gactcaaaaatattctgagtttgattacctgaaaatctacattagttaagaaagtgacacaaatatgaaaagaactacagagggaagaagaggtggagaaaatatatgtgcaaggcctcgccaaaatggaaaaaacaatctaaaagataaaccagaagataacctattctatgataaactaagagatataatatctgcatcagacagaaatctaagcaattatctcggacactctttttctaacattatctctatggttgactgaaatttattaaaaataataaattttggtgtattttacttctaaattaagatagagaatcattaaaccagaagtatgactcaccaaaattgattatttccaatgaatttcagccaataatagaatgagtgttagaaaggaagtgtcagcaagtgtgtccttaattaacattcttcttacgagaattattactttcaacacaatca

SEQ ID NO: 29065 - DNA, 423 bp, Glycine max
  Clone ID: jC-gmst02400003g08d1
aacaaagaccgaaagcagatgtatcaactcatctattttaaaacgtatatcatacataatgggaggacctccctctcatatactgtaaccaatgcggttctgtaaaggctttattaccaaaatacttggctgcaaccatttaaacaaaatcggagtaaaacagaaaaattagccctttggtaagtgcatggtacaaatctgaagtagcattaatttaaagattttttcgccctaattgccaagttaactgatcagtagctgccatagcccgagatgctggaccaatggaaccttcggacctgtgaaactaaaagatgactattccgagagagtaaagtgcattaatagtccatgataaatatgctgaatttgaattatatgcttacagagcaaccaagatataagctgctgtttgtataacaa

SEQ ID NO: 29066 - DNA, 484 bp, Glycine max
  Clone ID: jC-gmst02400003g09d1
ggaacatagattgagatccagtgtatatgatgggtaaaacaatcaatatgatctttattttagtccaacttgttggcacattattaaatgcacgtcaaccgtcttccatatgcacacagcaatacaaatggactcagattctttacacattgagctaggaatgcaaaaacagtttctctaatcgaagtgggggcaaaacttatgaacaaaatagtacattagcacttatcctcatcaaacaccttaattaagattgggaggggagcggagagaaactctgcaaaacttctgatcccactgcttagaacatttgagccaaagagtataaagacaggttacaaaagagacaaagaataataatgaatgtagcatgaggactataacttcttttacacggatgcatgttcaagccttcaagtgaaatttgccaggctcagagtatttcggtttcagctgctcaatttgttaaatttaaacccccgat

SEQ ID NO: 29067 - DNA, 465 bp, Glycine max
  Clone ID: jC-gmst02400003g12d1
agcataaatcttgagagaacatttttttttgtttcatcatataaaatatatatgttctgaaagaacacatacaagtacacaaaaaaaaagggggaaattcataaaaaaatacagaaaaaaaaaaacagaattgagtaagagggaaggaaacatagagaaaattttagcaatcagataataagaagccagtagtagtgcaaaagtcccttgccaagagtgttggaaccccttttagttaagcaggtaccttctcccccttgagtggcttcaccacttcccatgtgaagtcagggtcatctctgccaaagtgtccatatgcagcagtcttcaagaacctgccatttccacccctcttgagatcaaggttgatggagatcatgccaggcctgaagtcaaaactctccttcacaatgctgaagatttccttgtcagggatcttcccagtgccataagtgtcaacaaaca

SEQ ID NO: 29068 - DNA, 414 bp, Glycine max
  unsure (1)..(414): unsure at all n locations
  Clone ID: jC-gmst02400003h01a1
cggctcgaggcaacaaaagaactaaacttgacaagcaagttgatgattagtagagcctatcatgattcattgtttatggccaggctgtctccaatgggcatgattttcattccatgttacaaagccataagcctgaagagtttgccaccattcaagatatgtcaaatggtgtaaaagtattaacactcaccctagccaaattgtccagtcactaacatcttctgtagtgagttcatgtgaacttttgtaggaaaaggacatgtaatttacttctgttacagcctactgattaaatcatttcaaattttggatatacccccttcaatctatcagaatgaggggttgaaccatacaanttgaaacgtggttctantagaaccactttttacaggagtaaaatgataactgcctgtg

SEQ ID NO: 29069 - DNA, 307 bp, Glycine max
  Clone ID: jC-gmst02400003h01d1
ggggtatatgcaactggattctacaatatcattagttcctttgtcttttaaacactccgatgaaataaaattcaccgttgtgactccttccacaggcagttatcattttactcctgtaaaaagtggttcttatagaaccacttttcaaattgtatggttcaacccctcattctgatagattgaagggggtatatccaaaatttgaaatgatttaatcagtaggctgtaacagaagtaaattacatgtccttttcctacaaaagttcacatgaactcactacagaagatgttagtgactggacaaatt

SEQ ID NO: 29070 - DNA, 409 bp, Glycine max
  Clone ID: jC-gmst02400003h04d1
agaaaataaccctttttaatttataggaacaattcaatacattgacaccaccaatagtatgatttaccaacaaaagctaaaacgctagtcattgagaaaaataaacaagtaactacacttctttgatagcagttccccttcccatcttaacaccattgccataatcatcattcttcacgaatctggaccaaaaggggtgtgccttccaaacctgggtcattttttcaatgggaatgcccttggtttcaggcaagaagaagtagatgaagaatgtcatgatcaacacgaaaaaggcaaagaagatgaacaagccgaactttatgtggcaaagcattgtcaagaagacttgtgcaatcaagaaagtgaaaaacatgttcaccgacacatttatactttgagcagccgaacg

SEQ ID NO: 29071 - DNA, 51 bp, Glycine max
  Clone ID: jC-gmst02400003h05d1
tttgttttttttttttttattttatatttttttttttcagggatatttgga

SEQ ID NO: 29072 - DNA, 420 bp, Glycine max
  Clone ID: jC-gmst02400003h06d1
agtatcaaaagtttaaaaaatagatagagattgcaatcgatgaaatgagcaaaatagttttaatttctcaataacaaggggttgcaaaataataaaatataactagcataaaaaattcagagagaaacaaaacattccaacattgctgaaacataaagctttaaatcctaattctcaaactagaagagtgatgttcccttgcccttcttggcaccaccaatctcaaagggcttgcacctcttaatagcgtgttgggagacatgcttgcaaccctggcattgcaacctcagaacaatcttcttgggggttttagccttcttgtggaagacgggcttaatttggccaccataaccggattgtttgcgaacataacggcgtttttcttgggcagcaatgctatccttacccttcttggattgg

SEQ ID NO: 29073 - DNA, 445 bp, Glycine max
  Clone ID: jC-gmst02400003h08d1
aatagttccaccggatttctatatcttcattgccttaaagaacaatattcatatttttgtaaaactaagatacaataattaatcagctatatggttttaatttgaaataatgtacgtgtgactctttctggaatgattgatattctgttatttgcccatgcaatgcatatgatcaagatctgcatatatgccccaattaatttttgttgggtgtctcagagatctccatagcagctttgaacatgacatcataggctttctctatgcaaaacttgaatttctgttcatcaacgaatccctttagtgttctcaaggtgattcttattactttcacatagctcataattgatatgtctacattctcaggtccaccagtcatggtgaaatacagaccacttattggatgatttgccaaagtcatatgttccattggcccaaaaggttg

SEQ ID NO: 29074 - DNA, 465 bp, Glycine max
  Clone ID: jC-gmst02400003h09d1
ctcccacggatagattgatgtccagagtacatgccagtttatgaatccgttcacccagacactttagatacgtacaactctttactgttccatgcacatagtatatatacatagaaacgataactttttagctataagcacaactgtttttcatatcttcatctttattgcaaaccacgacgtaagtgccgtacgactatttccgaagcatctgctcctcagcatgtcatgtctggagaaagttaccttcaaatatgagatgctgaggaaagatgaattaacagaaacaaacaagagctcaatttaaatgtgaactagcataacatgcagctggagtattgccatcatgtgaagatttctctccactagcttgaacattgttatggttgctcacccctcccatggaactatcctctatatgattatgatatgaccaagaagtcccccagctctatgattttacta

SEQ ID NO: 29075 - DNA, 480 bp, Glycine max
  Clone ID: jC-gmst02400003h10d1
aaagtcaaattttaaaattaaatgcccaatactatcaactgtataaaaaaatacatgtaatactgatgactaagggaaaagcagggggaaaaaatacataaaatgaactccaccaaggtcagttacagacagatttggccagcttaattgtagctttatcaggaatttacctcagttgctcaaacctgtcagattctgcaagaagacagctaccatcttgcactggctctaacttgaatctataatgtttatttacacgttcactgcatccctataagttgacaatccatttgcagctaattgcctgccactttaaaaaaatgctatgctgacatccctccttttctgttttcagattggcctctattaacaataaaatgggtaaagaggattgctctaccactaaacctgaccttgtacaagacaacattagcctggctctatttgacttttctttttgcaaagattggacaagaggat

SEQ ID NO: 29076 - DNA, 407 bp, Glycine max
  Clone ID: jC-gmst02400003h12d1
gttctaaaatacatgttgacttattgggtgaaacaacagtacaacgcttcaaatgcatgcacaaccctttacatgtacttaagggtacacgtgtagatagattgaataagttgtgacattttattctgatcaactatagcagaaatgtgctaagacgtcatagaaatgcatttatttataaaaatacattagtggtggaaatttaattggtatgacaactagatggtgattctgtagtaatacaaagaaatggctcacgaattggcaaagaatgggaccaggtggatccgtacatagcttggttgttgatagacatgtttgatgtgtgggatatgatgcttatagagatcatttgggagtactgcctgccactttgatccagagaatggcattgttaggaatgggat

SEQ ID NO: 29077 - DNA, 386 bp, Glycine max
  Clone ID: jC-gmst02400004a01d1
caatccaaaatagctgagatcaggtaattaagaaaatatacttttgctagctaaaagatacattccgtccagggagaaccaaaaacaactgtttaggctatgccgtcaagaaattaattggttctctcactaactcatttaaccattcattcaaaagggtccaacaactatgtaaaaactgaccaccatcagaataatatcatgatctagcctccaaagggtctgattgcaaatgcactaatttgccaatgattaacgctttttcttgcttccctttgcactggattttgaaggtgaagctaccaagtttacgaacaggaccatgatggagatcactgagattagagatccatacttagccagcaacctcttagcccattcaaact

SEQ ID NO: 29078 - DNA, 377 bp, Glycine max
  Clone ID: jC-gmst02400004a04d1
ggggggctaaagatgagtttatttcattaaaagcttcacaaaattcattcgacatgctaaaattacagtcgaacaggagggaatggaaaatgcaaaaaactcataacttacggcatgggacatttgattctgaaaggacataaccccggctaatttgcttataacaactaatgctttcgcacgctttaaatactcaaagggtttatcttgggtgattccaaaattacgggttccaacaactttggcaagggagggagctattattccatgttttaggaattggcttccctagcacgatgagaatttcttgacaggaggggaaccctcacttcatttcaaggtttttcaaccaataatcaaggggggtgggacacatg

SEQ ID NO: 29079 - DNA, 54 bp, Glycine max
  Clone ID: jC-gmst02400004a06d1
tttttttttttttttttttttttttttttttttttatttttttttttttttttt

SEQ ID NO: 29080 - DNA, 448 bp, Glycine max
  Clone ID: jC-gmst02400004a08d1
aaaatagaattcccatatgttttaatactaaaagggaaaacaggaaggtctatgtaattaagattcatgatatagcaccatccactattatttaagacggaagaaaggaccagttactactattcagaaatagatgataggagtcatcacctttgaaaagctgattggtgcaataacagaaataccaacataagtctagtacaagattatgaaaagaaagcgcatatataaagtttctgaaggtgagctagattaagcactagctgaagccacatgtttctgtattttctgctgcagctcatccttctttgctcccaccactttgtccagaagcgttccctctttcacaaacacaaaagtgggcatagcctcaatagcccaatcttgagaaacactctttaattcgtccacatccacctttaggaatatgacacttgtgaacttctta

SEQ ID NO: 29081 - DNA, 442 bp, Glycine max
  Clone ID: jC-gmst02400004a11d1
gaaaataaaggggccggggccggaaaatatcttaatcataattcacaaattatcatttaaattacatgctaatcaattattggggctcaggctcactggccactgagttggactctcttcggccgagtccactcagccgaatcatcgcccaaaacaaaaccaaaacaatcgttttcaactaaccatcacttgccacctgcttaacaacaatatttttaataaacacaaaacttaaattcagttttataagcatgtttagtaccgttcattgattaaaattgaactaaaattacttacaaaactatgttttgtctcgcctttatataacagacatatataatgaacactacctgggttcattcatttggctgtatttctattaaactaaatttgatatattataataatttttattacagtaaacccatgaaagcccaaacct

SEQ ID NO: 29082 - DNA, 447 bp, Glycine max
  Clone ID: jC-gmst02400004a12d1
aataacaaaataacatacatctgaattagctttttgtgtctaccgaaatcgttcctctggttaaaatcttatagactaatctccttgtaattagtttttctacgtacacttatggtatttaactgaacgacggtcccagaaattagcacaaaccttctgtctttaacaaaacatactcaggaaaactaaaccaaaaaacaaccttgtttgagcaaacacattgaacatatttcaatttataaacattattttggctttgatcagtattattgatctcccctatcaaaaaatgagggactaagctcctatcaagttctccattgttatgattgggacacaaaatcaggggctgtgtcaaatcaccttcatataatgcattagccgcaacctgaaatattaaatgtgcagctctaaacttaaaactgaagctgccccacccacactact

SEQ ID NO: 29083 - DNA, 476 bp, Glycine max
  Clone ID: jC-gmst02400004b02d1
cctaaagatttgtagatgttgaaggccattcttaaaactcccaaattgacaatattgagaataatattacaaaacccaacacctcattttttttttaacatccgtaagacccccaaagtttataggggagtaatctaatccaatttgccttataccccatacaatgttcagtgaaaggtgaaggagcaggaagccaaagatgtaaacggaattttaaatcgtactataatagatagcaactttacgcaacaactacgattatgtaaacagcacagaaaatatggttgatccataattatacaggaccataaatggttatttaagaaacaaatcacccaaacttgagatatttggcttagatgagaggaagctaacgagaaaaatagctttacttccagctgaagcctttgcttaccacctcacaagaatttttctatgcttgaaggcaatgttgctttgggcacagctccaataac

SEQ ID NO: 29084 - DNA, 484 bp, Glycine max
  Clone ID: jC-gmst02400004b03d1
acaagtcatcaaccgtttatgtactttagttataataaaaaaataacagttatttacatttaccagagtatattataatgtacaaacaccataaaaagaatatagtcagaactacagattcagagaaatgctagttgcaatgcgagaatgtctttatattaggtcagactgtagcttaatggacatgtagagaagagctaatagagcaccttggggaagtggtgcataccttgcaaggtatgagccaacccacaaggccaccacaactagtgcgacaacactactactggttttcccgcaaacccaacttgcaaatgacaagcatagtgttagcaatatgccacccctcccacccaaaatccatgctattacatagcccattttatagccggtgtctaatttcttatcaaacaatgccatcagactgctgaatgtgagtgagaaacgggatccaagcgtctgaagcaaaaataatgacatgaat

SEQ ID NO: 29085 - DNA, 405 bp, Glycine max
  Clone ID: jC-gmst02400004b04d1
caaaacaaaatggcataacataaactttccaggtaacataatcataacattggaggggggttataactcgaaaacagccaacattgccttttttttaggtttcccccacaaaaccccaattttttggagcatgtggccttttttttggggcggaaaattattatcataaagcttttaacaaaagggggagtccttgtccattataaagtaatagggggggcccaaaaacatggatctctcactaagttccccattggcccctgctgaaagcattgcaaaagctgcctttgaagcctttttccatggaacaaacggtttcttcaacctttttagttcaccttttattattgaattggctgctggagatgctcccaggtggtgggcccccctcgccgcctttggggg

SEQ ID NO: 29086 - DNA, 468 bp, Glycine max
  Clone ID: jC-gmst02400004b05d1
gaagcttaacaatcttcacaataaaaaatgcattagttgatacaaaccataattccctcgtacaacctataatagattcataaatcattaagccaacgaacgttcacaataaaactaattttaaacccaaaataaattctttaatgaaaccaaatatttaacatgattctagatgatggaacatcaaaagaaacagagacgagggtgagtgtgagggagatctgtctttgaacacaaatatgccaaaaggagagaaggttgatacactataaatacctaccctcctactgtgctctgtttggggctgatgatacttggtgcattagtgtgattagaaatataggcatttgggaagctggggtttcaatggaggtgatagcaaggtaaagaccaaatagcaaaaaattgtaatcagattgaatcgaattaacctaaccctgaccactgcaacaaatatggtcctaatat

SEQ ID NO: 29087 - DNA, 464 bp, Glycine max
  Clone ID: jC-gmst02400004b06d1
aagcaacaacattcagaagtctctcttatttagtccacgagattggatatgggatgagaagatgatttttcaaccatcaacaaagaaagtttacattatcaaataaactgagctactaaggagcctgaaagatcagcttataccaaatctgaatcttaacacaaggtcaaacagccatgatacagacttaggaagggcattctcacgcatacaaatctatgccccaaaacacagctggttgattggttcgatattttctatctatacttccaatgagctccatgtcctctttagacaactcaaaatcgaaaacctgaaagttctctttcaacctctccagttttgacgatttaggaatgaccacagtgttcctttgaattccccagcgaaggctgatctgggcggcagtctttttgtatttttcagccagacctttgagaacttggtcatccaaacatgaaact

SEQ ID NO: 29088 - DNA, 219 bp, Glycine max
  Clone ID: jC-gmst02400004b07d1
agaaaaatataaatcccccccccaaatggaaacaccacagtagaaacatttaggggtctttaaatgttaacccaaaccaaactttttttaaaggggcatttcacaccccttaaacataacaattgttcttaaaaagggggggaaaatcccaaatcgaccctcaacaaaaattacgctcctggttaaaaccccccagggaaccccaacccccagggccag

SEQ ID NO: 29089 - DNA, 477 bp, Glycine max
  Clone ID: jC-gmst02400004b08d1
caaacagaatatgaaatatactatagctatggtatgtaaacaaggtcaatgaaattatagaataccccacttctatagtatttggtattttacaaggcagcaaattttatgtaaataattaattttacatttaatttaacgtaagacacaccacacagaagagtgggataaaggactgagagcaaaccttgtcttgttggttcttcaactgcaagggatgaggatcatggggtctaattctgatgttctctatacaacttccattatttattcgatgtaatctatgcttctgcttcctatacttctcacctttatctttgacctttttgttcttcctctcatgatctctagactggttctctaatttgggcactgcatttggtagccccttctggcctttgtataacacatcagcacaacacgtctttttaaaatcaaacgtgaattggaactattcagttttttttaaaaatatga

SEQ ID NO: 29090 - DNA, 488 bp, Glycine max
  Clone ID: jC-gmst02400004b09d1
aactgattcaaccttttttccttttattagaagtgtatcccgatttgactctttgtgtagcaagcaaacaaaccctttgtgtccattctcttgttacaaatgctaatctaaagaatcacaaacaaaaagggagacaaaaaagaagaagaatgcaacatccattatggccaccattgttcttaagttctagttcttgcagctcttcatgtataagtgaacatgtgcgtgcaattgtaggcttgcttcctcattttcattgaactgctgagactgacagaaccccttcccattccagaataaagcatatagtgcatgaagatacaacttaagaaaggaatgactgagccgaggcagcttcagcaacggaatcaactatctctaagtctcagacatccatccatgcatgtgcaagaaaactcccttcatgtggttggccaggaacacgtgaagaaaaatgcttttgggattagaactaatattagcttaaa

SEQ ID NO: 29091 - DNA, 350 bp, Glycine max
  Clone ID: jC-gmst02400004b10d1
cttgttggtgtttctttttttttttttattttatattattctttaatgttcatgcaaacaaaataatatttggaaagggggttcgcgcccggggggggcccaaggaaaaaaacccccccaaaaaaaaaaaaaaaggggccccccacaaaaaaggggggggaaaaaccggggggggccggggggaaaaaaaaaaccctgggcccgggcggaattccaaaaaaaaactcccaaaaaaaaaaaaccccaaaaaaagggggggggcccccccccacaaaaaaaggggcggccccccgggcttaacaaaaaaacccccccccccccctggggagcccacccttagggggggggga

SEQ ID NO: 29092 - DNA, 376 bp, Glycine max
  Clone ID: jC-gmst02400004b11d1
ggataaaaaaagatatatcggagtattcaatggatgacttctttacattaactggtccaaatatttttacagccttaaaattctaatgatagcttcaattttttccaaaaatgattgaataagattaagttaagggtcaacatctaactttatgcgcatggcccgaatccatatttcattcgacaacttaggaaactcaagatattttcctaatcaatcaacattggttccccatttgtagtctgaattggggccctggggctctgtaggcttaagggtttcttcatttcctgagacctgacaaactcctcaattcttgcttttagctcatcggcgggaatcaacatatccccggtaagatgagaacgggtgaatg

SEQ ID NO: 29093 - DNA, 521 bp, Glycine max
  Clone ID: jC-gmst02400004c05d1
attgaaaagcatagcaacacttattgagaccaaaaactgatacatttcttacaatttttaatatcagttcacttttaagaatgcccctatctctgtgcttttgcaacaaggtttaccggaaacaatgttcaccctcaaaaagaaaataggagagaagaaaataaacatagtttaacttacattaatacaaaacgatagattgcacccgcaaaaatatctgccacaatgcgaccaggagccgaatgctcgcaaggggggaacttggacttgtcatcaaagtgaattaactgccaactaaacactagccagaaggaagattttatccaaggccaattactggtttatgcacccccttcatcttcagagaagcgcttcttctggccgtaatatgggcaccaggggttcttgcaaatctgagtttacgggaaacagattacactgcgcatattgtgccatcaattggtccacaagaaccaaagctaccattgcctctaccataggtacagctcttgggacaacac

SEQ ID NO: 29094 - DNA, 492 bp, Glycine max
  unsure (1)..(492): unsure at all n locations
  Clone ID: jC-gmst02400004c06d1
agaaaaagcaaatgcttttattcaagagaaacaactgtgcattacatttgatactgctctcaggactatcaagaacaaagagcatcatcatacagttgacgaaggtgactgcaaaggtgatgtcaagacagccaatttttcagcaaaaaaaccagaaataaaactgataacttcccattgaacacaagaaacaaatgctttttactcatgagaaacaacgagcacttgttttccaacattgcgaccgctaaaaaggccaaccaatgctgaaggtccattctcaagcccctcagctatgtcttccacatacacaaccttcccctctctgatatttggcaggagaaactccaagaacttgggatataggtgaacgaaatccatgaagttaaagccttgcaaacgaatccgcttatatatgatctgtgccaaatntgttacaccttcatgttgagtaagattatactgtgagatcattccacagacgggtatgcg

SEQ ID NO: 29095 - DNA, 354 bp, Glycine max
  Clone ID: jC-gmst02400004c08d1
atgacaaccatggggaaaaaatttttatttgagaggataaatttgtcacgctaaaggaatgggatccacctctctagagaggaaaatatgatacacccatgttggtaccggttaaccattggtcaccttcctcttcaatttcatggagttgaaagctatatgcttaaaatgaatcttaccggagataagaatgtggaaataatgtttgtttcgttaaccaggagtagttcgttagtcatccctgccttaatgagatttgattcttactgctggagattagccctgattgttatacgtccagacgaggctttcatgcaatactttgagttcaagatatcaccagagagcaaattt

SEQ ID NO: 29096 - DNA, 470 bp, Glycine max
  Clone ID: jC-gmst02400004c10d1
gataataatttaactttaaagagaacttcatgatcatcaaccatccaaggatttaagacgaaaggaacaagtacaaccctcgaaagtgaattaggaagaaaacacaaggaaggaaaaccatacacagaagaagattccagagaaattcaataatacacaatttttttttttttattttcatttccccccctctagtagtcagtggtgggaagctgctcgtgggtgtggctgataaagacaacctcgtaaacaaggccagcgattccaccaccgatgagaggcccggcccagtagatccagtggttggtccaggtccagctcacgacagcaggcccaaatgtcacagcggggttcatggccgctccagagaaggccccacccaacaaaatgttagcgccgacaatgaaaccaatggcgatgggagcaataattcccaaattacccttcttggggtcaatggcagttgcgta

SEQ ID NO: 29097 - DNA, 472 bp, Glycine max
  Clone ID: jC-gmst02400004c11d1
atcataatatagcatctttccgctttcaatttttatcattaaattgcagaattctttcatgttaaacttgtgggatcatgggatgtttaacatatttcatgctaataacttgtatcgagtctgtcacatcctgccacaccgtagtgatttgcatactaaccagagcaaacattcatgtaaaaataaaacaccatatacacaggatttcaccagatacaggtagtttatacttacatattacacacagacacaggctgctatcaagaatagctagctattcgttacaagagtacatgtataacagttactgcttaaaataaagctcaagaagcttcttcaaagtgtcaaatacacttgtgaaaggattaagctcaataggggcgttgagtcctacatcaggaaattggtttgtaagtgcctgctgcattccagacatagacatcatagctgcccactgactattggacattac

SEQ ID NO: 29098 - DNA, 498 bp, Glycine max
  Clone ID: jC-gmst02400004c12d1
gtacagggtggcaagactacgttggaaatttattacagaacaccgaaacagattagaacatgcaacttattagctaagggtattaaaagaaacatgcaccttcacgtggaaacaccaataacaagatgaagcctatcattttccggttaggttaggtggcatacaaacagattaagaaagaataaaattatagcataacaatacaataataagaaaaagatgacaatcgaccctgcgtcgtggaacatcttcaattaaacgaccttcggtcattgtttattgtcatctccgaagtttcattgttctccttaacctcagttttaaattcgtttttggttgtcactttgcatttgtggtgcttgaagcatgttaatagggtggtcattaacgaggcctgctacttgcatgaacgaataaactactgttggtcccacacattggaaacctctacgcatcatgtccttgctaatcacttcagctttcggagtcttcacgggt

SEQ ID NO: 29099 - DNA, 393 bp, Glycine max
  Clone ID: jC-gmst02400004d01d1
agcgaaaaagaagtgtaaaattaaggtacagagtttaagcaatatttgtggcataataaaattgacaataggtacatgatatcacatgagaatatatagcatataaaggaagcacgggggatgatgatgatgaagatagagttgtgtgctcacaaatcatagggctgcttgccagtgaacttgacctcaataggactaacattcttaccaatagacctgaagttttgacccaccccttggcgtccggcgttgaccttctcagggtaaacaccatccttagggtgcaaatactgaacctccccattagggaagaccctgtagaactggtacttgatcttgtacttggacctgagcctagtcccaagagccaagcactgctccttcctggccaac

SEQ ID NO: 29100 - DNA, 479 bp, Glycine max
  Clone ID: jC-gmst02400004d03d1
gtgcagattacttatttcctcctttctgcttaaaatatcatacaaggcagcaagtgctgatcagcattgagcaaccacaataaatattcctaaaaaacctggctccatatctctaggtgaaaagtgtgcagataaagtgtatatgtaatgcaatttctgcaaactaccaaactaactgaataattcccattccattccacactgaatagtatggggaactgttaaagtgttaccttcaacaactacatgaatagttttcatagagcacatgtgctagagagagactacttatcaggatcaaagacatcaaacaaagcctcaactttacagggtaattagtgttactttcttgtaaaacatacaagaaaagcccataaatttaggcaattaaaacaggacaaaatgcataaatagaatgctcatgtttataataatacacttcatatcagggctcataaattgccattgctaattaatat

SEQ ID NO: 29101 - DNA, 502 bp, Glycine max
  unsure (1)..(502): unsure at all n locations
  Clone ID: jC-gmst02400004d04d1
cggcacaaaacttcagactttatttgatatgaagttgcagatttcattacagcatataaagaggtggatattgcaatgtttatacccccttcatgaactagaagttcagaggtggatattacaacgtttattggattaagcagactagaaatcacacaaacattaagggaaacgtgcttttggccatagatcagaatcagacaatttgttttttaaggaactcaatgatgagctggttcaccttctctggaatttgttcatgcacaaaatggctcccttctggaatatatatgatttccaagtccggcacaaaatttttcaccatcccacttcgaatataatcctccatgcctggaaagttgataacataatctttctcacccatgatcagaagtgctggaactgtaaccttcacgtcacttaagccagtttccacattgagactcctgtaaggagacctgcatgcatatctgaatccagatttttcatatanagatgcata

SEQ ID NO: 29102 - DNA, 519 bp, Glycine max
  Clone ID: jC-gmst02400004d06d1
cagagaatgcaagaaattatttctcttgttgataaatgtatacatgacaaagaacttcaaaaatgtaaagaggcaatgaatcagtcacccataacatacgacaataggtaacaacaacaaaaaattactaaaatacaacgtataccattcttgtaaagtagctagacagtaaatacaataaatgcactaaaatcaaggaaatgtgctgcagaatccagactccagatatagtcacacctaaatgtttgctgtaaaattcttaactagaagctcatttgtaggttcccataccgacaccagtctcgccgccagcataaggttggaagctttcccttgcccttgagtagttgatatagtagaattcagagattatggcagtgaagaaaacaaaagcagcaccggcagcaaagactcccttcctaactgtttcgcaagacggaggattctccccgaagatggtcctgtacttggtgtgataggcattttccactgatccagccaacaagcacacctcagcta

SEQ ID NO: 29103 - DNA, 431 bp, Glycine max
  Clone ID: jC-gmst02400004d07d1
gaagtaaatataatttattcaaaccaagaggaacaggcaaatgaccatagtaatttgaaccctcctggaaccatcatcctcaatacatacataacataacccatagaattctcgtatcctccgcttggcatgcatgcatgctgacatggagccaaatcagcagggcttatatatatatatatatatatatatatatatatatatatatatcggaaagccatacccaaagacttaccattacaataataacattaataataaataaaataaaaatgcaagaaacttcatctacttcaataataccgtatccatgggcttaagcttcagtcttctcaacagaaacttgttgtgttttggtttcctcaacggtttcagctggtttgatctcctcttgcttctgttcctccactggcgctgattcggtttcttta

SEQ ID NO: 29104 - DNA, 465 bp, Glycine max
  Clone ID: jC-gmst02400004d08d1
cctgggattgtattttctttttcaagtcatcaatgttttctcctgatgcacactgttcagaagacactgacaatgtaccactattaattgccgccagttgctgctctagctgcttcaccttttcttgcaactctctgttttcagaacacttatcaattagctgttcctgaaggacacggttgtctgcagattttagctccaactcaaaggccttttcattacattgagtcattaactttgtaactgtctgctgcatttcaactagcgatgaattagccacaggagattcttcagtctcaattaacctttgttctaacaccctcattagcttccttttttcttggatctcacgttccaagttctcaatctgaattttggagccttcagggtcatttacagattgctccatcaagcgcttcagagtgctggtactgaaagcaatatctccggctagcattttgactt

SEQ ID NO: 29105 - DNA, 447 bp, Glycine max
  Clone ID: jC-gmst02400004d09d1
ccccataatttgcttaggctctctctccccctctctgatttcgttcaatctctggaatttgatgtataatctagtaacaaagaatatctgattctttttttattttatttgatgtgtgatagttgttgatgtggtgttgcggtagaattggcatggagccggttacaattcttgtccttcgtggccaatgtggtattgctacttgtcgtcattctctttttcttagttaaagctgccagccttctcaattggtatttcacttcctcaaaatcatgttgcatttgttagattactgtctctgctacattcatatgcttgatttccgatattaaactgttcatgattgaatgaaaaataaattcattttggggaaaagtactttgattaacacattgcttacaatctgaatacatgttccatttcctacaattaatctctctaactatc

SEQ ID NO: 29106 - DNA, 483 bp, Glycine max
  Clone ID: jC-gmst02400004d10d1
atatataaaatcaaacaatttggaattttttaaaagatcagtctcaacaaaagtttggccaacttaaggggggaaaaaactcactactcggggatccataatgtcaaaacagaaaacactacaatatgtttataagatatggtaaccgaatagaaatccagcatttccatccaattaacaaaattatgctttgaggcgtccaaagaacttctgcttctcctgtgtggtctggaagcgaccatgcccaaactttgaagaggtgtcgataaacttgagcttgatctcctccagagcaacacgagaagtctgcttaaggagggattggcgcaatgtaataacccttttcttgggaccaacgcagcatcccttgaccatgatataatcatccttaacaacaccatagtgagggaaaccacctattggggtaatgtctttctcggtcctatcaaactcagtaagagcagagtgagattcatctccagc

SEQ ID NO: 29107 - DNA, 530 bp, Glycine max
  Clone ID: jC-gmst02400004d11d1
atatgctattcaagccaagaaaaagtttgaatatctatataaaatcataaatgtatcatgatatgaaaacatcaccaggagatgtatgttactataagacatatttgttggccaatagaattacgacatgaccatgtgcttgttcccttccctaatactgttggtcggcaaacgattcataaaaatattagactaaagctattaaaaatgactaggacatgtgtttggcagcacttccactttctaattcctcatggattacgggcgttaaccctctatagggactataaaactgttcttgacaatgctaaaacaaagcccattaaacatactagtctttgctcttgctccatacaggggacatttgtctttgtccgacattagaactcacaactgcacttccattttccacattcatcagaggatcagattcatcttctcttgcctgggatgattgagatgcagcttccacagttttttgctgattctcgagagtgcaatagtaagaatatagaatcatcccaatcatg

SEQ ID NO: 29108 - DNA, 391 bp, Glycine max
  Clone ID: jC-gmst02400004e01d1
aaaatgtgccgaaaaatatataaaccacacgaatcaataattcaaagcagaaaagggaggggggttcaaacactcgagaaccatggacgaaaaatggagggcaaaaatgtctgcaatcagaatcaacaaagagccgagtacatcagcaagtatataataatccaaaaactccatcccctacacagaagagacaccaaaaaaaagcttaatgctcctaacagggtaacaacaccggttcccgaaaccgatttattcatacttctcatttttgcccgagcaagaagacactaaatcgcagctagacaccagcacataatgtctagacaagctacttttttttcagtacaaccttaaaaagacttcttggcaacgaatacaagcaggtcaatga

SEQ ID NO: 29109 - DNA, 419 bp, Glycine max
  Clone ID: jC-gmst02400004e04d1
aaaaaaagcaaaaaaacccccctttttttttttgaaagggaaaaaaaaaattttttttccccaaagaggggggacccccccccccttttttttttgggggggggggggagaaaacccccccaaaaagaagaaatagtggggggcaaaaaaaacccccaaaaaacccccgggggggggttaaggaaaaaaaaaaaaaaagcccccccccctttgggcctttcccacaaaaaaaaaacgggggggaataaaaaaaaaaaagggggcccccccttgttttttttttctgttcccccggggggggggggggaaaaaaaaaaaacctcttttttatataattaaaaaaaccctgtttggcgggggggcccctttggggggagcccccccccccccccacaagaacacagggggggggggggggg

SEQ ID NO: 29110 - DNA, 442 bp, Glycine max
  Clone ID: jC-gmst02400004e05d1
agaaaaggaaagggtggaaggagatgcatttatttaaatagaagaaaagaaggctaaatcatagaggttatacggaaccttgcaatcctaaagtaactgatatcatgggatttagtttctccatggacagcaaggtccgtcaatatcctgccaataaccggagccatcttgaagccgtgaccagaaaagccggctccaagaaccacatccttcccaaagtccccacccaagaaatcaatgaggaaatcctcatctggcgtcatggagtagatgcaagactgtttgatgacgggctcagtggattcaaccatccccttgaacgtaaactccacccattctttgagtttttccatcatcaccgctgctccccacggcctcttatccgggtcgcacggctcccccccgtgcacaccaaccttaatcagccccggaaactccaacg

SEQ ID NO: 29111 - DNA, 235 bp, Glycine max
  Clone ID: jC-gmst02400004e09d1
gaagcttaaaaaaatctttcacaatacaaaaaatggcattatggggggagggaacaatttattttccttcgagattatcctagatacaaatgaggcttaatctgatacaggccaccttaaaggtgacctgcaaaagggatgtcaagaccccataaaatttattctaaaaaccagaaattaaactgataaactttgctatgggcacaatgaaacaaaagctttttacttatgagaa

SEQ ID NO: 29112 - DNA, 424 bp, Glycine max
  Clone ID: jC-gmst02400004e10d1
ccttcaaagtcctgtactccaatttgacatccctgttgttagggtcaatctcaagagctttcttaatgtcaagttcagccaaatccaagtcagttaactgcatatatgcttgggcccttctatagagggctttaacatttgtactctcgaggtctaacaccttggtacacaatttttctgcttccttgtagtcttttaacttcaacttgcaagcagcattgttaagattgcaggcaaccttcaaggtcttggcctgctttttctcctcctcaccgaatgaggaatcatattctatgtactttacagccttttcatatcttttggaagctcttgcatgcttaccagctttaaacaacacatttccttcttctttcttcttaccagcagcttcaagtttctcttcagtgttcaaatcccaggactc

SEQ ID NO: 29113 - DNA, 353 bp, Glycine max
  Clone ID: jC-gmst02400004e12d1
aaaagccccatgataggatttaatattagtaacatttgaacattttagcaattctcaagaatttcaaccccaactaaaccaaaacaaccaacagtaaagcatacaaaaattggggggttcaaaatggttgacaaaagaaaacagccccttcacttgcaaatactttttgggggcctgcaaatttagctgtattgaattcataaaggggcaacaggggtatttgattgggctccccattcaggccaagatccatcataaactggaacatcagactttttaagacgatgaaaaccccatgcaagaatgcaagcagttacccctgttccacatgaagtcacagctgggctttccaa

SEQ ID NO: 29114 - DNA, 446 bp, Glycine max
  Clone ID: jC-gmst02400004f02d1
acaaatgaatgtcatcttgaattgcacaatgaaataactcgaatgttacaccgatagtataccatgtttctgtttgtacttaagtgtagttctttttccttcccccgatatttccatgtgttcaattatatctatatgacagttactaaaaatacaaaatgtcaaactttactagcccaaatatcatacaatggacatcttacgatacaacaacgtacaattttgctttgcctttcagaactgttttctgggctagcaagttaagcttgtgcttgattcaagggttgccttagcaagccacaataagccaggatcattccgtttcaacaccaagtaagcattttcctttccaagattgtcaaacataacatcttcgctgaagccaaccaaaaatagaatttccaaggcagctttattatttacaatattcctctcaatgactggat

SEQ ID NO: 29115 - DNA, 474 bp, Glycine max
  Clone ID: jC-gmst02400004f03d1
gcacaccaccaacctcttgaattctcaccaaattaaacagtggtagcacactttacaaataaattaagagaagaaaaaaaaagcatagaatggagagagagaaaaaaaagagagatagaaaaagaaagaaacatgaattacaaaggccatgacttgaatcagatcaaaattcactggaaagaggtgcatggtcagagcgaatgaagacattgccgtagataaggccagccaaaccaccaccaataagaggtccaacccagtagatccagttgtcatggaagtcaccactaacaactgcaggcccaaaggagcgtgccgggttcatcgagccgccagagaatggccctgctgccaagatgttggcaccaacaatgaaaccaatggcaattggtgcaatggttcccaatgatcccttcttagggtctggtgctgtggcatacactggggacaccaaaccaaatgtgatgatgatct

SEQ ID NO: 29116 - DNA, 461 bp, Glycine max
  Clone ID: jC-gmst02400004f04d1
cacatataacataaattacattcattttctactacttattattccactctgatcaaatacatagacaatttcatcaggcaaaccatacatagcaggtaccgcatatgaattcgcccactactgaagcagccacctccatgaatttcctttataaattgtcatcaagtatgggggacagcaacagcccttgaacaaactcgcatcttttttccttctcctccttatccttaactgacaaggttgatgtctccacatttcttgttgacacagtctcatctaagcattttttagatgatcttgtctcagtgtgtaagtgaggctgagaactggcatgttcattagctaaaggcaatataaatgatgacaacagtggatctgcattagatgaggacactatacatgaagatccgccaaaaagggattgcaaatttccttctcgtagttccttcctcaaaaagata

SEQ ID NO: 29117 - DNA, 425 bp, Glycine max
  Clone ID: jC-gmst02400004f10d1
acatggccatactactacaacagagaatattaaataagaaacgtccaaagtggccttattcaggggtaatatgaacattaaagtggattcgtcgtggcataaatacgatgatgtaaaagtaatactatccttgtaatattacattacacacaatctgcacttagtggacactggatggatgctatatcattacataacacacgaaggctgcgaataagtagctaatacccttttcacgaagaagagtgctggccctcgcacgcggggctatcgtcgaaattcttcgatggatacttcgccgggaccataccgacctcgaagacgatatcatcgccggaggagcggattccggtgatggaccaccacttgaagaacgcgcgaaccctaatcccctcgagttcagcgattttccccttcacgatctt

SEQ ID NO: 29118 - DNA, 400 bp, Glycine max
  Clone ID: jC-gmst02400004f11d1
aggaaataaaaatagcgttctatatatttaggggggttcgctctataaatacaagagattagaacatattaaaggaatggagattatggggtgtgctggatccacattagtagatgacacttcgacttatgttggatgatttgagcaccaacttttggattaggagtgagcacagtgactggagcatgtgcataggtaggagaaagctcaaatgagaagcgttgtaagagtaatgacaaaaccaacttcgcttctaataaagcaaaattttggcctaagcacactctaggaccccatccaaatgggaaaaacacaacttggccttttgttgcctttgctactccttcagcaaatctttctgggttgaactctgtagcatcatcaccccaaatatcacgat

SEQ ID NO: 29119 - DNA, 410 bp, Glycine max
  Clone ID: jC-gmst02400004f12d1
aacccaatcaatataattttattttctttctttccaaagaaaaacaaaactgataccatcaaacccaaaaaatagacttcacaactatacatatacatatcaccagaaagaatgtgtcagtaactcccagctactatatctatgcagaaatttatatattttctcgagaattctcttcatttaccaacaatattaatcttcaactataaataattatcggctcaaataatgtcagtgcatgaacctttgaggcaacttcactctttaggcaactgtaccaagcatacgcttttctggttgatccgcattaaggggaaaaatatcaacaggggcaggtgtatagtcaacaccagtttgcttaaatctaccattacaggagcctgcatggtgatcaagatagattgcaacta

SEQ ID NO: 29120 - DNA, 409 bp, Glycine max
  unsure (1)..(409): unsure at all n locations
  Clone ID: jC-gmst02400004g01a1
ggaattcggctagagctcgagccgattcggctcgagcttttccagtttcaaagaaagacgagtgctgacgcttgaagacagtgaaggaaaaagctaacaaattcgttaatttctagaaacctctcatcaaaagtgtctttgatccgtgagaacttaaactcagactcctaaaatagtttgatcactttcgcattgacctgtaaccttttctctccggataccaaaaccgtaagttgctgaacatggacccgcaatcggcggttcgggcggaactggagccttcggttccgacgttctccccacggttcgcgctcacatccagttcgcagcggaaaatcgcgatcgctgtcgatctgagcgactagagtgcctacgcngtacgctgggcggtgcagaactacttgcgacc

SEQ ID NO: 29121 - DNA, 442 bp, Glycine max
  Clone ID: jC-gmst02400004g12d1
ccccccctctagtagtcagtggtgggaagctgctcgtgggtgtggctgataaagacaacctcgtaaacaaggccagcgattccaccaccgatgagaggcccggcccagtagatccagtggttggtccaggtccagctcacgacagcaggcccaaatgtcacagcggggttcatggccgctccagagaaggccccacccaacaaaatgttagcgccgacaatgaaaccaatggcgatgggagcaataattcccaaattacccttcttggggtcaatggcagttgcgtagaccgtgtacaccagaccgaaggtcatcacgatctccaacaccaaggcgttgccaactccaactccagcggagagtccgaatgctggaacagtggaggcggtgaccaaggccacgaggagggaggcgacgatggagccgaggagctgggcgatga

SEQ ID NO: 29122 - DNA, 304 bp, Glycine max
  Clone ID: jC-gmst02400004h01d1
aagggtcaaatcctcaattggatacctaccttttttcccaaaattttttcaaattttcccagagaaagaaaactttaaaagccaaaatatttggcaaagtaatttaatctatccccaaattaacaatggggggccactccaaactcgtttcacttttatttgaaggccaaagtaattgaagtattttggctacttggggcctcctttattaaaaattttttgcaggattcaaaaatggaacggccaaaaattttagccaagcaagggaaggctcaatttggggcaaaaaatggggagccagggg

SEQ ID NO: 29123 - DNA, 458 bp, Glycine max
  Clone ID: jC-gmst02400004h02d1
cgagaaaataatgtaaagcttccatattgaaataatgtatctgtcagttacaacagaacttcagaaggggaaccaaatcttgttcatccagcaccctactgccatgactgcgtagggaaccaacccataccctgaaacaaacttccttatgcccactagaacttctagtttaagcaaatgcaccagcacatgcagtggctggagcagcttccagctgtttctttgcagtactgtatttttttgttataaacctaaagaagtccctccatagcaactcaaacatcaaccaatttgttccagttctggacgagccattaccaccatcattccggttggacgaagcagaaatgactctgccggcagtcttcttcagttcttcatacattgtgcgaggggaaaggcattccattgccaaccacagagaaattttgcaggagaaggttgcaccatatatactc

SEQ ID NO: 29124 - DNA, 456 bp, Glycine max
  Clone ID: jC-gmst02400004h03d1
aagcacaaaagacgtggataacttgatattattttattacatacatgcatagatagcctgctctcaaataagtcggcaggaacaaagatagagagattcaacgatcttcaaatttcacatttgccagaaatatataacagaaaagaggggtatgggatatgagttaagttttgatcacattcaactacactatcccaaaccgttactcttaagactttgaacttcacttgtactctaggatcatgttgttctcaggagctaatccaacacaagccctcaggatgttttccagcatagctcgctgctttgacaacgcattcaccactggtgtacccggtggaaccagaggggccttggtcaggtaactaaggatggtcgcaactgggtggaatgagtggaattttccctcattttcagctttaaactcgattcgagtgctgagctcagcaagaagga

SEQ ID NO: 29125 - DNA, 470 bp, Glycine max
  Clone ID: jC-gmst02400004h07d1
accaaaccatcatttcctattttgtttttattagtttacaacgggtatacctgtcatcaaactatcaccaatacactgaaatcataatcataatgtaactgataacaccaccagcattgacaaaataaaatggttaaaaaaaagaataaaacaaaataaatcacacaaatcttgtaaaaggctttcttcccaccacccttgcgggcaaagacaccgttgaatccacactcacgtttcctatagattcaagtgactgaaatttatctgggactctttgatccttgtttgagaaccctttagaccacttgaaagacccaattccttgtgacaaagggaatgagagtctcctctttgaatcagtactagttggagttccaccaagcctgtctcttggattactactagcacgtactttggccctggcggaagggttggagccatgtagttaggcactgaaaatggtgggcagc

SEQ ID NO: 29126 - DNA, 412 bp, Glycine max
  Clone ID: jC-gmst02400004h09d1
aaaaaagcaacataaaataatttaaaaaaccattacactttttttaatagaaagggggagaatataaaattttacaagattaaaacatttgattttggattgggcatgtgctataagaggcaggtaaatttgatattgcagggatgacatatttgaaattaagcacagtttgtaaaacatgcatgagctaagaggcagctaaagtaaaatgtttttttttattcctacataatattgataatgcagccttttttcaagcaaacattttccattggtccgtcagttaaaaatccttgacgtgcattattcatcaacgacttccgtctcaagctctccactatgtagtccgcatacaagctcatggatctattaaccgctttaaaagcaactgaggcaggcaaaaaggcgttta

SEQ ID NO: 29127 - DNA, 409 bp, Glycine max
  Clone ID: jC-gmst02400004h12d1
aaaaaaggaaagcccctttgtaattagaggggaaagtccttcttaaaagagtttttgaaatttttgccccccccttttttaataaaacagtccttttaacccagttaacaaagacccccaaacacctttgaagccctgggaaaaaaaacaagaagcttttgggggcattccccttttttttttaaaattcaaaggggggggtccccaaagctttccccccttttttttggttaccgcaaatttgcaatttgacccaacatttttcccattttgggggctaaaaggagggcccttctgggggggggacaaccttccggttttgagggggggccatttcctttttcagggggggcaaaatgtcccccatgggggaccctttttgccaatttggaaaaaaaccaaatttttt

SEQ ID NO: 29128 - DNA, 371 bp, Glycine max
  Clone ID: jC-gmst02400005a01d1
atcttcatcttcatcagactcatcaccccaacgagccacatgcttctctaagggagcaggcttggtaggctttttagctttagttgtctgacttgtttcagttctttgtgccacaaccttcgaatcaggttcatcctttacattaacagattctcttggagatttcttttcttgttccatagttgtgttcgagaccatgggaatatttttggaagccctttcagttattgcattaggcattacaagaggctcttcatcaggaccaagtgatcggccatccagggtttgcagtcgcctcagcgtactcctagtgttgcatcggacatagtcccttctgaactcatcatttttgttccatagcttcatgattc

SEQ ID NO: 29129 - DNA, 494 bp, Glycine max
  Clone ID: jC-gmst02400005a02d1
atctccaaggacaaatagtagaaagggaggttatgtttttcttacaaaagcacaagagtataatgcatcttttacgataattttcttacaaccttgaataacctctattgtcttcgtattgctccatgaattcatcattgaactttttgaaactatccataatagcgggcatgtcttcctcgtctggtaaaatagtagtcctcaaatggaagaccccttctctctgtccaaatcctgaaccaggaacagtggatatgccagtggcttccaaaagtttgaggcagtagaaaacatctggaacctttgcagcctgtttagcagcctctaaagctcttggcggcaaacgtatttgagggaatgaatacatggcaccttcagtaaaattacaaaccacatttctgcaactgttgaatccatcagtcattagccttgctcttcttctcagtgattcaagtatttcggtgctctccctaacaaatttgtcataagaaata

SEQ ID NO: 29130 - DNA, 401 bp, Glycine max
  Clone ID: jC-gmst02400005a06d1
agatagtattaaaaattttgcgctgataacgtatcgaatttgtactccccctcccccttattatatttgaatatatggcaatctttcagccaacaagtgaagcataaatctggtagagctttgtttctataattaagagaccgaaagaaaggcttgctgtccagctacatctgaagatttgcaggcatgtattatattgcatatatctgtcgtctctaggattttctctgcatggtcaaaaatcaagggtccatactcgaaaaccattctcttgcacttatttgcatacttctccactgaattgcacaccttcagtaatgtctcaattatctctagcttagtgtcactctccttcaacttttccaatagagttgaaacagtatctttggcaaactcacagc

SEQ ID NO: 29131 - DNA, 415 bp, Glycine max
  Clone ID: jC-gmst02400005a07d1
ggggggatgaaactgggatatgcaatcgttattgcgcgccttgtaccaaaacatttaattttcatattttacaacaaaaaacagactttaaaaatctgccaagactaaataacgttaccagccaaaacctaaagggtaaatttatcacgcagttataactgcattatgcaaacaaaagataaaaaccatgccgaaattatagaacctttactaccataaattgcactactggtgagcacattgcactcgttgaccagatgggtcatcatcatcttcatcatatgcctcgcgatattgctggtgctgctttcggctcatctcctccttaaaggtgacatcatgcaaaggggtctcctcacaatcatccagctccatgtttgacacatgcttgctgctcttttgagggaacaccttt

SEQ ID NO: 29132 - DNA, 392 bp, Glycine max
  Clone ID: jC-gmst02400005a08d1
ggggggggaaaaaaacccccccccttaaattggggggggggggaaaaaaaaaaaaaaaaacgggaaaatttccccccattttttggggccccaagggaaaaaaaacccccccaagggaccccgggggaaaaaaaaattgccccccaaaaaaaaaaaaaaaatttgtaaattggaaaaaaaaccaaaaattaggggtttttggggcccctaagaaaaaaaaaagggtaggggggggggtttaaaaaaaaaagggggaaaaaactttttcccaaatttaaaaaaagccccaagaaaaaacaaaggcccccaaccccccttaaaaaaaaaaattttgggaaagggaaccccaaaaaaggggggccctgggctccaaaaaaacctttggggggggg

SEQ ID NO: 29133 - DNA, 544 bp, Glycine max
  unsure (1)..(544): unsure at all n locations
  Clone ID: jC-gmst02400005a09d1
aaaattacaataattaatggtatacatatatacgatataattaatgtaccaattaattacaattaccatgatgcaaacatcttgagttgacagaatttgatgtaaacaacatatataaagccgctagcataaggagaagattaattgccccaattttaaataatctcgctgctcccgaatccaacattttttcccgatctgattagcagataagagacagaagttcccaagcagcatagtgagaaccaaaataataacacaataaaggctctatgcaatttttgagagggacaaatccctttcaaggcacttgagtgaggtagggttgacatgcatgaacaagtagttcccagcaaaaaggtcaccaaaatgaacttgaccttccttgaatcttttcatcactttagcatatgaaattctcatggaagaaaccaacctagccctttttctccaaagtcttctcaagcttggaattttgagtctaaaccttctcctaatgggaacccttctaaacctgaaccagcttcttgacctnctttccctt

SEQ ID NO: 29134 - DNA, 528 bp, Glycine max
  Clone ID: jC-gmst02400005a10d1
ggtgtcaaatcagaaaggataagatagttgtaaataactcaaataaaaagaagaaaaaagtggtgtcagcctaacattgagaccatactcagaatgtttgttagtaacaataattgtcagcactgcatcagttgccatagactgtgacagtcaagtagactggaagccactaaacagaaagcaacaggattggttgttggtactgtttgtatgattggagcaacaggcagctaaaaggcacctattcaaacagagatgaccgccacacgcatcctcaccacactttgcaagtattaaccccaggcacaagaggccctaccatgagatggacgggaagattggcagacaaagagattcatttagttagtcctgccaataataaaatcatcatcaccccccagcattttgatcatagtgagagtctcagccactagctcttgaatcttctcctttcatcttggcaaaataatagccccacaacacatcaaaataatatctctaggcccctcttccaagttctaacacatg

SEQ ID NO: 29135 - DNA, 581 bp, Glycine max
  Clone ID: jC-gmst02400005a12d1
acttcaaagaaggaaacctacacaaacttttttttttgtaaatggaagagataaatacacaataataaagtaaattaagtatgcatcaagaaacaccaaagaaacccacaaggctgtcatatgatgaaatgaaaacaaagcacaccacaatcatgcatctccaaccaacaaaaaagccttgtctcaatcttaaatatcaatgagcaccactctccttttccttttccttttcctcctctgtcttggagtgataaccaggaagcttctcttttatcttttctaatatacctttcttctccttggcctctccttcatgatgagcaccttcaccatgctccaatgatgcaacaggtggtggtggaggaggagtagtagctgtggcctcctctgtcttcttgtgccctggtagcttctccttaatcttgtcgaggaaccccttcttttcctcagcatgtgctgtttcaacaacctcaactttctcaacagggacacttgtgtcctcatccttgtgatgatgatgatcaccctctaatttctcctcgatcttctctttcagccctttctttccttctcttcttctt

SEQ ID NO: 29136 - DNA, 404 bp, Glycine max
  Clone ID: jC-gmst02400005b01a1
cttggaattcggctcgagtcaaagaaggcgtcttcataaacgcctttcttctccgtttccgtttcctcgttcgaattcgctttttgatctgcgaaaatgagagagtgcatctcgatccacattggtcaggctggtatccaggtcggaaatgcttgctgggagctctactgcctcgagcacggcatcgggcccgatgggcaaatgccaagtgacaagacagttggcggtggtgatgatgctttcaatactttcttcagcgagactggtgctggaaagcacgtgccacgtgcagtgtttgtagatcttgagcccactgttattgatgaagtgagaaccggaacttaccgtcagcttttccacccagagcagctcatcagcggcaaagaagatgccgacaacaactt

SEQ ID NO: 29137 - DNA, 308 bp, Glycine max
  Clone ID: jC-gmst02400005b02d1
aaataaaccacaacccctttctccaataaaaaatttgaaaaaagggaaatttccttcctccaaaaaaactctataaagggacaaaaaaaaaaccccccctggaggggaaaaaaaaaactttccaaaagcacattttttgtgagtctcgggaaaaaaaaaactcccttttaaaaaaaaaaatttgccataaaagaaaaaaatcccctaccttggcacaactgggcttaaaaaaaacccttttgggtttttcttcccaaggggggggagcccggtctgtacaagggccctggccctaccctccttttttc

SEQ ID NO: 29138 - DNA, 359 bp, Glycine max
  Clone ID: jC-gmst02400005b05d1
accagaaatttcttaattattttccattgcgtcaaaactgcaaccttgcataaccaaaaaataaattgggagcaaaaggagaaaagggtaaaataaaaccttttaagctttgatgagatgacctccaacctcttacagaagataaagttgtcatggaacacccttattattcatccacacctaacaagacatccgttgaagggactgactaacttcacaacaatgttaagcttgaggcttctcaaacttgagtggctccacaccttccccggtgaagccagggtcatcccttccaaagtgttcataagccgctgttttgaggaacctatggtctcccctcttaaggcccaacttaatgg

SEQ ID NO: 29139 - DNA, 373 bp, Glycine max
  Clone ID: jC-gmst02400005b08d1
cttccagaaatagtatttaatattataagcagagattcataattcagattagccgaactttatacagaagcgaccaattaccaaacattaaaaaaaaaaaaaagaagcaaccatgagcttaacacacccatcacaagtccaaaacacttgaacttgctgaaaggcaagacatgaccactttattctaaggatgtttgtttaacacaaaacaccagagggcacgaaaaccatcacagacataatacataagtttttagctacacattaatagtttatcattattcctaattaagggctatctctgcttgaagcttgctctcccaacacctcacttgcaagtgcaggggttgcaggagcaatttggtccacattt

SEQ ID NO: 29140 - DNA, 531 bp, Glycine max
  unsure (1)..(531): unsure at all n locations
  Clone ID: jC-gmst02400005b09d1
caaattaaacacattgttgatgttgatattaatacaaacaaaattatatggtgaatcacatatttatccatgcatggttttatatgaccttagcattacaattcgaaactttccacatatggtgtcacagttcgtcacgatagagtatttcctccaacaatttcttcttcttacaaccccaattgcatttagtgttgcacaaggaattaaacagtgcaagcctagtggattgaagttgtataatgcctgaggtggaaggggattttgagagaacaattgcatacccatcatccatgttatcggttccatcaggaaaaaattgccacaaaaggcttccagccccactcccccctttctttgtggagtttaggatggtactgtacacagtgcttataactgtgtctctatatgatgaattgtagccagggtctttggaagatacaccaaactcagcaaaaacaactggcattccaagatacttttcagcatcctctatgtgggcttccatnccatgatttataaatgggatat

SEQ ID NO: 29141 - DNA, 485 bp, Glycine max
  Clone ID: jC-gmst02400005b10d1
cttccaaatactcccacattcttattgtgtagctgccttttttccctttatattattttaatatgattatgtataattgagggataaaaagaaaatacaaaaaaaaggaagaaaaaagatccaaattgttgtttttttaaaagagagggcacaccacgcgcttggttggcacagcaatgagtcgcgtggatcttggagcggtgagtccgaacacgtcacccatgtccatctcacttggcttcatcccatctggcaattcccacgtgaagcagtgaaggaggtgcgccaccgccaactcgagcgcgtagagccccaacaccatcccggggcaggatctgcgacccgacccgaatggaatgaactcgaagttgctccctttgaaatcgggcacgcccggtttaagaaaccgggcgggcttgaagctctcgggttcctcccagctgttcttgtccctcccaatggcccacgcgttgatcatgacacgc

SEQ ID NO: 29142 - DNA, 394 bp, Glycine max
  Clone ID: jC-gmst02400005c02d1
atacaaaccagaaatttctaaattatcttcttttgctacattaattctaaccttgatatcaaggaaaatatcatttcccctaaatacaaaggtgcaactcggacgctatattcctgccatcattttcactccattaacttacacctaagaaaggctgtgcggccctttatttgaggaattgccttttagaagtgaaacttgcttcatacccaaccaaagccgaacttagagagctacgcagctccacgaatcgtctcgactaccccacccatatacttccgtgctgaccagggaaaagaacactttagtctttccaattgatgtggacccaggcgatgttagaatcacaggcaattctttttacttggggagcgtatataaataagagccaggg

SEQ ID NO: 29143 - DNA, 470 bp, Glycine max
  Clone ID: jC-gmst02400005c05d1
ggtaccaaccagataatggtaggttatcttatttggccccactcacggtaggccagcgtatggggggcaaaaactttctcccaggggttactaacctttatggacgcaatcttgctgctttgatttttaattgatgtgcttgcaactaaatatggcagtgggctcctctttcctaagtggtgctttggggcggccaaagaagttttgctcctactgtgtggtcagtaagcgaccatgcccaaactttgaagaggtgtcgattaacttgagcttgatctcctccacagcaccacgcgaaggctgcctttggagggatcggcgcaatgtaatcaccctattcttgggaccaacgcgaaatcctttgaccttgagataatcatccttaacacaccatagtgagggaaaccacctattggggaaatgtctctctcggtcctatcaaactcagtaagagcagagtgagattcatc

SEQ ID NO: 29144 - DNA, 453 bp, Glycine max
  Clone ID: jC-gmst02400005c06d1
accaaacagtttgtacttatttaacagatcaggctccacaaaagtttggccaacttaaggggggaaaaaactcactactaggggatccataatgtcaaaacagaaaacactccgatatgtttataacacattgcaaccgcatagaaatccggcatttccatccaattaacaaaattatgctttgaggcgtccaaagaacttttgcttctactgagtggtctggaagcgaccctgcccaaactttgaagaggtgtcgattaacttgagcttgatcttctccagagcaacacgagaagtctgcttaaggagggatcggcgcaatggaataacccttttcttggaaccaacgcaccatcccttgaccttgagataatcatccttaacaacaccatagtgagggaaaccacctattggggtaacgtctttctcggtgctatcaaactcagtaagagc

SEQ ID NO: 29145 - DNA, 482 bp, Glycine max
  unsure (1)..(482): unsure at all n locations
  Clone ID: jC-gmst02400005c07d1
gtacatgagaagggatttgatttgatttaaccgattaatttacacagctgtattgcatgttaaattttacatcatgagttaatataaaaaaattatttcaaaaaccttcacaatgccaggttcccacttcccagcgtgttattagaaacacaataagaatagaaggaaaagaaaaggcatataaaattggaagatcatcattcgtaggtaagcaattagcaatttaccattaatacttctgcaccatcattttcaaaattttgagcaaaaaaatggccatttcacggagcaaccaatccttcaatggcataagatagagattgtgccaagtcagctttaaatagcagtgtttgcaaagcgtgcaacatatcatattctggatcaagtctttgctgccaaccctccagaaccaatgtggtaactatcacagcgcanacattgccatctatattgactttacagcgcctaacatgctcaagcaa

SEQ ID NO: 29146 - DNA, 449 bp, Glycine max
  Clone ID: jC-gmst02400005c08d1
gataataataataagtctaacattaaagttgcatgaaaagagaaatacatgatgcataaggtagttcatgttactggtatgctccggtacagcggagcatgcagtgcagtttgaagctgaggagttattaaacagctagttggaggaaggaaaccaaggacacacctgagaggctgacacagtgtttatttaatttagtattataatatgatgtcctccaatggttgttaaggaagggtgtgaggcttctcgaaatcctcgagactggtggggcgaaaccaggccttctcctccagcgcatcagagtgaatggcagaagcagtttggtcaccttcttcggggggcccaaataccccagtctgtggatgtggggcccagtattcgccggattgtgttgccgcctggacacatcgtctgggacctgcccatactggatctcattatcaggg

SEQ ID NO: 29147 - DNA, 596 bp, Glycine max
  unsure (1)..(596): unsure at all n locations
  Clone ID: jC-gmst02400005c09d1
ggcatgacatcgtgtcaattcatcaaacgcatgcaagtacaagcagtaagtacacgatcagccaatcctataaaaggatttgcaatttcaaaactgaacaaatctttcttagcgtcgcagtgtgattaacaatggctaaacaaaaaagaactgaaccttgcgctacagaatctttttgctatatagaaaggtagattcttcagttcagtatgttatttttctttcattacaaattatagaaaactgaacaattcaagcccaattgccatctgggataattcatattaatctttgagcgcacatggtactgaaaaacaaagacaaggggatcctggtcgtggaagaaacatcagttcttgtgttctttttcgatgtcataaagcacacacgcatctgctgctgtcttcatctggataacatttataatttgcttgactgcccatccaaataaactagtacccattagaagagaaaggaatgatatcttttgtaaattacttgatataacgttcaccagtttctctgttngattcttcgcangataaaacaggattaagtaaagaccttacatgagacacagcagtaagccataaaca

SEQ ID NO: 29148 - DNA, 555 bp, Glycine max
  unsure (1)..(555): unsure at all n locations
  Clone ID: jC-gmst02400005c10d1
ctccaaatagcaatatcacccttttcatacttcttttcccaacaaagactttcagctaactcctcaagttttgtttgttctgccttcagatcttccttggatcgcttccatgtttggtagtatgttttccaattaattggggggccagacaaaatccagtatccaccaggccttaagactcggtcaacttccattagatacatgccctcatttgaggtccatggtattagacatcgagagcactgggccatatcgaaggctcttgatgggtatggaaggtggatggtgccaaggacaccaataacagcaggcacccctcgttctagagcaaactgaacttgtgcttcatggttgtcctttggagcgaaggacatagccagcacatttctctttagcaagtaggctccccagcttgcaaccccacaaccagtgtccagtgctgttctgacagaaccatcagcaattggaataactgacgcangttcatcaatatatgcatctgctccgtgagggaacatggtccctccacctggaaaattaaacacatttccctgg

SEQ ID NO: 29149 - DNA, 397 bp, Glycine max; identical to SEQ ID NO: 29032
  Clone ID: jC-gmst02400005d01a1

SEQ ID NO: 29150 - DNA, 295 bp, Glycine max
  Clone ID: jC-gmst02400005d01d1
ggatacataccagaatttgctaaattaacagccgtggctccattaattgaaacttagatatcaaggaacatatcaagacccctagatacaaaggagcatcttggaagcgaaattcctgaaatcaatggcactcacatcgctcatacccaagaaagggagtacggtccgtccttatgagaaccgtcgaaacaatgacgcaccggtatttttctccccacagagaagacatgtcagatgaacacagaaatacggataaccaatggccataagaaacaaaaccaacagactgttccac

SEQ ID NO: 29151 - DNA, 394 bp, Glycine max
  Clone ID: jC-gmst02400005d02d1
cttactataattttcttaattttcttcttttgctccattaattcttaccttgatatcaaggaaaatatcatttttcgtaaatacaaaggagcaactgggacgttaaattcctgtcatagttatcacccaaataactcacacctaagaaaggcagagcggtcctttatttgaggaattgcctattagaagtcaaacatgtttatttcccaaccaaagctgcctttagagagctgcgcagctccacgcatcgttccagtttccctacccatatacttccgttccgacattggaaaggttcattttagtcttcccaattgatatggacccgcgcgatgtgagaaacacgggcaattcttttaccttggtgagaaaacataaataagagccagggtct

SEQ ID NO: 29152 - DNA, 345 bp, Glycine max
  Clone ID: jC-gmst02400005d04d1
ggatacctaccagaaattgctaaattatccgccgtggctacattaattctaacctagacatcaaggaacatatcatgtccccaagataccaaggtgcaacttggacgcaacacccctgatgtcatattcaccccattcgctgacacctgagaaaggctgagcggtcctctatctgaggagttgcctttttgaagtgactcctgcttcatacccaacaaatgccgacattagtgaccttctcagctccgcgaatcgacccgactgcccaacccagatacttccgtgcagaccaggcaacagtacagtttcgtcggtcccattgatttgggcccgcgcgatgtcaaa

SEQ ID NO: 29153 - DNA, 541 bp, Glycine max
  Clone ID: jC-gmst02400005d06d1
ggacaaatagtaaaaagggaggttatgttttggggacaaaagcacacgagtataatgcatcttttacgaaaattttcttacaaccttgaataacctctattgacttcgcattgctccatgaattcatcattgaactttttgaaactatccataatagcgggcatgtcttcctcgtctggtaaaatagaagtcctcaaatggaagaccccttctctctgtccaaatcctgaaccaggaacagtggatatgccagtggcttccaaaagtttgaggcagtagaaaacatctggaacctttgcagcctgtttagcagcctctaaagctcttggcggccaacgcttttgagggaatgaatacatggcaccttcagtgaaattacaaaccacattttctgcaactgttgaatccatcagtcattagccttgctcttcttctcagtgattcaagtatttcggagctctccctaacaaatttgttataaaaaatatctcccggttgaggtggatggagcataactcccataaatattgtgctggaacat

SEQ ID NO: 29154 - DNA, 230 bp, Glycine max
  Clone ID: jC-gmst02400005d08d1
aattctaaactaacacttctaaggtaacgtatggggatggttaaatcgatattaacaggccaaaaattatacagatacaatgagtttcaattgttaaatagcgaatggagaccttcaaatgtatgtaaaacccgaaattgttacacaagaaaaagaccgggaactcctgaagatgagatattttaaaaggaactgcacaataagcctaaaacaagatataatttgaaatt

SEQ ID NO: 29155 - DNA, 488 bp, Glycine max
  Clone ID: jC-gmst02400005d09d1
catatatattattatatatttatcaaatcaaagtacatacaagttacagaacacgtccggcttagactaattgcccgaataaaaagcagatctggcaactgaaatctataaatcgcacaaattaaggaaaagaaagagtccaaatccgagattaggtttgattaatagtaacaaaaaacaacacgcggatggtggatggattatggaagaagaatgatcaatcatctggtggttctgttattgaaattcatcttctcgtagtagcgaatagagaggagcgaaagagagaggtgaacctcgtctttccccaaacgtagcggtttcgatcgaatcatctgcggtacggtggggccccaggccgaggaggaagaggaagaggatgaagatgatgttagttgttgtagttgttgaggtttggagagagggaagagataaagtgcgtggaggcgacggaagccaccgagcgcgaggaccacggatcgcagctg

SEQ ID NO: 29156 - DNA, 523 bp, Glycine max
  Clone ID: jC-gmst02400005d10d1
atatctcattttagattatcattgaagttatatttccctaatggattcctcccttttgatgcttcagcaagggaaagcccctctactttccataaagcaggtaacattcacaacatcagagctgtcagaaaagatatgaatcaaggcaaagtggcatttgttgcacatgatatcttagcatttcaaccttggtctaagggcaaaatccttttgttgaaaccgaagaactcagaaccccaaggggaattttaatcagtagttaaccttgaatagatttgtctctggagagccattccctcgaaattactcaaatcccatcagttaaatttaccaagctccatcttcttcttgatagccctttgaccgtgatagatgaatgaatctagtattccagaaacggtgaaaatacctccaactatggcacaaacattagtaagaaaatgtaagaatgagacattttcttctgtaaaagtaaccttaattggagagaggtcatagaataagaaaaccccgggaagggact

SEQ ID NO: 29157 - DNA, 445 bp, Glycine max
  Clone ID: jC-gmst02400005e03d1
ggaaacctaccagaaattgctaaattacccaccatggctacattaattcttacctagacttccaggaacctatcatgaccccaaaataccaaggtgcaacacggaaggaatccccccgccgtcaaatgcactccattcgctgacaactaagaaaggctgagcgggactctatctgacgagtccgatttgagaagagacacctgcttcaaacccaacaaaggccgcccttagtgacccccgcagcaccgagaatcgtccagactacccaacccagccacttccgtgcagaccatgcaacagaacagtttcgcctgccccaccgataccgccccacgcgatgccaaaaacactggcacccccgttgccttgggccgaccttggaagaaagagccagggcccccggctgctgggaaccctgaggaggatgcgcaaatgataacatcta

SEQ ID NO: 29158 - DNA, 304 bp, Glycine max
  Clone ID: jC-gmst02400005e04d1
gataccaaccagattttgctaaattaccatccgtggctacattaattcttacttagacgtcaaggaacatatcatgtcccgaaaatacacaggtgcaccttggaagcaatccccctgacgacattttcactccattcactcacacctgagaagggttgtacggccctctatctgaggagtcgccttgtagaagagccacccgtttcacacacaaccaaggccgccctgactgagccgcgcagcaccgcgaatcgacccagcttcccaacctagatacttccatgcagacaatgcaacagtacac

SEQ ID NO: 29159 - DNA, 169 bp, Glycine max
  Clone ID: jC-gmst02400005e06d1
cgatccacaccagaagtcgctaaattaaccccgggggtcccattcatccgagctctcatttaaaggaacatatcgctcttcttaaatgctggactcctctagggaaactaatctgctggttttgcattcactccttctttatacaccatagaaaggctgggggcctctt

SEQ ID NO: 29160 - DNA, 301 bp, Glycine max
  Clone ID: jC-gmst02400005e07d1
atacctaacagaaatttctaaatcaccttccattgctacattaattctcacccagacttcaaggaaaatatcatgaccccaaaattccaaagtgcaacttggacggaattctcctgtaatcatattcactccataaactgacacctaagaaaggttgagcgggactttatgtgacgactcgcatttcagacgtgacatttgtatgctatacaaccaaggcctggcttccttacccacgcagctctacgaaaagactagactttcctacccaaccactattcttccgtccagggaaaagaac

SEQ ID NO: 29161 - DNA, 431 bp, Glycine max
  Clone ID: jC-gmst02400005e09d1
aaactataaatccaggtgctttgccctaaaagtacagatttacatttacatgtaaaaatggacctgaggactaactatactgttgtacagaagaagaaattaagatttacatgatacctatttttttcactacttataaggctaatacggtcttagagctgaagcagtgctttgaatgggcctggcaagcctcaagatctaatgctgaattgcagcaagcctttctttgtaactcgatttgtccatcctagccagagagtcagcgattctacggaagaaatccaacttgctttcatggtcgatgggaggcccaaaaacaagatgtttgaaccattgggtaccttgaagcccatcgacgtgcaagaagcctatttccgcaagcgttaggctatcattgaacgctcgcatttgcatagctatagaacgatctg

SEQ ID NO: 29162 - DNA, 475 bp, Glycine max
  Clone ID: jC-gmst02400005e10d1
attaaagagtaaaagtgggtcgggaatatatttttcagggagtacaattgagagcgactaccctttaacctatagcaatggaacaacagagtgggttgccacatttgaggaatttggtcgcaagtgacaaccctgatgtcatgataattatgggggattttttactctatttaccacaaaaaataattacgatgaacgaattgcacagagtaaaaagaatgatttgggtagggggaatgccaaaaccgaaatgatcaatcatttaatcacccaaacaaaactggataatttgcttccatggttatatccctgccttcggccacaactttgcgggggcgcctaaaacctggtcttcgatcttttccgcgcctttcaggaccttttctaacaaccttttccgggaaagtttcaacaggaggtggaggactgagagcaacattcactggagcagccaggcgctccaatatatccctat

SEQ ID NO: 29163 - DNA, 525 bp, Glycine max
  Clone ID: jC-gmst02400005e12d1
gctaaaacaattagcaataccaagtttgctagagaacaatatcttaatattctaaacagcattataatggaaatttcagtgtcattatgaaaataggcagttcagaaacgcgtactaatggaaggacaaactaaaatagcccagtacatccacaattcataacgaagaacatgaatgcccaaaatctcagtaacaccgagattagcattcaacaccttctccctttgaaaacattacacaagggaagttcaatcactaattagaagtatggtatgtttaattttgttccccgtcacctttgggtgcggcttctttaatttcatctgcaccatcatcctgcatgtcagaggtccagagggtaaggttatcacgaagaagttgcatgatcaaagtgctatccttgtatgattcctctcccaacgtatccaattcagcaatagcctcatcaaaagcctgttttgcaaggctgcatgcacgatcaggagagttaagaatctcatagtaaaacacagagaaattcagagc

SEQ ID NO: 29164 - DNA, 414 bp, Glycine max
  Clone ID: jC-gmst02400005f01d1
ggaaaaaagggccctggggtttcccaacccttttaaaaaaaaacatgggggtaaaacccccggggaccaaaagcctaaaacctggggaaaaaaaaaccccccgggggtttttccaaaaattgggggggccccccttttgaaaaccaaaaagggggtgggggcccccccccctttaaaaaaaaattttggttccccccgggccagaaccccgaaacccgaaccccggggggttttttctaaaaaacccgccccttttggaccccaattggaaaccccctagggggggggaaaattgtgggggggcccttaaacggcccaaaacttttcccgtgcggggggccaattccaaccccgggcccaaaaccaatataccccccccggggaacagggcccccaaaaaaagggggcccccca

SEQ ID NO: 29165 - DNA, 327 bp, Glycine max
  Clone ID: jC-gmst02400005f02d1
gtataccaaccagaaatttctaaattaccttccgtggctccattaattcaaacccagacatcaaggaaccaatcatgaccccaaaatacaaaggtgcaacagggacgctacccccccgcctacattatcactccattaactcacacctcagaaaggccgaacggtccactatgtgaagactcgccttggagaagtgaatcatgcatcatacccaaccaaggcctgccttagagacctccgcagttccacgcaaagtcccggctacccgacccatatacctccgtgctgaccaggggccagtacactttagtctgcccaattgatgtg

SEQ ID NO: 29166 - DNA, 290 bp, Glycine max
  Clone ID: jC-gmst02400005f07d1
caaaccagaaatcactaaatttcctaccgtggctccattcctccagacttagatatcgagggacaaatccacccccgaagatacaaaagtgttgctcggaagcaaaacccccgccttaaatggcacccaattaactcacaactcaaaaaggcagcacggtcctctagctgaagaaccgcataggggacgccaggcacgcttaatacccaacaaaggcttcccagccagcccttctctgtacccacgattagtccatcctagccaacccataaactagtgcgcggacaagg

SEQ ID NO: 29167 - DNA, 556 bp, Glycine max
  Clone ID: jC-gmst02400005f09d1
agaatcgaaacgatgtcacttctaaataataattatcaaactgtacacttcattacatataatcgtcatcaccattaccaactaaaagctaaccttcccaacaataaaagcccgaataaaacaatcattgaacaactgaacactcgaatctgcaacaactttataccctgaaaccacaccaaacaccgaaacaacctcttgatttccctacactacacttgtctttatttcttcttatttttcccgtttaaagtaaaccaatgaatctcctgctcaaacttggaacaattttattctgtgcaattccttttggaactttatgagtatgaaaaatcagaggagccacctataagtcatcaccgtgtgtttgctgcttccatgctgcttcttgtagaggccctgctgtctcttgacaaggccatcctgattccggtggtctttgtcttctttgacgaggtagttgtcgacctgtgctgctgctagtcgtccctctgaaatcgcccacaccaccagggactgaccacggcgacaatcaccggctgcaaacacccctttg

SEQ ID NO: 29168 - DNA, 516 bp, Glycine max
  Clone ID: jC-gmst02400005f10d1
acatgacaatttcatatattattattatacttcacaatcagcatttctttgttcaagactgataataaccattaaattattgtcattgtaacaatcggaaaacgagggaaaggaatagaagaaaacaatgaacaacccttgccagttagttgcaccaaccaacaaggcaccaaccatagtaccaatcaaaaggtaaaaagagagagagaccaaatcctactaagaaaagcataactgttcctttccatccaaagggagaaaacatgcaggttttgctcatggcttccacagaatggttgtgtctgcaatcatggaagtaaccacgtatgggtccatgttggaagctggccttctgtcctcaaaatatcccttccctgctttctctgtgtctctcccaaccctaacagaagctccacggtttgcaactccccataagaaggtgttgatgtcagcggtttcgtggcgtcctgtcaaacgacgttcgttgccttctccataagcagcaatgtgctcctt

SEQ ID NO: 29169 - DNA, 497 bp, Glycine max
  Clone ID: jC-gmst02400005g02d1
cactataaaatttcatagcatttgatgtgtacttagaacgtagaacagcaactttgaaatataacacgactggtttggtatattgaaggtacaaagattttgcctatatgatctcttgattcacataaatcccagtcagacaaagtagtgggaaacaacctctttgttgtactacactacaaatatagaaagctgcatttcaattagctctgggttcacagaagattttagttatacaacccggaaagattcagctatcttcttcaaatcattgtagtgtctcttccactgaagaccgctgcctgttactccaaacaaatataagcggttgccagctgcagtggcagtaatgaaaatatggggaggctctagctcaaactggtagtaagttcttccttcatgttctgctgcactaacgctcagaaccttcccttctacattttccccaatcatttctggaccaaatgcattgatcactttctctggggtccaatttt

SEQ ID NO: 29170 - DNA, 370 bp, Glycine max
  Clone ID: jC-gmst02400005g03d1
atacaaaccaaaaatttcttaattttctactgcggctccattaattgttacctccgaaacaaggaaaaaatcatttcccgaaaatgcaaaggagtaaatgggacgctaaaatgcagccataactaacacccaaagaactcacacctaagaaaggctgcgggggcccccatctgaagactcgcctctgggaagttaggggggaataaaccccaaccaatgccgcctatagagagctgcgcagatccacgcatagacccggttggcccacccaaatacttccgtgcggacatgggacaggcccactttcctcttcacaatcgatgggggcccacgcgatgttagaaacactgggaattcttatttgttgggg

SEQ ID NO: 29171 - DNA, 323 bp, Glycine max
  Clone ID: jC-gmst02400005g04d1
cgaaacaaagaattctaactttaccaatgctgctgcactcaataatggcatggtgaagtggaaacgagtccaaaccaagtattctactacattacttggaccaaagaaaactgacatgacccatgctgatgtacttgataacttccttagatgggacgggaccaaagctatatatgagcccctgggacgttagctttgagtgaggaccatgaaatgcgcacagtagtacatacaggagaacatggatgagccacttttgcccatacccccagctaaggtccataaaagtgaccctgacaatgccacataacaacccacttatg

SEQ ID NO: 29172 - DNA, 480 bp, Glycine max
  Clone ID: jC-gmst02400005g06d1
ggacagaaaagggatttatttttctcatatggatacatacattcagagtttacatactaacattacgaagaataatcttctaaatacaacaaaatattacaatgagcagaggatacattaaacggaggccaaaagaaaaaaacgatactttgaatataacacttgcacgtgtaaattggacccgtccaatataatatataataagactatcaccatagtgtagagtgcataaatcatgtcttgaaaaaagacaactgatcctaaatggtgaaaagtgatacaaaacattttttctgctcaacaacgaaattacaactgatcctaaatggtgaaaagtgatacaaaacattttttctgctcaacaacgaaatttcttttgttagatgtcattatcaagacattgagcgggctctgagaaaacgccaaggtccagttcctgttcccatcctccacacgccagcaaacatgcgaagactcatg

SEQ ID NO: 29173 - DNA, 330 bp, Glycine max
  Clone ID: jC-gmst02400005g07d1
ggcccaaatattttgtttataaaaagggggggggggtccaatactggccggactaatttggcatgttattgttgtttcaggtaacatttataccttccttccagccgcaaatgtcacaaactaggtcttaaatctcaatctaccttttccacttatttggggctcccaaactcattatatgcccctactaccctaggacacaattttttataaaactaaaaaaccttacctttttcaactccaacaaccctggttaaaattaaaaaacaaacccctcttaaacaagccaaagggagtgataccatcacttttatggggctggccactgat

SEQ ID NO: 29174 - DNA, 303 bp, Glycine max
  Clone ID: jC-gmst02400005g09d1
cagaaacagaaaacttatcataaatagttttttcatacacccaatctaacaaaaatataatttaatacaatcacgcaaggcaaaaaaataactctatacacgtgaaacgagtttcctctccaatctgataacctctttattccttaagggcgatatgtaactcaaaaccaaggttgtagagtctataatgaccttgctattttgtatgttttaggtgctgaacttctgctcagtggtgcttgctgtggccccaactgatgttacaaaattgcaaactgcacatttcacggatctggctccata

SEQ ID NO: 29175 - DNA, 597 bp, Glycine max
  Clone ID: jC-gmst02400005g12d1
aaataagaaagaatagccaataagcagtcacacgagaaatttccttgaaagtacttctaataatgatggataagcattgatcaaatggcataacaattttatataaaaaagaattgtgctgcttaatcaatgacaaccactttggggtccacttgccagagaaaatacatccatcggtagagaaaagggggttataaatttatattatacaataaaaaaaattcagcatcctttgttcaacgtttctccaagtcttccctgatctagaagttggaactcccgtttgaatctctggattaacctgaactttgttctttgcaacatatgtcatcctatccctaataatattgtgtaatattggatagtagaagcatttcaaatgaataaaataattaaataaataaataaactttgtcagaataaccaagaagcattgccatggcagccctagctcatgctaccatctgctcctgctctatatacagctgctccatccatggtggaagcatctctttactgagatcatattgatgcttctcagcaccaaatatctcagacctcttcgagggaacatctttaaccaatgaatgacccatg

SEQ ID NO: 29176 - DNA, 499 bp, Glycine max
  Clone ID: jC-gmst02400005h01d1
gcttaattaattgaaatggattggatcggatcgaatcttactcgtttacaaaaaaacattgagggggcaacatacatgccacacaaattttaaaaaaacttgaatcatcattatcttcaccattcatcaattcaaacaacatcatcatcatcaccatttccaaaacatttcttcttcatgcttcttaaaagggcttccttcttcccccttcttgtggatccgctcaattgatttttttttctttctttccatcatatcattcattcagaatcactttccatgcttcccatagccttcaaccctcttggtctcttcttggtacttttcttctccctaacttcatatctctcttggcacatatcagtcaaccacgccccgggacttaccaaaagtaagcttctttgaatgattttggccctctttttgggtcgctgaggaagcttgcaacccttcatggccagaaaatcttcctctttctccttgcttgagagagtgatgt

SEQ ID NO: 29177 - DNA, 357 bp, Glycine max
  Clone ID: jC-gmst02400005h02d1
aaaaaaaacgggcaaccatttcaaaaaagctcatgccatttatcggttcataatatgttccaaacttcgacttgggatcattaccaaatcttaccatcaactaaactcatttttagataccttccaacaaaagaggactcactttccaagcaatttatacagttaaaacattcgctttaacatcccccatagttaaatcaaaacaggctatgcagtgtctggcctaatacgtttcctccccaacagcattggtttcttccatgctggtgttatcatgggagtttacagcatccacaactacattatgatttgggctacttacttccactggagcacccatttccagcatgggctccc

SEQ ID NO: 29178 - DNA, 459 bp, Glycine max
  Clone ID: jC-gmst02400005h05d1
attgttcttattatattgttgttgtgattttatttttatactttggaaaactaattactcaacctgaccaacaatactaagagatgatcgtagatagatatattacaaatcccacaatcaagaatcaagatgttatccaattgattgcaccgacaaaaaaacattacattcaaaatgactatgagacagacattgctgcttcaagcctccaaccatgcaaatgagagaaactaggatttgaggaactggaatacaaccagaacgttgagtctgttgtgctccaatagcctgctctagtttttataatgatgatcattgactaattgaaggacgttcataaaaggacagaaatgaagaagaaataggtgcattgttgatctagccacggctgtttataaataaatatagtactgaagcaccttgtaccataacaaacatcaaacccacagtttaatgcca

SEQ ID NO: 29179 - DNA, 473 bp, Glycine max
  Clone ID: jC-gmst02400005h08d1
agattatggagtaaatatcatttatttaaacctaaagaaacacagttacacaccattacaaactcatgtaaccctgccaattaaccattacccctaaactccagcaccagcagcttggtcactttaatacacaactcccagaattttttatgtcaccacgtggcaagcacgctgatgtggagccaagtgttgggcttacacgtaggggtaccctccataatacaaccaaagacttaagcatcatataataatattaataaagtaaacttaagaaattaaaagaaaaaaaaaaaaaagagggtttttaacatggcatgcaaaatgggagacctgatccccacaacttggaccatttttaaacttggttttttcactcacactggccatagggctaagcttcagtcttttcaacaggaacctttactggggtttcaactgactcaactggtttggtctcttcctctgggggtgct

SEQ ID NO: 29180 - DNA, 415 bp, Glycine max
  Clone ID: jC-gmst02400005h09d1
attgaacccatgcatgcaaaaggggagccactttttttggaaatatgccaatcatgtttgaatttaagataccctgaggcataaaccaaccattgggtgacaagctttcggttttgctaaaagcttaattacaaattttcaggtaattaacaaataaaccgaaacttaaaagtactggggggccattaaattaccgaatcccttgaaacgaaaccttccaaaaactgggccttaaaagtaaaaaactcctccaatttaatttatatatatatgccacattatccaattttaggggaaacacacattttccaaagggagaattttcaagaaaagtggatggaggaggaggttgaaaattcttccatatttccctttgggggcttttttttcttcttgaagggatacctttagcctt

SEQ ID NO: 29181 - DNA, 321 bp, Glycine max
  Clone ID: jC-gmst02400006a02d1
ccaaaaagaaactggggttttatatccccttttaccaagggggtccccaggaggggggttttataacccaccccaaggaagggttacatgtttgaaagcctaaaaaaacggggttttcctccaaaccaaattttttttccaatacctttgttaaaccctccatgaacattggggtttcctacaaaaaccccaaagggccggaaattggaaaaaaacccaaattggggggggggaaagggaagccctttttaggcccttggtgttaaaaaaagatgggaaattttgccccccgatttagggctggataaaaaggggtccccc

SEQ ID NO: 29182 - DNA, 493 bp, Glycine max
  Clone ID: jC-gmst02400006a04d1
atatccccataatttgatatgaacctttctatgggtttgaaatttagactacagcttcatgaatcatataatcctcaacataaaaaggtggataagtacggaagagtttttctttttccagagcacaagtcaagaaaaataaaatataagcaaccatactgccacctaaatgatcaaaatacagaggtgaacaattttatagttccatattgaatcagaaatgaacaatttcaaaatattagtaactattatccagacacctaaaaattttggaaacacaaaagccgccattgcatttcgactcagacaatcctctccaactccctagcataactaagtgtctggttgatgagctgcagagagggtatttctttgcaaggtgcagattcttttgccttttggaaaaagacactatcattcttaatctcccactcaggatgctcctctttaatatattccaggagttcctggtctgaggagaacagcaacattt

SEQ ID NO: 29183 - DNA, 491 bp, Glycine max
  Clone ID: jC-gmst02400006a05d1
atgtatctatataatcgaattgaaattacgattctatcaaatctttttatttactttttttttttttaagaaaaaagaaagttctaattattaataaattatatctatatatatatatatacagatagatattctatatcttttatcttaattaatatttgacccctccttataatgtgttatagttttctttatttttaggaacttatccattccttttttaatgtgcccgacaatccgaaagaattctgggggaggggtcatttcgtttttgatctagaataaatagagcttcaagaaatgagagaattaagaatacccacgagaaacactaatccaatccataatgatgtaccggaaaatacaacatttttgttattcgaccaaccttcaggagaagcaaatacaacaggtacactaatcaataaaataaatgaaatagcaattaatgcaaaaacagctaattggaaagcaatagtcatgtttctaat

SEQ ID NO: 29184 - DNA, 473 bp, Glycine max
  Clone ID: jC-gmst02400006a08d1
aggtccgaaagatcactatcattatcgctgaacaatgttatttaacaaaagtatcaaccacaaataaaaacaacaacccaacttcccaatcatcgtcacgtccagcaaaatacattcaaaagctatctaaaatctggggaacccacattggcattaaaaaccatgaccatacaattttttagagaaatattatgggcaccatgcctcttcaacaatcccctaaacgttgcttaggcatcagcaaacccaagctcggaaagcttttggtgagcctcagcgtaatcagcaaagaaggcatcttcgtccgctgcatatttatcaacgagagggcggaatacagggtcagacaaaagagccttgtcagaaggtagctgaaggagaccttccttctaccactcaacaactccgtgaagtatgagttgtcgaaaataagaggattagaggtccagggaccctcaaatccagaacgctcc

SEQ ID NO: 29185 - DNA, 496 bp, Glycine max
  Clone ID: jC-gmst02400006a12d1
acctccaaagatatttctcagtccaagccgcaaaacaacgaatcaattcttgccatgtcatcacccccataaaccacgtcaccattaaatactcgaagaaagtcttgaacctaatctgctgctacttgggccccaacatgagtcagtaaattccaggtctgaagaaattccagctatttattatcgtcctgcagcgtgtttttgaaatgtcatcttcattaccaccggtgagtgaagaagtaaacacaagtgggcgccgagtttaactttaaacccgcttacgtgtcaaaatccaattggcgagaaaccctcgagcttctgaaggatctatcaagcttttcacttaaagcccttaggatctgccacgtggcatcccctttctggacctggctgttgaaaagtagggcactcctcgtcactgggtcccacaggttcctctgaatggtgctgaggtttgtcgctcgcacgcgctcgagtatcttcgcagcctcccacg

SEQ ID NO: 29186 - DNA, 488 bp, Glycine max
  unsure (1)..(488): unsure at all n locations
  Clone ID: jC-gmst02400006b03d1
gatagctcaattctacctggaagcattgtacgaaacatgtaacgtaacgatacaacccatgttacaaggcattttagagagagggtcgtgtcctagaacaactgttcataaagatgccaaaatatataaaagtatcagcaaaccccttaaaaaatgacaatgcatcaaaaataagcagtagcattcacaaggatgctaattgtttcatatttcaataagcaaaatcttggaaccttcacttttcaatttcttgcctcaggaagtaagcggctactgcaagtaggatgataaataatgcaatccacaagctaagcccattagtcttcttctcttcaattattgttaccctcgcacttgaatccatggatacagaagccaccgtccttgaatcaagggagaatgctaaagcagttactatgccaagggtgagcctttttatcattgtgtgaatctgcatatttgtngaatttacaactacaatgtctcct

SEQ ID NO: 29187 - DNA, 514 bp, Glycine max
  Clone ID: jC-gmst02400006b05d1
aaaaaaaaactaagtacattaataacaatattatgtcagctacttagcctacaagacaaacagagtatttctaatatggtttacaatatccttgagatgctaaacataaatatgattatgatctgactatcgatttttggatagggatgcttccagcttttctttcaactgtatagcagcagtctcccctccctcagttcttatggagaatgtgtgaataattttatcatctgtagtcgaaacactggagtcttgagccacaatttgatgctccttgaacgttttaacaacattagaaacagggtgaatatctaaggggcatctcactgtcacaactgtctcatcctctctttcctgaaaatccatatctggcaatgacaatttttggtcctgattgtggatcatgttcttctcagcttccaacaccttgatcttcatctggagatcagtgataaaggtaatggcatcaccaagcaaagatgccttggtccatttagatatgttagggacaaca

SEQ ID NO: 29188 - DNA, 517 bp, Glycine max
  Clone ID: jC-gmst02400006b12d1
gagaaaaatgaacatcttaagcctgattttatacccttgtgcaccaaaagccagcttcaacagagatcaaaatcaccttgaaccatattcacaactcagaatattacagagaaaaaaaattaacaatactactttacttacaaataaacttagcaatactttaacaattttcaaaaagtaaaaaaattaattcttccatacacatatatagaccctctcttccacttgccagtgagaataatggcaaggcaaataatgaagaaactacagtaagtgatgctcttttatcaactgatgatagaactgcaggtggcatgctcatggtcggtgataaacatattttgttcttggatccacaatgagaccttttcctccattcacttctaagtcatgctgaaagacgaaatctgggatggtcaattgttcacggggtatgtatctaaagagctgtagtagtctatcaacatataccactttcttccaaccatattgtcaacagcaactgaagtgccatact

SEQ ID NO: 29189 - DNA, 492 bp, Glycine max
  Clone ID: jC-gmst02400006c01d1
caccccattaaacacaatatacatttccaaaatgacaacactacatgcagggatttctatatgcagtaaaatacaacaatcatacaacaaaattgatatttcagccttcgtttccagaacagcatatatctgaacaacatgagatgcagccgaagcatcctagaccaatgcagagttgtgccaatgcggttgcacattggctgtttatccgggtacagcactggatgcagcacatgcaacagcagtaactgcacaaggtttcaaaacaatttgtggctgccttgaagatttcgggcactttaggcaatttcgattcaaatcctggaggagtattttcagcagttgcagttaagttgccgaagccgatacctaaatgtggtagtaaaatcattctctggccttggacgggtgcctcgaatagaggattgctcttttttgacgcttctttcggtccagatgattccttgactttctttagatgatcagtctcat

SEQ ID NO: 29190 - DNA, 514 bp, Glycine max
  Clone ID: jC-gmst02400006c02d1
aagcacaaaagacgtggataacttgatattattttattacatacatgcatagatagcctgctctcaaataagtcggcaggaacaaagatagagagattcaacgatcttcaaatttcacatttgccagaaatatataacagaaaagaggggtatgggatatgagttaagttttgatcacattcaactacactatcccaaaccgttactcttaagactttgaacttcacttgtactctaggatcatgttgttctcaggagctaatccaacacaagccctcaggatgttttccagcatagctcgctgctttgacaacgcattcaccactggtgtacccggtggaaccagaggggccttggtcaggtaactaaggatggtcgcaactgggtggaatgagtggaattttccctcattttcagctttaaactcgattcgagtgctgagctcagcaagaaggaccaagtccaagataataggagcagctaacagtgaatcctcacatgtgttgtgcaacac

SEQ ID NO: 29191 - DNA, 513 bp, Glycine max
  unsure (1)..(513): unsure at all n locations
  Clone ID: jC-gmst02400006c03d1
ggaaacaataacctaaatcattaattatcaaactgtacatttcattccacacaatgccacaataattaactaagaactaacctttccatcacgaagcctatgaacattcctaattttctactgtgcactaaccttgcacccttagatcgcttctttattattttcccccttacatttatatggggcaccaactacgaaccaacaatgctcaatgaatctccagcagtcatcttttattattccatcttttaagaatagaaaaaccacagaaggctcctaagtaatcactgtttgtttgccactgccacagtgtcccttggttgctgcttcttcttgataagttcgtctggactcccggcaacattgtgctctaaatcttcatttgtgaggaaactgtcaacttgtgctgcagcttgtcgtccctctgaaattgcccataccaccaaggactgaccacgtcgacaatctccagctgcanacacccctttaagactggttgagaagcgaccatac

SEQ ID NO: 29192 - DNA, 502 bp, Glycine max
  Clone ID: jC-gmst02400006c04d1
aacaataaataaaatataaaactaaattttacattaatatcgtatcgtgtccaatgatgcttactctcttgaaatctatcatttcaaggatataaagtaaaagtacaaattatatcgcagtggtgctattataaacaaacgctgctccatatatagaaaaggtaatgccatcaagagatgtagtgaactctaaactatatccatcatccatgcaggtgacgtcatcaagagattagaagaatatgctacacccgttcttgttcttgatcaaaagattagctccaaaaactcgggtagccatttcttttacagtaaaacatgttcacagtcttactgcatataatcttttatccaatagcatgtttatgtgcctttcttcaagtgccaactccaattaacttgagaatgttattgtgaggacttgcccaataaaatccttgaaggaaaattgggaaaacattgcaagcatcagggatataaatcattaatgcatgcatgccca

SEQ ID NO: 29193 - DNA, 485 bp, Glycine max
  Clone ID: jC-gmst02400006c06d1
actcttaacacatacgccttgcataaaattatcaggataataatacaatctcaaattactttacaatcttattatcaatatagccaacatagcatacattatatatacgcaaatatatatatgaagtaacaccataggcataattaaacactcttcaagctcgcacagaatttattcaaaggcacactagaaatggaagatatgatagagatacacaggcatggtgatactttggagcttgaatattaattatatatgaatatttatcatgttcagccaaacagatggtggtgcttctttccatgagcttcctcatcttctttcttaacttcctttttctcatggtgttcatgcaagacaaaaccaccagcaccaacagtagctgctgccgcaatctcctcttctaccttgtgcctgtgagcatgctctgggtctttcttggcctcatgcttctcatgcaaggcataagcaccggcagccgcagc

SEQ ID NO: 29194 - DNA, 504 bp, Glycine max
  Clone ID: jC-gmst02400006c07d1
ccacggaaaaaggaaaggttacattaacaatgtagttttcgaatagcttaccacacttattacccgtctctctctctctctctcctcattcatgaaaagaagtagtactataattttgcgtcgcatactagacttgttactacttagaaagctaatctaatctgttacacaccattatattattatattatattggctcaaaagtattaagcacgattatgggtggctaattggctaattggatgtctccgttatcaccgtccttacccttggaccatgaggcgaatttaccaaaggagccttccatttcctcaagggtcttgccctgtgtttcggggagcatggtatagaagaagatccatccacacattgcgattcccccaaagaggaagaatgccccaccaatagtgatcttattagagagggacaggaaagtcattgagatgaccccactagtgaccctattcacgacaactcccatagccgcaccctgcgcgcgaagcc

SEQ ID NO: 29195 - DNA, 572 bp, Glycine max
  Clone ID: jC-gmst02400006c08d1
atggcaaatgcattctttactaaaagaaactaatgctgagtattttttacatgaatcaaatccattttttcacattactgtaacagataggcctaaaatacattcctaaaatccaatagcagcagcaattatacgaattactttttttttttttcctgtgattggatgaaacttaagagcagtggattatcatcattgtcacatatgatgaagcaatattcaacaagtgcaagaactgtatgaataggaataagagtttatgtacaacgggaaatgaaaatagttgtcatttgaacacattatgctgtggcagctgcttgttcttcaacagcctgtgatgctgggagaagggtgcaaatgaggttgcggtcaccgtacacattatcaacacgtcctgtggtaggccagaactttgcagtacggagccaaggagctgggaaggctgcatattccctggagtatggttttgtccatgcattagccatgagcagtgatggtggatgaggggcgcccttaatacattgatgtaatgtaacctttctttctcatctcacaattcttgctaatggaat

SEQ ID NO: 29196 - DNA, 585 bp, Glycine max
  unsure (1)..(585): unsure at all n locations
  Clone ID: jC-gmst02400006c10d1
atagtgtaaaatacaacaaataaaaattttcggtcataaaacttacataatagtgttttctactccgagaaattttctaagctagaattgtacaggtaattcttttctttccagaaccaatatttctatgaaataataatccaactcaccagaattctacttacaggttgactgatataacacagggaatgcatgcacatgggccgcagccgtagatagatgcataataaatgctacttccgcctgaaaccatttgaacatgtgccagcatgcactaacttgaagaaccttgagctgctgtgcactttcaacaaattccatgcatgcactgctagacatttcgttctaagatttgatctgaattcctcgtttcaaaagagatttataagctggagttcttgaccattcatcaatttcgctagcacgtagaacaggcagaggatgtgacagttgccttgtatgtgcattccttatataccacccaattgggctggaagcaggtttttcataagagcgagcttgctccaggaatgcatccacatttagttgatcagccatagatggacatnccccagctaatttcat

SEQ ID NO: 29197 - DNA, 456 bp, Glycine max
  Clone ID: jC-gmst02400006d01d1
ccagtaatagtatttaatattataagcagagattcataattcagattagccgaactttatacagaagcgaccaattaccaaacattaaaaaaaaaaaaaaggaagcaaccatgagcttaacacacccatcacaagtccaaaacacttgaacttgctgaaaggcaagacatgaccactttattctaaggatgtttgtttaacacaaaacaccagagggcacgaaaaccattacagacataatacataagtttttagctacacattaataggtaatcattattcctaattaagggctatttttgcttgaagcttgctttcccaacacctaacttgcaagtgcaggggttgcaggagcagtttggtccacatttgcagccatcgttctaagggggcacacccatttcagcaccctaaaattgagccttaacaggggccatttccatgaccaaggtcttg

SEQ ID NO: 29198 - DNA, 469 bp, Glycine max
  Clone ID: jC-gmst02400006d02d1
ggtctagatatattgatcttatttatagaaaattttccctcatcatttgattttcttaaaatatcagtcaataaagtgtctgagaaaatcatgcacaaagcttacacaagaaagcaagaaattaatcacattaaccaagtttggcaaggacatcgttcagagaagatacagtagcagcatagtacttctctgcttccgggctgctcttaatttttgctgcatgatccagattgctgatatcctggaagagcttgccagtgagttccttgagtgatttcttctcatccttaggctttgcagcaatgacagtgttgagatcaaagcgcagatactcggccctgagacgcagatcattctgaacatatggccaagccttcttttcaatcaacttcttaacgccaacaatttccttggctgattcctttgccctttgtgcagcatcagttggagacaatggttgaaggaagaa

SEQ ID NO: 29199 - DNA, 356 bp, Glycine max
  Clone ID: jC-gmst02400006d04d1
ccaaaaaaaaggggccctccaaaaaaaattttccccgcccgggggggaaaaggggcccctttttttttcttttaaccataaggacaaccccggggggaacctataaggggggcaaaaaaattggaagttgaaccccaaaacgggggggcccccccccaaaaagggccccgaacccggggtttttcccccggggggggaaaaaaaacccccccccaaaattcccccccataaaaggccccctggggggggtccgggcccaaatttgccgggggggggtcctaaaaaccccccccttttaaccccggccccggggggggtccctttaaacgctaaaagggccaaaacccttggggggg

SEQ ID NO: 29200 - DNA, 494 bp, Glycine max
  Clone ID: jC-gmst02400006d05d1
aagcaaaagcaagcagatattccttttaactttgacaataaaacaatcacatattctttcgcttgatgacaaaacaagaacagagcaaaggttcacataactcacaaacaccacttttccttttcaatacactggtcaagaagaaaacaacaaaaacagaactccacaacagttgcgtgctagtcctcaaaacatattagaaactttggagaaatggatgttcttcaactcgacattgtagctgctgctgcaagaagagcaactccaaaggacaccaaggttgtcccttgagtactaaccaaactcatggcaccagaactgtccttggctgcctgagcctggtcatcatcttctgctgaagcgttctccttatcagctttaggagctttagccacagcgggtgctggagctataggcttaggcttagagaagtccaaaggaatgagcaccttgtccacatgatatatggcaagtgtcttatcagtgtacacaat

SEQ ID NO: 29201 - DNA, 521 bp, Glycine max
  unsure (1)..(521): unsure at all n locations
  Clone ID: jC-gmst02400006d08d1
aaagtaataaactatcacttcataggtcaggtatcatcatgataaaaacgcttttaacaggcccagaattggacggtaacaatgggtttgatctttaaaatagcacatggacacttcgaaggcatgctatgcctgcttttgtcccagaagttgaagaattgaaatcttgtgtgatgagacaatcgatcagtacttgactataaccctaaaattttagctaatttcaattcctcccagtgtcagcttcaagcattacgcatccaaactagacactgttgatatttggggttcggatttcttgtttttctcttgcatcattaattctacaaagtccctaaaagcgtaatcagaatcatggggtcctggggatgcctctgggtggtattgaagagacattattctttgagcagggaatgcaaggccagcacagcttccatcattaagattcctatgagtaacctccactccttctggcagtgtggcagggtcaaccgcatangtgtggttctgagcactaattt

SEQ ID NO: 29202 - DNA, 518 bp, Glycine max
  Clone ID: jC-gmst02400006d11d1
gatgaaaaggaaagataatatatataatttgttgaataacagaacagagaaacaagatgtgaaatgaaaatgaaaacatatggataaaagaaggggagagatctgcaacctttgtggcagaccccaccctgcattattacacctttctttctctttccttacagatctacattacattacattacatacacttccttgctgcttttgctttctgtttgtttccctgacatttatatatgcatatatatccctcatctatatatacccgatatttatattatgtataattgctacaccaacatgcatttggatccatggacacggaccaccacaataattaagaaaaaataatagtaataattgaagaaaaaacaagaaaaatgatccaaggtaggtatttgaattatctgtttctctttgtttcttgtaaaaacataaacaagggcatgtggtgtgaggataattaaggcttgggtacgtacgtaggtgattattcattgtcaaggtgatattccttt

SEQ ID NO: 29203 - DNA, 460 bp, Glycine max
  Clone ID: jC-gmst02400006e01d1
gcacaaaactggtaaaattccagatcaataaggattgcggcgaagccgcaaagatacaacattcattagggaaaacaggagtggggaaaaataaggggggaggggttgaggaagaacctattgctcacagtgcatgcttggacccctaactattccacacacagttattgctacaacccactatcgagaaaattcctctttggtgtattattatataaagcccaaccaattgactcgtaagattctactttcttataccattcacttggcaagttcgttgccgatgagttttgctgcggcaaccatgtttgtgagggctggcttcacctcaatgtacttacgggtcttgagcccacagtcagggctcacccacaagatgttcttctcgagcactgcccgcattcttgctgattctgtcaccactttcttcagctggcggtatacttggggagtggatgtt

SEQ ID NO: 29204 - DNA, 536 bp, Glycine max
  Clone ID: jC-gmst02400006e02d1
aagcacaaaatacttcgataactttatattattttacatgcatgcatagcatagatagcctgctctcaaattagtcagcaggaacaaagatagagagatccaacgatctttaaatttcacatttgccataaatatataacagaaaagagggtatgggatatgagttaagttttgatctcattcaactacagtatcccaaaccattactcttaagactttgaacttcacttgtactccaggatcatgttgttctcaggaactaatccaacacaagcccttaggatgttttccagcatagctcgctgctttgacagtgcattaaccactggcgtactcggtggaaccagaggggccttggtcaggtaactgaggatggtcgcaactgggtggaatgagtggaactttccctcattttcagctctaaactcgattcgagtgcttagctcagcacgaaggaccaagtccaagataataggagcagctaacagtgaatcctcacaagtgtgtgcaacacaattgtgttctttccgccatga

SEQ ID NO: 29205 - DNA, 393 bp, Glycine max
  Clone ID: jC-gmst02400006e04d1
ggggaaaaaataaggccccaaaaatttattaaatcattgaacccccaagggaaaaatgtaaaaaaggcccaaaagggggccccaaagggacatttaacccacaaaaaaactaggggtttcccctttaacaaagggttttttagaaaacaaatttttaaagcctgaaaaatggggaccccacattggggcccccttttaaaaaacatgtttggccctttgaaagcccagatttgggggggggtaattttaaaaatggggagcctggaaaatttaattttggtaaaccccaatttttctggccaaatggaatccggtttttaaaaaggtgggaccacaaaatttttcacattcaaaaaagcccgcagcctttaaaagcctgccaaaagggtttgg

SEQ ID NO: 29206 - DNA, 547 bp, Glycine max
  unsure (1)..(547): unsure at all n locations
  Clone ID: jC-gmst02400006e05d1
aaaagaaaataaacttgtattttatatatcttaagaaagtaaagggggtgttcagacacggaagttctttccagtgaaagtttgaccaaattgccaatttgatggaacaatgttccaagaggtggaagagcgacggtcgctggcggtgactctgaaggacaaagcctgacccaccaaaacggcgtttgactgccagttctgtccccagtttctgctcattggcatccaccccgttcgtgatcccttaacgtaggcgtgcacgatatcccctgcacccgctacgttgctgatcaaaaccaggttaaagtaacggaaaccgtttattgtgaacctgatcccaccatgcttcctacatgccaccctgcggaaggcgacaggcacgatgccggcgcggtattcggcgattttaaggaacatgggcatggcgaggtcgaagtgaaggcgaggagggttgcaccagccgccattgtcgtttggaagagcgtagttagggggacagaagttggtggcngtgatgaagatggaggggctgcggagtgacaccact

SEQ ID NO: 29207 - DNA, 537 bp, Glycine max
  Clone ID: jC-gmst02400006e07d1
caaaatatcttcataatctatcagagcaaaaaaatattcaggcactaaattagaaatttgttcaactcatccggatctaataattacttcaagtgcccttcccttctgtatgattatgattataccaccaaacgaaagatccatatcatgcttacaccccaggaaggatatactgcaaatacaccattaactcaatttcatcgacgcaaatttttctgccagatctatagcctcgtttacatgtgatgcctctgtaccctgacccgttgcaagaccaccttttcctttaccacatctcccttttagaggccccaaagcattactcagccaatctgccacatccagattacctttacctcctttctctggcaccccggcacacactacagccttgttcgtagattcgtccgtgctaaaaaccatcacagattagcccttctggtccatgacttatgtcacagccttacgaactgcagctacatccagaccaacatcaacaggagatatacaagatgttatccatttgaaacagcaagt

SEQ ID NO: 29208 - DNA, 536 bp, Glycine max
  Clone ID: jC-gmst02400006e12d1
aatcaaacacgctaaaaatactactaaagactaaatgaattatcccacatcatgtacaagcaatatttcaaggattcccttttcaacatgaccaaacaaagcatagaaatcaacagcataacactacatcttacatgctaaattacatcattgatgggaaagacaagtattaccaataaaaccaaacacctttcaatgcatcatcatgcaggaatgtgaaagtgcacaactcctctttccatatcatctctaaaatagataatgaaaagctgcaaccatgtatggaggtgcctttccctttcaatgattaaacttgcccagcttagggtaatattgacactatcaccaagagaaaaaaaaacctccaaatacttcaagatgatattggttcataagggtatgataaccatgggtgcttcagtgcttcggatgcagaaggtcgcttcttcgggttaacctcgagcaaatgagcaacaaagtcgatgaagccttggtcccccatcggtaatctataccttaatgatgtctttttagga

SEQ ID NO: 29209 - DNA, 463 bp, Glycine max
  Clone ID: jC-gmst02400006f06d1
aaaataaaaaaattctttttaatttattttaaaaaaattggatgttacaccgtcatacttacaatatggattgaagagaaaaataatttcagctgaagagtttacaaaggaaaatcaaaacaaaggctgcacaaagttgccatatcattggtgggttgtcacttccttgtagtggtggatgggtatatgcttttgaagaagtcctatcattttcatcttcctctgtatgcaaataccattccttccactaaaaaacaatggccactttttttcatgatcaaaattacaatgccctaatgtgacaactctttatgaagtaatctgaaaagtcaatgtactttggtccacaatggctttagatggggaaaagctatatttagccatggctttgccctgccattgaaatggatgacaccagcagtttcagcatcagcaaaacttgttttttcctgatatcccaatc

SEQ ID NO: 29210 - DNA, 530 bp, Glycine max
  Clone ID: jC-gmst02400006f07d1
cttatcagaataattcattatttattaaaacggaagtaatcaaatcacctgttgtaataagaaattgaataattagaatacaaataatggtttcctcattgctgttttttttcttcttcaaatttccaaatcaataaaaattcttctggcagtatattatataggtatagctcctgttaaggtgtgatggagttggaaatagtctaaaatgagtttactgccttcatggcttcgaatctgggctccttaggctggaacttgagtgtcgcatagagcttcatgtaatcctcaaatacaaattttggatacacttgttctgtatcctctgccttttgctccaacaatgctggtgcagggtagataagagcgtcactggcagggttgtagaatgaggctacggacattctggtcccattcgtttgggcaatcacacgatgctccacactcttgtatctcccattggtaatgacctcaatttggtcaccaaggttaacaacaatggaatggcgcattggaggcacatccaccca

SEQ ID NO: 29211 - DNA, 448 bp, Glycine max
  Clone ID: jC-gmst02400006f08d1
gactaataaaggacaaatttctctaaaaaaaaataaaaataaaggacaaataagggtcaaatgaaatcgttaacttatttaaaaagatctttatacgcacctttccttcttacctctacctttttctctactgaagcattaagcaacaaagcaatgacagctaaaccgagcaaattgggagaggttctattttttcatgccttgatattatctacatatacacattagcagttgaaaaccctgaactgctctataattaatctcagcttggtattatatatctttgatcggctttagtatttccacacacctgttcatttgcctggtgaatattggacttgcacagaggacaagttgcattcatttttaaccatatcactatgcactcatagtgaaaatgatggtgacacggcttaacgtttacattaactccatgcttaatggatga

SEQ ID NO: 29212 - DNA, 342 bp, Glycine max
  Clone ID: jC-gmst02400006f09d1
gggttccaaggaacaaaacaaaatgccttaataatatctcagggatatgttttggacattaagattggagaaaaacctgaagatgaatgatttaaagagttggagcttttttaaaagacccggcaatgacagtgggcaagttgttgccaaaaggggcactgaaatgttttgctaggtttttaacaggaccttttccggggacatatgcttggaagttgaaaccaagcttgggaaacattgcaaggctgccatttttaatttccttcacctttagcagtgcaacttggtttggatcatttgcaagccccaatgggttaaatggaccacctggatgaaatttgt

SEQ ID NO: 29213 - DNA, 499 bp, Glycine max
  Clone ID: jC-gmst02400006f10d1
gatatataaactcatttattcagttacactattataatcatatttacgtagctttccatcctgagcttttagactagtatacatgcttatggacaattgacatgccgaaaggaagcaaaaaagaaaaaggaaaaaagaaaacagaaaaaccaaaccaaaacaagtctaaaaaaaaaaagagtaacataacatgttggatgttccacatttttatttatgtttgatatcatggcaaggtgagtccagaggagaagcttataccagccatgttccaacccttcattttgcaatcagggagaggcatccacgtccaccggttccactttgtatcaaaagagagccacgtcatgtcccaaacaccttcacaattagacaccaacgcagccctaacgacaccgtttttctcttctaagcaacccatcattgctgcataaggcttctcaatcacaccaggaaccgcagacacaaactcccactttcttccgtctaaactcaaacc

SEQ ID NO: 29214 - DNA, 580 bp, Glycine max
  unsure (1)..(580): unsure at all n locations
  Clone ID: jC-gmst02400006g01d1
cttatcctcaagctcaccatcagaccctgactcgtcttcatcctcataatctgtgtcctcatacactctatcagatctagaccttttcttaccgtctttgcctgaccttggggcagcattttccaaattagagacactagatagctttcgatgtttcttgtttaattcttcttcatctctatagactgcagaaacttttgacgttttcagcttttccaagtaccgaatctcatcatcctcgtcatcgtcatcaccaaattccccatcaagtacacgtctctttggtactcgcttgctcttacgaactggttcagacttgtctcccagcttactagttgtgttctttccagaaatcttccccatcaatgattcctccttcccaagaccaaaaccacccctcgagaaatccttccacggaacaccttgtagacgactcctcttatccgaaggagagttattatcgtctgaattactctgttgcttttggcgtggtctggaagcatctgatgaacgagacttcattgttgttccacttcccgaagcaccattggttgccgaatnggcttgaatagacgtgtca

SEQ ID NO: 29215 - DNA, 553 bp, Glycine max
  unsure (1)..(553): unsure at all n locations
  Clone ID: jC-gmst02400006g02d1
agagcataaatatactggaatattataagatacttggaatgttctcttacttcttagacatgaatgacaaagtctgaaagtaacacattaatgtagattagtgagacgtgatgaaaagtaatatgaatcgaccatgaaacatggagctacctaccaccttggcaaacatgatcaaatggtctccgaatcttgtttctgcacctcccctttacaaaggtgcatatacacattatcacgtagttcacgggatgaaaaatatggagccaagggttggctgttattgaactcaataaccctcgtgtcagaatcaacgcatccctcatcataactattacttacaattcaaagtgctcttaagttcatgaaggaagataattcttatgactagttgtagtgaacacagtcaacggaaatagtcttgaatataaaacaaacaagtatatagcataggcaaatctacaagagagatctttgataaacaaacaagcatagcataaatccacatggcagatctttgattcagaatttttgagattaacanaatcattcaaat

SEQ ID NO: 29216 - DNA, 540 bp, Glycine max
  Clone ID: jC-gmst02400006g03d1
cactaataactgcaagagtaaattaaaactctcgcaaaacattgatatcgttacaaccactgatccaagtgacccttattttagaatacagttacacgcacaagtgcacaacacaagaccataggtaaaaacataaatggcatgaacaatgagtcaaagcaatggcagaacaataatattaacgccaccaccacttgtaacagtgcactcagttcctctgcagtagcagagaaattagacatagcccctgctcttcaaactctccactgcatccttgatgatttgctcaacaggagtgaattctagacctaaatcaatcagcttctttgatgcatcctttccacttgctctcaacaaccctggttgggtatcctttggcaacttagccacatcgtattcagggtataactcagcaaccttgtccacaagatcactaaagtgacgaatagattccacacacaagtgccttcctgctgctttcttgttctcaagtgccaaaatatgtgccaatgctatgtctttgaagtgagccgttcccat

SEQ ID NO: 29217 - DNA, 544 bp, Glycine max
  Clone ID: jC-gmst02400006g07d1
actctattgatacaaattctctattatagtccatcatatgcacgatatttcattcgcatcattggctacattctggttccgcatattgttgtccactaattggtgaagtaacagaaactaaaggtgactaagattttccattggtactaaacgaagcttatacctttatttattacatggtgaattagtacccctaaagagatgtttgcacttgccagttgagaatatgctatcaaggttttaaaaaacgatcgcgatcgcagtttatcgtgttccttgatattacagaaaattgcagacaaatacaactaatgcagtcaccacaattgtgactgcattgcagtagcagacactccaaaaacctttatgttgcggctgaaaacacagttgcagaccgttttttaaaaccttgaatgctattatactttagagtctaggttaagccaacagagcatagctcaattgatccataatcaagcaactcctgtatcatctgctctatgtgatcatcttcaagaactggctgaaactgttgatgggaaac

SEQ ID NO: 29218 - DNA, 517 bp, Glycine max
  Clone ID: jC-gmst02400006g09d1
catctataattcatagttcatagtataatataagcccacctaagcagttgaggcagagcaactaaactaaataaaatatgagacatgtagtgtagcattgactataggtaatagccatccatcaactttgatatcaatcatcctatgaagagacagagaaattaaacaaggaggcaaccatatgcctaatgaggaattaaaagtatagaatttcaagccaggaataataaaatgagaaagaaacagaaagcagctgtaacattttaaagaccaacttagaactacccttattgatcctaaccatagctttcacatgacctcactgatagattcataatactagtgccttagaattttgcttcagttgttgagaggtgcaggatatctgttgatgcaatcaagccaagggttcctagaaggcttggtaactcggcgcatggcgcgccaaaccacgctgttgcacttgaagcctgagccaaatgcgagttgccaaacgcggtctcctcttctcacactc

SEQ ID NO: 29219 - DNA, 533 bp, Glycine max
  Clone ID: jC-gmst02400006g11d1
gcagtaaatgttgtagcatttcattggaaaaggaaatacacccaccataagcaattctcatcaatcaaatcccccagagactggaggaaacggattgggaatgaaataggccatttccagacaccacacaaataaaaacataccataaatatagcacaaatggagtatctctttcccctatcgggaagtattgggcaatccaacaggaaacaaagaggaaacaatagaatccctatctctagctaatacacagataagtaatcggccctcatgtttcattcccaaacgcatgcatcgaatcctatggaagattccatcatccatcggactcactctgcatcctcaccttcaccaagcttggcagtgccattcactttctgggcatcttctccatcttctgggatgtcagaagtccacaaagttaggttgtccctgagaagttgcatgattaaggtgctatctttgtatgactcctcattcaaggtgtcaagctcagaaatagctttatcaaaagcttgcttcgcaagatgaca

SEQ ID NO: 29220 - DNA, 475 bp, Glycine max
  Clone ID: jC-gmst02400006h01d1
acaacaaattctatactagcgtgctttattgacatcaagtacaagaagtagcagcttcactctaataattgcccccaccttattacctcaaatatataatacaagtaaaaaaaaaaaaaaaactgttggtaatgggatcaaaatttcatccataataaaaactttcaacataacccaggaaaaaaatgtcagcttaaactcactttaaaaaaaaataaaacaagtttgatatgaatcaagtgtgcatggaatcagcactaacccaagtccaatgatgctttttaacagaaacagctttatccgcaacaattttgtcttgaaaaacccctccatactcatcgacctcgtagggggaaaaatccccctggggcaaacccttcacgggggcactgagcgtgtgcaaaacgtatcaaccgggcaaacccgggtacgaacccgaatcccggttctaacccttattttatacgaattggga

SEQ ID NO: 29221 - DNA, 476 bp, Glycine max
  Clone ID: jC-gmst02400006h02d1
atactcaatgtagggcaagccaatgtttttctttaccaagctcgagaagggaaggcacctttatagaacccatatatcctcaccagcataaatttaatataaacaaagataagcagcaaaagatctaaccgcaataatcttagataataattgaagttcccaataaaatatcaaacaaaacttccgaaacatgcattcaccttgacaccaccacggtttactaggccaaaaacaaggacagatgcctaacgtccttaggatactcactctattacataagccaaaaataatacatgaaagacctggttaaccaactgcaaaaatatcactgaccaccatgctttgccttgttatgttgttgcagaccactttcagagttgaaagacttgctgcagcttttgcaagagagtccaccagacatgggagtcttggcttcattgttgggagtctaggctttggcttcactgctgggagtc

SEQ ID NO: 29222 - DNA, 348 bp, Glycine max
  Clone ID: jC-gmst02400006h04d1
aaaaaaataagggcctacatgaactggttcccaatatatttatgggaatggggaaattaaccaggggcacatgtttgcaaaaaatattcccaaaaacccccttaatttattgaaaaaagcccattggttgggacaagcaaatgccctaaaccccattccatactttggggaacaccaaaccccttaaatacaagggccaacttttcttttaactgggggcattttaaaagcccttgaaaatttcgccaattgaaatccggaagggaagaacttccccgggggggtataacctttggtccagaccccaaggactattggagggcccttacaaacccctccaaaattttt

SEQ ID NO: 29223 - DNA, 555 bp, Glycine max
  Clone ID: jC-gmst02400006h08d1
aaaattcataacataagaattgaagagatcagaacaagataataatttaatatcccttatttgatttctctgaggtataaaccaaggtactacatacatatatattagaaaattttagtcaactaaacaggataaaattacataaatacctgatcagccactactccatttgcatgtcttgcaagaatagatcgagacttcccacttctctcagtagctggtcccttatcagattccagtgcatccttcaccctagaaactggtaaaccaactctagaagacctggtttgttgcactgcagcttctattgccttacttccaccaataaaatttgggtgggaagtgttgatgtagtccatctccatttctatgacgtgtgttatcatagtctccgagggttctaggccttctcgtaaaaagttcccaataacttcatccatgcgctttctcaagaaagggaaccgctgcaattcagtgaccatacagtgatggctgattttcattaactcgtcatatataaacctagcgcactgaagacttggatccattagtcga

SEQ ID NO: 29224 - DNA, 553 bp, Glycine max
  Clone ID: jC-gmst02400006h09d1
aatgtgaaaaagcatttgattcaagcacaagatcgaggaaaaagtaacttaaattacagtaagttatccgagcatcaatcggcataacaatctctttccacataaattgattcaggttccaaatgaacaagttggaataaccagggtctttatacattaacacaacacacagaataattcccaaattctacatgaagactcctcaaccttttttcgcatatccccatcattatgccattgtggccaatgctctgaatcagctatctgttgttgcctcacttgcattttcgttagaggtctgtcgcacaaattgtccacgaaatcgaggtcgttgttcagctaatctctttctgctctgatatcgaacctttttatgaaagcacctctcccttctctcttttctcttttggcgaaatttagttaaggccacttccctttgagaagtcttgttttgatctactctgttggcacttccacttccactagcatcaccactgccactattcccagtgagtccattgttgctttccgtgttggccctccagcattaact

SEQ ID NO: 29225 - DNA, 191 bp, Glycine max
  Clone ID: jC-gmst02400006h10d1
acattatcatatccttacatccaaacggagaacacccaaatgacacagaaaaggacccaggcaccaaaccaaccaagaccgcacaaccagggtcaatacccacgaacaccaacaaacaggacacccacaaaagacacacgaacaccccaaaaccggggactcgataaccccctcacaatggacatggtggc

SEQ ID NO: 29226 - DNA, 472 bp, Glycine max
  Clone ID: jC-gmst02400006h11d1
atatgactctggtgttatttttgattttgcaaattaaattacacaatcacagccgtacatcacacatgagttgggcctcttccaacttaaaagcagaggataacattggcccatgacgcgacacatgcaccacctaataatcataattttacatctttacatacaaaatacaaagactttaaattttaaaaagaagaaaagagataaacagatcatcttaatgaaatgaaaccaaaacccacaaacattggcttgatttttgttgttgttgttgttcccaacttgattaagcatgaaccgtttgattgaatcacttggacttgaagggaatggccctgattacgacctggtggtagagtgctgcaagagctgcaccgatgaatggtcccacccagaagatccagtgttcatcccaaccaaggtccttgttgaagatgatagcagcaccaagactacgagcagggttgatacc

SEQ ID NO: 29227 - DNA, 176 bp, Glycine max
  Clone ID: jC-gmst02400006h12d1
aaaaaaaaaaaaaaagaaaaaagaaataaaaaaaaaaaaaataaaaaaaaaaataaaagaaaacaaataaaaaaattgagtaatatgaaaaataaaaaaaaaaaaaaaaaaaagataaaaaaaaaaaatgaaaaaaaaaataaaaaaaagaaaaaaacacaaaatgagctgaaaaa

SEQ ID NO: 29228 - DNA, 448 bp, Glycine max
  Clone ID: jC-gmst02400007a02d1
gacagaaaaaagttcatttagcacttaagataggaccaagcctgtgagagtacaagggtaagattccctggtacctataacagatgaacaagtacagaagcgagaatcccactggacagggcattatcggattcactactgatgtcaggttccattctagaatctaagtcacctgaaagtctttcccttgatccaaagttcagaagaaagccctgcttccataaaacacacgggagttagtgctgctcggtgtctgtatcttctgctcatagctagagtttcctgagctagttggtccactttcaaagtccataggaagcttcattttcgccaatgactcggcgaattgctgcatgctttgcatgtacatatcgaccaaatcctgctgcagcacatttggctgcggcttgatgttaacagtgacaacaggcttaaggaatgactgatt

SEQ ID NO: 29229 - DNA, 401 bp, Glycine max
  Clone ID: jC-gmst02400007a05d1
gcatcaggaaatcaatgatccattatttacagggtaaactaaataaccggaaggaaaattttcccctatccacaaccaagtgcatttcatttaatgaggtaaattcacatgactagaacatcatgcccaagttaagattgaatgagaagaacaggaacatgcatgcaaggctaggggtttgccttaccagcaacctgttgattactagaatcatattcattttcacttagctcttcatcactggagttcttttctgtggcagctcctatgtcttcaggtttagcatacttctcacagaactctttaaccctttggtcataaatggctcagatcacgcatcattaaagctgcagtttctacgctcaaggggtcttatggattgggataccgaaaaagttgtg

SEQ ID NO: 29230 - DNA, 575 bp, Glycine max
  Clone ID: jC-gmst02400007a07d1
gaaataaatattatctatgtaaactgataaaagaatgcaaggtagcatcctcttagaaagaaagtcaaaatgaagaaattcactaaattacagccaaacaccatgcaaatctcaactccagtctccagtaacagaaagcacacgcatagaataaaaggctcacaaagccttatggtgattttctagagaccaattccatgttctattacaacatcctaatggtaaactatcaagagagagactagccttctcgtatgcactccacaaattccttggccaatacctgcttcactatgcatcgtcacctccagcagctcgggcagaatccaccttttgttcctctccatcttcagggatgtcagaagtccacagggtgagattgtccctcagaagctgcataattagggtgctgtctttgtaagactcctcgctcagagtatccaactcagagattgcttcatcaaatgcctgcttagcaaggtgacaggccctttcaggagagttcaaaatttcataataaaagacagagaagttcaaagccaggcccaaacggatgggatgtgtggatgctaact

SEQ ID NO: 29231 - DNA, 516 bp, Glycine max
  Clone ID: jC-gmst02400007a09d1
gagtgaagcaaaattcttgaccaaattatgttcaaattttctaacaaacagattgaaagttctgtactggacaaaactacaattgaacatctaaacttttgcagcttatatttttctgtccttatttatgcttcctgcttgcatttttatccaactaaatacacaagtattcccttcatcacaacccttcagagagagttgggaagcagctctcagatcttgtaagcacagaaccatgaatttttgtgagagtcttggctggactatttggtgtggaccttactctaagagaatccaaagtccttctaagaatctgtctcatggctgatatcaagtgcactgtcggatttggaggaggccctgatgccttgaactttgtgcagaagttcatgtgcttagccattgcttgttctgtgcaaacaagtctctcagacctcacaatttcatgcttaacagcctcagcacacaacccacaaacccatttcccaaagtacctctctctgatactatctatat

SEQ ID NO: 29232 - DNA, 505 bp, Glycine max
  Clone ID: jC-gmst02400007a10d1
aagaaatcaattatgaacttgaacctttatttgttcaccggggttggagttcagaactgcacaaaggagacttgatctcaaaaaatgagaaaaggaaaacaaaaatcacatttaaaggatgctcttctcttcactgttgtgtgctcttttcaataatagctattaacttcagcgatcaatgccttcaattttgtcttccacttctgaatacaactgcctgagcttctcaatattatcttctgaagtttcccaataaccacgtccattggcttccaagaatgtctgcaccagtttcctgaaggagtttggattagtgctcatgagcttgttcagcatttgctcatcttgaatgaaagttgtgttggcttcttcatacacccagttatcaacttggcctgaagttgcactccaccccactgtattggtgagtctcttctcgatctcgcgtacaccctcatatccagtagacaacatgccttcataccactttggattcaacagcttg

SEQ ID NO: 29233 - DNA, 553 bp, Glycine max
  Clone ID: jC-gmst02400007a12d1
ctcatgatgttcatggaaggcaaacccaccagatcccactgcagctgctgctgcaacctcctcttctatcttgtgcctgtgagcatgctctgggtctttctctgccttgtgcttctcatgcaaggcgtaagcagcagcagatgcagcacctaactcaccaaggtgctcaagatgcttgtggtgcttctcttccttcttatagtcaacctcatcatcatacccaccaccacttgttttgctgtacccaccatcagtggtagtgtcagggtacacaccaccaccaccagcggcgccatagccaccacttggtttgccgtagccaccatcagtgacgtcagagtatccaccaccaccagcgccatagccaccagaagtctcatcaatgccaccagaataacctgttttcttgtacccaccttcatagccaccaccagaagctggctcatcactagaataagatgtcttgctgaaccaccttcatagccaccgccagaagactcatacgatggcttgttgaaaccagagtcatagtcatcagaaagcttggaatatg

SEQ ID NO: 29234 - DNA, 567 bp, Glycine max
  Clone ID: jC-gmst02400007b01d1
atactaacaagctgtgattagccagaactatgttgaaaacactataatacacgttgatatgaaggcacagaagctgaaatagccgaatgaagtgccaaacccttctaggagttgggaacaatggtgccaacatatccaaatgccatgatgaggaaggcaaaagattggataaagaggaagatgaagaaatggtttttcccgaacataacatcatagcagccacaaaagaagaggtagaatgcgacaccaagttccaacaagtgaatcctgtctccaatcctgaatcgaggctttttaggtgctttacctcctgctttagccttgagagcatcaccaagtttttcagtgacaacccattcgttcactcgactggcctcaagtagaccaataattgttgcctttgttcgatgcagagacatgacattctcaaagagaatccagaagaccatcaaatggagtgaccttggagttccaactgcatttagaatagtgatgatggaagggatatagacagctccccactttgggaccacaacctcaggcaccaaaactgttgcaggtaataca

SEQ ID NO: 29235 - DNA, 499 bp, Glycine max
  Clone ID: jC-gmst02400007b02d1
attcaacaaacatttaattaataacaaggacaagtttacatttttttttccaccttacatatgtacaattgcaagcaatcgcacggcttgagagtcatatattcacccctccattcttcttcatgctacaaactatattatatttaattcccacatttttgttttccttttttttctattgccactgttacgtacactttgcaataaaaggaacaacaataattatgaaagcctagagccaattaagattgatttttctctaactagcccaaagcatatgtttaatcttaatcacttgcagccaccagcaccaaacccaattcttccaccaccaacatcatacacaacctctattgttttctgctgcacgttcccatatatagtaacatcactatcgtcaccatttgcagcaaaagccaagcaaacttgcttggcactggccacgtagagtatcccttgcggcggaagctgcaccgtgacgccgtcggcgaaggaaaaa

SEQ ID NO: 29236 - DNA, 550 bp, Glycine max
  Clone ID: jC-gmst02400007b03d1
agccaacgcaattgaaacgttgtcgtttctttattatcaataaaagtactctagtccttggcagttcaaacgcattactagatagtatacacatacaaacacagaacacaacatcaaagtgacaaccatcgattaataataaatatgtagggcaaatgaaaaacgaacaaagatatctagctcttgctgctttttgaaggtgacttttacagtactcctagaggggcaagaggttgctgcgatctgatcctgctctttctcaaacgctcagcgatgatgaaagcaagctcaagagattgtgaagcattgagccttgggtcacagtgcgtgtggtaacgtgagctcaagttatcaaatgtgaccgttcttgacccaccaatgcactcggccacattctgacccggcatctctagatgaacccgtactgggtggcttacttcttgctcgtgtacgtcgaataatgctatcacttgggccctgatggaatcgaacgggctagtattaaaaacacagggagcccttatggtgttgtcatgcataggagcactga

SEQ ID NO: 29237 - DNA, 308 bp, Glycine max
  Clone ID: jC-gmst02400007b09d1
aaattctactttgattgaatcaaaactgtaataaagttcctaagactggtgctatacagaaaatttgagaaatgatgtacttcaacttggcaaacaaaattctgagacaagatatgctacaacaaggtgaaacagctaaaaatgaggagagaaaaaatgttacaatgaggtcatagtgtgatgagaagatattagaagaaaaaaaagaaagaaagaactgggattgccatgaaatgcagtaagcatgacatctcaaaattgagaacaggttatgactgtggttgttgttgctgctggtcatctgtatg

SEQ ID NO: 29238 - DNA, 364 bp, Glycine max
  Clone ID: jC-gmst02400007b10d1
gcagaaaagggttcattaaatgtcacaaattttctatttgactatgtcggcaaagaccctgttttaggaggcacattggatgacaagaccatagacgtttaacagctggtctacaaacatataaggcgtgagaaatctttataactggggaattctacacattggtcacgtcagaaatcatctccatgaatatggaagctaaggaaacctcccttacacttgaaaccatggctatgactgcgactttataacgtgcagcgctattcgatatattgccacagaacctgaattttcagtggaaccgacaccatggttctttatgcaattcaagaggtacttaaaggcctcaattctacatggaatg

SEQ ID NO: 29239 - DNA, 558 bp, Glycine max
  Clone ID: jC-gmst02400007c02d1
gagcaaaaacttatatcattgttcaagtagaaacggggaaaagtacattaaaaaaaaaagagaaaaataaaatcgcaataaaaacataatgacacgctgttatctaaacttcaaaagggtctttgacaaaatcaagaacaacccatgagaatcttctgcttaatcgacttcctcaattttgggtccagcaccgcttccactgccagctgcaggaccatcctcatccatggctccacccgcatcaccaccagcaccctggtacatctttgctatgatgggattacaaatgctctccaactccttcatcttatcctcaaattcgtcagcctcagcaagttggtttccatctagccattggatagcctgctcaatcgcatcttcaattttcttcttatcatcagaagacagtttggaagcaatcttgtcatccttgattgtgttcctcatgttataggcataattttccaatgcatttttggcctccactttcttcttatgctcctcgtcctcagacttgtatttctcagcttcctgcaccatcttctcaatctcctcctt

SEQ ID NO: 29240 - DNA, 378 bp, Glycine max
  Clone ID: jC-gmst02400007c04d1
gggaaaaaaaaaaaaaaaacagggcataaaaaaaatcaccaaccaaaaacttttggaaaaaaccgggctaaaaaaaaaaagcaaaaaaagccccattggggaaacccctttaaaaaactttttggggggggccggttttttaaaaaaacctttgaacccggaaaaagccccaacacattgccaggggaaagaaaaacgggctcgtttccccttaaaaagtcgaaaaaaaaaggggccccccaaaggggggaaccaattggcccaaaaaggggttaaaaaaccggacacccccatgggggggggggcccaaaaaaaaaccaaaggggggttccaaaaccccgaacggtggggggcccttaaaaaattccccaacaaaaa

SEQ ID NO: 29241 - DNA, 538 bp, Glycine max
  Clone ID: jC-gmst02400007c05d1
acaacaataatagatcccctgatccagtattcaataaattcatcacaagttttcacttttcacttctttctcacaattacataactcatcgtagcactcttggtatcaatagatagcatatggtgtagcaactagctacaacgttggaaaattcagatatatatgatcttattctggttctggtttacgttgtcatcacactcatgagaagtactccaagaacaagtgacacccacattccatacgcactgatcatcttggcagtgccagagttctgatcagtggaattaacctgtgacgaatctgaagatgatgactcatccttatcagctttaggcccctttgccacgccacttgaaggttctggtgccaacgagggtgcctttgcaggtgccttggcaacaacaaagaagtccataggaagaagcaccttacccaccttatatatagcaagatgtttatcggtatatataatgccagtgacggtggtgttaacctcacccgttgagatgttcacactcccttcataacttatcac

SEQ ID NO: 29242 - DNA, 520 bp, Glycine max
  Clone ID: jC-gmst02400007c10d1
cataacaaacgtaggtgggatattagagtactattattaatgggacacaattgagttcaacacaaaccgaacttattttcaagggacattattacagacccattaaacatcaaagttcttcaaatgttttgggaacacatccaacattacacaacgagcttaaaaccccccacggagacggaggacaaggtgaagggttgattccttctggatgttgtagtcagcgagggtccttccatcctcgagctgcttgccagcaaaaatcagcctctgctggtccggtgggatgccttccttgtcctgaatcttggccttcacattgtcaatggtgtcagagctctccacctcgagggtaatagtcttacccgtaagagtcttcacgaaaatctgcataccaccacgaagacgcaacaccaagtggagagttgactccttctggatgttgtagtcagcaagggtgcgtccgtcctcgagctgcttcccggcgaagatcagcctctgctggtctggggggattccc

SEQ ID NO: 29243 - DNA, 341 bp, Glycine max
  Clone ID: jC-gmst02400007d02d1
gtataattcacaaaatttatattgtaaattttttcttagttggacttagacctttcaacaatagacctaacatccaccttgattatcaacaccaattgtatttaccatgccttgtcatctaacaataaccttccaaatcctgctatccaaaaaaatgtggggttttaggaaaagcaattatgtgtcatttttgtgatgaccatgacctggctgaaaatttgtgtcacccctttaaacgaaagttttatttgctagtgttagcagccttgtacattcttggttaacgacgataataaggaagattttccgtcttcatctactctgatcatcgctttatctgg

SEQ ID NO: 29244 - DNA, 516 bp, Glycine max
  Clone ID: jC-gmst02400007d04d1
gccatgaaatttcactttccatcattccattccatgctactactcttgtcttctctcgtctcgttcccactgtacactatccaatattattattccctaaaaataaaaattaaaaaggaaaacagcttccttcttttttttttttctctcttccctcccttgatcgaagttcttaataaacctcattttgtgaaaacactaaataggtcataataattacgaatccaccctgctaatcccaattcgcttcaccgacacgttcctaaacccttccatcatttccataccctgaaaacacatcatcccattcttctgctgctccatgtaactcctcacctccttccttatcatctcatgcatcaccgccataaactctccactcaaattcaacgctcccaatccaacctccgccggaaccggtgccggagccgcaacggtattcaccggcatcaccggcaccgtagttgcgcgatttgaaatttccgccgacttcacaccgggaagagacagcgacag

SEQ ID NO: 29245 - DNA, 549 bp, Glycine max
  Clone ID: jC-gmst02400007d06d1
aaaaaatctaaaactaaattttacatcaatatcgtgtccaatggttactctcttgaaatcatttcaaggatatgaagtaaaagtacacattatattgcagtggtgctattataaacaaaagctgctttccatatatagaaaggttatgccatcaagagatatagcgaactctaaactatatccatcatccatgcaggtgacgtcatcaagagattagaggaatatgatacacccgttcttgttcttgatcaaaagattagctccaaaactcgggtaataatcaataaacaccgcgtggtagccaatttcttttacagtaaaacatgtctcactgtcttactgcatataatctttatccacgagcatgtgtatgtgcctctcttcaagtaccaactccaattaacttgagaatgttattgtgaggacttccccaataaaatccttgaaggaaaattggaaaaacattgcaagccgcaaggatataaatcattaatgcatgcatgcccatccactccagaaccaggtcatgcgacgacacccacatacatc

SEQ ID NO: 29246 - DNA, 536 bp, Glycine max
  Clone ID: jC-gmst02400007d08d1
gaaagagaaaacgaatatgccattttctacagcttggaaactcacagaagcattgcttttacagaacagacagagactcctttcccccgctgtcaaaagccacaacttgcacagcacgtaattaaacaaaactccattcccttccccattaccctccagcaagattctcacccctcctgtttctcctacttacatgcaactccaagttcacatgcaaagattccaaacatcacacaaaccctagctacctaactaacgcactcactcactaccataagaacaaactaaacaaatgtaagagaaaataagctatgcaataatcatgtaaaacagttttacactctcattcaatcacaaataattacgtctaataagtttgtttaactttaaaataatactcataataatttttgattgattgagagagtaaaaattgatttatgattagttgagagtgcaaaaatgtttatatttgaactgataatgcatagtccttaaactcatgatctggcttaatttctttttacattacaaaa

SEQ ID NO: 29247 - DNA, 157 bp, Glycine max
  Clone ID: jC-gmst02400007d09d1
cactactttatatgctttcataattatatcatcattgaccttatgcatctctcctctacgactgctatatcctatgtcatgaatctggcgtctataactttgttaatgcaatacaattctcattactgatccggggtctcgtagaccggtccggaat

SEQ ID NO: 29248 - DNA, 472 bp, Glycine max
  Clone ID: jC-gmst02400007d11d1
gcagctcgaatttaaatatttttatttactcataaattagaaagacgaaacacctaaacaaacacaatagcttcagtggaaatatgccaccgtcgataaaaagtacaacacgatttgctgaatgtgtagcatttctctaatcttctttctcatcttcgttaatctcgtcaagaataacaattagtgccacaacgaacgcataatgaatgttgggatacactgtgaccatgaattggtctttcccaatcaaaatactctgaaccgtgtgctttttatgcatctgggctacgatgttgttagattcaccagcataaacaacgcaagatcgttccaaccaactacctttgaccttaaagtgacagacatcttcttttgtgttattggccaaaaacacatgtaatttggtcttaaactggataagggacgaacgcttcatagtaaagattagatctttggcctctgagctttcacc

SEQ ID NO: 29249 - DNA, 510 bp, Glycine max
  Clone ID: jC-gmst02400007d12d1
agaaaaaggaagactaattaatacccatggtggttttctattctggagaaatccgtgcagagaatgataaccaaatggtatacttttctactatcaagcatgtcttatagtaccaatacccttaaaacaaagtaaaagatgaagtttttttttttttcaaaaaaaaaaagtggggggaagcgcaaaagcattttctatacgaaagcaagttgcttttctcacatggccctaacagcttggaatcttggttccttgggaaggaacttctgctcagcatagacagacatgtagtcaccaaaaacaaacttaggataagtttcatctacttgttggtcttctttctccacaagttgtggtgcaggacatatggtggccttgaatgaaggattatagaaggaggcaattgatcttctgttcccatctggtgtggccagaaccctgtgccagcaactcttgtatctaccattgctcaagacctcaatctgatcaccagtgttgatgacaatggca

SEQ ID NO: 29250 - DNA, 580 bp, Glycine max
  Clone ID: jC-gmst02400007e01d1
gaaactgaaaaggcataatctattcgacgagtccgctaaacaatcactgaaatttggttattgcccaatgcccagagccatgagggtctatttgtacatgggaataaaacaaaagactgtatccatcccatcaaaatggttgttaaacggttacatcaaaagtgggtcaactcctactctagccattcatggtaaagataggattttatggtagtggatagatagcgactcactctctcccaccaggagcaccagataatgataatctatcaacactctgattctgtaggcacacaaccaaccccatcccaaaaaacaatgtttctcaacagttactgatccaaccaactaatccacaccgcatatattctcaaccaaccaaaacactggagttagtatgcaataaacattgtctgggtactcagtaacttataataataagaaagtactgctctgaaatctgtttcactagtatggtgcaaatatgattgaagaattgtgacccccaaaaccaaatgaattcgacatggctgccttgacatccagtctctctttctttgagccaacaagcactttagca

SEQ ID NO: 29251 - DNA, 509 bp, Glycine max
  Clone ID: jC-gmst02400007e04d1
tcgcgatctagaactagcatatattggaccttgtatcccatccaatcctttcatgtcggaactggtggtttcttcttggcaggtgcatcatatccataaagtgcgtaccttctgaaaacacatccagttccgacatatattggctctagaaagaaaaagaatgccaatagtaagaaggagaaaaagaggaaggtgaagcacagtgaagcatcaaagcagatacatgcacttgaaaatattgaggcggtgaatgaaggaaccaacaatgagaagacatccaatctgactcaaacaaagttggagaagaggtttggacagtctccagtatttgtagcctccacacttttggatgatggtggagttccacatggcgtgagtcctgcatcacttttaaaagaagccatccaggtcatcagttgcggttatgaagacaaaacagaatggggaaaagaagttgggtggatatatggttctgtgacagaggatatctcgactggatctaaaatgca

SEQ ID NO: 29252 - DNA, 538 bp, Glycine max
  Clone ID: jC-gmst02400007e06d1
cagcagtagttacgacttttggattttacatatagcacttggccacaacacacagaggattcttcttatgctgtgtaactcctggcaacacttcagtatcaatgtcttcctttttcattccttgtggcaattcccagtcaaaggaataaagaagattagcaagtataagatccaatgcagcaaatgccatattcataccagggcacaatctacgaccagcaccgaatggaataaactcaaaatcttgtccataaagatctatgtcgcaatttaaaaacctctcaggtataaactcttctggatctttccaagccttaggatctctatgaattgcccaagcattcacatataataatgtcttggctggaatttcgtagccatctaacatgcattttttatttgtttctcttggtataagtagtggtgctggtaagtgcaatctaagtgtctcttttatcactgcccttaagtaggaaaacttttgaatatcatcttcatccaagaaatctttcttaccacttaagcctctaatttcttc

SEQ ID NO: 29253 - DNA, 607 bp, Glycine max
  Clone ID: jC-gmst02400007e07d1
aaaagaaaatttggaaataaatttattctatcagccaaatattgatgtccacctagcctcaaaatcatgtaaaaggtttaaaatataaaaatgtcaaaaacttgtttttagatgaattaaagattgctaattaagcttttattgattggcactcaattttgcctttgaattttctgatggatgaggtgtgctatcggtgcaagcagtacaagaaagaggcttgtcagcaagattgatccgcaaggttcggtgcttctcattctcaggtatatggaggagagcatccatgattaaaatgtcccaatcacgaggaaggaaaaaggaagaccaagtgtcatctccatttcgaacagccttcagctgcaagacaccattgccttgtggtccagaaacaggaaatgagcatgaaacagaacgtctttcatgagctactgcaagagatgcattgtaccatggacctttaacaattggttctccaatagaatctattattgcctggttcttgcttaccttctccatggccttgctgctacatccatgatagatggcaaggtcatcataggcactcaaagcaacaccaccttgaatagtaatcaagacaaatgac

SEQ ID NO: 29254 - DNA, 374 bp, Glycine max
  Clone ID: jC-gmst02400007e08a1
ttagcgctcgagttctcttcttctggagctaagtgcctaagcttaaatggcgtcgattttgacatcggtccctgccgttgacgctcgtcccatccccactagtgcctttcctctcagaaaacctctctttcaaactccacccccccttgcatttcaaaaatcataggtttgccgctagctgcagctacgcagaagcaggtgacaacgctgattgtagctctaacaccataaatgttgtggctgatgtcagaagcgaacggatagtactcctcggaggaaacggctctgttggctctgccatatgcacggcagcagcgtacacgggcatcaaactaatacgcctaatgaggacaaggcgacctacttattcggat

SEQ ID NO: 29255 - DNA, 492 bp, Glycine max
  Clone ID: jC-gmst02400007e08d1
agatatgaacctcatttattacatttagtattgttttaaacaccattctcctcacacggtcacacactactcccttaaaatttaaaaaagattgtgctccaaaagctgccaccggtattaacacaaggaaaatagcctcattgtagttactccctgactgtacaattattgcaattgcaggtttatctcgtttgactatatccggatcatattcatacccgtactttattggcagcgtccttgatctggtcaattgtaaaaacaccaaagaagtcatcatctgtgacaccattgataacagccagcgcaacatcgtcaacactaacaggtggagctaagagtaaatcagatgcaggaagagaacttaaaggtttggtgaagttctctattgctcgtagaattttttctgctggctcccctaccaaatccaaaggaagctcataaccattcactctcctgttcccatatatgaaagcaggtcttaagacaata

SEQ ID NO: 29256 - DNA, 493 bp, Glycine max
  Clone ID: jC-gmst02400007e09d1
gcgtgtgaaactttacatccgagaaatcaagaacttgaaagatcaaaatccttatacttaaactatggacagaatgcccctacatgaaagcgcagaaaaatagaagaccaacttgaagtagctgcaacacccaacactaaggtttacaaagcgagaaacaatggttgcactcatacagcacatagatgtaacactagatgaatccttatgcgagagcacccacaatcctgattgttcttcagggataggaccgggcagcaagatatgaacaattttttggaaagatttatactagataattgtctttctggctatgctgcatacaaacctgtacataatgagcacaatcgtaagctatagagcacttggtgcatctatcatgcttaaatgcagactgtagcgcatagtcctgctaccaattccagcggtgcctttttgcatcatggcagcaaattcaccataatcaatccttccatcattatctagatcaact

SEQ ID NO: 29257 - DNA, 502 bp, Glycine max
  Clone ID: jC-gmst02400007e10d1
gaacactacaaatagaaagttgacatttaataaaccaaagcaacacaacgcagcaaagtcctgaaactcgctgcgcttaacaaaaatgtaatcaggggttccgacaaacacaacacattaaaacacagataaataaaagcaattttgccaccgtcgatcaagaacccagttctgggaacaacagttgcgagatgatggtggagacttcaaactttgtccgaaaaacaagctacctagaaaagaagacacaagagtacagaaaagaaaccaacatttattgtaaccaacatcccctgatgaaccagcccgcacgattcacttcttcttctgggcagccttggtgaccttggctccggtaggatccttcttctcaacgttcttgatgactcccacagcaacagtttgacgcatgtccctaacagcaaacctaccaagtggaggatactctgagaaagttcaacaaccatgggtttggttggatcatcttaacataacagcatca

SEQ ID NO: 29258 - DNA, 552 bp, Glycine max
  unsure (1)..(552): unsure at all n locations
  Clone ID: jC-gmst02400007e12d1
gagcccaaccatttaaaatttctttcccctttgcaacatttctcccagggaacaaacagaccaacaccaaccaagcataaggccccagctatcatcaatttccagctggataaataaataaacccaacatttttgtttgcaacaaaagttaaatttattaatagtagtaataatagtaacatattaaatactataatcactagccaatcaagacacacccctcttcgagtgagtgatgaaccttgcaatttgcatcaacctttttcaagtttcaaccccaattaaccgaaattggggatccaaccaggtgcttcccatcggaccattctacccttccaaaagcgttttctgtatgctgtggcgaacccgatgacgaaaacgtgacggtgaacgttttcttctcgttctccttgaaactcaacacttgcggttctaccgagattntaacggacgcagtgtctgacgtcacggaagctttgtaagttcccgcgggccccacgttagtgagagtcctcgtgtgcttaaccacgcttcctgatgattcaaacaaca

SEQ ID NO: 29259 - DNA, 434 bp, Glycine max
  Clone ID: jC-gmst02400007f02d1
caaaaaagttcatttaggcttaaaatgtttttgctttttagcaaaaaaccctttaatttacataagctaacaaaattttgaaaccggggagaattaataaaactttaaccttgggataaatttgcaaaagagaaaaaaaaaggaataaattctttatagtagtaggaaagtagtttttggccggccaaaatttaaaaattagggatttgggaaggttcgggcccaaaaattgaaaccccttagcaggattttggagcaatctttggggggaattccctttaatttaccccaattttttaaaactacttggttaacaaacttgatggaattctgaaaagggttttgaacagaggaagtgccaccccttttttcagggtcccaaagggtggggcttttaaaagcaaaacttgaaatttgaattgggggagtgattg

SEQ ID NO: 29260 - DNA, 496 bp, Glycine max
  Clone ID: jC-gmst02400007f05d1
gaggttcaagagaaacaagggcaattcttaagtaaacaccattttcaacaggaatgagttattgcgaaggatgccaattacatcactgacaacagcatacttattactgcaaaaatgttacaaaatataggtccatgacaaataaatgaaaaatggctgccaaagcaatcatccagaggcataaatcttgtaaatttgaataaaacatttgccagaccttcaatgaagtctaaatgaggcaaaaaaactataatgaactaatagaggctccagtaggttttgcgtcggaaccagttgtaattaggcaaacgctgaataggacccgtggcagcaataacaacatccttgtcatagataaatcggttcgtaacacgtttaattgtactggcatgaacagcttcaattctagcaaacaattcagctaatgggattcttcgaccatatgtgagtagctgacgaccaatatttttagccactgtgcttgttccatctatgt

SEQ ID NO: 29261 - DNA, 308 bp, Glycine max
  Clone ID: jC-gmst02400007f08d1
aaaaattacatttaccctgcaaaccgaaaaacttgacaaaaggcataaggaattagctgccgtcgacaatcgaggatcaactgccatttaccctgacccttggcaaaaaccatgaaaccaaaacaaaaggcaaaagaagggaaaacttccgggaaccaagaataaatttgaactacaggttgcagtttgatttgacattgggcccaaagccgaatttccgggcgacggccgcggacatgcaaagttttagatagggtaaactgacaccaaagcccaggccactggccgacaacgtaaaaaccgggaaa

SEQ ID NO: 29262 - DNA, 527 bp, Glycine max
  Clone ID: jC-gmst02400007f10d1
cagtaatgaaatttatattagacgtcattattttttgaattgccattacaagttacaattgcaaattccatttaagcatgaataggacatggcttgaataaataaaggagtttaatttgtaaaagaaatatataatcatagacagcattacacaagattatactctatgcagaggttagcccttcaggaagggattcactgtctggatcaggcctaagaaaccttctacaagcataaaacactgctgaatggaagccacttgggttgtcaatgaacacaaagtgcccggcctggggaaccctaaggatttcacatggaaccttcatttgtttgcgtgcttcttgggctccttcataattcatccagtcctgaaaaccatatatgaaggtggtaggcaccttccactctgaagcactgtgaagaagaggtgacctcgggagtcctccaaatgaaaatatatattttaagcacagctcgccactagctatggctgctaaagtatggtaaacataatctgtcagtaatct

SEQ ID NO: 29263 - DNA, 432 bp, Glycine max
  Clone ID: jC-gmst02400007f12d1
acacaaaaccttttttttttataaaaccggttacaaagccagaaataaattaacacaaaggaccccttatcaaaacaaaagaagaagaaacctagtaaaagaaacccagcatggcatgcatacattttcaccctaccctttacccataaaccagaaccttaattaagcccgagggaattaatacatatattactcgatcacaaaagcccaacaaaaattatggaatccctttatccatgcacactcaccttacattaaaacaccacccaccaaacccaccatttctacaacaacaacgttattcacccacttcatcggacaccctggaaaaacacccgccggaaaggccttcccgtcgctggcatcgttgccggcaacagggccatcgtccgccgccgtggaattccctttataagccttggggaaaccctt

SEQ ID NO: 29264 - DNA, 383 bp, Glycine max
  Clone ID: jC-gmst02400007g01d1
aactaaataaactcgttcatgtaaaatccttacgcaaactaaattaactaaataaatcgtacatggcaagcctgcacgccaactaaaggctgacttaaattatgagaagtgggacacactatgcaaaatccaaatagatgaagatctaaggtttgaccatttctgggcacaaaacggggggtaggggagatttaacgattagccttggcaactctagtaatttgatcctatcgcttgatagcatgactagcggatgaaccttgggacgcatgcagaagttgatatgacactattacatgacgtgttttgatgtttctgtgaccagatcttcgaggacctggagtcagaagatgaagagtcaagatgaccacgaagaagggggg

SEQ ID NO: 29265 - DNA, 565 bp, Glycine max
  unsure (1)..(565): unsure at all n locations
  Clone ID: jC-gmst02400007g03d1
ctattaaagcaggggacaaaactgaaacatgcaaaactccattaactagtgaaagccccctgccatcatgcttgaagccttggcctcatcagctggctttggagttggcagcaagacaatcgccattatggcgctcaacgcggctgccgcagcacccaccatgaaagccggcaagttgccaccaccaaacaaggaatcccaaggaccacttaatgcagacaccaccatctgtggtaccacaattgcaagattgagaactcccaaagataaaccttgtcctgctcctgaagcgctgcagtatattgatgctagagcaaaagggacactgaaagtaatcgcaaggggaactccaagaaccccaaagaaaaccatggacccaaccaccaccccctcggaggggtggcccacggcggcggggttcatccggcgctggtgctccgccaccttggtgatcaccaccgtcattccgaacccaatcgcgagaataaagttcacaatcgcccaaagcctttcactccncaaccatcttcccaacggctccaccgtcacgacatgaagccaacac

SEQ ID NO: 29266 - DNA, 521 bp, Glycine max
  Clone ID: jC-gmst02400007g05d1
ctcacacaataaatacaagagattctgcaaactgaaaaagggatttcttactaaagcaaactcaaacaagaacaacttccactcatttggcatctaccgtagtagaacaggatcaaaagcagctctctgatagaacacacgtatgtattatattgaacatcttgcacagtggttcatttctcacagctattgcaacttaaaatacttgcaaagcttctgcaaattccaaactttctttttctcccttctttatggatatgacaaagtgatcagatcatgaaacaataatcaatccattgaatttgaatctgatttttggtttggatcgatgccaccattcttcatcttaggaagggacaacaaataggccaaagcctactaattaagcgcttaaaactgcattagtggttggtttaagtgtgatgttagtaacatcagcttgattattaaagggtgttctttgtacgaagaagcatgccccaataacaatgtagcacagcaggagaacaaggcctttcatg

SEQ ID NO: 29267 - DNA, 509 bp, Glycine max
  Clone ID: jC-gmst02400007g07d1
aaatattctcaattttccttattgttgttggtgttcataggatctggcctaggcaatagaaagaaaattttgcaaaagtgtgcaataaaaacacgttattctaggttagactcatcgatggtgttaagcaccctcataactcaactcttcaagtagaggcaatccagtgtatgctatacaaagtccatattacttacaagtatacaaagcccatatacttacaagtaggatggtgacacataaattgagatgacaccaattgtgtgtgatagtgattacatatgacttcaagatcatttgtggaagaacatcacaatttgctaaatgataaatttgtcactctcacaagaactgctattaatgatctcccattgctggaacaataaatatgattttcaggcatacctcaactcaggcgttacttccttccggtaacgtaatcaatcttgtagttgaatcatattccattgcagttccacagttggagcatttgacagtgttggtggaac

SEQ ID NO: 29268 - DNA, 544 bp, Glycine max
  Clone ID: jC-gmst02400007g09d1
agaaacagaacagttttccaaaacgggctttacaagctacagactctgcctacgaatcaattagcttgcttacaaaagataaacagcaaattaattgaatcaagttaaggctgacacaatattatgtttgtcagcgtgatcaaacgtcaaaatacatttaagacaacaaaactgattgagcagatacaattgatgctgctactgttaaaaaagccaaaaaaagttaaatgaataacagaaaatacatttacaaaatacacgtatggccaaaaaatatttacacgttccgcaataacctatgttatgttagtcttctactgtctggatctcacccatcatgatcctgttactcacgacattgaatcccaaaactgaagagcttaccttttttcctttgctgccgcctttcttctttccaacttttgaaaaggatccatcagtgtaacctagctctagtacatctgtatttgcatcaactttccgatcattcacggtttgaaaagctatttccaaaacatctgatggtagtaggtccatgtaattg

SEQ ID NO: 29269 - DNA, 553 bp, Glycine max
  Clone ID: jC-gmst02400007g12d1
caatgcaaaagaagaacacttgttaaaatttctagcaaaggaatttacatcaatactcttctaaaaatatatccacctatactacgattcaacccgaaatacataaacactataacgccaaactaaaacccactccaatccctcacttcttagccttggcctttttcgctggagatttcacgcttttaggtttcttcacgacgctcttgggcttcttcacggcctttacgggagtcttcttcgcaggcttagcggcgaccttcttcggcgcggccttagcgggcttggccttgggcttggtggccgcagctttggccttgggtttggcaacagccttcttcttaggtgcagcagctttgggcttggaagcgggcttggcggcgggcttagccgcagctttggtgggcttcttgggagcagcagcggctttaacaggagcagacttagtcggtgcgagcttgaaagagtttttgaccttaacgagcttgccagcagcaacagacttcttgagatgaacgagaacaagcttcttgtaggttggagggcaactcct

SEQ ID NO: 29270 - DNA, 101 bp, Glycine max
  Clone ID: jC-gmst02400007h01d1
aactaaataaatcgttctttttggttcttttctgaaactatatcaacgagttaaattggaactatgaagaacctaggcaggctccaaccaatgacggccat

SEQ ID NO: 29271 - DNA, 510 bp, Glycine max
  Clone ID: jC-gmst02400007h03d1
gcaatataaaaagagaaaaaaatcggctaaaagggatatacgtaaacatttcgattgagtctagtcacagccatcacactaaaacactataggtatccttcccgaacaatttagcccgaagaacccaaatgagtggccaacatgaccctcttcttaagatccacaattacatgtgactctccatagctacattggtcaaatacacaaccgttaaaaccaggaaatactcatataaatgtttacaacaaacagaaatcaagtcctattcacgggttcaagcgcctcaacagtgaccacactatttcctctaattaccaccatccctatgtcatttttctcattgccattcacttccacagtgttgtcaacaactaaattcataaactggtcaaagccacggagagtaccaacaaccatgcgatttgcgttcagcttgatctgaagcttcttatccatgtactttttcaaatcccgtggttgccctgacctgctcatggtggaagaagagat

SEQ ID NO: 29272 - DNA, 61 bp, Glycine max
  Clone ID: jC-gmst02400007h04a1
aaaaaaaaaaaaaaaaaaaaaaaaaaaaaaaaaaaaaaaaaaaaaaaaaaaaaaaaaaaag

SEQ ID NO: 29273 - DNA, 560 bp, Glycine max
  Clone ID: jC-gmst02400007h05d1
caacacacaaagctgggaagtgcatttatcgaattaattaccaatgatatgggggtggggtggtactggatggcatcgacagattgtatttctgctactccaccaagtaccaatttgagcacacaatctatagtttttcatcaattaaataagccagtcaatcaaattttatacattttctgagttccttcctcatgctgtattaaacgactgccacaaattcctgatttacacagattccagcctgtcacttgtgcagcacacctttccttgccattttcggtaccttttgaatgtgattcttctgttactccaatgcttcataatctgtcctctccctccacttactcttgcgtagttttataggacggtttccaacatacttaccattcatttctttaagagcaccagcaaggtcagaaggattggcaaagctcacaaatccataaccttttgttttaccagtccgcttgtctctgacaactcgtgccatgttaaaggaaggaaatcgtgaaaatgctttgagagaacatatcattacctcgtaccagatcccacag

SEQ ID NO: 29274 - DNA, 509 bp, Glycine max
  Clone ID: jC-gmst02400007h07d1
aaaaaaacttgtcactgactatttttttgtttcttcctctgcagtaaaaaagatcaggaaatagataaatggtgggaacccaaacaaaaagaaaataaacttgtattttatatatcttaagaaagtaaagggggtgttcagacacggaagttctttccagtgaaagtttgaccaaattgccaatttgatggaacaatgttccaagaggtggaagagcgacggtcgctggcggtgactctgaaggacaaagcctgacccaccaaaacggcgtttgactgccagttctgtccccagtttctgctcattggcatccaccccgttcgtgatcccttaacgtaggcgtgcacgatatcccctgcacccgctacgttgctgatcaaaaccaggttaaagtaacggaaaccgtttattgtgaacctgatcccaccatgcttcctacatgccaccctgcggaaagcgacaggcacgatgccggcgcggtattcggcgattttaaggaacatgggcat

SEQ ID NO: 29275 - DNA, 542 bp, Glycine max
  unsure (1)..(542): unsure at all n locations
  Clone ID: jC-gmst02400007h08d1
attataggcacagcgtactaatgaatcaattccaatctcaatttacatggttatttatgtaccaagattttgtggcagttcatgtcatgccttattatgtcaaaacatcctatacaacttcattaacaacagggtatggatctcccaagatcattttcataactgattttttgactgacatatcataggtaatgttcataaaaatgtcttgtccataccctcttcttagttgaagagcctggtgtatcaccactcccagcaaattcccatttcacaacatctccatcccaagaagagctaacaagtgtagtgtggaaggggtgccagctacaatctcttacaggtgatttatggtgcttcagcgttgcgacttgagctccacttacctgtagtgagttatcaaagttaccatcaaaagagaaccaacttgaactttttattgatttttttttcaaataaacaaatctaactgcaaaatttcctgattagaatgaagntagttcatgcatagtggctaagaggatattcatcacgttccaaca

SEQ ID NO: 29276 - DNA, 507 bp, Glycine max
  Clone ID: jC-gmst02400008a01d1
agtctgaaagccacatacatcttttttaaagttacagttattgtacacggatcggatggggtaaataacgccgatcaattttctcatttttgggggaccctttgaatggtaaaaatactaaaaaaatgactacctaatctacataactgagtatcacgctgcttctggttgcaaatcatgcaccaagggctgcttaaattgggccataggaagagacctgatcgtaacttcctctgggggcttataacaaaatttatagttctattatcatacatacccattggcttccctgataggaaactacaatccctgctttcaaccataatgggaagcttcagtaatcattggcttcatctttcattattgtgtttggaccatcattgaaacccgtgctaggggcaagctcattcaaatcaaggaagcgtctctttcctgtgctgctctcaacttcctcctgaccaggactggttaatttttcaggaggcttggtttggtcattctcttcta

SEQ ID NO: 29277 - DNA, 447 bp, Glycine max
  Clone ID: jC-gmst02400008a12d1
aacattcagatttcaaggtaagaattttattgcacaatgagaaggcagagaaaattgatggttctgtttctcagtacaagttttagaatgaaaaatgaagcaacaagtgtttgtagtggtagtagtagtagtagtaagcatacaaaactacaatggcatggtacatacatataataattgaattaccaattcagaatttgatggctctcacttccacttgttggcaacaatgtcagccaaatccacaaccctttgggagtagccccactcattgtcataccaagcaatcaccttaaccatgtcatctcccatgaccatggtcaacgatgagtcaacggttgaggacacatcagtgcacctgaagtcaacagacacaagtggctcatcacacacagagaggattccctggagctcattgtctgcactctctctgaatgctgcattcac

SEQ ID NO: 29278 - DNA, 311 bp, Glycine max
  Clone ID: jC-gmst02400008c11d1
gaaacccaataagaattattgacattaaaagggaattgcccaattggggagcaatttattgtcccaaaactgtgacaaaacttgtttgacacattcggactataaatttagaaatgcccaccttgggaaaacttttatgtgaccacaagtgcacagcttttggcccccaataaattgtccgagcaatatgttgctaaagaaagaaaagaaccactcactgaaatttgtgcccatttgaagaaaattggccaaaaaaagttgcagcaaaattattggacctatgtaatgccaacaagagatgttccttgatt

SEQ ID NO: 29279 - DNA, 517 bp, Glycine max
  Clone ID: jC-gmst02400008d01d1
gatagtaaaccctaccaattatgttatttggtgcgtaaagagcatagtatctcctagaaaagatggagacagtgagagaggccattcaaattttcacaggactcatttttttatgtaacttaaagacaaattgaacatggtctttcttcgtctttatatgtgattttttctcaaaaaagcacggttcttcttgaaacttgtccaagctccttaaactgtatagtgctgctgaatcgtgtcaatgtcaagccccttcagcttcaccactgactcgacatgtccctttagagtatgaagctccctaagccttgcaacttcagcacgtctcttggcttgttctgcaatctctgaaagctccctgtagctatttttgtcattgaaaaggttggaagtttccggaggctgaagaccgtgaagtgtcctctgtgcagccgcccattgagcttccctctcttctttaccatagtctttctttgtagtgaaagcagtcttgttctccaaaagattatcccaagcc

SEQ ID NO: 29280 - DNA, 489 bp, Glycine max
  Clone ID: jC-gmst02400008d11d1
aataatatatgtaaatgcaatcattcacatgctgtctatatttatgctgctgatgtagtttctgacagcaaatagtgtactcacccttaatatccacaaatctgtgtatcttttgcataactctactcagttaatgtttggtttgcatcctctcccaacaagtgattcaaactaaagaagatagcttctttgaacttgtatcttaacatgatcaagacgaacattctcaaacagtataacaaaatgccacaggggcatgaaaaaaataagtgtattccgaggaacacttaattctatgcaaaaagaccagcttctatgagggtgtgctatgtgcttgtaaagttaggagtaagatatggagaaatccatctagactaattgagcacacaattattagagtgcacttaaagacccatattaatgacatatgagattctgaaattaggcaccacagaacatgcatgactagcaacaagacagaacatactt

SEQ ID NO: 29281 - DNA, 509 bp, Glycine max
  Clone ID: jC-gmst02400008d12d1
gaaaccatctttaaattgcacataccattctgatacaggatagatgcattacaaagctaacaacaccaaccaactttcaccaaaccagcacttaaaaacttaaacactgtggccaacatatatattttcgccaatcacatgaaagagtccttcaaattgcagagatgtccaataactccaagtcacccaccacatataacaatataataagaacaccaaataaaatgtgaaggaaactcggatcatttcatgatgaaattatgcataacttcatctcaggccatgaaactttgacttcaaatcttagatcttatcaagcttctcagccttgacaactgggtttgctttagctatgacatcccgagcagcagtgcggtaatcaaatgggcaattatgcttgtctgagtagcgatgtacagcacaaaaaaggtcaccacatcgacaattaaaccctgtcaaaccaactcgcttgttgcaactgctgcagcgttttggtccatccttcagct

SEQ ID NO: 29282 - DNA, 448 bp, Glycine max
  Clone ID: jC-gmst02400008e01d1
aatggaagacctacccagccttaaaaccataaaactttggtttatgaaccaaaaaagggacaatccttacagggtacaacataaataacagctccttaagggttcctaaaaaaaacaaaacccggggtttaggatccccattttattttttcacagcttttttaaaaatccggggaaaaacactccttgggacaaacaggtttaatttcccccaaaaacattagtctcactttcactcacatttatttttttaggaaaagaccccccaaataaaaagctttactccaaaaaagccacttttacaattttccccagtttcatacaaaccccctttgggtacaacttatagcaaggacgggccaaaaacctggggcataagggtgcccaaaatcaaaggaattcaaagggcttgaaaagcttcacatgggcaaacttaactcctttgggg

SEQ ID NO: 29283 - DNA, 368 bp, Glycine max
  Clone ID: jC-gmst02400008e12d1
aattgggctacccaaccttaaaaaaacaccggacagggtcctttaaaatgaaataaaaatacccccattttaaaagaaaaaaaaaactggggtccctagggtttttaagaacaaaagctcttttaaaaaactaaaacattcatgaaatacaccagcaggggacttaaaaatcttaaccgggaaaaggggggaaaaaattggttggggggcacataattttggaaaatttttttaaaaaattttggtcaaagtttaccatcccaaagatttttaacgggtttaaaggcccccaagggtttgtcaaaaaaaaaagggcccttaaataggctaacccggttaaatttaaagaacttttccaaaactttttt

SEQ ID NO: 29284 - DNA, 594 bp, Glycine max
  Clone ID: jC-gmst02400008f01d1
cacaatattctaagcattgaatgattaacaaaatttaaatgcagcagttccaatatatagggactcaaacatcaaaacaaaatttcgaagtttcgtttactagcctaatagtgagataaattaccaaccttccgaacctactcactgtaatacaggggaaaattactacatgagtacgataaaatgcagtatcaatattcactgaccaccatgcttagccttcttatgttgttgcagaccgacttcgttggtgaaagactttttacaacttgcgcaagatagttgtccagcagaactgggagactggccttttgtactgttgggtgtctttccacctttcttcgaaggatggggagttgctacatgtacatttttcttaccattagtcttttcaggagtagcagttttagctttcttggcagaaacaggagtttttgctgcagactcatttggtctcttcttgccctgatccaccttcttagcaggggtctcttcatcactctcctcatcactatcgctgtcatcatccatctcatcggaacttccaaattcatcttcaccagcaggatcatcatccgatcatcatcagaatca

SEQ ID NO: 29285 - DNA, 458 bp, Glycine max
  Clone ID: jC-gmst02400008f11d1
gtggaaaagcaaaggtgcatcatcacatgataaggacacgcaaaacacacccattttagcacaatagataaaaccgtataataagacccctaatgctactagtcctgctgaaagcatttaatttaaatttaaaatccagggactagtctggggaaacatcctcacatattacatcaataactttcattatataacagtaagagataccgtgtagcaatattataagttacaaaacatatacaccgcaagtcacaaaagtcagtccccatgaaaatcaagtgatgtgaaggctatttcggtcatgattgaactgaaatgtctgcatttgcgtggttggtgatcttaggaggagccgtttttgtttccttatccgctttagttcgttctttgggtttgcaaacaccattgctgttgcgtcgaatgttgtttttgtgaggaaaaggggcattggaaccacc

SEQ ID NO: 29286 - DNA, 509 bp, Glycine max
  Clone ID: jC-gmst02400008f12d1
acgtacacttacccaattattttattaatgtcatgtatgccaagtgacatttgataagttaagtgcagataattgaaaggaagaagctactagttgaatttgtgggtccacttgagagccaaattggagatgttggtggtggaggaaccatgttgagcgagagccttagccgcagcctccttgatatccttgattcggtaacgaagcttcttcccttgttcaccttccatgaggcacttgactaggctggctatctcctgtctctccaccaagccactctctgcaacgttgggcctcagcgccaccttgacgtcatgcgtgagcataaaggcgttggtcctctgctccgcgaacagaggccaggctatgaaaggcacaccgttcaccacgctctccagaatagagttccagccgcagtgggtcaagaacccacccgtggatggatggcccaatacctgaggctgcggagcccaagactgaaccaaaaaccctcttccttttggtctttc

SEQ ID NO: 29287 - DNA, 79 bp, Glycine max
  Clone ID: jC-gmst02400008g06a1
aaaaaaaaaaaaaaaaaaaaaaaaaaaaaaaaaaaaaaaaaaaaaaaaaaaaaaaaaaaaaaaaaaaaaaaaaaaaaag

SEQ ID NO: 29288 - DNA, 492 bp, Glycine max
  Clone ID: jC-gmst02400008g11d1
gaacaccatcacagatcccatatatttcccacgatacatgctttaagcactaataggctcaaaaaaaactaaacacataggaacacaaatctaaatagaataaatatacaaaatacacaacagaactctgcagctggtaaaatccatagctgatacaaacaatattcaatacccattcaaagcttaaaacaagtttttttaaaaaatggtgtgcgaccttgatttaggccacaatgtcaatgtttgtacaacaaaatcgcaacaaccataatttagaacctcgaactgaagctctaccagtggaagaaaccaaaccatatcaaataaaaaaaatgcagtcatagtaggggcaaaggatgtttatcaggctcaatcatatagattcacatcacattgaaataacgtggttattaaaaaaaaaaacataaatccaatatgaacatcaatggatcttagcaatatatggttatcttcaattcctttgggaagatt

SEQ ID NO: 29289 - DNA, 547 bp, Glycine max
  unsure (1)..(547): unsure at all n locations
  Clone ID: jC-gmst02400008h01d1
gtaaacttcaaatgcaactgttttatagttgaatgaggatcaaattaatgttcacagccaacaattacccaacaaagtttccatagacaataactgccgacaatattacatccgacataaataatgaaattgttcctttaactttaatttggatatcagatactcagctgccaatcagtacagaaccaccacaacagattcattctcaaaaatcaaacaatttgaccatcattattctcgaccatagctctactttcatgatgaccaccatcctttttatcggtttcagttttgtctaacttctcatcatgctttccattgaatttaggggagtgttgttgcatgtgatttctctcatcatccaggtggtgccgatgtttgtgatgatgatggtggtggtggcgatgatggtggtggtggcgatcagacttcttatgcattgatcttttgctttcatcttcaaaattttcttccaatgactntgatctgcttctttgaccatgactgtgatgataatcagaatcagatgacctcagctccacattat

SEQ ID NO: 29290 - DNA, 511 bp, Glycine max
  Clone ID: jC-gmst02400008h11d1
aataactaatcactatcgcttgaaataatttgcatagggtttctgcagactttacccccaagattacaaacaaaatacttaggagacaaccctgccatcatgagaagcccaaaaacttgacccaaactacaatacaaaaacaaaacatttgcccctgaaaataacttggtaattagattacaggtagagactgtccagtgagactcaactggcaggagttggaaaataaccattgaatcatatcaatggatgtagatcaaataactttgacatatcagatgcattcattctactccacataaatacaaaggtataaatatactcaaagcaggagtcttcacacctcacttttgaataatccaccaactctaggcaagtcaaacactttgtactttgctcgatatttctttcactttaatgtctcctttttccactcccttgctctcataataatcatcaagagcccattgatactttgactgattcaatccaaacaacgtgcaaatgatca

SEQ ID NO: 29291 - DNA, 452 bp, Glycine max
  Clone ID: jC-gmst02400008h12d1
aactccaacatttttagtacttacgcttcaagcaaacaatgcaacagtatgcacttgaccttacaacatttgaagtttctctacttcacagtcatattggctaaaaaataataaggtgcctccaaggatggaagatcatgaaagcttccgcaaaatctagctgcctaagactttatacattcaaaattaccgctcaatgttaaaccagagcagcagctcacttctccgccctcatttggctcttcaaatttgcatgtccggaacatagacaaaacttctcctttcaagtcctgatggtggacacagaagtccgcagtggcataataattgcctttcggaattaggacaataatgcatctcccagaaataatctaagttaacaatacggaagaatagttagcgtattactgaactttatttaagtattgccaccgtcagagctgctacaggct

SEQ ID NO: 29292 - DNA, 472 bp, Glycine max
  Clone ID: jC-gmst02400009a01d1
aagcacaaaatacttcgataactttatattattttacatgcatgcatagcatagatagcctgctctcaaattagtcagcaggaacaaagatagagagatccaacgatctttaaatttcacatttgccataaatatataacagaaaagagggtatgggatatgagttaagttttgatctcattcaactacagtatcccaaaccattactcttaagactttgaacttcacttgtactccaggatcatgttgttctcaggagctaatccaacacaagcccttaggatgttttccagcatagctcgctgctttgacagtgcattaaccactggcgtactcggtggaaccagaggggccttggtcaggtaactgaggatggtcgcaactgggtggaatgagtggaactttccctcattttcagctttaaactcgattcgagtgctaagctcagcaagaaggaccaagtccaagataa

SEQ ID NO: 29293 - DNA, 485 bp, Glycine max
  Clone ID: jC-gmst02400009a03d1
gaataccgtcactcaacaacatgtaccatttgaaagcacgacccacaaaagaaaacgatttgaaagcaatgccacaatctttggttttagtccaaagaagcatgtaccatttgaaagcatgacccacaaaagaaaacaaactcaacaacatgaatttaacatacaggatatatataatagtttgcattcattttacttctccatgtaggacacaaaaaaaagtctcagaacaatcacacagtatagatccttcagaaacttttccctcagttaaaaaccagcccatccagctggttgagaagttgacttgtttgcctcaccaaaagcctgagactttgttcctgcactgctaggtctttgcatctgtgggctgcctgcaggtacagcactgaagctatctgttccaaaaccccatgaatcaaaatcagtagctagaggaacaggttgcttgttctgctgaccatttttcaccctgacagatttgg

SEQ ID NO: 29294 - DNA, 344 bp, Glycine max
  Clone ID: jC-gmst02400009a04d1
ctcaaagaaagtaaaagatgaaatgtggtttcatcgattgaactcataagtacaataatgtgtaatgagaagggaagagacagaaagcaaaacttaatcatttggattacagtccatggttcaaagttccagagacaggaactgaatgtacttgcaaaaaataattaaatgaaaactgaataagctcagccaatgttttacaagaatgaatattataatttatggcaataaacgggtacagggctatttgggagctagctttttctgacaatgttcttttccattttcagaacccaatcacatgtgcattgtaggagcagaagaatattattgaaagattgatg

SEQ ID NO: 29295 - DNA, 454 bp, Glycine max
  Clone ID: jC-gmst02400009a06d1
aaaataaatgatactatatatatcacgatcaattccatatccaaggtttcagcattgcaaacaatcaacacaggaaaccaacaccataataaacaccaagagttgccaattagaactaaaaaacgcaaatacatcaaattaaaaagtaaacataaacgcagatacagggccaaagtttgcaccatttgacactttcactattcaattcacctataataattattaacaatcaacatagaaaaccatacggttacggaggacacattctcataccgagcccttggccggcgccggagcggtggagacagcagcggtggtctcggtggcaggaatcttgacgtagcctagcttcttggggctctcgatctcgtcttcgtcggaggagaagtcgtcgaaagcggcggtggggtggcgcgtggagaagacggaccagacgaggtacatggtggcggcg

SEQ ID NO: 29296 - DNA, 182 bp, Glycine max
  Clone ID: jC-gmst02400009a07a1
cctttctgtaattttataaccgtcctttaaaattgtagataaataattgcttaaatgagctacattattagtgtctttgtaggtgttagtaataaggtcttccaagctgccgtgtaaattattaattgtgcaaggtcatgcaataatctgacaatcacatttgtttaactaaactgttactc

SEQ ID NO: 29297 - DNA, 502 bp, Glycine max
  Clone ID: jC-gmst02400009a08d1
aagttcaaaatcttttatatagccataacaacttcactttatattaattatacaagtgattcaacaaaccaactaaaaaagacaatacaagatcctgattcacaacactgaaaattgggatgggtccagccgctagctggaacgagacatgaacagtttaacactagcggggacataaatctcaagaaactactgagatatttactagttttcacagttgcagagcatctaaatgagacaaaaaaacagggtaggcgatgttctatatatagcacaagatggagtagttaagcatgagaattggccagctgatttatcaaagccaaggcattactagtcaattgagccacctgaagaatttggcctctcaccgtgttctttacatttgaaccaccagcagcagccgtctcttggaagccatcggtgcacgtgctctcatcggtcaaagcagcactcacccacgtttctacgtcactcattgtcatctcaaaattggagggtg

SEQ ID NO: 29298 - DNA, 431 bp, Glycine max
  Clone ID: jC-gmst02400009b01d1
aatattataagcagagattcataattcagattagccgaactttatacagaagcgaccaattaccaaacattaaaaaaaaaaaaaagaagcaaccatgagcttaacacacccattacaagtccaaaacacttgaacttgctgaaaggcaagacatgaccactttattctaaggatgtttgtttaacacaaaacaccagagtgcacgaaaaccattacagacataatacataagtttttagctacacattaatagtttatcattattcctaattaagggctatctctgcttgaagcttgcttttccaacaccttacttgcaagtgcaggggttgcaggagcagtttggtccacatttgcagccatcgttctcagcgggcacacccatttcagcaccctcaaattgagccttaacgggtgccactcccatgacc

SEQ ID NO: 29299 - DNA, 443 bp, Glycine max
  Clone ID: jC-gmst02400009b02d1
actctgtctaaaaggatgtactatttaaacccatgatcattgaatctccacgtcataattgttaataatggatttaattcatacaaaaccttaaagttaataataataaaatgcaaccgataagcattagaaactaatagcagggcaaaaagattcattaaagactgcagggtggagaaaggggtggcagaagaaagattgagggggaaccaaagtatcatagacaaaatcatgcagcaggctgctcctcagtggcaggagcttctttctggggttcttctgtgaggccattagaggtggcatcctttggctgtgaatcaagtgcaccttctgctgcagatccagttgcttttgatgctgctttctcttttccatccttattatctttggcgtctttagcaggagccggtggtggaggaatcatgtgaggtggtggtgtatgc

SEQ ID NO: 29300 - DNA, 468 bp, Glycine max
  Clone ID: jC-gmst02400009b03d1
gaacctgaattgatcaatataattaaacagcagctggacatccaccctttctagggtcacttactgctgttagagtgccatgctttgtaagtgatttggtgttttcaccaactttcctattgaagttcataggcgttttgagagtttgcacaataagctgagtcacagctagtgcttcagaacctctcagttgatgacctctctcttctaggaaaagcctactttcttttgaaagctcaatgtgatcgccattatgagcagtcaagttctcataacgaactacatttggtattagcttgtgatagatccttgggctcacaactgcatccaagggtttcattcccaagatgaaatgattaagaaagacttgaactacggctgcaataatgttcattccaccgctccctgcaagtaccccaaccaactgatcatcctttgtgacaataagaggagtcatggaagacaatg

SEQ ID NO: 29301 - DNA, 406 bp, Glycine max
  Clone ID: jC-gmst02400009b04d1
gattaaacataacttacaacgaatatatttaaaactaaatgatgtaacgagcaaaaaaagacattttcttcccacaacagttggaactggacaaaagagcaaaaaacaattattataaaataaataaatatggaagtaataagcaaaaaaaaattattattaacttgaaaaaaaataagggaggaaagggtgcatcactatctagttcaccacactaacaatacatttggactcattgctaaatggccaccaaattttgcatttcatccgagggagaacaaaatactcttctcactgaagcagccgttgctcgttgctctagagtccatatcctgaattgtccatggggtttccagcaggtatggcctcaggttcctttatctcaaacaccacgcaatctgacatt

SEQ ID NO: 29302 - DNA, 549 bp, Glycine max
  Clone ID: jC-gmst02400009c01d1
gagagaacatttttttttgtttcatcatataaaatatatatgttctgaaagaacacatacaagtacacaaaaaaaagggggaaattcataaaaaaatacagaaaaaaaaaaacagaattgagtaagagggaaggaaacatagagaaaattttagcaatcagataataagaagccagtagtagtgcaaaagtcccttgccaagagtgttggaaccccttttagttaagcaggtacttctcaggaatcacaggcttaatcacgtgttctttaagatcagctgcaatctcatcatttgtgacagtctcatcatgctgtgtggagatgagcacagtgtggacgcggattggaaccatggcacccttgtcattgtagtactcaacagtgacttgggtcttgccatcaggtctcagccaagggcatgtcccgttcttccgaacctcggtgagcttggcaccgagcttcgtggcaaggacatggctcaagggcatgagctcgggagtctcgtcagtggcatagccgaacatatgaccttggtcaccagcaccaatc

SEQ ID NO: 29303 - DNA, 496 bp, Glycine max
  Clone ID: jC-gmst02400009c04d1
aaagaggaaaactttaaaataagttcattccaaattcagtttttaaggattgaaacattattctagttttcttttaggttgttcactaaccatgaacaaagtagctagctagcttatggtcatctacattaatcctacagaacaatgatctatgacgtggaattttctttgtttaacatcatcagggttggcattacagtgcatgaataccaaaaacagcttcattattgaagtctctaggagccatgctgaaacctggaacttttaccttggcataagcctcatgtaaagcacagtcatagagatcttgcccttgcattttcagggccatagaagtgacatcaggtgaagatgacacaaacaaggcatcactatttgggttgaaaaccatgaatgatccatcattgtagtggctactagtccagcccagctgtacctttgatatgctattcagcttctgctgtggtgcatgcacaggagacgcattaaataactg

SEQ ID NO: 29304 - DNA, 449 bp, Glycine max
  Clone ID: jC-gmst02400009d01d1
aagccaaaataattacttatttaagatcccattagaaagtccacagcaatcggtaatacatacccaattttgtaacgggtaaacaaacccatccaaactgaaatttttagttctcttcattttacaaacttgggcatccatttttggcaaatttaatagaatacagagttttggcctaagtaaacaatgaattagttctgattttgagggatttagatactaaaattcaggtgatccatcccttaggaaattggtagtagaaattttgggcttggaatatgccaaaactacctttgatcagccagtacaattacgggttttctggataaaccaggtgccacagcatcagctttaggacttggggccagtaattgatgcagttttgcaccaaagtttgggttatttttgcaaaaaccattcttattcttcacaggtttatcattagaacc

SEQ ID NO: 29305 - DNA, 517 bp, Glycine max
  unsure (1)..(517): unsure at all n locations
  Clone ID: jC-gmst02400009d03d1
cagtgaaagttcatatcgaacgttaatacattatcagcaaagaacagagtgtactttgttattttcagttacatcaactactacaaacgtaaacggccaaataaacaagaatctaaagtcatgacattaattaacataagcaaacaagaagaaacaggacaggaccttttctggggtctgtacaaggaacagaaggatcaaattcagtctgttaaaactcttcttgccttctctaatccatcgccctttccttcaacctctttctctttctcccaccaaaaagacaggaaactagagaaatattaatatatgtaattaatctgtgaatccaaggaccatattctcaagcaacactaatgatgctatctccattgctgaaacattgcatggcatgtaaagctgaatgtcttgatgatgtctgtctttggtcagatgagaaggatagccccagggacagtgtcngttgtgggtcaatggcagaactagaagaactcgtggtgatgataccagacactgt

SEQ ID NO: 29306 - DNA, 346 bp, Glycine max
  Clone ID: jC-gmst02400009d04d1
acgagataaccactcggtaccatatatatatagttagtgagaaaacgacatacactgttcacaggatgaagctttatttcagtgtggaatccattatacacagaacacatacgtaggttgaaaacttagctatggcactctatctatagacggttgatctaggacaacacacaggacatgatcttacatatgctccaccatctactattaagggtgctgaacaggcatgggctacgtttggaacaatggtggtgtgatctgcaatatccacagatttatggggaacccatttgggggcattgtttacgacgatacggctggcaaaggtagcgccggcatcaactcc

SEQ ID NO: 29307 - DNA, 478 bp, Glycine max
  Clone ID: jC-gmst02400009d05d1
ccgcttcttggtttcattcactccatccaaggaagaatcgtctattgagtaatttgttatggtgaactaacacaatagcacatttattggaatttaaccagttcagcaccagcaacttacaaaagaaacaatatggaaagatagcccagtatgtaattccaactcaacaaacaactgggtcaacaaaagagtgatccactctttcctatcaacttgaaatgtcttcaatcataaaagtgcacattaacaattatgcttcagtactgggtcttttctttgtggtgtaagccgcgtactccttcccagtatcatgtcttattgtctgatcaccgaaatcaaggaatgcagatgtgaatgccaatgctgatccagcagaaagtgcagttttgatgctccttgctctgtaacccataatagttgcaccagcaacaaatgccgcaacagctccattgactaaatccctctttatcctatagtt

SEQ ID NO: 29308 - DNA, 589 bp, Glycine max
  Clone ID: jC-gmst02400009d07d1
gcacaaaactggtaaaattccagatcaataaggattgcggcgaagccgcaaagatacaacattcattagggaaaacaggagtggggaaaaataaggggggaggggttgaggaagaatcaattgctcacagagcatgctaagacacctaaatattccacacacagttattgaaacaacccaatatagagaaaatttttctttggtgtattataatataaagcagaaccaaatgacttggaagattctactttcttataccattcacttggcaagttcgttgcggatgagttttgctgcggcaaccatgtttgtgagggctggcttcacctcagtgtacttacgggtcttgagcccacagtcagggttcacccacatgatgttcttctcgagcactgccagcatcttgctgattctgtcagcaatttcttcagttggtggtatacttggggagtggatgtcatagacaccagggcccattccagcaccatacttcacaccttcgcggaagactgacagaagctactagtcggaacgagagttctcaatggtgataacatcggcgtccatgtccatgatggattgatgatgt

SEQ ID NO: 29309 - DNA, 535 bp, Glycine max
  Clone ID: jC-gmst02400009e01d1
aaaacaatctgatatcatttccattattcttttttttctgacacaaattcaatacatctgaaaccactataagatgtgttagcgaggagctaacactcatccacagatttattaaaccactacaagatgtgttagtgaggagctaacactcatccatataaattaaaccactataagatatgtgttagcgaggagctaacacacattcacaaatttattctcactgataggaaggcaagaaaaccttataatttggcactgatcttccttggtggtcaactaggcattgaccaacatttggtagtgccattgtcctacacacttaattttacaagtcttcttcacaccaactttgtattatccttttttggtttctatgcccaatgcaatgcactctagaataaaatatatcactgactggaacagaagcctaagaatcccatgaactcatggttgtttatcatttgaatgctgttctcaatgccaaccacacccatggtgagggcgctagcaaaaatgacacctgagaggatga

SEQ ID NO: 29310 - DNA, 463 bp, Glycine max
  Clone ID: jC-gmst02400009e02d1
cctactccaatgaacatgacaatttcatatattattattatacttcacaatcagcatttctttgttcaagactgataataaccattaaattattgtcattgtaacaatcggaaaacgagggaaaggaatagaagaaaacaatgaacaacccttgccagttagttgcaccaaccaacaaggcaccaaccatagtaccaatcaaaaggtaaaaagagagagagaccaaatcctactaagaaaagcataactgttcctttccatccaaagggagaaaacatgcaggttttgctcatggcttccacagaatggttgtgtctgcaatcatggaagtaaccacgtatgggtccatgttggaagctggccttctgtcctcaaaatatcccttccctgctttctctgtgtctctcccaaccctaacagaagctccacggtttgcaactccccataagaaggtgttgatgtc

SEQ ID NO: 29311 - DNA, 486 bp, Glycine max
  Clone ID: jC-gmst02400009e04d1
accaaaaaagacaaaagccaaaaatatattaagaaggattctttgtacgcaatacataatcatttctcaatcaaattaaataaataacacactagttcatcatctttttggttccctagcgatttacataagccagcatcaggaactttatttatcgcaacactaacaatacaaataaaaaaaatcactaaaaaggaaggaatagcgatcggaagttaatccccccccatgcacgtacaattagaaccacactctgatcaatagaatttgaagaagaaaaaatggaaagccacaactagagcaaacccgaagcaaaagaagatttaagatgatatgttatacttatagtataagcttagtaggcacattggaaatcacgtggggctttccttgagcaaacattgagaagcaagctgagtgagatcggaaggttgaggttgatgcccaaaatgtttgctctgagagcagtgcaaaggcacactgcag

SEQ ID NO: 29312 - DNA, 550 bp, Glycine max
  unsure (1)..(550): unsure at all n locations
  Clone ID: jC-gmst02400009e05d1
attcaaaactacagtcaattaaattaaaacttgaaacaatcaaaatccatacagagacataccaccgtctatcaaaaccaaaagtaaagcacagaaccaacaaaggtaaataacaatgtctctaaaacatccataaaaccaaaactagcaaatcaagcatccaccctttcctcctccaagattagagtcttccctgttggttttgccaatagatctgtgtactcttggaatggagatttggagaagcgagtctccttccagaattctggtgtcaggaatccataggttttcatcaagcaatcaaaagtagcctgtaaataatacaaagcatcatcattattatgggtactaaaaacaacatcatagcaattctttcatgaacattagcctctccaccaaaggatcatgcacacaaatacacattagcctctctaacaaaagatcatccacataaacacacatacacaggtaacaaatcacacaagtgatgatacantgtgaatgccaataattgcagcaaaaacaccatagactaacacatattaagtaa

SEQ ID NO: 29313 - DNA, 335 bp, Glycine max
  Clone ID: jC-gmst02400009e07d1
aacctgatgtgctctttatactcatgatcaaggtgtatatacaccctaattggggatactgactgcagttagagcgccatgctatggatgtgaatagttgaatgcaccagctaagcttttgaaactcataggcggtctgagagattgatcaataagcggaggcagaactagggcttgggaacctatatattgatgacctaccacttctaggtaaagccaactatgttttgagatgtaactgagagcccgaagctgatctctggggttcttatgacaggccaatttaggtattagcctgtggaagatacttgggttcacaattggattcaaaggct

SEQ ID NO: 29314 - DNA, 522 bp, Glycine max
  unsure (1)..(522): unsure at all n locations
  Clone ID: jC-gmst02400009f01d1
gaaatgaaatcaatatgccttccttgatttttattaaggacaagagagtgcaattatggcagcttaatccaatccataagtccaagtgaaattacataccatgcctattaacagcactgtaagaaacaatgttcaaaatccactgagtcagaaggccataagaataccgctcatgacaaactgaacaagatgactatgatgaggaagcagcatctgatgttttgtcactttccttgcgtaggctgttttctctgttataagcagacttagcaccttgaaagatagttcctaactttttcaatgctttggctcgagacttcagaacatctttggaggcacttggatctttaagaacagcttggcaaacacgtgacagagttgattcaatatcaataacattgatctgccatagagaattaatcatggcatccttcttatcttcaatagctttgactatgctntcttctttggtttctcctggtttagcttcttgagttcttcttgtatttgaatgagggacac

SEQ ID NO: 29315 - DNA, 504 bp, Glycine max
  Clone ID: jC-gmst02400009f04d1
attcaatccagagactttacctcttcatctaaatatgaaaataaataggtatacatgctcacaaaaattatggtgaaaaggacataagatgagtttatacttgagtgctacggtttacatttgtatcttgcaagctttattaagctatacaattccatgtacagatggaagctcaacctaatggctttgtgtataaaactgccctttgcaaactaataaaggtattggaagaaactaccatgcagcaaagaatcctgaatttcaaatgatcatatttgtaaccagcttcaaaccctgatgatccggtgacatattgtttattaagcattgagtagcatttgcaagattatgtcattccatgagtcaattggtcctggcaaacaccaatgtagacaatcattctgaactttggcattcttggcttttgcaaatggctgaaactttctgtaaggtccaggatgtccatctggtctcagcagtgaaaggagagttgtgtccaaaagt

SEQ ID NO: 29316 - DNA, 485 bp, Glycine max
  Clone ID: jC-gmst02400009f05d1
aaaacacaaattcttgcttcttaatttcatgtgttggaaagtgtgaacccgtgtttgcatcactgcaaatgggttccagaacacacattgtcttcctctttccaatacaacgaaactgctgaaacatgattgacattgactaattaaaaatatttttacactgacataataaaagctgaaatgaaaggttgaatgaatttcatcaatcctgctttatttcttcttttttttattagggtaggggttaattttaattacaatccaacattaggattgcctgaaccagctgcggcaactcccatcccaccaacaccatcagatgtagctgccattgcctcatggtctcctgaatctttaacatctttaacatccaattcacttacaagttcatcaattttcctaaattgatatggccatcttgcattatagagaaactggcgaagatcaaacctattatcctctggtgaataactcttagcatggta

SEQ ID NO: 29317 - DNA, 535 bp, Glycine max
  Clone ID: jC-gmst02400009g01d1
ataaaatattaacagcattagccaaccacatgtaaaaaacacaaatgcatccaattgttctaggttcataataataaccaaaaaataaatatgaaaatggagagtaacaaagcatggtgagacacagctaaccgaagctactaaaaacaaggaacaaagcaaacaagtaggataactagggagcagaagtagtaccagttaaagcaaacaagaaaaacagacactcaactaacaaaagctaataaccccaaatcaagatggacctaatggaaatagaattctcatcaaaacttatctgcactgtccctcttctctttatatgcttttcaaatttaggttatggttgaatggtcctcacttggccatcatgactttgacgaactcctcatagttgatctgtccatcaccatcgacgtcggcctcgcggatcatctcatcaacctcctcatcggtcagcttctccccaagatttgtcatgacatggcggagctcagctgcagagatgaaaccattctgatccttgtcgaacacacgg

SEQ ID NO: 29318 - DNA, 506 bp, Glycine max
  Clone ID: jC-gmst02400009g05d1
gtccactcaaatacttggatatatagacaatgaaattttcaacagaccgggcaaaatagcgcaatcagcaaagtgcaaacttaacatttgcaaatagtatcccacatataaaatggacgaatatgttattgaggagttaattaaaactaagagcagagcataggctaccccaatttcaagccgaaagaagagcacaagtaaacccatcttgcacaagttgattaaccgcattcctgaacttataatagtcctcaaccttgttgtaaacctgacgagaaattcgtgcatacgcagtaacagagccatcttccccaccacgaaaataaattggtacttcaacatcaaattcatccctcaaacgggtcctaagcttttgagcatcagagtcactcccaatacccaaagaaggaggcaaacccaccatcaccatgctagcactcatatgcgaaggactctcaaggtgggtcccccaagccttcaccaacatctcccccatctcaacaacc

SEQ ID NO: 29319 - DNA, 533 bp, Glycine max
  Clone ID: jC-gmst02400009h01d1
cacatgcaaagtgataattctattctgttggtttccaaatggtacaaggcacaccaaaaatacatggttgatctttatttttgtgacaaagaaaacatcatcaaaacatctcctcgatcgccgcctaatcaaggagctaggtagtcgcatggtatggtacaaaactctaagtttccctatagatagtgtacaacatgcatggaatacaaggatgaaaagaatacatggatagtgtacattttacatgctccttcccacaaagctttctacttaatgggcttgagagcttgatgaccatagtggtgcaagttgtacatttcattggcaatgctgcagctccagcacttgctgctcatcatgtggaggcatgattctcttggaacacccctgcttgacctttgtgggaggaatggcttatcaaaataaggcatcaattgagctcttggaaccatttccttcctcagcaaacgaacctcttcctcttcaatcaacttttgcagcttctcctcttggttcttttgcagctccatgat

SEQ ID NO: 29320 - DNA, 478 bp, Glycine max
  Clone ID: jC-gmst02400009h02d1
attcaaacaaagtgccataattttaacccggaaattaataaatttacatacaagtgaggagataagcttaggattccccaaggaaactgacaaaccctacggtcccgattgcttaataatcgtgaatgggacccaatctacggacaatatcaatccactcagtggaaagtccaaagccaaatttaccttgttattattaccatcacccgctgctcatggatgccattcctgtacacgtgtcacctcccacccgtatacggcgagtcaaaccagattcgttcactcacccaaattctgccatactagtttcaataacacaaattggggatttcacaaccctaaattatacaattagtaattttctttttggaacaacaacaatactagctagctagcaagctactagcaatagcttagcgtagcatatataaaaattaatcatacccagagagcgccgacttggaccagtttggggatc

SEQ ID NO: 29321 - DNA, 514 bp, Glycine max
  Clone ID: jC-gmst02400009h04d1
aatctaatgaggatcataagatcagatttcttccattttactgttgaataataatgtacagaacagacccagtagtagagtatacactgacaacaatacatcagagcccaaaaaccatgcatggactctctacaaaaccttgacttccccattcgtaaatgcagaatcacaaaacagtttcccatctactgtacagcaatgtctaacctcccaaaaaagaaaaatatgcaagttaagttttgtatcaatttagccctttctctggcatctatatggtgttctgattccagaagatgcatttgccattgcacgaactgtcatttctagtatcttaagtgcaggagagaaacccctcatgcgttgatgctttaaatatgttacatacaacaagttcctcttttcgaacaagtgagcatttgttagttgattgcttgatatgaacaaattgtcagaaagtttaatgctgagacattaatgaactccataagcccgagcagaagccatgcaaaatgca

SEQ ID NO: 29322 - DNA, 528 bp, Glycine max
  Clone ID: jC-gmst02400009h05d1
gataaacgagttatttgccaatctttaccataaagaacactacaaataaaatttggcaacagctcaacactatcaatatcaaaatttacataatgactgccataaagacaagcaatattctttcaatactcatcatcatttgagactaattaagcttgcttgattcctagaattgaaaagagaaaagaatattttgttgttgggcttatgatatctagttgggaccccagcagcttaagtacatgacagttctcaaagactcttctgattgatttgccttctcatgttttagtgttgtggatatcatagcagaagaagaaagcttgttagcctgagagaatgagccaacatggtttttgagatggtgttgagctgatcttaaggcatgattccacctgcatatgccttggtctttcaaggcctccacaattccaacacttgctgccacactccatgctctaattcctgaactcatcttgttattgtgatgatgatcctgtaatcttttagatgactttatgtgacaga

SEQ ID NO: 29323 - DNA, 565 bp, Glycine max
  Clone ID: jC-gmst02400009h06d1
gaacactacaaatagaaagttgacatttaataaaccaaagcaacacaacgcagcaaagtcctgaaactcgctgcgcttaacaaaaatgtaatcaggggttccgacaaacacaacacattaaaacacagataaataaaagcaattttgccaccgtcgatcaagaacccagttctgggaacaacagttgcgagatgatggtggagacttcaaactttgtccgaaaaacaagctacctagaaaagaagacacaagagtacagaaaagaaaccaacatttattgtaaccaacatcccctgatgaaccagcccgcacgattcacttcttcttctgggcagccttggtgaccttggctccggtaggatccttcttctcaacgttcttgatgactcccacagcaacagtttgacgcatgttcctaacagcaaacctaccaagtggaggatactcggagaaagttcacaaccatgggtttggtggaatcatcttaacaaaccgcatcaccgtcttcaaaacttggctccttctaagctctatgcggatcgctgcaatttgtcatgagttcaca

SEQ ID NO: 29324 - DNA, 534 bp, Glycine max
  Clone ID: jC-gmst02400010a01d1
aatgttaaaataattcttaagcatttgccacaagaaaatgagaaatatatagcatacatctttgaagaaataaagtgtaacttagggactagcaaagaatgtacatgtcttatccaaaagtgtacatgcatatgatataatgcatgtctcatgatcatccctttttcttttatgtagaggacactgatacttttgttcagggacaatggtagatttagtaaagaaactaaaattgccaatggccataaagtttaatcttccccttcctctctattcctttggacagcaccaaaatgctttactagtatgtctaccacaataggcaccaagttcttgcaaggcacacccttcttatacacctcagctagatgtgaatcacttccaattctccctcccaggaaaatatccacaccttcagtggccttaccattctcatccctagccatgcaccccatgaaaccaatgtcagcaacttgcacctggccacaagtgttggggcagccagtccaatgcattctcacaggcctagtcaca

SEQ ID NO: 29325 - DNA, 612 bp, Glycine max
  Clone ID: jC-gmst02400010b01d1
gaccataaagaatttcaaaatattctgaggtcatgacatactcataatttaaaacaaactctacacaaccttggaatcttgcttttgaaatttgaaaaatgggaaccaaatgtgtctagaagtttgaagaaaaaatgaaagtaaaatcccagcaaaagaatccacaaaacaaaatacattattcaaagatataacaaatgtaaggtaaaagcaaggctgtctgccatgcccttttttgtacaaaagtggccatgcagcccaaaggaagaagccatgggagaaattatcttcaagtatcgtctacttgtgaatgaaatacaaagctcgggaatgttgtggtgatgtccttgaggtattgaagggtcatgttcttcaaaagtgacggatggcgcaaaacaaggtttctccactcttccttgtcaattttgccatcatgctttgtatctgcttcctcgaaggtcttgtcaattatactttctataacgtcatctgataggttcatgccagattcagcaagagtagcaactaccaattgcttcacctctggtctttcaataaaaccctgctgcttgagatcatatagttgaaaggaaaaatcgatcttatcatcaa

SEQ ID NO: 29326 - DNA, 540 bp, Glycine max
  Clone ID: jC-gmst02400010d01d1
cgtgttgtcttattttacttgtggcaagttttgccaatatttacatcacaaaaaagaaaaagatagacacatcacgctcttcacatatcaaatctcacttttcacacgaattgactgggcaaaaaagcaaaaaaagaaaaagagagacctctgaagataaattacggtgccactttcatcataatccacacctaccaacaggtaccgtgggtaaaagcacgctaaaacaagacaactggaccaccaattggtatggcatttcagcttcataatcgcttcctcaattgagaccctttgcccactgctttcatattttgagaatctctgaaacagacaaagtgcacgagagtgctaccatttgggtagacagcaaaaacacttgtccctattttcttatggcacagagaacacatgctatcaccagttatcttcacaacttctttcctctgactatagagttcatctttcacctgaaggttctcactttgtctcaagctctttatcaccgaacaatttccgtacatttcactagattttctc

SEQ ID NO: 29327 - DNA, 501 bp, Glycine max
  Clone ID: jC-gmst02400010e01d1
gctcaaggcgaggcacgagataaccactttttaccatatatatatagagagagagaatacgaagcacactgatcacaggatgatgctctctttaagtagggaagcagatcttatcagtacacataggtaggttgaaattctagctctagcaatctagctagagaaggtagtacttgcacaacacacagcacatgataatttattttatacacaatctcattctcatggtgctcaagatgcatggactaattaagcaacaatgttggtctgataggcagtgtccacagataaattgggtacccataaaatggcctcgcttccaaggaaatggcaaacagggttagttccaggatcaactcccataagttgatgaagcatttgatgattcattccagaagtatttgagtggcaaatagcaagtgcctgagttttggttccatcaccagccaccaatggaaccatgaaagctgttgttcacggacttcatggcagtaaaatact

SEQ ID NO: 29328 - DNA, 492 bp, Glycine max
  Clone ID: jC-gmst02400010h01d1
aacataaatggtttggtttcatttaatctcccatcaaagaatgttgattgcataacatagttgtatatttgtgagtttaaaattcttacacatgcaaagtggagtataacaagagattggttatgcagttctatgacagcacattttgagggaataaaaaacaaaatagtcccaaatgaaaagataggaatatatatttagcattaatgagtattatactttgcacaagccatatcatttttagtataaagtatattcaacgaatgggatcatctagatcagttccaaaccaacagagaaattctgacactggtccactagtgaaatattataaaaaaaaaatctaacatgaaataggtaaccaaatgaaatggatcggagtcactagtggttaggaagagcagcacccacctttctgtgcaactggctgtcccctgatctgcactgttggaggccttgcattgtttgcaggttggcttgccattctatcct

SEQ ID NO: 29329 - DNA, 388 bp, Glycine max
  Clone ID: jC-gmst02400011a01d1
gaaattaatagttggcatttttaatcaatccaattcccagcacacaggaaaaggccccaaagaccatttttacccctatgtgaaaagggttctccttttttttggaaaccaatttaaaaaattcaaggtttaaattaaacctttatatacacgtgtttccattacacgcgcggacaccagccattggagtcctgtttagtttggccaaaacttgcttatggccaaaaaagggaaaaaaaattttttaacagctcccgcaaagaaaaaagaaaaatcccacgtacccacttaattggcacgcaccaaaaccgactgggcacgtgccaaaaaaaaaagtctactatttgtagccaaacttcaacttattggccttcaattggtctttata

SEQ ID NO: 29330 - DNA, 552 bp, Glycine max
  Clone ID: jC-gmst02400011a04d1
gggggaccctttgaatgtaaaaatactaaaaaaatgactacctaatctacataactgagtatcacgctgcttctggttgcaaatcatgcaccaagggctgcttagattgtgccataggaagagacctgatcgtaacttcctctgggggcttataacaaaatttatagttctattatcatacatacccattggcttccctgataggaaactacaatccctgctctcaaccataatgggaagcttcagtaatcattgtcttcatctttcattattgtgtttggaccatcatcgaaacccgtgctaggggcaagctcattcaaatcaaggaagcgtctctttcctgtgctgctctcaacttcctcctgaccaggactgcttaatttttcaggaggctggttttgttcattctcttctactgctggatatggaacaggctcatctactttcttttcttgttcttcattatcactgccatctgaatcttcactttccatcatgtattcaccattctcactgggatctgagtgatcagctgatgaaatagacttctca

SEQ ID NO: 29331 - DNA, 447 bp, Glycine max
  Clone ID: jC-gmst02400011a05d1
agcaagcaactttgaattaaaatttaatgggttaacttccccgacttgcaaatcacccataattggaatatctaataagttgatcgggtgaagcctaatcaattctacttggaagtgatttgggggagtcaagccatgggccccccattgatttgcttctttgctctatacttttttttgggaatgcaaaaaagacatgagtttgactggcttgggatagcatttcaaaggctttaaatcttacattttctggactggcaccgggtttaattattggggcttgaattggggtttttcccttaagcatgctcactactgatgacatacatgggctaagagtgggaaaagggttggggcacaagagtgcttacagcagcattctgatggccctttctggggggttctttgaaccaagacttggatccacccgctccaaaagggttcctt

SEQ ID NO: 29332 - DNA, 484 bp, Glycine max
  Clone ID: jC-gmst02400011a07d1
atgaaactgggatatgcaagcgctattgcgcgccttggaccaaaacatttaattttcatatattacaacaaagaacagactttagaaatctgccaagactaaataacggtaccagccaaaacctaaaggggaaatttatcacgcagttataactgcattatgcaaacaaaagataaaaaccatgcagaaattatagaacctttactaccataaattgcactactggtgagcacattgcactcggtgaccagatggctcatcatcatcttcatcatatgccttgcgatattgctgatgctgctttcgtctcatctcctccttaaaggtgacatcatgcaaaggggtctccttacaatcatccagctccatggctgacacatgcttgctgctcttttgaggtaacaccttttccaggaactggcattggtcaggggaaagaaaccctgagtctgggaaatcaacattaaactggatgtaaaggcga

SEQ ID NO: 29333 - DNA, 459 bp, Glycine max
  Clone ID: jC-gmst02400011a08d1
gaagacaataaagattttgattatattgaaaacagcatcataatgacaatgataatgataataataatcccactataattgtataacatctaatttgtttttgcatatccccaaacagcagagagcatgaaccaatgcaaaattgtaccctttttgatgtctttgatatcccatttacagaattaaactaagcagcagcggactacttggagtccaaccaccgcaaattgaattccccctagcaccagcaccatgtacaggtaacacaacaacaacccaaaaataaaaaccctaaaaaagctgagctaaatggacatgtctgtgcccaaactcaccttaccctttcaaattccctttcagcgagggctaggaaccggcacggtcggcgaaagcggaagctgcggaaaccctaactgaccagaagttggggaaaacagaagccccggcgacagaagaggg

SEQ ID NO: 29334 - DNA, 397 bp, Glycine max
  Clone ID: jC-gmst02400011a09d1
gaggatgggaggcaagagggggaccaccgctgggaaaaaaaacaccaaaaaaaaaaaaacaagaaggaaaaaaaacaaaaaaaaaataataaccaccattaacaaaataaaaagctgcaaaaaaaaaaaaaaaaggtggaaataaaagacgcaaaaaaaaacgaggaaaaaaaaaaagagggaagcaaaattagaagaagaattgagaggagaagtagggaggaaaaacagaagaccacaaaaggggggcccccaacaaggagggggggaacaacttagggatcaaaagagggaacaacaagaggggggggcaataaagggggcaacaagaataagaacattaagctggacgcggagttcctgcggggaaagatgacccctcctaaaaagaagcccg

SEQ ID NO: 29335 - DNA, 449 bp, Glycine max
  Clone ID: jC-gmst02400011a12d1
atatagtgcaataacagaattttttttggctccattggcacttagcatgggtttacatatccagctagttttcgttaaaacacaagtactcctacatttacgactagttagcttatgtttgtgtagctgttatcaatgtaatttccatctttccaatgcacaaaacgaaaaagacgcagttttgttactttcggaatgagagaaaatctgttgcaacgtacgtgtactcaaacatgcccttttagttagccttgggcggcatcgttttcaatatggacactaacacttgagccatccattattaatccatcttcatgcgccacccttctgctagatcccttttcggttcgttttctctttgacatgatgtttttttcttcctcttcttctctttcattgacaaaggttaagaatgatctaagacgagtatagtatgatgagcatccctc

SEQ ID NO: 29336 - DNA, 487 bp, Glycine max
  Clone ID: jC-gmst02400011b01d1
gcataacgcggggttcaggagttctttgcaataaaagtgccgtttaaacagggctaatccatacccttcatcacgaaactgaaatgacaaacattgattcaaaacctgccttaaaattaacataatatcacagaaagatcgagctataggtgacaaaactgataacacactcctaaagtgaactcaatctaactaaagaatagcctgggacttgttaaggatcactccctcgtacttcacctggaaccacttcatagcatcctcctttgtgactcggtgctgaattccaacacgggacttgcatcttcggcgacgtccaacacgatagccaggtcgctccagaacaacaaagaaatccattccataaataccagttgaaggatcatacttgattcccaaatcaatatgctcctgaataccaaagccgaagcaaccagtatcactgaagttccttctgagagttcatattccttcaccttcaaaccac

SEQ ID NO: 29337 - DNA, 501 bp, Glycine max
  Clone ID: jC-gmst02400011b07d1
aaagcataaaatttcttttaaaattcactttaaacctcgtttatcgttgggtcgacattaattctagggaggggctttccccattaacttgtgatgaaatttgccatatgctcatttctcagctaattgctaccaaataaattggaatagggtacattgtagttcaagggtgtgtgtccagcacatagatgaaaaataattcaagcattcgagctttctctggaatggttgtgatattgcagtgaagcctctcttactgtcttgagagccttgtcatatgctataaaccccataaaatagaattcataaccatccactgtgacaagctgcatgtatttttctgcagggttaaatctatttgagaaaggactaaccgtgcttaactgatcgagttgcaacacgaccttataatgcacactctggttttgctgcagcgagagtggataattgcacagtggatagtcgctgcaaaaggctactcttttagttgatacatatatt

SEQ ID NO: 29338 - DNA, 481 bp, Glycine max
  Clone ID: jC-gmst02400011b10d1
gcaatcgttattgcgcgccttgtaccaaaacatttaattttcatatattacaacaaaaaacagactttagaaatctgccaagactaaataacgttaccagccaaaacctaaagggtaaatttatcacgcagttataactgcattatgcaaacaaaagataaaaaccatgcagaaattatagaacctctactaccataaattgcactactgttgagcacattgcactcgttgaccagatggctcatcatcatcttcatcatatgcctcgcgatattgctgttgctgctttcgtctcatctcctccttaaagttgacatcatgcaaagtggtctcctcacaatcatccagctccatgtctgacacatgcttgctgctcttttgaggtaacaccttttccagtaactggcattggtcaggggaaagaaaccctgagtctgggaaatcaacattaaactggatgtaaaggcgaccctttatgaat

SEQ ID NO: 29339 - DNA, 392 bp, Glycine max
  Clone ID: jC-gmst02400011b12d1
gaataataaagaacagatcacgcaaaagtgcagtaatcgcggtgcacggtgcacctgtaaagatctacactttcacgcaatcgatatttgtttccttaatttgatttagcattcacaaaaaaaaaaaaactagggcataattttggtttgattaaacataaggggctatggattatgctttaaagaaacattaacacatagcatgttcacaatttgatatatcatgaaacgcaatagtgttttagttgacagacagacatgtggagatcattatgcacgtaagaagcgctttttcagtcttcgaaagttttgcactcaatggtctccggattgtccttgcagtaggtctcgagcgggtcggagacctttcccttttgcttgtatttggcgtg

SEQ ID NO: 29340 - DNA, 494 bp, Glycine max
  Clone ID: jC-gmst02400011c01d1
aacacaaagcctcattcacagcacggtggtgtctttcaagaaaacaaagttacattcccttccctgttgcacaggtttgaccaaatacactgaattactaaaattgacataaaaggaacactaggaaaacaaaaagcaaaattccaaacgattattctgggaagagtcaaaccacaataatacttatcaacaagaaattcggttgttgtacccataataccgattcctactcgcactagtctcttcaaacaacaccaacttcgattgatcagtagctgtagttcgaaacatggaggctctctgaggcaccatcagcaagctgtgagttacccttgtaggttcccagagttgcctctgagttagccttggctcttaccaaaagggcttcctgagccttcttcacattctcttcttttccgccccatgccttaagggtgctctgctgaagtgcccttccaaggagaaagagagtgaccatggcttcttcccattga

SEQ ID NO: 29341 - DNA, 441 bp, Glycine max
  Clone ID: jC-gmst02400011c05d1
aactatgatacgatattgatatttaattcttttggcgaaacgagctcaatacatcatattaaaacataaaaagcagcacctaaaccagaacagcaaacaagttcaagggagaaattgaacataacagacatgacatacaagaacacttgaaaaaagacacgcttaaaacaagaacacttgaaaaaaaacacgcttaaaaaccaccgcgaaggcgaaggacgagatgcaagggggattccttctgaatattggaatctgccaaggtacgaccattttccagttgcttcccagcaaaaataagcctctgctgatcaggtggaatgccctccttggcctgaatctttgccttcacattatcaatggtatcagaactttcaacctccaaagttatggtttttccagtcaaagtcttaacaaagatttgcatgccaccacgaagcc

SEQ ID NO: 29342 - DNA, 488 bp, Glycine max
  Clone ID: jC-gmst02400011c06d1
agttaaaaaaaaaccatgtgattatttcattagccaaaactacaaaccacagtatgcacaccaaaaacaaattacaaaccacactatgttaaagccacagttgcaggcacgcttgtaaaacttagttattccactacacactcttgaagagtaagtgggtagctttaggctatggagaacatgtactaatgtgcctcactcttttaacacaaaccttaaatcacagacagaagcatgtagattgtagtggagcttatgcatgttcatggaatgggatagacaactatttttgcagttgctctgtttgtttccagatgggcaaacgcttcaacagtctgagaaaatggaaacgggctcttcgggtcaagtattggcttcagcttaccactctcaaaataggggtttagtttctctaagatcgccccatcagtagagagtatgaaaaggatagctggatgaaatccaggtggtactattgtcacaacttt

SEQ ID NO: 29343 - DNA, 562 bp, Glycine max
  Clone ID: jC-gmst02400011c07d1
ctctatcaatagacaaagttaacaaaatcttattaatatgttggtagacaaaagcacaagagaaaaatattgatacaaaacagtaaatagcactgccatatatatgcaggcagcagatccagcctagaatttcaagaaaggttaaactaacagtgagatctttgcaatttgcaataatatacattatacaaacaatcatccacctttaattatgtcagtagaaatgtttaaatttaaaacaacttgatcaagcatgaaattctggttaagcccgtctttttctatcatcttcctcgtcatcatcagaatcaccactctcacgaaaccgtggatttttttccggtctggattcgtggtcagtgttcctccgagattcatgatcagaatgtctttttgaggactcgtgtatgtggcggtcatcatctcggtgtctcttcctatagtaatctctaccatgtcgatgggaaccaccatgaccatgacctccaccatgtctaccataggaagttggaataactggtggaaaagaacccatagaccagtgccataatctacaagctgg

SEQ ID NO: 29344 - DNA, 535 bp, Glycine max
  Clone ID: jC-gmst02400011c08d1
ggattgcaatgatcatttattaaggttcaaaactggctatgtttcaggccacttttgcagggtgcagttgaagacagcatctatatacaaacatatacacatccttccgaatacactacctataaggactttgacaatttcaggaacaaatggcctgagcaaattccatataatgatatgcttaacaagctgtttaagtttaacctactgatccctcaagcttcaagctcatgagttggttcacctcagaaccaaattcatcaggaagctcattaaagacatcacggcaaaatccagagatcatagcagccattgctttttcatagtctattcccctttgctgaaaataaaacaattgatcttcaccaattttggacgtactagcttcatgttcgattcttgctgttggatttttcacctgaatgtaaggataggtatttgcagctgcattgtcaccaatgagcatagagtcacactgcgaggagtttcgggcatgctcggccttggacagaacctgaaccagccctctataaca

SEQ ID NO: 29345 - DNA, 363 bp, Glycine max
  Clone ID: jC-gmst02400011c10d1
aaaaggaaggccaaaccaacactgaaaaaacccgggtcggaaaccagcggggtaaaactttaaggaacatttatgaacagttcccaaaaagaagattcctttaataacccaaaaagaaaaaggggatgggggacaaaaagttggccgggatgaaacatttttttggggttttaccaaaggtaaaaccttttgttataaccgggaccgcattttttataaagggccccagggccaaccagcccctcgggtaggttaacttctttatgggccttgaaaactttcgggacccggcaaaaaattaggggtaaaatcaggaaaaaagcctggtcatgccgggggtttttttgaacctgggttggaaca

SEQ ID NO: 29346 - DNA, 394 bp, Glycine max
  Clone ID: jC-gmst02400011c11d1
gaataataaagaacagatcacgcaaaagtgcagtaatcgcggtgcacggtgcacctgtaaagatctacactttcacgcaatcgatatttgtttccttaatttgatttagctttcacaaaaaaaaaaaaactagggcataattttggtttgattaaacataaggggctatggattatgctttaaagaaacattaacacatagcatgttcacaatttgatatatcatgaaacgcaatagtgttttagttgacagacagacatgtggagatcattatgcacgtaagaagcgctttttcagtcttcgaaagttttgcactcaatggtcttcggattgtccttgcagtaggtctaaagcgggtcggagtccttttccttttgcttgtatttggcgtggc

SEQ ID NO: 29347 - DNA, 486 bp, Glycine max
  Clone ID: jC-gmst02400011d05d1
cagagtaatacattgtgtagagtatttggtttatatagtttgtaattacgggcttgtcagaatgtgtatggaccagcccatcagcacaagttcataatatacaatgttcactattgttttaatccgtgttcttcctgttggatttcataacctattacacaactgattgatagcatgggctaaacaaactgcagtatttaaatatggcaccattttctttccgtgagtaatgtagctgctactggttttatcaacaagaacaacattaacctcacatagctccatctttgcttgaactctgctccatgtcagtctgatcttgccatggccacttcagattagaagatgaggagcactgctgtggaactgaaaatgaatatgagcttgtactggcacactgcttcttacatgatgaagaatcagctgtggagcaaatgtcttggtcaatgcttgacatgccagtatctttgttatgattttgagagt

SEQ ID NO: 29348 - DNA, 553 bp, Glycine max
  Clone ID: jC-gmst02400011d06d1
aatggaacaaacatgaatcacccaatacaaggagtgtcatttatacactgtgtgctaacattgttgattaaattaccatggctaaacagcacagcacagtcacttgaaagtgctaaacatgaaataagattgcatcaggaaatcaatggtactttatttacagcgacagggaaactagaaaggaaggggaatttccccccttatccataataagctcacatgtggtgaggtgaattaacagaactagaagaagaacatcatgtacagataaaatgcaaagttaagaacaggacatgcatgcaaagctaggggtctgctttaccaacaacctgttcatcactagaatcatattcatcttcactcatctcctcatcactggatttctcttctgtggcttcccctatgtcttcgggtttagcatacttctcacagtactctttaaccctttgttcgtaacttggtcggtcacgcatcattaaagcggcagcttctcctttcaaggggtctgatggattgggatacagcagaagtgaggtagaacacctcaacacat

SEQ ID NO: 29349 - DNA, 437 bp, Glycine max
  Clone ID: jC-gmst02400011d07d1
atgatactgcaactggcaacatttataagagctcttgaacttttgttattgatacattccacaatacatggggctgtaagcctgttatagattctatggattaagttcctcgattcatttatacattgccaatgtatgcatgcagaccgactttatgcaagttgcattgccttttcccgtttcaagtcaaaaaccctgatgagtgcattttcaacaaccttgtctggtgtggatgcaccaaatgttacaccaattggtattggaccctctggaagccagttttctttctccaccagctctccatgggtcaacttgcatgctattttgattcctggaccaattctttgctcactgtcaatccaataagaaggaattccacgttgctgcgctatttcttgcacgtgtgatgtattgctagagtttcattcaccaactac

SEQ ID NO: 29350 - DNA, 303 bp, Glycine max
  Clone ID: jC-gmst02400011d09d1
aagggttagggttattttatttttattgaaagttgaaacaaacaaagctgaaaaaagaacacacggacccagcaacagaaaaacaaggacgataagacgaaactaaagaacgcccatgaaaaaggggataagaaaaagaggaaagcaaacaacacatgtacaaaaacaaaacagaaccgcaaactaacatcgactgaaatacaagagagaagcacctgaaagcggatgagagccacagagagagcaagactcacgcgaaaaacaaccaatagaaaggaagccagaaaaaacaaatactagaga

SEQ ID NO: 29351 - DNA, 363 bp, Glycine max
  Clone ID: jC-gmst02400011d10d1
aaaaatgggcaaccggtcaacccttccaaaatgccaaatttacaaaagggcgggcaaaaagacacgcattttttttataacacccacaatcggggggggctaaaaaagcttgctggcatcccaaaatggaaaagaaaaaaaaattttttgggggggggcctaagaaatctaggggggccccccgcaggttaaggccaggaccgtttttaaaaaccctttggggggattggccctctcgagggtcagggggggggatttcataccagaaaaaaaaaggttggtaccctgggaaaatggccccacctgggtctagggaaggggtggccctctccccagggggttatcccccccgtaaaaccccgg

SEQ ID NO: 29352 - DNA, 490 bp, Glycine max
  Clone ID: jC-gmst02400011d12d1
gtaggaacattaaaaactgatgataagcctaaatcctttgaattattttcagaaagttcgtgcaagagacatctatgccttgaagttgaatgaactacatttggaagatatataaaactacaatcatgccaccaataccagaggaacgcaaaatcataatgcgaacttctgaactggcatgtgattcagcaaaaacaggagctgccaacttttaatgaccataaacatgcaggtcttgctcggactcagctggtagccactgagtcactgactattttggtctcattcttcagctgtagaatcagcaaccaatcaagctagcggaaaatgcataaagaaccaacattggagacaggctcaatttgaattcagaaactcgctaacggtgaccaacaaggaggcaggttcaattgaccatactcaaactgtacaacgagacatactggggatttataagagacagtgtacccttaaagaactatgatgatga

SEQ ID NO: 29353 - DNA, 556 bp, Glycine max
  Clone ID: jC-gmst02400011e07d1
aagtgaagaaaattcatttgcatacagaaaatacaaaggctataaatccaaatacgtaaaagttagaataccaaggaataaactacaaaaacataaataactcaaaactattgaaaattgtgtccttgcgggtgatcacttccctcccgcattatcagcatcagctgcaggatctgaactggcactacctgcttccgtcttggttgtttcatcaatcctcctactagaatcatcgtctaattcatcatccatcatgtcatcctctcccacatttatatcttccacatcatcatcgtcgtcattattgttttcgtcagggatctttcttttcttgggaccatgctccagcctatgagtatccaactctttgtccattgtctcctgtaaattctggtcattgttaactttccttgcgttccttgcattctgccatctctccaattccttctcaacattggcaagatactgctccccaatctggttctgatactcggacacttcctctcttcttgcattcttccattctagaaaagcctcttctttgctcttctcaagt

SEQ ID NO: 29354 - DNA, 201 bp, Glycine max
  Clone ID: jC-gmst02400011e10d1
ggccaaaaacggggaaaacccccaacaaaaaagggtggggggaaaccccaaaaaaacccccattcattggggaaaaccgggggggggaaaaaaaaggggggggggggccaagaaaatcaacaccgcccacaagtcagagacccacccctaaagatgtgcaccggagcctatgcatgcccccggtatgggaaaaacaactct

SEQ ID NO: 29355 - DNA, 445 bp, Glycine max
  Clone ID: jC-gmst02400011e11d1
aggcgaattatagatgtcctaattttattgaaggtagctcatcatgttttttttatgcttctcataacagactccattcactcactctatgaaccccaaccaaccaaccacatgatactgatattgaaaaggaaaggggaagggtttcgaaatgatatccttaacaccacaatcccctaaacgacgacacgagaaagaaaagaagagaaaaaaaaggcaaaaacgacaccgaaagaaataacacagattcagagattaaagccgcgggtcaacgtcgtctaagagagttgaccgcagttggcgatgacaacgggcttggaggtcctgccggagctggatccgaccttctcgatgtccttgacaacgttcaatccttcgatgacctgtccgaacacgacatgctttccgtcgagccactctgtcttctccgtgcaaatgaagaact

SEQ ID NO: 29356 - DNA, 417 bp, Glycine max
  Clone ID: jC-gmst02400011e12d1
aggcacctaaaacaattaaaactttgtgaacattgagtgtactgcaaacataaaaaccaattctggatataataaatttaaacagaaactgactcaaaaatccctgtgagaaaaaatgcttaaactattggcctcctaactcgggggacctaatttttggccacaacatgaaaatcgaataaaaggaaaaaccaaaccaaggagaacctacaaaggtccaataccatccgccaattgcataaaaagtctggcttccaaggggacctaacggagaaacttataacatactcaacttacaaatccattcattaaactagatatatctattaaaaacccaaagcttcaaataccaaataagtcaaccaaactttactgaaatatggcacaggactgggtgcatgaagaacttgatcacca

SEQ ID NO: 29357 - DNA, 388 bp, Glycine max
  Clone ID: jC-gmst02400011f01d1
gggaaaggcccaggggtttttttatttttgggggtttccccccccccctttctaaaatttccccccctggggaaccacttttttttgaccccctttttcccccacccctaaaaattccccgtcgggccacccccaaatcaaaatcccccggggtttacccggggatttttttacccccaatgggggaaattaaaaagccctttttttacccgggccaccaaattcctaaaccccattttgcccaaaaaaaaccccccctttcccctttcgggtttcggccggggaacccctgaaatttcccgacccccccggggtttgcccaatttgggggcaaaaaccttgctttgcaaatccccccaagccttttctcccccccctttaccccgtt

SEQ ID NO: 29358 - DNA, 480 bp, Glycine max
  Clone ID: jC-gmst02400011f04d1
aaaaatcagctcctaaatttagtatgcacaagaacatcccaagatgatgaatttggtactgggggcacatgacatgattgtttagagaatttgataattattctcttgattacatgttaacgttaaacctaaaatcacggcaaaaaaattgaagccactaatggagggcattaacttatgtttgttttgtttttgcactttaaaacaaaggtcctaaagcaaaggacattagatcatgaaattagataagacaagccaacattccaatctgtacacacagaaaaaaagaagttttgaaaggagttgaaatgaaaccctgcgggaaacaagcaaaatctaatagattttcctttttcatagcttctaacatgctaattcaaccataaccaatttagaaggaagaaaaatattgtacaccaaaatcacagagggccattggaaattggtgctcctctcttgatgctatccatgttggtagtt

SEQ ID NO: 29359 - DNA, 576 bp, Glycine max
  Clone ID: jC-gmst02400011f05d1
actaatgaaatttaaatcttagcagttatttagcaccaccaaaactttcattgatttggatataagcatatattataacttacaataaaggcattttcgctcattattgagagggagaaattagacagaccctatttcgacctttttcaacattttggtggcttcattgaaattccatactaatttgcataaatttttaagaaagccaccagcaagaacagccctgttcaatgcatctactaacctgctctagtttaggcagcaagtttcttattactacatttactctccactaggctaagtagaaaatctgtaaatacgtgctcatagcctggcatttttccatatccaggaaagtagttgatgtcgatgacgtaaaacacatccttggttccatattctcgaatcatatctatgttgaacaagtggagtcccaatctatgacggagctcccttgcaagcctctccaataaaggtcttggtggatgttcagcgatattaggatctagatcagcatcatctgcagaagcggctgcacatgaaactctcggaaaacggattacaccagcaactttt

SEQ ID NO: 29360 - DNA, 567 bp, Glycine max
  Clone ID: jC-gmst02400011f08d1
acaaaaccatcaatcaggtacagttatatcgctgaataagaaaatcataaacaatcaatgaaatacaaaaaacgagaataaaattaacaaaatacaactttccggcaagaagttgaacctcaaaatacaactttcctaaagcttcagggtatctgagaagtacctatctccaaaagcaatggtctaaggaatatacatgttaagaggttaaactagccacaaaacaaccttccaatttcaccactgtctccactgcatcctaaatagaatgtgcaactcatgcctaccctgtacccaccaattggctaatgggtccattgatcagaggttacccaaaaaacaccaatcaatgacaatgtatcagaacgagacacacattattcaacacaaaattttcacacttgaacagaactacctttctcttccacaggtgaaacttgaagaccaccctcatccccatcacatcatccgcctcacatctgtgttacccatcatcataccatcaaaaccagcattctcagaacagtcctcgccccattgcgtttcttacacaacacatcacagaaa

SEQ ID NO: 29361 - DNA, 543 bp, Glycine max
  unsure (1)..(543): unsure at all n locations
  Clone ID: jC-gmst02400011f10d1
atcaggagcactggcaaaataacatcataacacaaccggaaacttacaagagatgttcggtacattgagtattgtccctgtaactctactccattatctcggctatcaaaaacaaccacgttaccttttcaaacacagaacttccacaccatgtagaagctattagtgccaaactggctgtggtcgatggtagactctttaatattaccaccatcgacacttagataacttgctaagtaacaaaagtttaatgggtccactataccaaagcttcaccaccttccctcattcaaggaaggtaaactaaaattttaacctcaaattgctctattccgaagtggaaaaacgagctccaactccatagttggatcctgcattgagaataaaacattcactcaggtctgtatgcataatacccgtgaatntttatgctctatttacagaactatatagaggcataaacaaactttcacatagaaccaactgaacccctaatctaacatctaaacgttagtagtcaaaaactagtgactgctattaaca

SEQ ID NO: 29362 - DNA, 446 bp, Glycine max
  Clone ID: jC-gmst02400011f11d1
agtatacaacaatccccaactgcagttggataaatgcatatagtaagacgataagcatcatatatagatacaatccaaaactgctaggcacaagataaaattacatacaaatttttgtgatcttcaactggacagtgaagcatctaaaacaacaatactagaaagttgattcatttcatcccatgtttggaaagattcccgagaagtttggtatcttatcaacatgcttgagggcacgctcagctgtctgccgagttcgatagtcaccatgctggaaagcatccacaagtgcagtactcacattttggtccccagaaacttcataggctatatcatctgttctcaataatctctccactgcccaaactgcccttctcctcaaagtatctgttcttttctcaagtagcacatcaagtataggcttcactccctctgcttcacacaaa

SEQ ID NO: 29363 - DNA, 485 bp, Glycine max
  Clone ID: jC-gmst02400011f12d1
gaaactatatctcagttattgactatttacacaacataatttcggtctaatttcacggaaaagcaggcagagcaaataaaagttgcagccactcatacatgcaagcaaaaggctgtcaacaaaggcaagagttttccaaaacttgcctcttgagatagtagaggcagccaaggcaatcaattaacaaaaggataatacagttatctcatgttcccaagacacaaatttttcctcatcatattcataggcatgcgacaattgatatacaaactgcagtatatgcccaatagtccttcctacaagcaagaactagaattattttcagcacttcctcaatcttcaatatctcagtcgtataggccattttgctcccatatatccacaagaaaatctaccatttcagcaagagggataggctgacggaatggcttgttgctcccaagtaaactttcatatgttgcattccaactcaatttaggttcttg

SEQ ID NO: 29364 - DNA, 452 bp, Glycine max
  Clone ID: jC-gmst02400011g01d1
cccccaactgaatagcaattagccaatagctaaaagggtcataacgcaccaaaataatgggaaacatgaaaagaagccttttatggccaacccaatttaaaaaccctcctctttggggggtttttacaaggaaacatgcttatttggttgggggcctgcaagcaaaacacattttgggcctaatggtgacaaaccccattttggagagaaaattttattagtctcccataaaaggcatttaatcgggaccatggggttggggcctgcccattaaactcaaactcaggggattgcctgggggagttcttcaactcagggggcttaatctcctccaacattttaacaacttgacccattttgggcctttgatcaggccccttagccccacatgccaatgcaatttgaagcctttgaaccattttcttttaaaatatggcgccttaaaaagctcc

SEQ ID NO: 29365 - DNA, 602 bp, Glycine max
  unsure (1)..(602): unsure at all n locations
  Clone ID: jC-gmst02400011g05d1
gaggaaaatctattctaattaattttcagctaggaaattacatgaaagtaaaggaggaaaatgcaaacaaaagataaaatttaaaaggtttggcaataacatgtacttagctagggacaccttcacaaaattaattacaaagtaatccaagttctcttctgtttcatatatataaaaactacagtttaattaatttcataatactgcatcacacccttgtgccaaataattagtctctctatattgttgctccaagaaaactccataaaacaattgaaaatcattgatatcatgcccagcttcatattccattgctgcatgttccatcatgtcatctccacaagggatccatgcattcatctcatcaaaaggcaaggaagagatcaattccatgtcaacccattgattaggatcactgactgacgtggagcaatcttgactatccacgtgtcccatctcatacatttgacccatttcagtgtcagtgatctctgcctncaatgactgaatcatggtcacaagtctatcatcgccatagtactcttcttcttggtttcttccatagtgacatgagaagaacatgttgatncgagaatcattcc

SEQ ID NO: 29366 - DNA, 468 bp, Glycine max
  Clone ID: jC-gmst02400011g06d1
actaagaagaaaaatgccagactgttaaaagttaaagtttaacctcggaacacaaaaaattgaaatggtggccaatgcaattctttctgagtaattttgtataaacaaaaactagaaagaaataaacttctcttatttacctttgacagaaaactaaacttcaaaggaattaagcacggcttttagagtctcctcagaagtttgccactgcttgtcattggcactaaccacaaacaaaacaacagtgtttccctttgctgttgcttttgcaagattgtgtgtgcctgtgagagcatatggtgtttcgagcacgtatttgtagtatgtctgatcaccaagctttttaactgaagtctcaaggagctcttctggatcaaaagtgtttccagtgacaaatggtccaagagaagcaatcagtttttctgggctcccaatgtcctcaattgttgcatttggtttgttggtaag

SEQ ID NO: 29367 - DNA, 443 bp, Glycine max
  Clone ID: jC-gmst02400011g08d1
ggtacatagaatccattttaaattttaatggccctttccacaatttcttcaataacttcatattcatacctacaaaagcgcaatgctttttttttggttactacatacataaaaaaaattgtaattggcccacaacaaaatacagagtttgggttgtacccggtttcaaaggtccatcctttcaagtttgcggcttcaaacaaagctgatctccatttctggaccttctcaaagtccttacccaacatattttcatgttcagtcatggcttcaccataactatttctttgacgccttatatccctgggctccactttgtaaaatatgggccaaaccagttggtttttcatcttcatgcattcaaggattgccaaaagctcattaagacaccaccaggaatgtgcctaatttttagaaaatacactgattgaaagccttgattt

SEQ ID NO: 29368 - DNA, 439 bp, Glycine max
  Clone ID: jC-gmst02400011g09d1
ccagtcaaacacaataaaataaaatgaactatgcatgaagatttaactatgcatgttttactattagttcctgcaattttctttttgcttgtatgcataaaagaaatagaagacacattcaagtattcaacttcagccgtgtgcaccacccccacggtcagacacaaggtaattaaaatgggggtgttgaaaacttgttcttccaagtgaaacaaacattttagagacgggaagatgattttgtagaccttggatctttactatattcatacacaccaataccttgttttcttccaagtcttccagcatcaacatactgcacaagtagagggcaaggtgcatatttgttgtcaccaaggccagcatgaagaactctcattattgacaagcacacatgcaatccaatgaagtcttgcaagctttaaaggacccattggat

SEQ ID NO: 29369 - DNA, 431 bp, Glycine max
  Clone ID: jC-gmst02400011g10d1
atagacaataattgaagttcccattaaaatttaaaacaaaaacttatcaaacatgcattcacctttaacacttccacaataccacggtttactgggcccaaaaacaaggacagatgcctaacgtccttaggaaactcactttattacataagccaaaaataatccctgaatgggtcataaccaacagcaaaaatttcactggccaccatgctttgccttggtatggtgtggcaaaccactttcattggggaaagacttgctgcaggttttgcaagaaagtccacccgacttaggagtcttggctttggcttcactggtgggagtcttggctttggcttcgctgttgggagtctttccgcctttttttgcagggtgaggagttgctggatggccaccttttttaccatcagtcttttcaggagtagcatttt

SEQ ID NO: 29370 - DNA, 526 bp, Glycine max
  Clone ID: jC-gmst02400011h01d1
aagcaagttataaagtaaatatcatttattcaaacctaaagaaacacaataacacatcatcacaaactcatgtaaccctgccaataaaataaaccctcatccctaaactccagcaccagcagcagcttgctcacttcaatacacaactcctagaatttctcatgtcaccacgtggtaagcacgctgatgtggagccaagtgttgtgctcacacgtaggtataccctccataatacaaccaaagacttaaccatcatataataataatatattaataataaagtaaactaaagaaataaataaaaaaaaaagcttttcaacatgacatgcaaaatggtagacctaatgatccccacaactaggaccatttttaaacttgtttttctcactcacactgtccataagtctaagcttcagttttctcaacaggaacctctactggggcttccactgtctcagctggtttgttctcttcctctgtggctgctgctggtgctgattctggttctggttcagtagtttcttta

SEQ ID NO: 29371 - DNA, 540 bp, Glycine max
  Clone ID: jC-gmst02400011h04d1
gaacacaaaaaccgcgtttcatcattcaaatgtaaaggttatgccacgttcattgaaagttgaaacttacaatgctgataatcgaacacactgacccttctacagaaaaacatggaagttcagacgaatttatagaattcctatgtcaaaggggataagttaaagaggaaagctaacaacacattttctaatactttttttatctgctttctttcattgactgaaattcatgtgagtttcacttgtttgtggatgagagtcacatatttagcaagactcacgcgaatttctatcaatagaaagtatgtcagaaaaaataaatattagagaatatattgctagtattttttgtaaattaaaaataacttaaaccaaggcaatgctgctctctccaccagggggtttccgggcaccttgcacagggtctttgatttctgtctttccatcagcaaatatgtcactgccagtcatttctctgagcttagccctgctcagaggcttctcagctgagccctgaggaacatcttcttggaaaatatt

SEQ ID NO: 29372 - DNA, 538 bp, Glycine max
  Clone ID: jC-gmst02400011h05d1
aaaagtaatgcatctataataaattagaaacgtcagttagtatcattgccaaatcaaaattttcgatctcaaaataagttcaaccccgcactacaaactacagtatcttaaagcaaaggtttacatctacttgctgtatagatgaactgcagtgaagatgaagaaacccaccatcattgaaaatgatgctccataatagggataggctgctggtataaatctttcatattcattgtgtctaaagggacgaacaggaatctgctttgataaagataagcttgtatatccaagtttttcgtactcaactttgaattggaaaaccccatagacatctggaaccttaaatgatgtgaaataacggcccttgccatcagttgataaagtcttcaagacataggggctcatcatgtaaaattgcacttgaacatcatcagctacgtaaggttcccatgctgtcccagaccactcataaacttcaacagagtattccaaattatcattgatccgatagatggctggttcattagcttccccaact

SEQ ID NO: 29373 - DNA, 595 bp, Glycine max
  Clone ID: jC-gmst02400011h07d1
gaatggaagaaggcatatctttaaattgaattgatggggtggaaaacccgaatttaaagatttccaatcatacacaatattgcaacaacaaaaagaattttaaaaaaaaaagactttctttttttactttttttacccaaaacctaagcaaaatataaaaacaaacgacacttttttttagactctttaaatccaaaagctgatcacaatcaaaatcaatggcgttatttatgaaagctccataagacttcaaacgaccaaaagccggtttctccattgatgttctcttcaaacatgaatttactcttcaatagcaaggggcacagactcagccaatttgcggtacttgagagcatagaacatctcgaggtaacgtttgctctcacggcgttcaagattggtcacgtgcttccagaagccatacacaccagtgagtgtcaagagcctgtccgagtaaatttgccatgtgtacttctcatgaatacgcttgagtccaccctgggagattttgtcccagtgagatggatcagccttggctcttctcaaagaactcaacatggatctcagcagcatggtcaccatggtaaggatcaat

SEQ ID NO: 29374 - DNA, 458 bp, Glycine max
  Clone ID: jC-gmst02400011h08d1
gtgtcatatctagactattaagaaacgctttaatttatgctaatcttgaaagacctgcactcattacactgattcgaatagtgtaatttccgtgtccatgtacatttctataatctatttagaagaaaacaaaaatttggaagaaggatataaaacataatattaataacaagcaaggggctgggagaacttcacgagactcagactaggagaggcttccctcacatctttgttcttattattatggtgttgccacattttcctttgcctgtggagcaatttcttctccatcacttccaggttcactgccaggaactcccaagcttagcagcacttccttccactccttagcaggccccttccatgaaagatcttgagccatgcagttcttgataatttctgtaaaagctggagttccatagactgcaagggcccttttgacagtctttgatatagca

SEQ ID NO: 29375 - DNA, 570 bp, Glycine max
  unsure (1)..(570): unsure at all n locations
  Clone ID: jC-gmst02400011h09d1
aagcacaaaatacttcgataactttatattattttacatgcatgcatagcatagatagcctgctctcaaattagtcagcaggaacaaagatagagagatccaacgatctttaaatttcacatttgccataaatatataacagaaaagagggtatgggatatgagttaagttttgatctcattcaactacagtatcccaaaccattactcttaagactttgaacttcacttgtactccaggatcatgttgttctcaggagctaatccaacacaagcccttaggatgttttccagcatagctcgctgctttgacagtgcattaaccactggcgtactcggtggaacctgtaatttaataattgttgttcacacaatttgagaaaattaatcaaaggggggatgaaaaaattcactgaacaattatgaatcagatacattatacttaccagaggggccttggtcaagtaactgaggatggtcgcaactgggtggaatgagtggaactttccctgttaaagccataactcatttgagtctttaaaaacttangataggaaatgacgttggaatg

SEQ ID NO: 29376 - DNA, 429 bp, Glycine max
  Clone ID: jC-gmst02400011h10d1
aacagtgtataatgcccatgggccatgatttatttatttagaaagaacaacctagctttatgagtatgaatatcataagcattggcactgccatcataacagcactcacacgcatacataacataattaacaccatgaacatgcccttctacccaactctaagctacttgcatagtactacatatataatatccttattgaaattaaaaaaaaaaacaacagtaacatcggaagattaaaaaacatagcctcttaatcctcccatccccatgaacctgcagtggtctcggttcattgaaccagcccatttaaaggaaaagaccttaattattttttgcataatatattacagattttcttcctcgatcatagacaaggggaggaaaattcaagggtcctgatcatggtgcttgttggcaacattgcact

SEQ ID NO: 29377 - DNA, 484 bp, Glycine max
  Clone ID: jC-gmst02400011h11d1
aaaagaaaaattccaccttgtaactattaatatgaagcaaagatagtagcatttggtatttcgcccaaaacatccagaatcacaaatggtacttcctgattccaatctatgacagaaaaaatcacaaaactcaacaacaattttataaaagccaaatcactcggaatgatcacttggcagaaagcaaactctagtatatataaatataactctttatgtggccaagaaaatcaagccacaacccatctgtccccgtgatgtacgtaaaaccagccatttcaaaaacccaagccggtccagccaccctctatttaccaaggctggaccttgtaggacccaaggacattgacttgacccccaactgttggactgtcaaactggaggactttagtcactttactgatagaccagccaaagctccttctaattgaagttgaatccaccagaaggcacagcaggaggttgagcgccaccaaagttgaac

SEQ ID NO: 29378 - DNA, 506 bp, Glycine max
  Clone ID: jC-gmst02400013a01d1
gttgatagttgttctatatatactattgaataaataaaatcattcgagtacagagggtgaacgttgaacaggaatcctcattctatttggattagcgagacactgattttcttcactacacaaaaaaatatccaagatgattgcttatatctcaactcaaactcaataaaacgtttgagctgatgcatctccgcttgttcttctcacatgtacaccagattttttgtcataatgattagcagtgatatatcttttaaggtcaattcccctactgccactgtgatttttgcttttgttagcatacaaaactgctttatcttctgagtcctgctggagccttctacttgcaccaccattactatccactaagaaattctgatccaagttatcataggaggaagatgcccccatgttagatgaaagcccatagtggctataccaattgggtcccacctcaccaaatatggtatccgagaaaataacagaaactggcagagtccttgata

SEQ ID NO: 29379 - DNA, 448 bp, Glycine max
  Clone ID: jC-gmst02400013d01d1
aaattataaagtaaatatcatttattcaaacctaaagaaacacagtgacacaccatcacagactcatgtaaccctgccaataaaccatcacccctaaactccagcaccagcagcttgctcacttcaatacacaactcccagaatttctcatgttaccacgtggcaagcacgctgatgtggagccaaatgttgtgcttacacgtaggtgtaccctgcataatacaaccaaagactgaagcatcatataataagattaatcaagtgaactaaagaaatgaaaggaaaaaagcacaaagagggttttaaacatggcatgcaaaagggtggacctgagccccacaactaggaccatttttaagctcgtttttctaactcagagtgtccataggtctaagctgaagtcttttcaacaggaacctaaactggggttgaactgactcagctggaa

SEQ ID NO: 29380 - DNA, 513 bp, Glycine max
  Clone ID: jC-gmst02400013g01d1
gcacataggatttcagtcccatattagaagtatgcaattcaaatgtgagatttacaagggcatggcctctccaactacaactgactagattttgtagcatagttctcccaagttctgaaagtattatttttagcaactcttaagacaagaataagtcgggccatcggaaaccagttgcagtcttgcagatcaatagatatttctcactgcacttcccctttttctttagtgcaaagataagcagaccaaatgagaatacatgacgataacagcttaatattaaatgttatgcaagtctctgtacatgcaaaaatgcaatccccacgggaacacattacaaaattgcccaggtgagggctcgagaaataaaatgaacttacaattgttaattcgtaaatgtaactcttacccttttttgtatgggtaaataacttcatacatttacttcttgtatatcagactccaaggttgatgggtgtaattatccagtagcaatatctgctaaaagcatct

SEQ ID NO: 29381 - DNA, 460 bp, Glycine max
  Clone ID: jC-gmst02400013h01d1
gtataaatattgctgttcttttcttttttacgtgcccaaaattgcgttgagttgaatattacagaaatgtgaatgcaagtattatatacctaaacttaagttgtccttgcctttaaccccatcttctcaagtttaacacattggccactccttgcaaataccctacggaagcctgccaatgttgcaaggatagccacccaatttcagttcacacgcaatttctctggcacaaaagcaaaaattggaaggtaaacagcttacacagtatcccccgttttccttctcaagcaaatgtaaacaactattttttgccacattcactagagtatgtgttcagctgcaaaagggtccaaatattgttccttgaccctttattattccttcccttgggacacaatatttagctagcccacaaagtcctggatcatatgcccttcaaattgacgcctaagctccttct

SEQ ID NO: 29382 - DNA, 408 bp, Glycine max
  Clone ID: jC-gmst02400014a01d1
acaataataaatccatatttttataattaaaagtagtagattacagcgatgcacttgagaaacatattaagtggactaattctccctggtcaagcaagaaaaaaaccagctatgacccaaggtagagagagattatacacagaatactagtaattaactaagactggctctgcaattgccaaaaactccattgcagtagcagccacctgagaagacactaagacctagactagaccatacataatgaagattaatacccttacataacaacataggacactaagaaaacacggcttcacagagaatcccagtcgatctcataagaagggtacttctggagattaaaattatccgaatcaccttcccactgcggctcgctgacgtcagcgaaagtcagaaccgaaagcg

SEQ ID NO: 29383 - DNA, 514 bp, Glycine max
  Clone ID: jC-gmst02400014a02d1
gcacgcaaagctacggcaaacaaatggaattctattacattatgaattacaagttccttgcatggcatacatcaaggaaaactgggaagttgttgtatgtggattgatttgccacagccttatatagacaaaccaaatgcttaatatcaacacaaacacgtgtacagaaaagaaaccactcttcaagaaaacagaaaataagaaaaactaacatattggaagaggtgccccattccactccccaaggcattccaaaagtggatcaatgatcttcccttggcacaaagcagtgaacactttgtcacactcttcacccggtgagataaccctttcaccagttagcaatgctgtccccaactcctctctcacaaacttgtacaaggggtaagacctgcattccttgatcttgtttggaattgcacattggtcattctcatatgcaactcttgcaccttccacttccttaggcaaaagggtcttcaactcttcctcaaatgttgcaatcttttggaag

SEQ ID NO: 29384 - DNA, 545 bp, Glycine max
  unsure (1)..(545): unsure at all n locations
  Clone ID: jC-gmst02400014a03d1
aaatatgaaaaacttaattaaacccaaaagaaaaatatatacagggatgtgcagtcacacaatacatacagagaaagtaatttttacttcggcatgaatcattatatcttcacaatcttgtcaattactggttcaacgaaggcttctaaatcatccaggtcattcttgagttcttcaaccttgtgtatgaattcttcagttaactgagcatcatgtgctgcctcttttgatgcacgttctacaaccaaagctgcttttcttagtttaccattctcaggaagcatctctgctacatcttcagataccttttctgctaccgttgccactttttctaccacttttgccactgcttcagcctcttcaaccacaaactctgcctccgcttgtattatctgtagttttcgccagtaagatttccagaaaggtagcaagagagaaagtaccatgcccaaaacccatcttaaccaatgagggaagatagtgaagaatttagaagcaggtgcaggagcttctggttgagccttcacatnctttattcttttgga

SEQ ID NO: 29385 - DNA, 534 bp, Glycine max
  unsure (1)..(534): unsure at all n locations
  Clone ID: jC-gmst02400014a06d1
aacaaaataaactgaaactagaccatttcaatgtagatacggtataaatacttcacaatcaaagactggatgctaggaagtttaactagtgcatgatagttataagctctggtaacaaaaaagtaactgctgttgacagaaaaaggatggaaatactgaaacaaacaaagggaagtttcaccaccctttctacacaagtctcaactggaaagttgaagcaaatatccactcacaaatctttcacgaagacgatcagttaatgagacgccggacgagtgacccttggcctcaccggagtctttgaaggactcacccttattggctgggtccccaagagcatcccactacagtttagtgcaataatagcactttcagccattgcaaattccacaaaagcaattcgagttgaatgcacgtggtcccccaagagcctcaggcgcataacctcgccacaagctgattcaaaaaaattcttcacttcagcttgagaaacctttntatcaatatttggacaatagacagtccgggcacaca

SEQ ID NO: 29386 - DNA, 493 bp, Glycine max
  Clone ID: jC-gmst02400014a08d1
ataaagttagtaaaaactctaattaatcataaccatcaaaggctataacaaagcatgcatgctgcacctttcactaaagtgttcagtatttgtacacatcggtggacactagacaagaaaacgaatggtcattagagagtggaatctttgaggcttttctccttattgcaacccttgtgtaacttgtttcatggaacaacttttttccataatatatttctatctataccttcgctggtgttctttatataaaggggactatgcgggaaacttaaaagataagaataagatcgattgattacaaaaaggacatatgagactaagagtagcaaaagagctaccgaaagacaagtaatttaccagagaaaaagcaaaggcaaaagttcaatcccagtactgtgcacatattatattctttatttaccacctttgtgcttttcgcagaccttggacaagaaggaaaggaaaacgatgatcagagcaacccccgcat

SEQ ID NO: 29387 - DNA, 525 bp, Glycine max
  Clone ID: jC-gmst02400014a10d1
aaataaaagatcaaaggttgaatttgatccttaaatttatatcaagtgacatgtttttcaaaatttatttccatatataattacagttcaatagaaaatgtaaagataaattcatttaaaaaaatgacaacccgacattaaatcttgctatatgtatattttgatgttgccctatgcaagactatgtgatcttttaaatggaaaataatggatcatcatcatctaaaggttgctaaaagctttggaatcaaataatttgagacaatgcggtttgtcttctccgtaggatgaaaggcatcccaaaacacgtacttttcggcgtctgtgcatgtaagtggattcttgtcactgcacaagtagctcatttcaaatgttcctgtcgaacaacacgccttctctacaacctcaaatccatatgtggaaggttttgtaatgatatcactgaagatggaatatgcatttgccgacaaagctttcaattgtggaaggtccctattaagcttcgttatcacattctccaacttc

SEQ ID NO: 29388 - DNA, 506 bp, Glycine max
  Clone ID: jC-gmst02400014a11d1
agtcacaatcttcaatggattgatgaacaatatgattttgatttcacattataaacattgacaaactaaaaagtacagttttgccaagcttataccagaaacatccaagaacctatagaaagatagcagaaaaataattctacaagggggaatcaaccactgagcattttacaacaataacttattgtatcaccatgctcccaatcttaatattttatctgtgtgtatcacatggaaaagtaaattaatctaccagtatacttgtttctgatctgctctgtggcttgtttggtaattacatggccctatgtagaccttacggctacatagatgatgtggtggtatcattgacaaggatactctgtttcctctatatattgtgttctttttatgttcaaaattttcaacccccacttttggagctttatggtaataaatgaacattatggaaaatgaatatatgtatataatggtctaatttattcaaaacttcaattctttttagc

SEQ ID NO: 29389 - DNA, 465 bp, Glycine max
  Clone ID: jC-gmst02400014b01d1
gtcacacttcttgtaagcatttaagtaaaatactgattagatcaagccataagcacactagttattttgcaaacaagtagttcataggcatattacagattacagagtcaagcttatttattgatttcatttaaaattactaaggaattacttctccatccagaaacgggttaaagtggtgtgaaaacgtcttcacctttgctttgagttccctcagtcctcttaaatcttccatccatatactgtaacttgagttcttagcaagaacatcttcagacacctccttattatcaataagttccatagcatacttctcaaatttctcaatgttatcccacagcacagccaactttgttgtgtcactctcacttctaacactattcagccagtcccttgcttgctccacccttgcccaaaagcatgaatcttgggtcaaacttgcaaacttgctcctcctctcattat

SEQ ID NO: 29390 - DNA, 470 bp, Glycine max
  Clone ID: jC-gmst02400014b03d1
ataatacactgattgcaacatacattcaacttatccaaacaaacaggttcctataaagattacagactccacaattactaatattcaaggtagcttcatagggtattatagtagaaacaaatgtaacacaagcaaaagaccaggaactattctgggacttgtaatcatagacaacatcttgaatagcagttaaccatcaaaacccagcattcagtcatttatatcataatttctctttccacaccctcataatatctccagcaacttcaccttagtaaacaaaacgaagtcaacagttccaataccaactagcacctgctcctggatttttccatggccctgggagctaagccaatagcatcagaacccttcatgattttcagtcgtttgcatgtgtcgatgaacatattccatggtacatcttcaacaagcatccagtcaccatctttatcttcataagtgagtacata

SEQ ID NO: 29391 - DNA, 479 bp, Glycine max
  Clone ID: jC-gmst02400014b05d1
ccatcgtacatccagcattatataaacacaggcttttttagttaattatacatttttctttagagaacattaaattacacataagtatagtatatcagtatatgttatattctatgccataccaagcaaccaaatttcaaaattgactctccagctctgcttatcttgctctggaaagctgtatggcttcttgatcaagagtagactcatcattccaaacaaattggtgagtcatgagtgagaattcttgattcctagcctcttcaagttgctgccagtcagcccatctatctgccaagccaactccctgcagcattttcaccacctctgacatggttggacgatcctcgggatagccttgggtgcaaagcaatgcaacctgtagaatcgtctcaacttcctttggatcataactctccaaatttctatcaacaatgtcctgcaaccttttctcctcagcagctttttcacataatcaa

SEQ ID NO: 29392 - DNA, 356 bp, Glycine max
  Clone ID: jC-gmst02400014b06d1
cgaaagccaggccattattaactggaacaagtttaggccaaatccacaacactactaaagggaggtaattttaaaaaccccaggagggggatccaaaaaagctccagacaattaacttatgggagtttacataaggaaatacctaaggtaaggacacattagcaaaaaagggggccacaataataggagaagttttaaggggagcaacgggaattacggggctcaatatggaaggcacccaatctggaaaaagggcccttatttttttccacttttttggagcccaaaacctccaaagcttcccttgggggggccctgggtttaaaactccttaagggcctttgccctttcctttt

SEQ ID NO: 29393 - DNA, 505 bp, Glycine max
  Clone ID: jC-gmst02400014b08d1
agacagcttgacctcaccctcatcagccttattagcttcttcttgctctctttcccccctctcaaattcttcctggcacttgtttaacaataatctcttgaaagttatcttttcattgtcttgactgagatcaggtaacacagctgccagatgaaaacagaaattggcatacatttcacagaaggtaggttccatcaaggccttctcaaagatttgcgagatgacaccattgagagtgaccacattgtcaatattaactgctctaacctgatcaaaaagcttctcaaaattctgaggagttaacttgtttaatatacccttcaattgcctctgctttgcctgttcctcatctgtcactttacccacctcatatttcttttcagctttgtgcatcatctgtaaaggagtttgaggagtagacggagatggaattaaacccctctgctggaagctattagtgcgctgccacctttctccatcaggggctatttcttgattcctccct

SEQ ID NO: 29394 - DNA, 534 bp, Glycine max
  unsure (1)..(534): unsure at all n locations
  Clone ID: jC-gmst02400014b10d1
gacgaaaatttgctttagattcctagtgtcaagaatttatgccttatatacagcaaagaacgggtcagtacatttgaaatccgtcaacttatccaacacggtcatattaacatccactgcggtgcgaagacaaatccttcaaattgcagacttgaccccttcgttcatcaagctaccagcttatagaacttcagaggatttgcaacagcatttgttaccttggaaggacagccgaaagttcccgcacaataaaatactagcagttgttctgtacaggtcgaagttcctgaaacacaagtcttgatagttttccatggcacttccatcacacagcataactgaaaaagttattatcactaatgctttctaagatactttcctacagccatagttttgagcttcaaactgagaggcaagggggcttacgtcatgtgggggacataaataaaagggctggaaacagttattttagcctattttttcttgacttcccctgccccaagctcaacaggaagctgtanatatatgttcata

SEQ ID NO: 29395 - DNA, 466 bp, Glycine max
  Clone ID: jC-gmst02400014b11d1
agggaaaagtcgtccaattacttttgagtaaacaactcacgcacgccctaaacaaacaaaaagcatcatcattttttgcaggactcggcaaagcccagcattgttaaagcaactattggccatttcagcttcactactattaaaaatatacacacaccacactctaaccttttagaaggtcccacagcccactacaaaaactaagccccactataaaagcgcctacatcatggtccactacccccacccatttgacactagaaaagaagcgcatatcaattgaacttttgacaatgtcttcctctctacttgaaatacggcaagacatgatataggggtttgcttgtcttttccaaggcattgatatcgaaccctgtattgacaaaagctgaaagaaaggcaaaaaaggaagaattatggcatctgactttgattgcaacttgatgcttgccaatgacttatttat

SEQ ID NO: 29396 - DNA, 488 bp, Glycine max
  Clone ID: jC-gmst02400014b12d1
aacatctagcagaagcatttctgcttagcctctccaatttcacgttacaagttgttcacaagtactactaatccaactaagtgaaaatgttctaattacaaccaaaagccgaagaagaaaagacttttacaatatgctagtaatagtgacgaggcacaagaaagactcttcttcttaagaggaggatgagaaggtgtcaatgatggttgtgtggagtgggtcactcaagtgggtggcccagttgttgagcgggcccttgccggtggcggcggcttggactgcaaagcccaagaagcccaccatggcaagacgggcgtgcttgatctccgccaattgaagggtggctttcttctctgggtctgaggccaggcccaatgggtcgaagtaactgccacctgtgtacaacctcttctctgggtcgagctctgcattcctctggaactctatgtagccaattacgagtacctcgatccagatcagtgtggtga

SEQ ID NO: 29397 - DNA, 460 bp, Glycine max
  Clone ID: jC-gmst02400014c02d1
agagacaaaagtgtaggtttattagaaaaccatctcaaaaccgtgcatcacttcaagttcagagatttacaatacccattagcaggccaaatatatatgacatttttggaacaaccccattttcaagcattgatacaatacagagtaaagaaaagggaaaagaaaaaagaaaaaattaaggggattgatcatatgatcatgatcatgtggtggagtctaaaatgaccttggctttgccacaatggtggaatgcttgagtatgtgcaagctaaattgccctcctttctcactagtgtcaatctgtgactggccagggggaggcaagagctcaaagttttggaccaaacgtcccaaagtgatgccaagaattggcaatgcaagaatgattccagggcagcttcttctgccaacaccaaagggaaggtacctaaagtcattgccattggctttaacaagcgac

SEQ ID NO: 29398 - DNA, 485 bp, Glycine max
  Clone ID: jC-gmst02400014c03d1
ctgccaatcgttttgcttcttttttatttatgggacttaattcagactagccttgtctcacacacaacataaagaaaccaacaaatgctcttaactcttgaccgaaaatcctagttcctaattttccagtcccatgacaacattttcaatccattgataagaacaaaaaatcatcgttgggaacacaatattttcccaaacattttttttcgctgtcacaggacgagcttcctttcacctcatctatttccgcaatgcctcacaaacaaacattatttatcgttagcctcgtattaacaacatacatatgggtttttaacacaagctgttgtgcaaaaaccagaaagtatggccttacccaaccttcagaggacctgtatttgctggtttctgaaagaatcttgcaactggcatcccatcagcatcctcgtttcctgcttttcctgctctccaagaacgatcttttttcctctgtggctttttat

SEQ ID NO: 29399 - DNA, 393 bp, Glycine max
  Clone ID: jC-gmst02400014c05d1
aacaaacattaaaatatctcaaataagcagtcgtagtctgaactttgaaacttacaaatcgcatgcacctcacaggtatggtacaataataaccatgatcagagcaacaatgtacatatataagcctcactcacttttacatatgcatggtcccaacagtcacaaccaaactgagcaccttcaaatttggggaagcagaaaagggaggcaaagaatacaaagagtcaagaaatataaagagggggagaaaaaaaaaaacatataaaacggagcagctatgcttcaaagacaattaaaatgaaatcatcatagaagcttgtcggcacacttcgccctcaattcacctcagccattttctctcttgaggaggatgtacattggttcctttggcac

SEQ ID NO: 29400 - DNA, 496 bp, Glycine max
  Clone ID: jC-gmst02400014c06d1
aaattaaaatttataaaaattttatttcccacgagacctagtacaatatatagtaacacaataaatacaagagattctgcaaactgaaaaagggattcttactaaagcaaactcaaacaagaacaacttccactcatttggcatctaccgtagtaacacaagatcaaaagcagcttctctgatagaacacacgtacgtatgattcaacatctttcacagtagtggttcatttctaacagctagctattgcaacttaaaataattgcaatgcttctgcaaagtgctaactttttttcccccccttctttatggatatgacaatgtgatcagaatgaaacaataaccaatccattgaatttgaatctgattttgggtttggatcgataccaccattcttcatctcaggaaaggacaagaaataggccaaagcctactaattaagcgcttaaaactgcattagtggctggtttaagtgtgatgttagtaacatcagctt

SEQ ID NO: 29401 - DNA, 447 bp, Glycine max
  Clone ID: jC-gmst02400014c07d1
acaggaacttccttgcagcttttatgggtaaaaaagtacatgattgtaagaccaagatttttatttaaaaaaaatacaaaatatatcgggctaaattttagatacacatattatatacaagaagaagaagaaaagaacacattgataggaacatcattcactagtcttccacgcttctcgcaagagctcatatcgtacaaccttgcggcctcccttaactagttccttggacaaaagtgatgagtcatccatgccaagagcagaaagtggtgaatccaattcatcaagttcatcatcactggtatataattttttgagcacaaatgacccacttctcagtgaagttttggttcccacttcttgtagcatgcccacaactgaagaagctggaggtggttcatagaacgtggaaccagcagagcatggaaagcttgtaatggcccctta

SEQ ID NO: 29402 - DNA, 574 bp, Glycine max
  Clone ID: jC-gmst02400014c09d1
ggaaaacaatttataatttgttcacacattcacaatatttgcaacatttgatagaacaaaattaattgttgatcgcattagaatagaatatattatcaaacgcgattcaaactacatttaaggtacttgaaaaatattaacaccccttcacttccaggaattgaatacatcagaggcattcaattactgccattggccatgtgaattattctaagatcacgagtgaacggtaggtagctgttcaagcaaagccatcaatcaactaatagagcgagaaaaacagaatgaaactaacggtcaacatacactatgcacatcttgacagcttctgaacctttaatttgtttcactcaaaagatagaaaacaaacacatgtacatagtatcttttccttttcccctgtatgtgaaggaatacaatagaaggtgacagaacaaatacacctcgccatgaatctaagacatcctagcaaacccctgttgtaaaatttccccaagccttcaatatagagctggttgctcatcgaatgtaggttcatcgatatctggtccaaaatcatttcaacccgagagag

SEQ ID NO: 29403 - DNA, 513 bp, Glycine max
  Clone ID: jC-gmst02400014c10d1
ataggggaaaacaagttttcttgtgatgtatttagatctatttcaattacccgttgttacgttgtggatcttttcaagaagcaacgatcactatcaaactattttaataatgtagtatcaggtattttatgtcaaaaatcttttcaatttacaatgcatatcaaaattatatcccaaactaaaacttttatttatttatttattagctgtttaaataatgtatggttagattgtatttcataaactaacttgaatttttaattaagctgtacatgtaagccagtcaattttaatttttcattttttgaagataaatagatgacccatccaagaaataacaaaggagggtaacggttataaggaaaacagaaaaaattgaaaacatgttccacaaaaaatgatcgatttaggattacgtttttgtccatatccattctgcaacttttacgttggctttttcactcttattacattaatccattctgcaacttttactttggcttttttctcgag

SEQ ID NO: 29404 - DNA, 512 bp, Glycine max
  Clone ID: jC-gmst02400014c11d1
agtgattaacagaaatgtgactaaattgcaggtacttgtctgaagatagcatatatctttttctaaaagcagataaaaatagacaatgaattgcaggtttaacagattaagcagctgctccaacagctacaccacccttgagcctggatttaccatacagggtttcttcaaaccggattatctcattcttggacccataagcaacttgagttctgtcatcaatgttactgatgactttgtctagcacagactgatgaccatcactgctgtaacctccagctttttcaatcaagaaccccaaaggagctacctcaaacaacagtctcagtttggctttggctgatggtgatgacacgttggtgaagattcctttttcttttacaataatctggttgacgtctggcaccattcctccagtgtatctcaatgtgtacttttcattgacatagtaatcgatcaacttagcataatcggggttgtcagatgtggctctcaaattcctggggagaaca

SEQ ID NO: 29405 - DNA, 476 bp, Glycine max
  Clone ID: jC-gmst02400014c12d1
aaaattataaatagtgatgtcatcaaggtttcatatttcagcagaatgatcttgacataaaagttaacatggctaatctgaatattcctgtggtaacgccaacacctacaatgatgatggacttgacataatatacagaaggatagcatttatgctccaagtgacttacattggcttcctcaattacattgttgaggttttgctaagaagttgaaaatacaagcacttaatagtttacagagccacatttccttctaatttgcccttgtattcctgtaagtactccaacattactaagcttcaccatggatgcagcaaaatcattatagaaggaatattggtcggtgctgtaaaaataagccatagaagaagtccttcgatccgaaagtagtgccatgtcagattctagaagccctttgttggataagagatttctataatactcattgtcgaaggtcaaagtagtattagaatca

SEQ ID NO: 29406 - DNA, 338 bp, Glycine max
  Clone ID: jC-gmst02400014d01d1
aacaaaaaaatttggctcaaaaaaatttggctggccaccattttggctggtgaaaaacccccccttttggaaagggaagggccaattttttggggggggcccccacccttttacgtacgggcctcaataaaggaaaaatggtccaggggacacacctttcacaatggggacaacttggacacccgttggggttatcccccccaagcgcaatggttgtttaacctgtcccgaaccccccccgattttatttttgggagcgctctttgaaacaaaaatttgggcccccctttctcgggggttttataacccccttaccccggggaaaacccctccccggg

SEQ ID NO: 29407 - DNA, 492 bp, Glycine max
  Clone ID: jC-gmst02400014d05d1
cttctcccctttcttctcctcctttttctcttcctttttttcttcctttttctcctctttcttttcttctttcttctcttccttggcaggtccaactgatattatatccacttttcctactttcttcagcttcttcactattttcactgtgtccatttgaccaatcactgtcaacttctgcttcatggagttcaaggccttggcattgctactactcatcttcttcttggcatccttattagccaaagcctgaaccaagaaatcgtccagcatcacaagcgccttgatgtacagattcggaaccttctcagactcggtgacacgcatgaccttctcaagctgtttgttaatcttgtcaaagctctcttgcaaactcacccagtcattgatcttgatggcattcttcatctggtcaacagtggataccatctcctcgaatcgcttatctttcgccgacctcacaaacgcgctttggccatcggaatcatcact

SEQ ID NO: 29408 - DNA, 477 bp, Glycine max
  Clone ID: jC-gmst02400014d10d1
aagcagaaagaaaattttatttatgacctctggggaaagagaagggagtatcatagttagcattaaactcttcactagatactttgcaagcaaatattggatcctaacaaagtgaattaggttggcaagccctgaagtgtattattattttgagtatacaacatgtttaacgaactttgtcacgtacaatacttgactaatttccctgcagtgcaccactgtctcggagggtgccgtgaccataccatcccttgaagttaacctaagatatcttctctttcaagagatgagtacttgagtatggctgcaacaatcctatctttgtctctggttgggaatgcttccaacaggacaccatctttgtagaagtggaaaagaggcacggccctgattctaagtcggtcagcaacctcggattgctcatcgtactcatccattacattatgctttaggaagattaccggagcttcatgatca

SEQ ID NO: 29409 - DNA, 506 bp, Glycine max
  Clone ID: jC-gmst02400014d11d1
gaattattcataaactcatgcagataaatacatcaaggatgtgtccaaaagacaactatcctgattatgaatatcctaaagtaaacaatcaaattacaagataaataaaaaaaataaaattatgaaacaagcaacatacattgggaaggcagtgtccacaaattcaaacagcagggaatatgaacatcccacaatgcaatcgacgccatcccaaactaacacaactcattttcccccaccaaaagaaaaaatggctcaggaatcatatagcatctatggggtctactttccgactaccgaccgactcaaaatatgaggccctcaaacagactcaatccttttattatatttatgctgcatagaagaaatgtggatttgggtggtgtggggacaaaagcaaagaaacaaataaattgctgatgacagtaggcattggttgagcaggagaccaaggtatatgaacttgcttgcttaatcatcaattaccagcatctctgctgtaaaac

SEQ ID NO: 29410 - DNA, 269 bp, Glycine max
  Clone ID: jC-gmst02400014e03d1
ggatgctattgagggctgttattgagctcaataaccctcgtgtgagaatcaacgcacccctcatcataactattacttacagttcaaagtgctcttaagttcatgaaggaagataattctgacaacagaaatagtcttaaatataaaacaagcaagtatatagcataggcaaatctacaaggaagatctttgattaacaaaccagccttggattaatccacatgggggaactttgattcatattttatgagctcaacaaaatcattcaa

SEQ ID NO: 29411 - DNA, 479 bp, Glycine max
  Clone ID: jC-gmst02400014e04d1
gtaataataaatacatctttattttctattttcatataatatagacataccacctattttccaagaagtacattttcatttgtcctcttccccaacctcacttagccactatttacatatcctctacccccaaaacttaggtataattttaccttagaaaccaaaccctataagtccttatcaaacatcatcaccttaactaaggttgaaaagagccttgcttattttgctacatgccattcttttgatcactgcaccatcaactatttcataggtgtcttatttctacctcttcagccttttccagttctattggactttctatatatacaaaacgctagaaatcactacagaaaaaaagaaagaaggacggtgacacttcccaatacctgccctaggaaagctcgagtattggattttgatgaaacgacgtcgaaacactcgcattagtatagtagtatttttatactacctaagag

SEQ ID NO: 29412 - DNA, 466 bp, Glycine max
  Clone ID: jC-gmst02400014e05d1
aagaaaatatacattaagcttatgtggcgcacacacatcaattggacaagagaaccgggccgagcaatttaaaaatcccccttcactaagctatgaagggacacatggaattttaggtttacccttccccctcttgaacaagagaacatccatgacatgttgacaacctcaagctgcaacactatacatcaattataatctcagtcattttctggttcaatccaaatctttgggctggtaggagaatacaataaataacatgatacaaaaaaaaaatttgcccctcaagcctcgtaatgaaaaatacaacccaaaacacttgaatctattgcgagaaatttactagcacaaaagtggacaacccagcaatttaagttgaagaaatggaagtctgcataacaaaggcagatgaaaaagaagtgacctctgcaagctgaagaagacaaggaagcacgcataaaattca

SEQ ID NO: 29413 - DNA, 449 bp, Glycine max
  Clone ID: jC-gmst02400014e06d1
gctgctgtgcatgctaataaatattattgccaccttactcctctctacagattgcatcctccgcgtcacaagtaacttttgactcttttggtacatctcctacatctatactgcacatatcaccactagagttgttctcatcacatttccatgcattcctcttgaaccatggtcggtgtattttctgctgtctaaagtacctcgttcccaaatcatttgagtcacccttcaatcgtttacttatgtgtttattgtcctcaaacagaaggttagagtcttcaaggttaacaccagttgggctgggaatcatatcatcagagcgacaattaaccataccgctggtatccccctgctcaacttcagcaggctgatccattatcatagcattagtattagaaggttgacaatctttgttgtcccgtggataccggggtagtggaggaaaaggg

SEQ ID NO: 29414 - DNA, 517 bp, Glycine max
  Clone ID: jC-gmst02400014e08d1
ggaaacgcatgtttgaaacttaattgtcaccggtacaaatcagaccaagaatggtttctttcagtacttataccaatcttgatttaagtcttatttaatagtaagtttgttcagaagcatgagcatcacaagccaagtgaccaaccacacaaggtttctattattaacgttttctcctctaggagatatcacaaattaaaagttggtaaacttcttttctttcaagctatccacagtctccttgaggctcacttccaaaggagtatattcaatccccaagctctttgccttttctttggatacctgatatattggcacatatgggttatcatctgcacacttctctggaagtagtaatgtcgggtacaaatcacgtaaaatcttcacaatttctgagtagtgtgccactctctccaccaaacaataccttccattagctgaagcattctcatatgctagaatatgggcatttgcaacatctttcacattgacccaaccaaaagatgcatttggaaat

SEQ ID NO: 29415 - DNA, 441 bp, Glycine max
  Clone ID: jC-gmst02400014e09d1
gttccttcaaaaggttttatggctttataattatgattccccattaagtttgtatggatgctcaaaaccccccatttgaccccatgaatttgatttaccagagggggaatgaaatcagttttgatggccacaaacaattggatttaccagagggagaatgaacatggctcctaaacaatttttttatcccccaagcttttgaacccaacatccattcctaaataacctttaactacaaaccctactatacatcccaaaggtaaaagagctcctatcatgttgggatggcccataagaatcaattttaccccataaaatcgggggatcccctaaaaaaggtggaaccacctttttgggggttttaccttccccatgaaaaattaatggattatgttttaccataaagctacatgactactcaagagacctttttatagggat

SEQ ID NO: 29416 - DNA, 517 bp, Glycine max
  Clone ID: jC-gmst02400014e10d1
gcctcaaaaaaccagcaactagaccaaccaattcttaattttcacaacttccattacaaacttcgtactcttgtcaactaaatcatacacaagatgaataaacaacacattctgagcacctaacacacatgcacgtacatcagcatggcacaaatctatccataagcaagcacactgttgcctctgacatggtttcatgagtgtctctctgaacagccatcataaccttgtgagcctccttcttcacaacttgttcttcttctgacccctctttgcctttggagaagaggctctttcgggccataacaactttctctctgagctttgtcagctcccccttccacccctcaaccatactcaactattaattagtcactcccgctcacaaaaactatgtaatctaagaaccccttttgtttcttgagctctctaaatctcttcaatttatgttttaaatggtgtacatggttggagtgaaactgttcaagtttatatagaaaatagacaggcgaatgag

SEQ ID NO: 29417 - DNA, 324 bp, Glycine max
  Clone ID: jC-gmst02400014e11d1
aaaagacaagcatagacaatcactacctgtaactaatggatactctgtgacacttacactaacacgaacagaagggcatatgacccttaaatggggacagcccatatgacaagtgccgactgaatccagttccgtatacacagcatatgtatatatagaccgatatgtacataggacaccagtgagtcaacgactacaattgagataccactatagggaggattgaaacagaactgaaaaccacccctatgtccttgactgccgactgggaatagacaagtcaccctcactgaaccagtgggcttcatcggccataacggctga

SEQ ID NO: 29418 - DNA, 480 bp, Glycine max
  Clone ID: jC-gmst02400014e12d1
gagagcaagtaggatcctatatgagctgtgtgattctgtatatgtacaaagaaaactatttcactcaatattatacaagaagtattggatttatatgatattctaagaaaaaattggagatatgggccttctccgagactcatagcaatagatagatttcgaaccaattccctccaactaactgtaaccgttatcttcgggtaggtatatggttgcattcctgaaaccagcattacaatctgagtcctgatatgagtgggctcatgtgactgtctgcatgggttgaacggaagtcatcaggtggactaatcggtagaatttcaatagagcacagggctgtttagatagggacttgactatgttgaatgtgatgaacaatgtatagtcctagtcacgggcactgcttccaaaagttgaggagagagggactgatccaggcatctgttggggggataggtcaacactacgggcatcaacatg

SEQ ID NO: 29419 - DNA, 540 bp, Glycine max
  Clone ID: jC-gmst02400014f03d1
aatatcgcaatcgctgaacaatgttatttaacaaaaggatcgaccacaaataaaaacaacccaactccaatcatcatcaccagtccagcaaaatacattcaaaagctatctaaaaatttgaggaacccacagtggcgcattagaaaccatgaccatagaatttatgagagaaatattatgggcaccgtgcctctccaacaatccccaaaacgttgcttaggcttcagcaaacccaagctcagaaagcttttggtgagcctcagcgtaatcagcgaagaaggcatcttcgtccgatgcatatttctcaacaagagggcggaacacagggtcagacaaaagtgccttgtcagaaggtagctgaaggaggccttctttctcaccactcaacaactccttgaagtatgagttgtcgaaaataagaggattagaggtccagggaccctcgaatccagaacgctccttgtgcgcagctccaatagtgtgacccccagacagagcaacgatatctcggcactaagccccatagctttgccaaacaca

SEQ ID NO: 29420 - DNA, 464 bp, Glycine max
  Clone ID: jC-gmst02400014f04d1
cagtcaatagtattatatcaccttcaacagaattaccaatttactagtctgaggtgttgtgcaatactggcattaaagaagctgccttttgttttcttacatgggattgaggagttacttgtagaaagaacaatggttggcagtaggtatactacagacgcagcctagacatttgtaattttctgcattttcacgctttacgcggatgactctagcaaaatacgtgatttacaatccacctagtacaacaagctaacattctgactcatcataacaagcacttgatatacaccgaaaaaagaaacaagctcccttattattaaattaaaaagctgacaaattggggggtcaactgatgaattagatccattccttggggttgatgcatgcgtccaagagtttccattcttcgcttccttcttccggtttatgatcgtattcccaccgagcagtcagtgggagag

SEQ ID NO: 29421 - DNA, 282 bp, Glycine max
  Clone ID: jC-gmst02400014f05d1
aaaaaaaaaaaaaaaaaaaaattttatataggccgattttaccccacaaaaaaaaaaggggggactgttttttccaaaaccaaatttttaaacaaaaaaaaaatttgaaaagggaaaaacacaggggaaaatgaaaagacccattttttaacaaaaggtgctaagattaaccccaacctttgggtgggagaaaaaaccttagggaaaaaatgagggtttttacgacccaaaaggggggaacttttggaaaaaaaaattttttgcacaaggggttttaacccc

SEQ ID NO: 29422 - DNA, 507 bp, Glycine max
  Clone ID: jC-gmst02400014f07d1
ggaaattcatgtttgaaacttaattgtcaccggtacaaatgagaccaagaatggtttctttcagtacttataccaatcttgatttaaggcttatttaatagtaagtttgttcagaagcatgagcatgacaagccaggtgaccaaccacacaaggtttctattattaacgttttctcctataggagatatcacaaattaaaagttggtaaacttcttttctttcaagctatccacagtctccttgaggctcactttcaaaggagtatattcaatccccaagctctttgccttttctttggatacctgatatattggcacatatgggttatcatctgcacacttctgtggaagtagtaatgtcgggtacaaatgacgtaaaagcttcacaatttctgagtagtgtgccactctcttcaccaaacaataccttccattagctgatgcattcttatttgctagaatatgggcatatgcaacatgcttcacattgacccatcgcaaagatgc

SEQ ID NO: 29423 - DNA, 442 bp, Glycine max
  Clone ID: jC-gmst02400014f08d1
atcaacttaaacaaagttcaagcactagaactttacattatatatagagtaaagatgggccatatatacaatataaacataacccaacacttcaaagctaaaaccaaaactcactatttatacaaggggaattcgctcgacaacttaagaatttatttggcaactagggcctttatactactcagtcatccttaagcttatatacattggcaatggaatcttctgtctcccacaggaaagatccaaaagcaacagcttccaagactaggctcttcaagctagaaaatgaagtcaaaataacatcatcattctcaaccgaacccgattccttggtggtaaaaagagcacaactataacttccaaccaaattcacaggcttcttagacctcaatctggcacatttctgcaatgatccgggatgaaagctcataacataacattt

SEQ ID NO: 29424 - DNA, 479 bp, Glycine max
  Clone ID: jC-gmst02400014f10d1
gcaatgtcaattttcctttcaccaaagtgtgcaaaatttaagttacattatggacaagtaaggtccacacataagctcctattcaaaatacaaaaaagagagaaaaaaaaaataatctaaagttaattttccgaagaaagttggtgagtacacaaaacacaacccctttcaatttctctgttctcaattaacgacccatttttgcattgcagcctctattattattcatccctttctaatctgtaccactttaagcttttggagcactaatgactacccttaactctctcgaggcttcacccttttgcatctcaatgtcgttgtttgtttcagcatcttctaccacagtctccaacctcccattttctgaacaacacttcatcacctccatggttgtctctgcctctttctctttgctctccttgtgtttgccccatagaacggagtaaagtcccattactatgagaatagcaccaacg

SEQ ID NO: 29425 - DNA, 355 bp, Glycine max
  unsure (1)..(355): unsure at all n locations
  Clone ID: jC-gmst02400014f12d1
gtaaataaagctcggatcataattaatatatccgccttaagtgaaagcacaaatctgagtttattagcagaccaaagatcctatggtggctctttctccctcactacacaaactatactatacagcaagttgcaaatattgtacaagaaagcaatagggactgcagatgaacttccgtatgaattgaaatttccatacacattggaggtcagctactgataaaagagtaggaaattaaaacatgtgtgtccaatgtggcttcaacaccccactttctctcaagtctcaacagaagagtggtatcgtaacttccacctnccttcatctagtctaattgctttatatatgaattacc

SEQ ID NO: 29426 - DNA, 450 bp, Glycine max
  Clone ID: jC-gmst02400014g02d1
gaaaaacaaggggaccttccaacaattcatgtttcaagttcgaattataatttacataatttttgcaagcgggggataatagataaagtagagtttaaaatgcaagaagccaagaggcttatgacatgaaacggggaacagagatgaaacttgaaggaacccccaagggaagttgaagctcaagggtaggtttcaaaggctgggacaggggctttggaaccaatgaagacgtttccataaatcaagccagccaaaccttctccaatcaatgggccaacccagtagatccagtttgcagccaagtttccactgaccacagctgggcccaatgagccagctgggttcattgaaccccccctgaatgggcctgctgctaaaatgttggcacccacaacgaacccaatagcaatgggtgcaatgatacccaatgaccccttttttgggtctact

SEQ ID NO: 29427 - DNA, 345 bp, Glycine max
  Clone ID: jC-gmst02400014g03d1
agggggaattttaaattgaaagattaaaattggcataagcaatacagcaacagggtaccacaccttaattttggacaatttaattcctagcagaattatgtcaataagaacgaacaagtagcgtaggggtgaaatcaagaaccattttttgatgaaattaaaagggacggcggaagatttgagatgatatagctagccttggggtaagtgcacatgacatgaggcaccagttaattagcttgcttggcctttttctttcttaaatttctcctcaaatatattggactatttcaccttataattgggcaatgacctttcaaattacccttcaatttcaagaagcct

SEQ ID NO: 29428 - DNA, 473 bp, Glycine max
  Clone ID: jC-gmst02400014g05d1
cagaaaaaattatttcctttgtagtctttataccatagtcaacagctgccaagaaacagattacctctttctttttttgttttccttcagttcgatcccaagataagcatataatgtaaacacggtaagtctttctacaactaaaccgaacagtggtagttgagtttctgatgtttcttggccgtcctagttactttccacaatcacctagtactatgggatcaacattagaaatacaacttctccccatgcagagcaggaagtgggacagtagttataattaacacacacaactgctaccgttaaacggttagtgattacaaacaacattgcgaaagtaaattggatcaaggtcgtcatatcagtggttaccatcttcaagggttgtcatttctatcggtagtaagcctgctgataagtgggagccaaaacatttccatagccaccatatgcaggaggatagttcatgggag

SEQ ID NO: 29429 - DNA, 251 bp, Glycine max
  Clone ID: jC-gmst02400014g06d1
ataaatcaactcgaaactattaatgtataacacaaccaaataagtttagatcttgatctgattacaaagatattaacaaacctgagatgagaggacacaatcacactatctgcgtattacaaatatcaactgcaaaaaggagaaaggggggatataaagcggctacctatacaaccacacagccactcaaagaaaagctgaaggttagctccaagttaattttcttcctttgcctggcttcttagccgatc

SEQ ID NO: 29430 - DNA, 530 bp, Glycine max
  unsure (1)..(530): unsure at all n locations
  Clone ID: jC-gmst02400014g08d1
gacagctgaattcattttctgcttggtccactttagaataatacgttaacattcaattaaagcacatgttacaataacattccacttgtttggctttttgaagcttggtggtcttaagaacttggcctgtttctccaccaagaaaaataacataactgacgaaagtaaaatccaattttttgataaattttacaaaccacgggccttcatgcattgataacatatttgaacaggatcttgaaggtatcgtgcaaaaggtctaaatacagcgtgggaaaaaggtttgcccgacatacccttcagccattgccctcctcacgttagattcaaacatctttgggttctctctcaacacagcagcggcatcgtgattcagtggatcctcgtaatttggttccgtgaaaagatgatacaagccatagatgacagtgtttatattaaggacaggtttccaatctttctcgtagatgttgagacaaacatttccttccaagtcaatatttggatgaatagacttngtcttacactta

SEQ ID NO: 29431 - DNA, 538 bp, Glycine max
  unsure (1)..(538): unsure at all n locations
  Clone ID: jC-gmst02400014g09d1
acattgtatataaatgattgcaccgcacaagaaaatgattaaaaatagcaagtgaaacaaaaatcgcacattaattttcccctcctgtttctatcgggtgccacattttggcaatctctcatttctttttcaacactcttcctctgcaccttcgaattcgtataataaataaatgaattaaacaaagaaccatttcgaataaattaccaaaattcctatattctaaattcagaaaagcgtaaatcaaaattttcctcagcgacagcacttggagcacagtattaggaaaacaacgagaaagacaatggaagaaagcgctatggccacaccaagaaccaccttgttgggcccatgatgatgctccttcatgtgacggacactgccaccaccaccaccaccatcaccatcatcataatcataatctccattactgccatcatccgcagaattagaacgcttcgaaggtggaggagacaccggcctnccaacttatcacacggagcatcttaagcttatgataacttggagacaaacggac

SEQ ID NO: 29432 - DNA, 496 bp, Glycine max
  Clone ID: jC-gmst02400014g11d1
aaaagacaacaatcagaactgatataaatataattatacaaagagtctcaattcactccaaaattctgttatgccccttcactatttcccacacattccttattcatgtttccttcactctctcatcattgcgcagttcacatctccaatacctagctgtcatgactcgtgtacattcaattacactgtcacactacagtttcctccttattccaagcaccatttgtatttctcctcttctaatcacgtatattttcccttggcccaacacttcccaaccttcctctcttatatacaagttaaaggtctatcatcaatcatttggaaaggaaaaaaaaatgatgttttctgagacgtgggaacctatgctcataatcaaacataatggcgattataaatgaatggactaccatatctgttttaaaattctgtgtacatttctcttataccaattaaatacaattcaaataatccctatagacaacccatagaaaac

SEQ ID NO: 29433 - DNA, 480 bp, Glycine max
  Clone ID: jC-gmst02400014g12d1
aacatacaaaaatgaaaatttgtgtattcttcttatatttttattcacaagcaaaaatgatttaactccacagatatttttcagtccaagccgcaaaaccaacgaatgaattcttgccatgtcatcatcaccacaaccacgtcaccattaatatactcgaagaaagtcttgaagctgctactttgggccccaacatgagtcattaaattccatctctcaagaaattccagctgtcatccaccaaatattaatattatcatcactatttctttatttttattattgtccatgcagcgtgtgtttttgaaatgtcatcttcattaccacgggtgagtgaagaaataaacacaacttgtcgtcgagtttaactttaaaccctcttacgtgtcaaaatccaattggcgtgaaaccctcgagcttctgaaggatctatcaagcttttcactcaaagccctcaagacctgcccacgtgcatcccct

SEQ ID NO: 29434 - DNA, 550 bp, Glycine max
  Clone ID: jC-gmst02400014h01d1
gcacataggatttcagtcccatattagaagtatgcaattcaaatgtgagatttacaagggcatggcctctccaactacaactgactagattttgtagcatagttctcccaagttctgaaagtattatttttagcaactcttaagacaagaataagtcgggccatcggaaaccagttgcagtcttgcagatcaatagatatttctcactgcacttcccctttttctttagtgcaaagataagcagaccaaatgagaatacatgacgataacagcttaatattaaatgttatgcaagtctctgtacatgcaaaaatgcaatccccacgggaacacattacaaaattgcccaggtgagggctcgagaaataaaatgaacttacaattgttaattcgtaaatgtaactcttacccttttttgtatgggtaaataacttcatacatttacttcttgtatatcagactccaaggttgatgggtgtaattatccagtagcaatatctgctaaaagcatcttcaacgtctcataagtcataaaacaaatacctacacc

SEQ ID NO: 29435 - DNA, 548 bp, Glycine max
  Clone ID: jC-gmst02400014h02d1
gcacataggatttcagtcccatattagaagtatgcaattcaaatgtgagatttacaagggcatggcctctccaactacaactgactagattttgtagcatagttctcccaagttctgaaagtattatttttagcaactcttaagacaagaataagtcgggccatcggaaaccagttgcagtcttgcagatcaatagatatttctcactgcacttcccctttttctttagtgcaaagataagcagaccaaatgagaatacatgacgataacagcttaatattaaatgttatgcaagtctctgtacatgcaaaaatgcaatccccacgggaacacattacaaaattgcccaggtgagggctcgagaaataaaatgaacttacaattgttaattcgtaaatgtaactcttaccctttcttgtatgggtaaataacttcatacatttacttcttggatatcagactccaaggttgatgggtgtcattatccagtagcaatatctgctaaaagcatcttcaacgtctcataagtcataatacaaatacctaca

SEQ ID NO: 29436 - DNA, 529 bp, Glycine max
  Clone ID: jC-gmst02400014h03d1
aacaagaaccaacaaatatatacatacttcaacaagggtcttttacacaaggcaatattgtgttctacatcacgataatgaatacagaaaatatcgggtagccattgtaagcaatgcttagcaatattattaaataccatcatgcttgatgaaatcaatagaatcttatactataggtacatgtggttatgaagtactcttgctcatctaatcttcaaaaaagcagggtaaatatgctttgtttctggtggtttcaactagtagtagtactgtggttgagccaattaatgccaaattgttggcataattaatatgtgtgctgattggaagtgcgggtgatgagacagctagaagaagagacgaatcctgatgatgctgcatttggttggaatggccttgggacaatgctgccattgctgcaaagttgccaagccaagttggaaattttttgcaaaggaacattttttattctgtccaccatgaccttctccattggtcctctttccttcggtatcttacaagtcataca

SEQ ID NO: 29437 - DNA, 471 bp, Glycine max
  Clone ID: jC-gmst02400014h05d1
gatatcaaatactatattttaatgaacgtcgtgtaaccaaaacagagaaaacagagcactctttttaataaacaaaacacagcttcttttttagagtgaacaacaaatacagctttagttctcaattaattaataacttttccagactcttcatgatggaaggatggatgttgcgtgtgtcgtgctagtagtatactttctttcttttactgatcgacaagtttgctgcctttgacatccacaacaaacctgtatcttacgtcattcttctccaacctttcaaaggctttgttaatggaatccatggttaccatttcaatcatcgaactcagacccttctctttccagaactccaacatcttctcgggctccttcatgctcccaatgaagcttcccgttattgacttcctccctagcatgaccatggggctaacaaattgaagaggggtgttgatgacccccatcaagatc

SEQ ID NO: 29438 - DNA, 61 bp, Glycine max
  Clone ID: jC-gmst02400014h07d1
ccctctgcttacattttttttttttttttgggaaaaaaaaaatctccccccccggggaaaa

SEQ ID NO: 29439 - DNA, 444 bp, Glycine max
  Clone ID: jC-gmst02400014h08d1
actccaatgaacatgacaatttcatatattattattatacttcacaatcagcatttctttgttcaagactgataataaccattaaattattggcattgtaacaatcggaaaacgagggaaaggaatagaagaaaacaatgaacaacccttgccagttagttgcaccaaccaacaaggcaccaaccatagtaccaatcaaaaggtaaaaagagagagagaccaaatcctactaagaaaagcataactggtcctttccatccaaagggagaaaacatgcaggttttgctcatggcttccacagaatggttgtgtctgcaatcatggaagtaaccacgtatgggtccatgttggaagctggccttctgtcctcaaaatatcccttccctgctttctctgtgtctctcccaaccctaacagaagctccacggtttgcaactccccata

SEQ ID NO: 29440 - DNA, 469 bp, Glycine max
  Clone ID: jC-gmst02400014h09d1
attcatgaagatttttcattcaaattaattgattacaattttgtagacaaagacgccttctataaataaaattctcagccaaagaaaggaaaaagtccaacctcaatctcaattcaagcctcaacttctttttcacccgaaaacggaaataaaaaataaaaaaattgaagcaactggttagaagcaattgctcattgttgaaacaaactgaaggaattcgaggctttgttaacacttgggaagatcagctggcggtggaaacagcttctgatttgggagttttccatccaacacaacccatgccatcttaagaccccagcttgtgtgcacttccaagtgacaatgcatgaaccatacccctggattatctgctaggaatctgatagcaacccatccaccagatgggactcccactgtgtttctctcaattgggtcaagaagattgaagtttgcagggtccttatttgga

SEQ ID NO: 29441 - DNA, 467 bp, Glycine max
  Clone ID: jC-gmst02400014h11d1
gaacgagtataatgtatctccattgcttcattacatcctgtgtaacaagcatgtaaaccagtgcattagaaagcacaagattgcttggttttcaagtataatatctcaaaatacatcaaactaataaattggtcacaatggtcacccttccattcttctatacatcgacttggcactcttttttataccgctagtagtcatcatcttcatttcttgacccaaagaatctcctcacaactgcagcggcagcaccaagaaacataaacagaagaatagtgtcaaatccaccttcaacgcctacagctacactgggacctggtgcaaagaatgaaaatggagaccatccccagccaccgtaaaatggcacaccataaccatagccatagccaccaactagcggaggtgccactcgaggattaatatagatattggctctggaatatgtgattcttggtgaggagcgcgga

SEQ ID NO: 29442 - DNA, 466 bp, Glycine max
  Clone ID: jC-gmst02400015a01d1
ccagtaatagtatttaatattataagcagagattcataattcagattagccgaactttatacagaagcgaccaattaccaaacattaaaaaaaaaaaaaagaagcaaccatgagcttaacacacccatcacaggtccaaaacacttgaacttgctgaaaggcaagacatgaccactttattctaaggatgtttgtttaacacaaaacaccagagggcacgaaaaccatcacagacataatacataagtttttagctacacattaatagttaatcattattcctaattaagggctatctctgcttgaagcttgctttcccaacacctaacttgcaagtgcaggggttgcaggagcagtttggtccacatttgcagccatggttcttagcgggcacacccatttgagcaccctcaaattgggccttaacaggggccactcccatgaccaaggtctcggtggtggttga

SEQ ID NO: 29443 - DNA, 310 bp, Glycine max
  Clone ID: jC-gmst02400015a02d1
ccagtaattgtggggggcttaactaccggggattaatttttcaaattccccggccttttttccatagcgaacagctacctaacattagttataaaaaattgtatcgcccatgaggtcttcatatccctctcacgtgcaaaaaaatccaacttgctgtaaggaaaaacctgaccacttccttttaaggacgtttgtgactcacttttggccgaagtgaaaccccctctttttattcattaagcataactgtttcacacacgggaagtgtttgtcaaggttgctaagcaagggatataactgtttgcatctt

SEQ ID NO: 29444 - DNA, 387 bp, Glycine max
  Clone ID: jC-gmst02400015a03d1
ctgggggaacccacttaattttccccattcattgtaccttaaataatatcaatcaaccttttggcttgggatgggttaaaaaacccaaggggtatgggtcactctctcttgtaatgagccacaccccaaagggggtcgcgtgggttgtgaacacacgatagaggtggggttaccaaaaaagaaaaaatggataaaaagctgtttatacaaaaaaggtgaacaccttctttcccccggaagtaggtgctggggtttactgggcaggcattaaagggctttattcctggggcatgaaccaaggaatctgcctcgaagcgggggggggtgccttcctcctgaaaaattcaatcatcctaactagggagaccctttttgaaaaaatatgac

SEQ ID NO: 29445 - DNA, 512 bp, Glycine max
  Clone ID: jC-gmst02400015a06d1
gataaatatgccaaccattataccatagcattaaaaatttaaaaccagtgtaatgtatacaggtaccccactaaaaaagtacaaagatagagattatagtcatcatttctcaagcatcaaacactttcttcgcaacacgcagatcccgtgacttttcatactcacaagattattacactgcaatcaaagcattccagtccaggtcgatgcaaaaacttgtacagaagccaatgaaatatgcacgataacaagacattaagcaaagattagagaccctgttcaatgagataatcaccaagcctttcaactaccatgttgcattgacctggagtcattggttcatcataaatgccaatgatcaaggccgcaccggtcttcttcacagtaacaccaccaggacccttcttccctcgaatgacagtaccgggttcaccctggatgaccatatatttggtgccaccgagatacaatccaattggagcaagtgatccaggctcattaagtcattcatg

SEQ ID NO: 29446 - DNA, 381 bp, Glycine max
  Clone ID: jC-gmst02400015a08d1
atctataaaaagcaatacgttatttgaagctgaattaagtaggtagtgagagattacatgatatggaccatgatagcatatggtgtatgggggccaaaaaaaatgacaagcatagtggtgttgtcaatgactttcatcaagattaggtgagattatgataaaacttttctcttgatataattgagctctaaattcgttacgaactagtacaacaaagtcctacaaaattggattagtatcatttttctcaaggaaaatcacattattatgccatgtctttataaatagatgatcttccttttactcatgcagactttaacttagatgatgttgaagccagatgggaaagacttctgtgtcccacaaacaacagaggagcat

SEQ ID NO: 29447 - DNA, 387 bp, Glycine max
  Clone ID: jC-gmst02400015a09d1
atcacactaaaggatctgattaattgaaggcaatatatgctggacaaccgcgcaccactcacttggcatatatggaacacatacataatccatatcgcattacttagtggcggggcatgtgttactcatgtctaatgcacaaacatagcaggggcatgaaggaaaaccacaaaattaaaacgaggatcatatagctgataataataacaacaacacatgcactataaaaaccacatgcagtagtggtagcggcatcttcttcagattgggaacgcgctattgatggaagggagagcgctgatcctgatgatgacgtaacgtgcgaaaacggttgccttgaacgggcacgaccagttgtgttcggacctatctttgccaccggcgttg

SEQ ID NO: 29448 - DNA, 527 bp, Glycine max
  Clone ID: jC-gmst02400015b01d1
atcggaaaacttctgaaactattactattatttaatacattaattaatgagtacaaatacaatcactctgtcttctttcttattgttcaactttgaaggagacgaaccctttagcttctttctcactctccacaacaacaacattatctgacacattggtcatagaaagtgctacaaatttagcctcatcttgagcataaaatgaatattgaaaatgactaatcctattaggaaacaccaaaactgatgaaaaatcagccacccacttcgtgccatttccgctcgcagttaacttcccaactgttgatctcaagctcatgccattcacattgttgcgatcaatcaccacttgttcaatgctactaaaatctccatctagttttacaataggaaccttcttattggggtcaccattaaacatattatcaactatatttaggccaaaaatttgacctttaatggacttcaatacaatattagcatcccctaaaaacaacccattagtgacatgaacttgcacaggatct

SEQ ID NO: 29449 - DNA, 364 bp, Glycine max
  Clone ID: jC-gmst02400015b03d1
aacagaccttttgaatcaataaatcataggtagaaatatcgccaacattgcctgttagatcaccgatgggaactattacaactaactgcaatacagatccaacgaattataggcctatgataccaaaaaccgagattttgattattcgaaggaattacttttgccttggattccaaagatgctctaggaaatggggatagcacctcataggaataattatgtcaatgcaataaaagttgctaaccaatctcctcagtttgaagcccgaaggaagaaaattttatccatgaaaaaaatggtggagacgaacattacaggaccccagaataggacaaatgtaaaaattggaacccacggagacatt

SEQ ID NO: 29450 - DNA, 215 bp, Glycine max
  Clone ID: jC-gmst02400015b05d1
cggtgcaatcatataataatttcatgctgcaatctgattcagaggcatctaacaagggatcaaaatttatttagaagatggagtcatcccctcgtcttagggaacagagtgatgaaccacataggccactcgttctacacaacacattataagaaccttaacaaaacacatgctcaacaagtgagccccatggtgacaataatatatgatacccc

SEQ ID NO: 29451 - DNA, 381 bp, Glycine max
  Clone ID: jC-gmst02400015b06d1
aagcttgactgaaatttaccaaaatgaaattccataacatcaaaacactaaaatatcaaaccaaattcatccaacttggttggtcattgatattaaaaaacacagtaaattactccttagaacaaaactttgacaaactcatgctctagtgttaattaagaatatgttctgaacaaaaaagctgaatagactacaccaattaatcgaagagactgaaacccatatcatcatcagattcctctttctcctccaccttttcctccttctttgcctcaacagcaggagcagcagcagcagtacctccctcaggacctgtggcgacggaaacggaccaccaccaccagagggaaccgtggccaatttttccctacgggcagcaat

SEQ ID NO: 29452 - DNA, 332 bp, Glycine max
  Clone ID: jC-gmst02400015b09d1
aaacgttagaaactcgtaatgtatacattgtggatttacacaacgaacttgccagagccgatgtgagtaatacattgcattaagatgaaaagaatgccgagatgacttacctgatgatacagcagcctgtgttgcatataggtctggacaactgggtggctgctaaagagttagaggctatatgttctcacggtactaacctactagtgtattagaaagtctacaatcacggattgaggatgatgcataattctatgggcagtggatatgacattcattatcttggtgagcctagccctttttactcgacaaatcacattctctcgcataag

SEQ ID NO: 29453 - DNA, 425 bp, Glycine max
  Clone ID: jC-gmst02400015b10d1
gagtaaaagcatggatattatataattttttttttcatgaatacattgagtagaagagattaattacctaaaagaaaagaacacacactgaagaaaggaaagtgcttgaaaatactaaagggtatttaccaaaggctcttgtcttgaaagaacctttaatctacataggatcaaagaaaagcttgcaataaaagcacaagcaattgccattattaataacattattattcttacaatatcaagtcattttgcttccaattatctcctttttgaaacccatgattatgaagaggaaattgactcaaatagtggggttgctcctgaatgatccaagagccttagcagcacctgctctcaagataaattggtggtagaaggctgcaatggctgctccaataaatggtccaacccaaaagatccaatgg

SEQ ID NO: 29454 - DNA, 457 bp, Glycine max
  unsure (1)..(457): unsure at all n locations
  Clone ID: jC-gmst02400015b12d1
aagatggtcaaatagcatttattcattaaattaactccgaaagtaactgattgttcactgaaaaatactactaacagaactatcatcatgaacacgccaaatagtttcacccaaaaggtttgctacagtaataatcgttaactggggaaaatagttcttctccgcaactggaatggtgtttgtgataatcacctcgtgaaacaagccactggacaacctctcaattgctggaggactgaaaatagcatgagtgcagcatgcatacacttccctagccccctcttcatgcaagagtgctgcaccctcagcaatggtccctacgtccaaaaccaacatttgaaccagaaaatgcaccaacatatataaatggttaaaagagcaagagtttacaactataaaattctagtgcaaatactttaaaaggtangaataccaaaatatgctaaggatcatttgg

SEQ ID NO: 29455 - DNA, 476 bp, Glycine max
  Clone ID: jC-gmst02400015c01d1
agaaatcaaagggaatctaatttataacagagcattttacagctagccgcgagcatacataaataggcagatttttgttttgtgtgtacacacatatatatacagatgtagcccgattcagtgttttttgtccttaggttgctgccgtgcggtgtatataatatcaggctatgaaaccttataagattttttacgccactccctgcatgtatatattgacatagtaatattatatagatatgtgacaacatatatgaatgaattttggcccacccatatagttttattcaattttctccaaacttagaagagtttggttcaatcgatctattccttcacgattttgagtgtatttaattagctatgtgtgactccaagagaccaagaacattaaggttctaattgggtcttctgattggaggctcaacctttgattggtgagaagcctactactactgctaggttggttggatcca

SEQ ID NO: 29456 - DNA, 415 bp, Glycine max
  Clone ID: jC-gmst02400015c06d1
gagaagcactatatgtgagaaatatcttctataacagagctccatatgtattaaggatatagaccctacaatgaagtataccaacaatgaaaggactacaatacaagtatgcatgcactatagaccaagtgtgactcatagaatgtaagaagttattgctcttgatgatatgatacatgacaatatagatcaaatgtgcatcagaatccagactgcagatatagtcacacttaaatgtatgctgcaaaatttctaactaacaagctcagttgtaggagcccatacgtacacgcagctggccaccagcatacggctggaagctatccctggcgcttgattagtcaatataggattgtacataaactatgctagcgacgaaaataagagccctatctgaaactgacactcccttact

SEQ ID NO: 29457 - DNA, 464 bp, Glycine max
  Clone ID: jC-gmst02400015c07d1
aaagtggccgtgttcggaaaatatcttaatcataagtcacaaattatcatataaattacatgctaatcaattattgcggctcatgctcactggccactgacttgcactctttttcgccgagtccactcagccgaatcatggcccataacaacaccataacattggacttcaactaaccatcactagccacctgcttaacaacaatggttataataaacacaaaacttaaatccagttttataagcatgtttagtaccgatcattgattaaaattgacgttctatgttactaatgtatcataatcaaaactttttattacgtaaattatcaaaacaaaactccaatgttaattacaaaactgaactaaaattacttacaaaactatggtctgactcggctttatatcacagacatatattacgaacactactgtgatcattcatttgcctgatatttaataaact

SEQ ID NO: 29458 - DNA, 481 bp, Glycine max
  Clone ID: jC-gmst02400015c09d1
gataacaaacagtagtaacattaatgggacaatagagttcaacacaaaccaaacttattttcaaaggtcattacagacccattacacatcacatttcttcttaaaatgtttgggaaaatccaacatcgaacatcacacagaaatcagctccagcttaaaaccccccacgaagacgcaacaccaagtgcagagttgactccttctggatgttgtagtcagcgagggtccttccatcctctagctgtttgccagcaaaaataagcctctgctggtccggtgggattccttccttgtcctggatcttcgccttcacattgtcaatggtgtcggagctctccacctcgagggtaatagtcttacccgtaagggtcttgacgaagatctgcataccaccacgaagacccaacaccaagtggagagttgactccttttggatgttgtagtcagcaagggtacgtccggccttgagctgtttgccggt

SEQ ID NO: 29459 - DNA, 477 bp, Glycine max
  Clone ID: jC-gmst02400015c10d1
gatgattaacattgaaatatcctattcaaatatatgtaatgggttaccgtttcaacaaatcgtcggtagcaaaaataaccaataattagacagatgctgttggaccctgtaaccatatgccaagatcaagtaataggataagcagcaggactaaaaaggaaaattacaacatatatgtacaaaaatccctacatataatataatatatacaaggtcagatttcattattacttgatttcatattcttggccttttccatccactttctcttctcatccaagctctttaaggtgcctttccatttacaacctgactcttgaaaaatgtttcttcaatccttaacttcatattcttttgattcctgatgtatttctgagcaggcactgaaaatcttctaagaacagccctctgctgcaaaaggaggggacttttcaatgtctttcaatgcattttcttgattttcctggttactaacac

SEQ ID NO: 29460 - DNA, 488 bp, Glycine max
  Clone ID: jC-gmst02400015c12d1
gatcatcaaccatccaaggatttaagacgaaaggaacaagtacaaccctcgaaagtgaattaggaagaaaacacaaggaaggaaaaccatacacagaagaagattccagagaaattcaataatacacaatttttttttttttattttcatttccccccctctagtagtcagtggtgggaagctgctcgtgggtgtggctgataaagacaacctcgtaaacaaggccagcgattccaccaccgatgagaggcccggcccagtagatccagtggttggtccaggtccagctcacgacagcaggcccaaatgtcacagcggggttcatggccgctccagagaaggccccacccaacaaaatgttagcgccgacaatgaaaccaatggcgatgggagcaataattcccaaattacccttcttggggtcaatggcagttgcgtagaccgtgtacaccagaccgaaagtcattacgatctccaacaccaaggcg

SEQ ID NO: 29461 - DNA, 324 bp, Glycine max
  Clone ID: jC-gmst02400015d01d1
gcacaaaactggtaatatttcatatcaatcaggattgcggcaaagccgcaaagatccaacattcattagggaaaacaggacttgggaaaaataaggggagaggggttgaggaagaatcaatggctaacagagcatgctaaaacatctaaatgttccacacacggtttttgaaacagcccaatttagaaaatcctcctatggtgtattataaaagcagaaccaatgaacttgtagatagtactttcttataccgttcacttggcaagtgcgttacggatgaacttagctgcggcaaccatgttagtcagggctggctttacttta

SEQ ID NO: 29462 - DNA, 451 bp, Glycine max
  Clone ID: jC-gmst02400015d02d1
gtaaaaagcaagtaacattaagttggattgggatacacaagataattcacattatctgaagtacattgcaataacatatacttcaccaaacacaaatctaaaaactctcaaaagtccacaagtcatccttttctttcatgctcacttgccggggacgaagttggtggcgtaggcccaggcattgttgttgactgggtccgcaaggtgatcagcaaggttctccaatggacccttaccggtgacaatggcctgaacaaagaacccaaacatagagaacatggccaatctcccgttcttgagttccttcaccttaagctcagcaaaagcctctgggtcatcagcaaggcccaatgggtcaaagctgccaccagggtagattgggtcagtgacctcaccgaggggcccaccagcaatacgataaccctcaacagcacccattaggataacttgg

SEQ ID NO: 29463 - DNA, 431 bp, Glycine max
  unsure (1)..(431): unsure at all n locations
  Clone ID: jC-gmst02400015d03d1
aaaaaataaatataatttgatattatagaaggtgaaagtccttgacagattgaaatctttacagaagatagttctgtaagaaaatcacactggtaacttatacacggttgttacgtaagagaaaatacgtaaaagctagcgggatcaagcaacagcgcctcttccttttgtgttgaagcttgcttatgcgggcatcgtataataacaccataacatgatgggtttggtttaatttcattttggaacacttgccgctatctttgctcttagatccttgcgcaagattttgcctgacggtgacttgggaattgcatcaatgaagaatactcggtttattcttttgtaaaacaccacctgtttggagataaactgcttaatttcatcctcggttgtgtcggtataaccatttgatatgaccacanatgcaacag

SEQ ID NO: 29464 - DNA, 500 bp, Glycine max
  Clone ID: jC-gmst02400015d04d1
aaaaaaaaaatataatttgatattatagaaggtgaaagtccttgacagattgaaatctttacagaagatagttctgtaagaaaatcacactggtaacttatacacggttgttacgtaagagaaaaatacgtaaaagctagcgggatcaagcaacagcgcctcttccttttgtgttgaagcttgcttatgcgggcatcgtataataacaccataacatgatgggtttggtttaatttcattttggaacacttgccgctatctttgctcttagatccttgcgcaagattttgcctgacggtgacttgggaattgcatcaatgaagaatactcggtttattcttttgtaaaacaccacctgtttggagataaactgcttaatttcatcctcggttgtgtcggtataaccatttgatatgaccacaaatgcaacaggtacctttcccgcggcttcatccttcattggaacaacagcagcatcagagatcttaggatgagtgaga

SEQ ID NO: 29465 - DNA, 502 bp, Glycine max
  Clone ID: jC-gmst02400015d05d1
aaaacagaaactgccattgccattgccattgagataatgcacgtgcttcattctacagaagctacaaggagccatgctattacactaatcactaaacccccatggagagatattgagaacaatgaaatcatggataacatgtaaagcagcaaacatcaagctgggttttaaattgttagcgtgttaatgttgacgtactttgttgatcaatctcttctaaacaggtaacgttcaagaaaattgaccattcaacattaacaaggtacagaccacacatgtcctatagcaaccgggctgagtgcagagctgttgcggcttcacaccaccaccaaaaaagtaacaaagaaagggtcttttccccaaaaaagtcatcattttggatagaagatgtcatagtgacccagaccatatagtagtgtgataaaggaatgttcttttcagagctgcaactagcatttgggagatcaccagccactggcatgaaatcatgatgatttacact

SEQ ID NO: 29466 - DNA, 479 bp, Glycine max
  Clone ID: jC-gmst02400015d10d1
cgtaattgattggctagaagttcattaagtagaaaaggtacaagtaataatcatcattaaaaatagtgtccaagactatataaaccacaaacacaatttagacaaattaatgttggatccttgggttactgtagcatgtgtggcaagatgatcttagtaggagtaacctttgacgaacattccccgagtggcttcctcagattcaccctcggcagtgtactttccaagctgagcgagtgagttggacttggcacggaaaaggagtgcatcttgagcagcctttacgttctcagggagtccaccccatgtcttcaagcaggtgttttggagagctctggcgtaggagaaggacacgtgccatgggtttggagactggttcatagcattcaagttcaaggttgcttcaacctcagattgtccgccagacagaaacatgattccagggacagcaagtgggattcttctgtgaaggagcttga

SEQ ID NO: 29467 - DNA, 403 bp, Glycine max
  Clone ID: jC-gmst02400015e01d1
catgaaaaaaatgtcaactaatagtcaaataccaataaaaagaacatgcacaaagtcctcttacactcaccctaggctcatcggtaaaaatggtacagttttcattaagtttatgaaaaaaaggaaaatgaactcacatagtaccaatttccatataaaccttccacaacagagattcgtgtaacaactcaatcgcaggaacacatcttgctcgataacttagcaaaatggaagaaggatgagaagtgcattggtaatgaaaaaaaatacatgacccatccaaaacacttctacaagaactaatgaacccactaatctttcattgaatgattgcactgatgacaatcaggaacctgaacttgtgcctaaacaaagggaaaagaaaaggtgtttggcttccttt

SEQ ID NO: 29468 - DNA, 52 bp, Glycine max
  Clone ID: jC-gmst02400015e02a1
tgacaagttcgatgtttgggtagatcagtgacgcaatacaagagctatgacc

SEQ ID NO: 29469 - DNA, 347 bp, Glycine max
  Clone ID: jC-gmst02400015e05d1
gtgttatgttttatatttagattttttgcaacattttggaggattatatattcaggagatctacactatattacatgtaatataaaggaattaacgaacccaaggaaaaaagactgctaaggagctctcactcgactgaaataatgaactgaattgacagatgtcaacaaaaagatactagtattttacaacaaaacatattgcattcattaagcaacggaccccctacgccaaagaaataacatccattacagaacacgatccggagtaacctttggccatcctgacgccacacaggaaattgaatttctacaaagatgttccataagcgaggcaacagaacttca

SEQ ID NO: 29470 - DNA, 561 bp, Glycine max
  Clone ID: jC-gmst02400015e06d1
ccaaattgaaacaagaaattttattgccatcgtagctcaattacatttagtctccatcttgcatcttgtaattttgctatatctgagactcttttgtctgcttcacatttctatagcaaaacgtaaaatagaaacatctaacgaccaattcgtacacaaggtacacgtacaataacaacagtggaagaagaaattggtacctataaaaatacactggatcggatcgagtagagtatacataccacaagtgtcaataacatattctttattacactcattttaacacattttttatgattagtttaaatttattaaaaactataaaatcacataaaaaaaataaccatgaattttccagatttaattttcaataaattttagtgacgaaatatttcatatgtaacttttgaaaaattcatcactaaagtttttgtaactttagaattagtgacgaaaaggcaatacatcactaaattccgtcactaataaacatatttaaaagagtgtattagaaaatatgttattaacatttttcttgtctgagataaagttagacactaa

SEQ ID NO: 29471 - DNA, 441 bp, Glycine max
  Clone ID: jC-gmst02400015e07d1
agaacaatcataagtaaatggagttgaagcaatctgggctctagatgaaagtttaaggacaaatccgagcaatgctatccatcacaactaatgctgatacatacatcatgctatactaacaagcttgattaccaagaccgagcaacgtacagtgcctcttatgacaattgagtaggacagggggataaattatccatctgttggacattaaagtgagcatcagtacgatcgactttgcaacaccctgataacaggtaaggcaaaagtagactctgatgttgaaaccatacatgagcagctacaggtgtggctacggcatccgggtcaattctgagtgatgaccacccattacctgcaaaatctgctaccacaaactttttgaagaatctgataacgccttacacaggaaagttgagcttcgtgcagttacataccgataat

SEQ ID NO: 29472 - DNA, 312 bp, Glycine max
  Clone ID: jC-gmst02400015e09d1
acaaataataaatacaagggccccattaatattaaacaataactttgacatcataaattcttccaaaataattatacaaaagtgacaagggaaaacccgatctgccagttgcctactgaataaaaacacacattattactatgtgttggcatacacgcatgaccttgggccttgtcatgagtgaatattccaaagcaattggtcctttatgccttcttaatccttatgccacaaaatgctatcatcccttgaaagttggaattgcttcttcagaaattgatttatacaaagggagttgccatatctatttgc

SEQ ID NO: 29473 - DNA, 495 bp, Glycine max
  Clone ID: jC-gmst02400015f01d1
attccaaagttatttttaagaagcataggtttcatcaaagtaccaatactgaatatcatacagaagcatacaacagagtacaaacatacatacataattataagtagcagttttcatcttttgggtgtacagaaaagaattaataaaattagatgaggaggtgagtaacttaatagaggagaatgagaatacggtgggaagttttcatttataaagttatatattatatgatatgatgtcacttgttgaaggtagcaagaaaactgatagggccttttcctgttacagcagcttgaattgcaaagatgaggaagaccaccatggctaagcgagaatgcttgatctcagcaagttgaagtctggccttttcttcagggtcgttggccaaacccagaggatcaaagaacctgccacctgggtacaaccttttcttctgggtaaagttctggatttttttggaaatctatgtaccctataactattaccttaatccag

SEQ ID NO: 29474 - DNA, 495 bp, Glycine max
  Clone ID: jC-gmst02400015f02d1
ggtggttgaagaaccactttgatggcagcgtcaaagacggctttcacattctgctgtgtttttgaactacactcgatgtaggcaggagcaccaatcagttttcttaattcttctccctgtgctgtagtaattggtactgcaccagggtggtccataaaaaattgcttatcttcccgaagatctaactttgttccaacgagaattattggaacaccaggggcataatgccttagttcagggatccacttctttgcaatattttcatagctagccttgcttatgagagaaaaggcaagtataaaaacatcagctcctcgatagctcaagggtctaagcctattataatcttcctgaccagcagtatcccacaatgccaagtttacggtgcttccatccaccacaacattagcactgatattgtcaaaaaccgtgggcacgtagtccgtgggaaaagtgttgctggtgtaggaaatcaacaaagcaggtttgccgaca

SEQ ID NO: 29475 - DNA, 336 bp, Glycine max
  Clone ID: jC-gmst02400015f03d1
agcttaggaggcagaagaaccacttcgatggcagcgtgaagcacagacctgacatactgctgaggggtgaaactacactcgctgtaggcaggagcaccaaccagattgctcaattactgtccctgagctagagtagttggtcctgcaccagggtggcccataaaaaatcggttatgtttccgaggatctaactttggcccaccgagaatcatctgaacaccatgggcataatgccttaggtaagggatccacttctttgcgatattttcatagctggcctcgcttatgagagaataggcaagcatggaaacatcagctcctgcatagctcaagggg

SEQ ID NO: 29476 - DNA, 450 bp, Glycine max
  Clone ID: jC-gmst02400015f06d1
aacaaactattgatttttattattaaatttgggacagagttttgatgatttttttcttcagattacatcataaaattgcaaaatattgaaccaaccaccgtggaagtgtgcataaaaaatatatgaagcaatcatatatagcatacctcagaataaattcatagagggatacaacaatctcatatccctaatccactctgataaactcaccactaaagcactcagtactcactcctttctcacaatcataacactcttgaatattaactacatggtatgcaatggtttatgatgagaatacagtcatgagaatgagttcaaaaacacgggatacccactttccatgcacattgattttcactgtgccagaagtttcggttgtgggattagtttgggaagattctgacgtatctgcggataatggatccttatcagctttaggagcctttg

SEQ ID NO: 29477 - DNA, 469 bp, Glycine max
  Clone ID: jC-gmst02400015f07d1
gatcattcccaatcaaatggagctgaagctatgtgagctctagatgaacttctaatgataaatcgtagaaatgcatagccaacacaacttattctgatacatacatcaaactatactaacaagcttggttacaaagaccaagcaacgtacaattcctcttatgacagtagagttggacagggggataaattatctatttatttgacattaaagtgaacatcagtacagttgactttgtagcaccctgataacaggttcttcaaacatttgactctgaatttgaaaccatacatgagtagctacatgacttgctttggcttccggctcaattttgagtaatgaccacccattagctgcaaaatctcctaccacaaactttctgaagaatctgatagagccccacaaagcaaacttgagctacatgcagctacataccactaatctgactcaatctcatctgtcaactgat

SEQ ID NO: 29478 - DNA, 460 bp, Glycine max
  Clone ID: jC-gmst02400015f08d1
atggcaataactgtatatcttaatttaacaacactacgcaagaaaccatcacaaagttgagtaacaatattctttttcacaaacactttcattaatcaaatactcaaatcaaactattttctttttttctttgagtgcgaggaagttcaaagaacctaggttgccccattcataggccatgttcaatttttggcgagagcttataatgatatttacaggagtcttaccaatgaaagatcgccaacaagaatagaatccaagaaaccccactataatataattgtatttattttccttaaattaataattaccacaacaattattgaaaagtggatttgaagaaactagtcctagtcctttcttttgggaggaccgggaagaggagtgccgtctaagaaatatttgatcaaagttagggctctggctggttggtaactaggcacttgatgccctgcttccc

SEQ ID NO: 29479 - DNA, 371 bp, Glycine max
  Clone ID: jC-gmst02400015f11d1
aaaaaaactggggtattacataaacaagcacagaaaaaaaaaatgggaggatgaagttagcatagcagatggacagggaaggaagaaataatcggtattgtagaaccattcttacatactttaatcctcccttggttatcgcagagagttgcacaccaacacattttactgatagtacactaggtgttgggtggttgcaacattctggaaccttgcattaaaaccagtcccagtggcacccattcccatgtctacatgctttagggcatgttgaccttgttgatgcataagggtgtgtgcaccacccattttacttaaagccatttgacgttcattatgctgcaagaccagccagagaaaagcccggacat

SEQ ID NO: 29480 - DNA, 489 bp, Glycine max
  Clone ID: jC-gmst02400015f12d1
gacttcaaagcagaacatacattagaatgaaaagcatgagttcaattgacaaatcaatagggtaggctggtgaaaatcctaaattactttttcacatccataggtgcaagttccaaatctttctatattggtgtacagcattaaaatatttttaattgaaaattcttggtataagcatcagcctaatcttgcttctcttcgtaacacctcttcagcaaattttatcaaaattgttgtccgtggtcgttgttgaccttccatggggacaaaatgagctgttacaacagctggaaacccggcaccatccaaaacgccccgtactattccagcaacaaatgctccacagttaaacgttcccatgtcctttgggatagaaatgaatttgtttactaggagctccttttcactgatcatgtattcatcttcatgttcagttcctttctccagtgaatcagctacctttccaaataatactttccacactgtact

SEQ ID NO: 29481 - DNA, 439 bp, Glycine max
  Clone ID: jC-gmst02400015g01d1
agtaacaagagtgacaggttcaaattctaaattatagcacccatgaaatgtatctcatgtgaaaaataggccacaagttattgtagcttagataccagtaacaacacaccaaatataatagctgacatgcacaaagcacatgaaatactatatgaaacagacctacttccacatagaaaaatagaaccacaaatgccttaagcaacagtttcaacaacagtatctgaaggcttgttttcaggctcagctgaatcaacaattgcagcttctgaaggcttgttttcaggctcagctgaagcaacagttgcagcttctgaaggcttgttttctgaggcaacaggtgcactttctaaaggcttgtttttagattgtggtgcttcatccacccagaatgcagtcttcttcccagatttggaaacggcttgcagaacttcatctg

SEQ ID NO: 29482 - DNA, 469 bp, Glycine max
  Clone ID: jC-gmst02400015g02d1
cacagttcactcattatatatattaagaaacatccaattcagaggaaggagtaacttgtccttatgtcaacgtacaggttacccatgcgactttgaagaatgaaaatataaagacgttagggacatagcccagaaaaataatttggcacttcaacttagaaccatgtgtaatatgaatcatcatactgagaagaaaacagaagaaaggaaaagaacatgacatccaacagaagtgacatagctaaagtactaataaataataagctcatgtcagaaatctgcaaagacggcaaaaagatcaccattgatgtaatcattgtcgaccaaactaaccaagaagtggctgcccccaacctcttcaaccaatttcctggatgcctcatcctcagggtacaagcttgcccatcctcttgaccaaatttcaaatgcctcatccttccatacattgaagctgacaggatctacaatg

SEQ ID NO: 29483 - DNA, 513 bp, Glycine max
  Clone ID: jC-gmst02400015g05d1
gcacaaaactggtaatatttcatatcaataaggattgcggcaaagccgcaaagatacaacattcattagggaaaacaggagttgggaaaaataaggggagaggggttgaggaagaatcaattgctcacagagcatgctaaaacatctaaatattccacacacggttattgaaacaacccaatatagaaaatttttctttggtgtattataaaagcagaaccaatgaacttgtagattctactttcttataccattcacttggcaagttcgttacggatgagttttgctgcggcaaccatgtttgtgagggctggcttcacttcagtgtacttgcgggtcttgagaccacagtcagggttgacccacaagatgttcttctcgagcactgcaagcatcttattgattctgtcagcgatttcttcagttggtggtattctaggggagtggatgtcatagacaccagggccaatttcagcaccatacttcacacctttacggaagactgacaggagc

SEQ ID NO: 29484 - DNA, 382 bp, Glycine max
  Clone ID: jC-gmst02400015g07d1
caatgagggttgccgaagggccgtgatgatacgacattcattagggaaaataggagttgggaaatattcggggcgagttggtgaggaagaattctaggtttacccagcttgctagaacatgtaaatcttgcacacacggctgttgatgcaacccaatatagtacactattctatggtgaaggagcaaatcatgaccggtgaacttgtagattatacttgcttataccattcactgggcacgttcgatcggatgagctttgatgcgctaccatgtttgagacggctggcttgactgcattgaacatgcaggtcttgagaccagcagacagggttgacccataataccatcagctttagcactgcaagcatcttatggattatg

SEQ ID NO: 29485 - DNA, 342 bp, Glycine max
  Clone ID: jC-gmst02400015g08d1
gcaggtatggcaacatactgataggatacaaagatatatatagtgtttaaagtttcttaggtattacaactttatttccatcaccacaaaaatagctagttgatgtaattggtagcaaacttgtgtgtttctgttctctatcaactttagtccttgttgaccttttctagacaacttgggtgaaggtcatagtcacagacatcacaagagaatgtccaaaacttgccttgctttttacatgaatcacatacatatgctttggccatatccaatttcagtacatgttcatgcttcacatcctcaacctgctgaggcaaagcctatccttcctttctaagagct

SEQ ID NO: 29486 - DNA, 574 bp, Glycine max
  Clone ID: jC-gmst02400015g09d1
gaaaacttcacaatctatatttaacaataaattcctagttacagactttcagcaattctgcatgattcatagccacattcatagtgtgcaagtagaaacaagcatgcagtcacctctataataaataggcgcccagtctttctctgcacaagtaacaaaaatagtaaatacaaaaaaagcaatcctgcagattcacaatcaatccgtatttaacatatcaaatccaataatccatagttccatttcttttgcatagtttatggctcagtattctcttccaactcatgttttgattccttctcttctgagatgaaatctgaactgccttcagcagcaacggtcccatcatcagtatgtcctacagctggagggttctgaaagagttcattattttccaactgagccaacttatctttggattctccctttagtagctctactacctcgagtatggtgggtctcttctctgcctgactctgagcacataaatgagcaattaaaaccactcttttaagctctttctctgcatagttaccctcaagttttggatctgccagtcactgaattcttttac

SEQ ID NO: 29487 - DNA, 472 bp, Glycine max
  Clone ID: jC-gmst02400015g11d1
caatcacgtaatttgtttcaactattatgttgaaagcataggacacgacaaatagtacacaatataaagccagaacaaacattggagatattatatatatatatatatatatatatatataatcgtacaatttttcattttggaagtccaaatatacagaaaaataaaaaacataaaagcatttcaataagaatatatcaactatgctccctgctttatttctttttctgcactcttttcttaatagattttgtcttcttctcttattcacaccaatgaacactgagaattgttctgcctttgcactaggcaatctataaacaacttgtgtgtagtccaattattacttggcagtgctgtttctttgccctgatgatgccattagcacagggacagccactataaacgtaaacaacatacttcctagcagtatatatgatcttactgatgatttcctggactcttcaaacag

SEQ ID NO: 29488 - DNA, 480 bp, Glycine max
  Clone ID: jC-gmst02400015h03d1
gcaaacacccaattgaattaaatcacaagaaaacgttctgaagagagaatcgtgacacatttgtcagagtcattatttttatgagtcaccatcacaggtgaagacacgcagaaatactacaaagagtgagatgggggaaatcgggggagaatgaacaagtgatccagtttccgttaacttctatccagtgcaagtgctcttaataagggatatcaatatcgcaaaagaattgagttaatcattcgtgatgcacaaactggtataattggagcaaagtcgcatacatatctaaagcaccctgaaaggcgaagcatctgtctactaatgagagcttcagatgtaacccaaaaaatatttgattatcgatcacatcaacttataactggccacacactcaacacattcgtgcattgccaaaatacctgttgaaaattagaaggatgaacgtcctagtcctattgaagagtatccagcagctcg

SEQ ID NO: 29489 - DNA, 402 bp, Glycine max
  Clone ID: jC-gmst02400015h05d1
cagaacttcatactttgttcgatcgaagagcacaggcagcatttcagcattactacaggaggctattgatatggaaaaccaagttttatcaactaaaccatcagagcagcaaagctcagcaccttaggcatactgcttacgggactgatcgacagcgatgaagttcgcatcaggatatttcgctgcagctttccctgggaaagcagactcatatccaaagttaggaggatccccctttacataagaagagtggctaattgacaggatcacattcacagatggtgcggcctattcaacttgctacacgagtagtacatctggaacatagactctgtcaagagtattaccaatgtttgactcgcacacagttaccagctcattcaccgactgggtgttaactgg

SEQ ID NO: 29490 - DNA, 497 bp, Glycine max
  unsure (1)..(497): unsure at all n locations
  Clone ID: jC-gmst02400015h09d1
gaaccaaatgaaatccgttcttattagtatctatttgccattcatattataaatcccatgtcatgggaatatactgtataattgataaaagtaacaagaccaaaagtataaacactgataaaatatatgaatgttgtacatgaaatgaaagattgaatctctaattgagacataattattgttgttccagtcaaattcatgcctcctcgtcaaccacaccgacagcgtagtggccgaagtttctgccctcagataatatccgctgcttattaagtgattgcgtcctagccttgttcaaaaacgaatttggagacttaaacattctcttttcaccaccagacattctgtgttcgttggtattaagatactttctcttcggtgagaaaccaaagacttcatgtaggaactcattttcctgcatatgcttgatgaatcctcccccaagaaaatgctngataaaattcaactgcatcatttcagaccatgatgatgcctgc

SEQ ID NO: 29491 - DNA, 351 bp, Glycine max
  Clone ID: jC-gmst02400015h11d1
aaactgttgacaaatgatttagcatgggcataaattttatagcatacacgtagcacgttccgcaatgcacatcttattacataccgaagagctcttaatcaccaatgtaagaggtatacaaattgacacgtacgagcatgtgtaacgtacacttgggaccaacaccctttaaactgcccgacctgaataaaatatccgaaaaccatattaacgcagttcacaactacagcgacttttgtatggtttccaaaagaggtaggcctaataaaatgaatagaacctatatccgatattattgtcacaactttaattctttaagaaagtgatcgtcataatatgtgatatcatgta

SEQ ID NO: 29492 - DNA, 409 bp, Glycine max
  Clone ID: jC-gmst02400016a10d1
aaaaaaaccatggggggggggtttattggaaaaagacccttttataaaaggcccttcaggaaaaccaaaacgcttggcggggggggaaaaaatttaaaggggggcaaggggttggatttgggcccaaaagggccaaaattttttttccaaaaaaaaaccttaaaccccccggggccccagcaattcccaaccttaactttgggttcgggcccttaaaattttaacccgacccccaggggtttttcccaaaaaaaaagggggggccaaccttgggcccccctggggcccctgggaaaaccccccgggcccccataaaactgggggccaaccgggaaataccctggctaaaacgggttaaaccccccgtttgcccccccggggtaacaagggcccccagggggcaaaaagg

SEQ ID NO: 29493 - DNA, 350 bp, Glycine max
  Clone ID: jC-gmst02400016a12d1
gtagcccattcatgttcatttttatcagaccccaaaccgcatgctgaaagagagaacttttttctaaaggccggataccccgatcatgtttctaagacgttcaacatccgataccaaaatatgtggttttactcggaaaaaactctcggaagacagcacccccatcaacactattagacaaccataagggctaggcttgcgctcaaagccccccaaaatatgtagaccccttttgaaaattatttaccgcaagcttgtgaacccacgatcggtccctagaaccccaaggaatgtaacactctgctccaaatccccaatggttttttgggcactctgttcaaccctggatg

SEQ ID NO: 29494 - DNA, 540 bp, Glycine max
  Clone ID: jC-gmst02400016b01d1
aggtaagagtactatattaacatccttcagatgagtctcaaatctcaatagaagaaacaatgaattcaaaagcaaaaaccactcagtcaaaaacactaatttgaatttggaaaaataagaggattacactatttgacgtctcgtaacaaatttaccacaagtacataccagacgaacaagaaaaccatttacacgagaaattttcaattccacgagcaatcagttgctgcaacacaatcgtcgttcttttttcccacattcatagttgtagaaaaacctgcctaagtttctcacgagcttcacgaaagcaaaacgcaagaaaaatcgcacaattacacaagcaactaccacctgtcaagctgcaattaacttctttaaatggagaacagcatgaacaggcgttatataacactaaaaattcttgaacatattgctgaccaagtactcctgaacaaaagcttgaagacaaaggaccaggaggaagaaggccttatctttttattcaaacaagtggcattctataatacttcattgcccaaa

SEQ ID NO: 29495 - DNA, 533 bp, Glycine max
  Clone ID: jC-gmst02400016b09d1
atctacaattttaaagggcggttacaaaattacagaaaggaagcatcgaagtctgtatgaaacggatcgtctcatcgtgataaaagactaacagaactattacaatacacaattcgctaaagtgaaatgccacacattgcaactttgccacttaacacaatttgcagttcaggtgcgtcgctgtttccttgtttaaagagcttcaatttccctcatcacttgagctttgtcagcttcaaattgttcatcctctttgtcaattttgaagtcttccaacagtctcagcatcttacttttgttcgcaacaaatataccgacgatatcagctggcttatgttggttagcagcaaatagcttgaaaacatgaaatgcttcaatctgtatgctcttgcttgactctcttagaagattcattaaaatcctcaagttgtctcttgagctcacatatcttgtcattacggctgaatttgaacgatcaagtaacatatcttccaacaacttgacagcttgacgccttgtaatataattggaag

SEQ ID NO: 29496 - DNA, 619 bp, Glycine max
  Clone ID: jC-gmst02400016b11d1
gcacgcaaacaaagtgatttattaatccattcgatgttcaaatggtaatagaaacaataaaggtctaaatgcccaaatggtctctaacagaagctaaaaaagacaacatagaaaaacaataacgtatctggaaaaccagacttattttcacaaggacagaataataaagacacttaaggaaactactcttcctcatcttcctcattccagcactttagagttgatctaggtgaaccacagtcactagtcttcccgaatttttggtagacaacagaaccacccattccaagcccttcgtggctcctctcttcacgacagtatcccttaacatccagaaagcaggtctgctcaaacgacttgcttgcaccatccacatgaactgcaacagaaaactcagttgggaggaaacatgccaataccctctgaaccatttcgttcagattcaccgctttgaagtcataaccaacagtttcgaagcttgcataactgaaaccatcttctggggtaccatgaattgtagaaacagcagcgcctttaacagagtccattgaataaccacatggttcaaagtcaaagtcacaaatctcggaatctggaagaattttctaatgccggaata

SEQ ID NO: 29497 - DNA, 460 bp, Glycine max
  Clone ID: jC-gmst02400016c08d1
ggtcaaacatggtaaacataaaattcccatatagtttcatcgaccattcacacaagccttttgctacgctgaactaaatgtgtttttaccttactatctataaattataagtttcgaatgagaacaactgttcacccgaaagaaaggaaaatgttaatggaacacttcacataaaccatcgcaaaaaaatatttacggttcgacacaacagttgggaacatgcatttacctatacgcacacacaacttcaaacccattggaccagagacctaaatcataacagcaaatgacagacattttcatttccgaatgaatgccacggtagcaacacgggagcctacggatccaccaaacatgaatgttggatatgtgcggacatgacttacatactgaaatgggggctctctgcatggctcctcaccctttagtgcctcaagttcctgtgcagtagcaatttttc

SEQ ID NO: 29498 - DNA, 572 bp, Glycine max
  unsure (1)..(572): unsure at all n locations
  Clone ID: jC-gmst02400016c09d1
aaccaaccaaaagtccactgaaatttaatggccattttgtaactcaacaaaaaatgttgtaattgcataaatggttgcccggcactgcaaccaaaagcatgtctagaccgaaacaagcaccaaaactgctgatgtgagtgcttgttgattgttaatatgaacctatattgaacacaaaattctgaccttttacatcagatatatatgatctataatcagacttatgtacacttgacatcattcatcctacttggagggtacgtctttgtcacaaacactgcttgcttagagattctttagataacagcacctgaagcagctcacgtagcctctcagcaccaggtcctggcctaaacattgtatcattgccacgaacagaacaagggtcagccccaccatctgtgttcccaacacaccatgcaccaggtgaaaatctatgtgtgcgccccagaagttctttgtcaatcttgtctaacactggatcctcctttgcaaaattgcgcgccaagagtgccttgcttttaaccatttngtcaaagtccttcacagttaaagagatgggatgctgcttt

SEQ ID NO: 29499 - DNA, 532 bp, Glycine max
  Clone ID: jC-gmst02400016c10d1
acataaagggataacttcataaaatttatatttgtatacacaaaaagtctatacgttaataacaccaaacatttgatagtataatttttacactattagcccattctattatcttatccttatcatatatgctgcaaacatggcctaataacattcatatatgtctaaatcagggctttaagaataatcaactcactcaatccgcataacatctctctcctctttctattgtgacctggttaacttattcaaacacacaccacccaagcagaaacatctgaatcaaaggagaaaattgctctgcatatctgaaccttcacatgctctttttgttaacagaatggggagagctgtggtcaatagcctgcacctgactccgaagattctgattgtctgccaagaggcgatcatattccataagaaacccctcagattgctttctaagagccttcacctcagtttccaaagccttagccttgcttgcttccatctcacactcagattctagtttcttaatattgggctttaacat

SEQ ID NO: 29500 - DNA, 528 bp, Glycine max
  Clone ID: jC-gmst02400016c12d1
gaatggaagaaggcatatctttaaattgaattgatggggtggaaaacccgaatttaaagatttccaatcatacacaatattgcaacaacaaaaagaattttaaaaaaaaaagactttctttttttactttttttacccaaaacctaagcaaaatataaaaacaaacgacacttttttttagactctttaaatccaaaagctgatcacaatcaaaatcaatggcgttatttatgaaagctccataagacttcaaacgaccaaaagccggtttctccattgatgttctcttcaaacatgaatttactcttcaatagcaaggggcacagactcagccaatttgcggtacttgagagcatagaacatctcgaggtaacgtttgctctcacggcgttcaagattggtcacgtgcttccagaagccatacacaccagtgagtgtcaagagcctgtccgagtaaatttgccatgtgtacttctcatgaatacgcttgagtccaccctgggagattttgtcccagtgagatggatc

SEQ ID NO: 29501 - DNA, 506 bp, Glycine max
  Clone ID: jC-gmst02400016d01d1
gggagataaacaacacatttgacactcataatataccccaaaaaatcaagattaacaattacaaaattgggaccactcccccggggcaaaagaatggtaataattcacatgttcatcactatagacaggatgataatttaactatgctttctatgttacaaatttgattttcatgactcagcttatggcagctgaaatgccggtcactccaatatccattcttcatgttcatggcatgcatgactgtaactttttcagtgcagccaagttttcaaagtgcaattccatgatctagccaaagtgatcatgtttttgactcatggctcgtgtctattgactcggctatgaagttccaacatttcttggtggttcgggtccactgagagggcagcacgacagtctcttagagcacctaagacattctctttatgttcatggaatgctgcacgtagatgcaagagatgcaaatcagctttaaatgcaatagctctagagagttctgcaat

SEQ ID NO: 29502 - DNA, 581 bp, Glycine max
  Clone ID: jC-gmst02400016d10d1
agaaaaactgaaattccattactagtaaccaaaagtgacatttagattgaagtcaaggaaggaagactcctctcaacaatcatccactcaatcccaaatgtcaaacaaaaacaaccaacaactcaacaccttaacctaaaccataacccaacgattcctacctgactaaccacaacacagtaaaacaagacacacaactgagcttagtaactcaaccttgactcacacacacaatgcttgtggatcatgaactacattgtttattcttaacattatcttcaattattcaataagtctccattttatttgcactcgaatatttatctatacaaaacttagatagagtacctcaagggttaccactattactctctgatcagaacaaaaatttcaccttgataattagtaaaactccaattgtcgaggtgaaacttcaattataacaaagaataatactataaccactaaaagaactgtatctaagatttgtactaatgaatatgtgatgggtcactctttcttcttttagatatcacacatattttctaaaagagacaatcatgttcaaaacagatcagtct

SEQ ID NO: 29503 - DNA, 327 bp, Glycine max
  Clone ID: jC-gmst02400016d11d1
gcatgtaataaaggtatcatagcatatagcatagcataggtatttcatacattgttcttttgaggagcacatgcagcaattcagtcttactacatgattctctttatttagaaaacaaagttttaccaattaaacaaacttatcagctaggctttgcaccttagacaaactgattaaggtactcatccacagtgatgtatttcacatcaggatatagagctgaagcttccactccaaaagaagactcaatttcaaagttagtatgatccccctttccttaggaggagtggttaattgacaggatcacattcacgggtggtgcggact

SEQ ID NO: 29504 - DNA, 481 bp, Glycine max
  Clone ID: jC-gmst02400016d12d1
aaatacgagaactggggtcgtcgatgtatataatcatctacctactaaaacattcgatgacttaataatacgctttatcaacaaaacccaggttaaacaacgatcctcatcaattcatacaacaatcccaagaacaagtcaatgttttttgactgctccacattttaaacttgttgaaagccattcatccacattgcaatttgataccaccttgacaactcagacgccttaagcctcctcctcctcttcatcctcatactcttcctcgtcaacagtagcatcctggtattgctggtactctgccaccagatcattcatgttactctcggcctcggtgaactccatttcgtccattccctcaccggtgtaccaatgcaagaaagccttgcgcctgaacatcgccgtgaactggttgctaactctccggaacatctcctggattgatgttgaattcccaatgaaagtggatgacatcttaagg

SEQ ID NO: 29505 - DNA, 620 bp, Glycine max
  unsure (1)..(620): unsure at all n locations
  Clone ID: jC-gmst02400016e08d1
tcgcgatctagaaccgacaatgtcgactcctgctaggaagaggctgatgagagacttcaagaggctgcaacaagacccgcctgcagggatcagtggtgccccccaggataacaacataatgctgtggaatgctgtcatatttggtcctgatgatactccatgggatggaggcacgttcaagttgacactccaatttactgaggactatccaaataaaccaccgactgtacgatttgtgtctcgcatgtttcatccaaatatttatgctgatggaagtatttgtttggatatattacaaaatcagtggagtcctatttatgatgtggctgctatactcacatctatccagtcattgctttgtgatcccaacccaaattctcctgcaaactctgaagcagctcgaatgtttagtgagaacaagcgtgagtacaatcgaagagtgagggaaattgtggagcagagttggacagcagattaagttcatccttatatgcatgggaagctttgaaggcatgaatttggttgcagtgatggcaactattagaatgattgtgcaaactcatcacanttatattctctgctgatatgaatgatagcatcatcttaactttaattaatat

SEQ ID NO: 29506 - DNA, 531 bp, Glycine max
  Clone ID: jC-gmst02400016e09d1
gcaaaattaactatgataaagacaacagttaaaattaatggtaaaagatgaaaatatgtttgctgacaggtgtgccaaaaacctctctgcctgataacaaatacaaattgagcaacgacacaatgaaattatgtgattgtacagtatgtcaatatagaaaaaaaaaaaagaataacaaatgttataatcttaacaatctccaccttttcaattcaggcaggcaagtaattctataatggcattgcattataggacaggaatgttaaacccctttatcttttttccaaagtgttgatacgttttgccattaggaactgaaacaactgttatgtaacttaaggcatatgactcggcaacaacaatgaggcataagtcttataccaaaaacaaaactgcaagtttggcgtcaagcagcaactgatttgctttaattgggagccaaaaaccacactgaacagcttaggctcaaatcaatgtgttcagggatgggtttatggtttggccattctgacctttatcaatgaggatctt

SEQ ID NO: 29507 - DNA, 443 bp, Glycine max
  Clone ID: jC-gmst02400016e10d1
aaccaataaaaaacaaatagccccaactttaaattttaaaaggaaaaaaaaaaaaaaaaaccttttattgggcccccaaatatttctaaacttcggagcaatacccccccaaattttccccccccttcttcaatcaccccaccccgaaaaaaaaaccttaaaaagaaaaaaccaaaaaaaaggggtcatcctaggccttcctttcaaaaccaaaaaccaccctgggcaccaacggaccccccaaggggacccccttaaaccatggcccttttaaaacccccggccctcaaaccattaggggccttgtccccccccgagggaaaataaacaccccctgcccggacatttttctccggtttggctgggcccggaccctcccccggtaaaccacctgggcccatgtccccaaaaagtttctttggaaaaacccccttatttccctg

SEQ ID NO: 29508 - DNA, 476 bp, Glycine max
  Clone ID: jC-gmst02400016e12d1
aagtaaaacatacatccatacttcataggtcaaatatacaaaaacttatcttccaaaactgtgtggttgcccccaccaaactcggcaagcacaagtttcaaaatgtatactcttgtataaatgtcaagatccaaacttataatatgtaaatactgatatttattattacttcttaccacaagcggcttcttagattatatctagtggacccaacaactaatcacaatgctcaatactcttaaatttgtgtttttcaccatccattgttattattcaagaagagaaaaagatccaaatccaaaaacaaactacaggtccacatctgcagatagcctccaatttattctcaagcaggtattagaaaatattgaaggcacatccctcacaccatcttggaatgttggggtagaactaactacacagggtatttgtatagctgaagaaccttctgccaagctggtcggttactaatatca

SEQ ID NO: 29509 - DNA, 433 bp, Glycine max
  Clone ID: jC-gmst02400016f01d1
gatgacaacgacatcaatcgaataataagggtctgaaggtaacaatgtaaataaatgtaatgtgtacccaaaacagggtcaaaagaaaaagaaacaaaaaaggaaaataaatgatacaatacaagaatataataacagcaacaaagcctgtctagaagaccaaaacaagggtagcccaacccaaacctaagcctcctagaaccttcttcaagcacatgatggtctctgctccactctcatcgttggcagcagtggcaggtccaggggaagaagcgtcctcgctaggaccaggagccccggtgggtggcgcaggaggtcccagcaacgacggtgaaggagccggagcaccgtgcttcttacccttcttcttgtgcttgctcggagccggagcgggagccacaggggtggtcggcgccgacaccggaacgggagc

SEQ ID NO: 29510 - DNA, 543 bp, Glycine max
  Clone ID: jC-gmst02400016f09d1
gacataatacgaggctttatataattcaattgacttaacaaatcaaatagtaaacaatgctatttggttatacatggaaaaaaaattcaaattgttcttcagtaacaaaccgctgttctttttcaagaaaaatacatgctcaagtaatgaaaatctaagtagggcaagaaaattagagactggagatcataatggccgaagtaaactcaacttccttgcgtttaactaacaaatctctacgccttgtttgcaatgttgtttgagagccagtcaagtccttcatagagcccttcaccagatgtggcacatgtgctctggatataccagtggcgctgacggagggaatgaagaccaagcttatcagttatctctgcagcattcatagcattaggaagatcttgcttgttggcaaaaactagaagcacggcatctctcaactcatcctcattcaacattctatgcaactcatctctagcttcaacaactcggtccctgtcattgctatcaaccacaaaaatgagtccttgtgtattttggaagtat

SEQ ID NO: 29511 - DNA, 572 bp, Glycine max
  Clone ID: jC-gmst02400016f10d1
acactaaaaaactatgattaatatactcattccatcaagtttcaacatttgagggggaaaaggtttttgttctataacactccacattgtatttgagaagagaaaaaaaactgctccattacaggtattgcttgaccactcaggtgtgaaaactaaaatctatcagccgttatcacagcaggttgagcttcaacatgccttttaacaagatatggacccattccaacagcttcctgaaactttgcagctattcctgcaaaagcaggattagcagaaactctactagacactgtcaatgatttgtgtattgccttgcagcagttatatctgccttccatacctatttttgtcgtttcagtacttgggtccgtaactttatttataatctcttgttttgaacatatctccatcaagcaccatggtcgggcaaccaatccacttagcattctatagcccgctagacgtatttctgaatcctgctgcaatactgacagaaaaagacccgatggagtcagctttgagcttctggatgctgtttcataaattaagcgtccaggttttcttcttcttcg

SEQ ID NO: 29512 - DNA, 561 bp, Glycine max
  Clone ID: jC-gmst02400016f11d1
catccaatccaactttaagctactttcgtgaaaatatggaatatgaaacagtagtagctgttaagaattgtttgaaagatggagcaaaacaaatcatcagaaatagataatcttccaattccgagagctgaatgcattaactacttctgcaggcaaaaagccttaggctactactagaaattaaagaaaaataaatggaaattcccagagttaactttcaataagtgataactttaattagtctgtaaatgcattcagcctccttcccattaattatacagtttccttccagaaccgaactgacctatcagttccacaggaaataaaagcagactctattggtgagtgttcaagccagcggggtgcaccaacatgattagaaggccactttgctactttttctgttgtcatcgcatcccagataacgatctcattgctcagttcatctatggatagaataaattcttctgtctcattaaaaatagcctggcaccttagctgggtatgtatagcacccagatattgtttgactaatcttccagagccaacttcccatagctt

SEQ ID NO: 29513 - DNA, 401 bp, Glycine max
  Clone ID: jC-gmst02400016f12d1
aacaaatgtgagcaattatacattcactttgatgatgaaaacatgaaaagcgccaactgttgaaataaagtaccatttccattcacagaataacaagggtccacacactttatatcctaaatttgccatttaatagcgcctttaaaagcgcgcaaatacacaaacatgaaaaaaagaaaaaaaatagccttttgatttaaacaccgaattgaataccaggcggaaacgtgagaagatgggacattaatttcttaaacggctttgacgggggcggaggccgctgtggggttaaatggggcaccaatggaagtttcgtggggatcgtattctggatcgtgacattcatcgatggtttcgcgacccttttaaagacaaggtttacatgcgaattttattgtgat

SEQ ID NO: 29514 - DNA, 350 bp, Glycine max
  Clone ID: jC-gmst02400016g01d1
aaaagcatgaatattttgttgatttgatccatccaatcatgcaaccttaattacttaaatgccacgtttggagtggtatatcttcgaaatcattactcttataacccgaaagtttgttggttgccaaaaaaatctaatttggcatattacaagagacttcacgaatcatgcaagttcagatgtacataccaggtggaaaaagaaaagatattttacacacaaaagacacaattaatacagtgaatccttctgatgtttccattcccgccatacacaaaaggttgatgaaactggagtgggttttatctgttgatcgtgtaggaagcattgattggaagagacattttttc

SEQ ID NO: 29515 - DNA, 597 bp, Glycine max
  Clone ID: jC-gmst02400016g08d1
gttcgtccatgtttccttgaaagattttcatcatagaggctctcccttggtggagaagcaacaacttcagattcaccgttgcaagcctttggtgatgaaatcttagcatcgatttcattgtcattctctggaggtcctgctgcttcaacagaatgatcctcgtgagggggactgggaactttcttgttgttgctttcatggtcaagcattttctcagtttccctttcgttagcagcaacatgacccttggaaggttttgctgatttagttgaagagcttgatttctttcgtcgtctcttggtagcttgttttggcttttgtttactattgtcaactttttcagtgtccaaattattatgcacctcctcaccagatatattcaaaccttcagagtgattagaaaaatcagcgtcctcttgttttttaatggacttggaatcagctaaagcattatcttctccaacacatgcaacaccattgctcattaccaactttggagatatactcacaccagtattttctggttgagagggcgcaacttcccttgaatccttttaaccacatgtgttgactcctctggtgactgttttgctgaat

SEQ ID NO: 29516 - DNA, 602 bp, Glycine max
  Clone ID: jC-gmst02400016g11d1
atattaaaacattaaggatttttacaattatctaatcatagcaactacgtaagagtttaaacgctgttttcgtgataacacgtttatttttccattacagaagatgacttagccattcggcaataacattatttgttttcattgtatcaactaaaataacttaacgatgagggtaccatttaatcttactccatcagaaattgcatctaatttgtgtttagatctcgggaagaaagttgcagccataagaagggaagcgggttaaagaacactaaaacttgaagatagccgcaccacttgatggcttggaagcaaatacataaaggccaagatcgttcttcttaataacgcccttgtctattctagactggtagaaacattccttcaaattaaggataaattgtggaactatgctctctttcaccaaagcaacagcacaaccaccccatccagctccagtaagccttgccccaagagcaccattgttacgacaaatatttacaagttcttccaactccggacagctgcattcatataaaacgctgcagctatgatgactttcgttcataaggtcgccaagcttctttagcatgtcctcgtcg

SEQ ID NO: 29517 - DNA, 502 bp, Glycine max
  Clone ID: jC-gmst02400016g12d1
atattaaaacattaaggatttttacaattatctaatcatagcaactacgtaagagtttaaacgctgttttcgtgataacacgtttatttttccattacagaagatgacttagccattcggcaataacattatttgttttcattgtatcaactaaaataacttaacgatgagggtaccatttaatcttactccatcagaaattgcatctaatttgtgtttagatctcgggaagaaagttgcagccataagaagggaagcgggttaaagaacactaaaacttgaagatagccgcaccacttgatggcttggaagcaaatacataaaggccaagatcgttcttcttaataacgcccttgtctattctagactggtagaaacattccttcaaattaaggataaattgtggaactatgctctctttcaccaaagcaacagcacaaccaccccatccagctccagtaagccttgccccaagagcaccattgttacgacaaatatttac

SEQ ID NO: 29518 - DNA, 472 bp, Glycine max
  unsure (1)..(472): unsure at all n locations
  Clone ID: jC-gmst02400016h01d1
atatccaaaacacgcacataatatatatgatgcctacaagatgcaaaagttataattgatgacttcaatgggacgtgaaaattcacgttagattgtccggggaagtagtgattttccttccctgatctagcaacgtaataaaaaaggacatggtatttttccatctaaaattaagcatatgcacaaacaacactttcttgtataccagcattcaacacgcaaaattttgaccgcaccagcaaaatgaaagttcccttgtgcaacttcaaatccactatccaatataatgcatataatattacagatatcgcatggacagttgctattgacattcttccgagaaaccaactccaccgaagtatacctattcttttttctcatcttttccattattttgaggattaagctcgtcatcatcataatattcttcaaaatattcttcatcactatcctnctcatcatcataataata

SEQ ID NO: 29519 - DNA, 420 bp, Glycine max
  Clone ID: jC-gmst02400016h10d1
acatgaaattcctcctttattcctttgggagatgatcacgattactatgtcatgattgtattacacttgacctataagttgaatttaatgtgaaataaaatcctaacagctatcctatagaaatttgatcttggttacaagacttgtttattaagaattagaagatatagctagacataaaactagaatatgcaacaacatcaacccaatctggaaaaagattcttcaatctctttattggatcaaccaacttttggtctaaaattgctaggtccactcgtaatgcttcagagttgttagcctctaaccagaaggtccaattcccatcgctaggtccactaagacgacatatatatgattgtggaccatcaccataggtttcagttcctggaagcaaattatctgcaaatgaccaacttg

SEQ ID NO: 29520 - DNA, 545 bp, Glycine max
  Clone ID: jC-gmst02400016h11d1
aatgcaaagcctaaatgttatacaataactaataagaactttacaaaatcaatcaataacagttgccaatcagtaattatcctatacattgaccttggcaaagctaccacatctacttgtccttgtatacccacccatgtctcaagagttaagaccactgggagtgttaaattagattaacatataccaggctcccagcgaccaagggtagtttctaaattagtactatttcctagtcaaatccaattgtacattctttcttgctcttcaaccgaatccttagtcacttacaaaattctacacaacctactcagttcagttctcctcatgcataagaaacaactaatgctacaaatatttacactactgatacgctgtgacattgcaccaagcacccgcaatccatccttcactgaacaagctcgcaaagactgcatgccaacaattatttattcttgcaaaaacaaacctgttgaattattcagctggctcatattcatattaggcactacctgcctcatctgatgaacttcctgctggacgta

SEQ ID NO: 29521 - DNA, 501 bp, Glycine max
  Clone ID: jC-gmst02400016h12d1
ggtacaaaattctgataaaatttccattgcatcaaaacggtaacattgcataaccaaaaaataaattgtgagtaaaaggagaaaaggaaaaaaaaaaacagtttaagtattgatgagatgacattagacctatgaatgaagtagtagtagtcatggaacacgcaaattattcatccacacctagcaagacatccattgaagggagtgattaacttcacaacaatcttaagcttgaggcttctcagacttgagtggcttcacaacttcccaggtgaagtcagggtcatcccttccaaagtgtccataagcagctgtcttgaggaacctatggccacccctcttaaggtccaagttaatggtgatcattccaggtctgaagtcgaaattctccttcacaatttgaagaatctccttgtcaggaatcttcccagttccataagtgtccacaaacactgacaagggctcagggacaccaatggcataagaaacttggacaatgca

SEQ ID NO: 29522 - DNA, 538 bp, Glycine max
  Clone ID: jC-gmst02400017a02d1
gatcacagaaacaatcatataatagcataaagacggttttaacagtataagtcacccatatgtaaaagcactaattgcaaccaattgttccagtttcatagtagtaacccaaaaaacatgaaaagtgaagtacaaatgcatggtgagacacagctaatccaagctactaaaacaagggacagagcaaacaagtagaaaatactaatgagcaataccaataaataaaagcaaacacaaatccgaccaacaaaaactaatgaccccaaatgaagattgtcctaatgaaaatagaattttcatcaaaacttatctgccctgtcccttttctgttcatgtgctttcaaatgtttttgttatggttgattggtcctcacttggccatcatgactttgacaaactcctcgtagttgatctgcccatcaccatcaacgtcagcctcacgaatcatctcatcgactttctcatcggtcagcttctcaccgagaatggtcattacgtggcggagctctgcggcagagatgaaaccattctgatcctt

SEQ ID NO: 29523 - DNA, 515 bp, Glycine max
  Clone ID: jC-gmst02400017a03d1
cactctagaacatcattatttctcaatttatatagctctttaaccataattccctggatacaacatgtatactagtgtatacaccatattcaaagatagctaataaatacttgactgtataattaatatcacacaaacgtaaagtggcaatatatagtgtaaatatatataagcttaatttatacacagaaaccatgagtataaagcatctttatacaaaatattcaacaagaatttactttattaccacatcattatagtaaaatgtcatgataaagtggtgaaattctattgaatgcttgtgtcaagatgtttttataggatcaaagtgtgtatataaattaaactatattttttaatcaatatatatatattgttcacacattttatatatatatataagaggtgcttaacaagttggataggcaataccacaagaactaacggtttatttggcattaggagagttaacatactgcttcaagctagggtttttgaggtagccacagaagcat

SEQ ID NO: 29524 - DNA, 456 bp, Glycine max
  Clone ID: jC-gmst02400017a07d1
agaggactaaattggggatttattcaacccctcccaaaaaaacagaagaaaaaagtaacactacttgcacttatagccattaaacaaaactattgttacaagggtatgacaggtttctggtaaaagattgtataaatgaatatacatatatttccttatccttcacagacgaaaaagtcaaaaaatgacaatgaaaattgaacaggaacgggtaatgaaatgaatcttggatttcttcgaagccaagacgacggatttgtatgacgatcctacctttttctcgttttatgtgtgagagcacaaatgaatttatagaaaattggttcaaaatccttcggggttaatcccccttttcatctgccaaccttcaatgcaaaccaacacttaacgtatatttgatgccgtcattgaggatactactttccacaactattgaaacactgctccaaaagagat

SEQ ID NO: 29525 - DNA, 384 bp, Glycine max
  Clone ID: jC-gmst02400017a09d1
aaacaaaacatctcttcattaaaatctgaggatgattagaatatagtacatgttacaattatacatttttccacgtcaggcttgcccatttgattcgatttcttcttgcccactttcacaagtttttgcattgcatctctgaatatcacacaaacaaacaaataacttatggagtaggaaggtgatcttccaccctttcctccaaacagatgcttctttcaacacttttaaaagaacaaaaagacaaaatgaaaacaaggtataacaagacatcttaggaatcatcggggttagtaatcaaaggtggttcggtatcctcgttctgagcttgagtttcagtttgtgttggaacttcctgctgttgctcaactagcctgctcatac

SEQ ID NO: 29526 - DNA, 379 bp, Glycine max
  Clone ID: jC-gmst02400017a10d1
accaccacccaaaaaacaccagaatcttccataactcagaaattaaaactaaaataaaaatacacaactaacacgccctacattaccacatgcctgaattaattttattacaaaatcaataaattaaccaaattccccgtccaataatttcccggaaaaaaagcgcaaattaaaaaaaaaaactaaaaaaacacttacaaaacaaaaccaataaaattttaaaattacataaaagtatcagaaatctcaaatgcagacaatgcagacactgcaacagtgagagccgcagaagcttttacgtgaaccccgtcattcttaccggcggaactactccgttcagtttttgatgatggcgctttcgccggagcaccagcgggac

SEQ ID NO: 29527 - DNA, 503 bp, Glycine max
  Clone ID: jC-gmst02400017a11d1
atcagcaaccggtatgagtctttaatctttattcctagaattacataaccgatcaacagtctccataataataacagtgtcacatacattacacacagaacagatcctcagcttcgaaacacagtcagggcgctctctacataaaccctttattaaggaaaaaaaaaacaaagtgaactcacgaaagcacgatcaattactattaagtttaccgaaccgaaaacggcgccgttttggattcaggtcttggaagcttcgagatctgcagctttctgaagaagactattgggatcatcctcgaggaccatgcggatggggaaggagccgaggccgtcggcgatggcgagcatgatcttcctcatctcatcccggaactcgcggcggtcgacggcgccgctccggtcgccgtcgaacttgtcgaagatggagtcgtagagcttcgcgagctgatccggcggcgtggcgacgtcgatgccgaagtgcgtctcgatgaggcgcatgga

SEQ ID NO: 29528 - DNA, 356 bp, Glycine max
  Clone ID: jC-gmst02400017a12d1
aaatcccaaaagcccccccccttgggcatggaaaaaccctttttaggggggggggggggtggcccccctaaaaaactcccacgctgttttaaaagggcgccccggttttttgggcttttgaaaaacggggccccctttctcccctagctaaaaggggaaacttctcaatattggggggaaaaaaaaaaaaaaaagggggcgaaacttccctccccaaaaaaaggggttccccagagggaaaaaaagggggggttttaacccttggtctcaaggaccccaaaggggggcgaatttttttttttctggggcttaactccccccataaaatgcccccaggcccaataggtgttttcccg

SEQ ID NO: 29529 - DNA, 468 bp, Glycine max
  Clone ID: jC-gmst02400017b01d1
aggaacgaaaaatccatttttctcctttttattgaataacgataatcacaaagtcatacacataatcatgggaatacgataaccaccgggcacttgtgattttctcacaacaggaactttaagtacacaagacagagtccaagtgatccaaccattaggcaataatgaaccccttaattagttcgaagctttgacgggtccttccttggggggatgcacgactatgtaattataggcatccaaagggagaaaattatcaagtgttagggacgtgcattggcgagtgaagatcttgcaagcctccttggacattcccttcttgaacttttctggtcccacttccttttcaatcctagccatattttcttcaaccactctatgaaaaaggtctttggtcactttttctccaagcccattcccatctagctacactccatacttgggccactggcagttttggaccctggt

SEQ ID NO: 29530 - DNA, 503 bp, Glycine max
  Clone ID: jC-gmst02400017b03d1
aaaagaagaaatccattataaaaaaaataaaataaaagaagaaatccattcagagtgccacaaatacaatcaaggaagtaatcatgtcataatttacatccatacaatggattaacacaaaaggcaaaaagattgacatgaattttcaaaatgaagaagacaccagacacataaataacaactaatacaagcaagcacatacaaaaacaagagcctaagcccttgtcttgaaaggaatggctcggatgactatctggtgatacacagcagcaagggcagctccaatgaaaggtccaacccagaaaatccattggtcatcccatgcatggtctctgttgtagatgatggcagctccgagactcctagctgggttaatgccagttcctgtgatgggaatggtagccaagtggaccaagaacacagcaaatccaatgggaagtggagccaaaataggaacgtgagagtctctagcgtttctcttggcatcagtggcagagaaaacg

SEQ ID NO: 29531 - DNA, 570 bp, Glycine max
  Clone ID: jC-gmst02400017b04d1
gcccgtgaaacgtgttttatttccattgattatttggagctaacattgaacacaagcatgatacataaaaaaaaggttgcattttatgaacataactatagacacattacatatttatccgaagcagcttcgtatcgttttggataactctccctctctctagcttacagctccagctctttcaacattggcatatgagctacaaatgcagtcataacttatcatcaagaatggtggacatcagaagcccttgcacgaattcaaaccttcgagccttctctacttgatcctcttctgatagctgtaactgctgaggttttcttttcaagaaatcgtcttttgaactttcttttactagagcatcttcagtggaaggaggtgttgcactcacagactcatcagctacaactgggttaaacataaatgatgataacagaggatcgggctcggaatatgaggaagctaagtatgaagaaccttcaagaagggactgcaaggctccttcttgtacctctttctaatatagaaatcgttgaagcaagccttctttctgaccctcttttgcgctga

SEQ ID NO: 29532 - DNA, 542 bp, Glycine max
  Clone ID: jC-gmst02400017b05d1
aaagaagtaacaacaggtattgtctccttcatcattcacatttttaaaaatttattctaaaattcaaatcataagcagagacaaaacagaaaagaaaaggtatataatttgaaacttaattttaggcatcaacaatttcctcagtgtccgcagaagccaaaataagctggggttcttcccttccaactccacacgttccatcaattgcattgttcctacccaaagccttcaacgccaaatgagccgccttctgccctgatatcatcatcgccccaaacgtcggacccattctcggggagccatcaatttctgcaacctccatgccagtgacaatcatgccaggcacaatctccctagtgagcctgacaatagcgtcctcagcagcattcatatccaaagccttcattccaggaacgctatcaatcatcccaatactcttcaacctcttaaccccagtggcgccaaagggtccatcgtgcccacaagagctcaccacaaccttcgccttcatcacgatggggtccatgcatgactgcgtgtca

SEQ ID NO: 29533 - DNA, 386 bp, Glycine max
  Clone ID: jC-gmst02400017b09d1
agtgccttaaattggatttaatatgctttacattccaaaatcctaaaagttggtccaagtgcttaacaagggccgaaatttcggacaattccaccactacttttcatactagttagggctttactccaattaaaatggtttatggaagaaaccttccacccagcaaacaataagcaatatcaccctttaggtttccttcattctttggtacttctgctgctacactgatatcagtctctggattactaaataagggcagatcgtattattcagcaagtcactgggtttagggatattttttggcggtacactagctagactctacaataagatctattctccactacgcccctgaagagttgaaatgcccaaagaaattttttgaa

SEQ ID NO: 29534 - DNA, 522 bp, Glycine max
  Clone ID: jC-gmst02400017b12d1
cacgagataaccactttttaccatatatatatagagagagagaatacgaagcacactgatcacaggatgatgctctctttaagtagggaagcagatcttatcagtacacataggtaggttgaaattctagctctagcaatctagctagagaaggtagtacttgcacaacacacagcacatgataatttattttatacacaatctcattctcatggtgctcaagatgcatggactaattaagcaacaatgttggtctgataggcagtgtccacagataaattgggtacccataaaatggccttgcttccaaggaaatggcaaacagggttagttccaggatcaactcccataagttgatgaagcatttgatgattcattccagaagtatttgagtggcaaatagcaagtgcctgagttctggttccatcaccagccaccaatggaaccatgaaagctgttgtttcacggacttcatggcagttaaatactgcagttctgaaatttagcctatgacacatcact

SEQ ID NO: 29535 - DNA, 560 bp, Glycine max
  unsure (1)..(560): unsure at all n locations
  Clone ID: jC-gmst02400017c01d1
agcaataaagattccgtattcaaatgctaatgatatcttggcataataaaggtatccatttcatatttaacagcattaagcttgcaaacttgcaacaatgcagtgagagagaaataaaccaaaaaagtaaaataaaagaaagaattggtccaggtttctcttattatatttctctcactttttccttgcattgctgcagtaactattgaaaaattgcaactcctcaaatacgactttcgcagaacattgcatactatagcagtcgagaagaacaactaacaataatgcctgtaaacagtggtcgaacgcaatccgatggtgtccttatttaacaacgaaagtctacatgtatgaccaacataagcaccatgggtccaaaagacaaaaacacaagcttcataacagtaggaggagattgcattcagcgaagtttacaggatgctatcctacaatcccaccttcgttacttagtgcgcactacgcataatttcatgcangtaaccaccagtcattatgagggacacaagtgacacaacacctgctggaaagacttttctgat

SEQ ID NO: 29536 - DNA, 427 bp, Glycine max
  Clone ID: jC-gmst02400017c02d1
aagcaacagtccgagccttggttcaaatctgaagccaaaataatacaaaaaagacagtctattttttatgcaagttttacccaacatttggtgatttctagctttaaaccgggttacacatggaataaagacccaaaaatgaatgacagaaatacaacatttgcattttacacttgacctttcatgaacacatgagccttgatgactcacttttgctattaccaacatttgaaaactattgtagtattatgcaaccacttaccttcatggaggtggctgtgtaacgtatttaagaactttggactttcccttgagagtgtgcatgaaatttggcaagccctttctttcaccctttttgacgtgctttaagttcccacaatgcagttagcttcttctgcgtgactaatgtgaacttagcctttttcct

SEQ ID NO: 29537 - DNA, 385 bp, Glycine max
  Clone ID: jC-gmst02400017c04d1
acaaaaagacaaagttttggcaattggcaccccccaaactttggttccctcattaaatatttccccttttgggaaacaccgggtttaaatctactaaattttttttttgcccaaccttcaatttactaaaaggggcaaaaacctagtccaaataattttaaaagcaacaaaaagactacttgggcttttatttatttatcaaactttccaaatttttgaaatttaccagatgacccagtcccttggaacctttttgtaacttgggacatagggactttgaccataagggggggttatctgaaaataaaggggaaaggcttcatggggctttaaaggaactgggacttttgggggctccaaattttcctttttctccttttttggg

SEQ ID NO: 29538 - DNA, 514 bp, Glycine max
  Clone ID: jC-gmst02400017c05d1
agagaatccaaaaccagattttattagattgaaaagcgtaactgtacattgatagaaacagtaaatcctttatctgatgaacagagttacccccctacaatccccattccagtgatgactccccgtgccaattcaattacattgcccctcatgcataccttttacagtctccactaatcatcatatagcatctcaccagcagaaaggaaagtctactgtctggctgcgacaactggcccttccaccttgaaagtggctccccagatttcctcctcattagcaggaactgcagtaatcttatttttaggattctcatagcacatcaatcctccaacagctgtagagtagaaacatccttgagggaaagaagcaagtgacttgccacaagcaccattaagcaattctgcatcatcagcaaatgctacgtagccatcagcagttattccccaatacagaggtaccttaccatattgatcagatgccacaaagagggtagaagtagatttgtcaaaac

SEQ ID NO: 29539 - DNA, 500 bp, Glycine max
  Clone ID: jC-gmst02400017c06d1
aagctgaaagttagactgccacactttccattgttttctcccatataaacaaatttgatacaagaaatatgacgattttcaaatgactaataaaggagaaataaggatcaaatgaaatcgttaaccttatttaaaagatctctatacggcacctttccttcttacctctacctttttctctactgaagcaattaagcaacaaaacaatgacagctaaaccgagcaaattgggagacgttctattttttcatgtcttgatattatctacatatacgcatcagcggttgaaaaccctgagctgttatataataaaactcagcttgatataatatatctttgatcgcctttagtattgacacacctgttcatttcccttgagaatattatacttgcaaagaggacaagttgcattcatctttaaccatttcactatgcatgtagaatggaaatgatggttacaaggaagaacatgaagttcagctccatcctcataagaagag

SEQ ID NO: 29540 - DNA, 468 bp, Glycine max
  Clone ID: jC-gmst02400017c08d1
acaaggaaggtgagacatgatttcattgtacagatatcttatgatgatgctgtggtcttgattaatcagactgaccaacatagagtactgcgaaaaacaaatggaaaggatctagaatcttaaacttctctaaaaatcaacatgatattcctaaatcaaacaagcagaaatcaagatcaacagtaggcatcaagatatttatattggtgcttcctattatactgaagtaagcttgcataagtccggtcccaaattccaatatacatacactcatcatcagggctcatagaaaccccagaaatttccccaaagaaatcaatctcttgacgttttctgtagtctgctttcgtgctataaacatgcacaaaatctgcaggctcagcaaccaccatatattgaccatccgaagaaaaccgaatagaccgggttgcccctaggttattcttgagaatggcagtaggagatgat

SEQ ID NO: 29541 - DNA, 523 bp, Glycine max
  Clone ID: jC-gmst02400017c10d1
atacaaacagaatttcttcattaacacttaacagcaaacacgagaacattcaatcaccccaaatacataacttaaccatacataggtagatgaaggaatcatattccttctattcacttttattgaaaaccagggaaagtactgcaacaaccatagagcccctagatggagatactgttgggaattcctctgaaagtcaatccctcctcactagaaggatagagcaaagtgtaaggcattttagccggcccactgcggtttctcaacgtctcgtccttgttcttctgtataagcttttgttcaatctcttgaagcttctttccaaacctcttgaaggcctctagtggaccagcatcagaagtccaatagtcaccaccatctctctccccaaggtagaactcatcagatgtgtgccttgacaagatttctataattgtaaggtcaatgagggtctccttcttgccagtaatagtcttcaaaaactccttctcagggttcttagccaaagctgcatactcagcag

SEQ ID NO: 29542 - DNA, 507 bp, Glycine max
  Clone ID: jC-gmst02400017c11d1
ggcgaaaattaagaatgcttgttttgaattaaaaaatgataaaattaactcaagcattcttgagtttaacatgccaaactaactctggcattattgacaacacataaattgtctttcaaaatataaactataaagtaatatggattaatgaagtataccatcaataaacactgtcaaagttgaaaacgctcaaactcagacatatcaaaaccaaacggtagagcaagtttcaacagtgtcacattattgggtggctaaacaagatcaaggcaacaaactagaaggttatccaatcagctcttgcaagagctcagtacctgtgagccagcttctccttttccaggtagttttgaacatacgcgtaggtgccgacgaggggaccgagcaaaagagtggcgctgatccaattctcggagaccttgtggtgaatcttcgtgggcaagtccttccagagacctcgcataatcttttgctggaaaggggaaagcgcgtagatcactgatttta

SEQ ID NO: 29543 - DNA, 502 bp, Glycine max
  Clone ID: jC-gmst02400017c12d1
atagctcttaacacatataattccctggatacaacatgtatactggtcatattcaactctagagagctttatctgatatgatcatccttaacatattcaaagatagctaaatacttaactgtataatatatcacacaaacgtagagtgacatatatagagtaaataataaatataagtttaatttatacacacaaactatgagtatataacatcgttatccaaatattcaacaagaatttactttattaccgcatcatgttaaaatgttgcgataaagtggtgaaatcctattgaatgcttgtgtcaagatgctttgtaggatcaaagtgtgtataaattaaactgtttatctatatatatatatatatcccacactttaattataagaaggcttaattaattaacaagttggaaagggaatcccacaagatgcaatcggtttttcgggcattaggagagttaacatactgcttcaagctagcgttcttgaggtagccacat

SEQ ID NO: 29544 - DNA, 500 bp, Glycine max
  Clone ID: jC-gmst02400017d02d1
gcacattcaagctggctgaaaggagagcatattacatatatgttatctcaacaaacaagaaaatcaatacaaacttgattaagataccatatatatagtactagatataaatacacatatttcccagaagatcgacaacctaataatagatacatcatacatgcatcaaactagttgaagaagcagtggcttcaatttcatacttaattcccacccaaattaaagcacttaatcttccatgattgccaaattaattaagtagcccatggtgtccttcaaaaaccttgtcatagtaatttttcttttcttatttttgaaagaagaagaaaaaaaaaaaaggactaaaagctctcacagcctatctcatcctccaagagcaactggttacagttagccgggggatgaagatactcctcacaaacatcatcacaagccaatttccgagcatcgttggcgagcctatcagccacacgattcgccttggtggagacagaaacaaa

SEQ ID NO: 29545 - DNA, 524 bp, Glycine max
  unsure (1)..(524): unsure at all n locations
  Clone ID: jC-gmst02400017d03d1
aaaaagccatctggaggcattgtatattcaccaagtcaattgattacatgtgaacatggaatagatcaaactggtaagagaaatcaaaagatagtatctaatgatattatacaactaaaaccacattataataaactacataaccccacttccttaccctataataaacctatttctcaatctttatatttatattccctttgttctgctgtttggctttttcctcccctatctgacattgcttgatattttgtcacgagtattgatggggattctgcaaaattgtttggacatctacaattttttattctaaacatgaattttcttccgagattccatagacaaaagcaacagccgttccaatttgaaaagaacaaaaaagaagggaaaagagtcctaacctaaaatccaagagaccacatcgccatactagctagttaagacctagatgcttagattcaacaaagttatagtgatctttcacgggatgtttacaagctttgcacgtctngttctctgatcaa

SEQ ID NO: 29546 - DNA, 481 bp, Glycine max
  Clone ID: jC-gmst02400017d05d1
acacttgatgcgatcatgaattgacttcaaaaaacaaacaaaaatctcattcagaactctaagctacagaattataatattatacaaagttagccaaatcttaaaatagttctttggcccgtgggcaagccctgaattagctaatatcttgaaagtagtaactcccctgcctccactatgttttcatgatctttcattactactagggcgagaaatccaaactgtcacaataaattacctgtgcaataacaaggtgtcattctctttcaattatttagctttctccatcattcattatcatcatccttcatgtacttctcttgcactgctgcaactgtaaattgctgaattaagggaagctcagaattcaagtgaaactttgaccacgaaaataagcaacataattgatacattcatgattatcagaacactaattaagacttcagcattagcaagctccaaaatgcaacttagaggacta

SEQ ID NO: 29547 - DNA, 447 bp, Glycine max
  Clone ID: jC-gmst02400017d06d1
accactaggaaaagactgatggattaatagataactaaaggatcgatgccgtcatctttacaattatcaataacaaaaaaaaatacatctgtgcttaaaagaactttttgcctcaatcaactaagtattgaaaactttgaggcacagcacctactgcatctaataatcagttcaacaagttaggattccccaaagactaaaattcacactgactagaagtctgggtagtaccacacacaggattactcccataatatacatacatgccacaattcccatttggtggatgttcatttgaagaagaatggctgacccttttggaatgatcaatcctttgtacttgtttaacatgacccttttcagggaagaccctggtaactggcctactatgtgaaaacttcaagtaggacttttctggggggtagttgaagatagatgaaattggat

SEQ ID NO: 29548 - DNA, 463 bp, Glycine max
  Clone ID: jC-gmst02400017d07d1
gtatgtgttcaacaattgtttcaatcaatgttgccttatgcctgtatagagagaaggataaaaagaataattgattttagtccaacaagaaccataaacaaatacagtaatagatagataaaacaagttatcatgtgatattttgcaaatccaaggtaaaacgataaatctttccacaaacaaaaaaatggctaatataaaatttcgattcctcatcttattttattgattttaatttgatatactaaattttaaaagttttactttgttactaatagtgtttcaagttgaacaaattggtcctttccttgcattagttttatgcactaacaatgctaatattgattgacgttacatacgttcatcttatgtaacatcttatgtcaccaagttgaccaagttagtgtggtaatggacccacgtgaacggtatttgtgccaccacacacagtaatgttgggaga

SEQ ID NO: 29549 - DNA, 518 bp, Glycine max
  Clone ID: jC-gmst02400017d09d1
acgtcccggcggccgccctttttttttttttttttagtagcaataagcatgataataataataagtctaacattaaagttgcatgaaaagagaaatacatgatgcataaggtagttcatgttactggtatgctccggtacagcggagcatgcagtgcagtttgaagctgaggagtaattaaacagctagttggaggaaggaaaccaaggacacacctgagaggctgacacagtgtttatttaatttagtattataatatgatgtcctccaatggttgttaaggaagggtgtgaggcttctcgaaatcctcgagactggtggggcgaaaccaggccttctcctccagcgcatcagagtgaatggcagaagcagtttggtcaccttcttcggggggcccaaataccccagtctgtggatgtggggcccagtatttgccggattgtgttgccgcctggatcacatcgtctgggacctgcccagactggatctcatcatcagggttctggtcgtacactgag

SEQ ID NO: 29550 - DNA, 473 bp, Glycine max
  Clone ID: jC-gmst02400017d10d1
caacacaaaccaaacttattttcaaaggtcattacagacccattacacatcacatttcttcttaaaatgtttgggaaaatccaacatcgaacatcacacagaaatcagctccagcttaaaaccccccacgaagacgcaacaccaagtgcagagttgactccttctggatgttgtagtcagcgagggtccttccatcctctagctgtttgccagcaaaaataagcctttgctggtccggtgggattccttccttgtcctggatcttcgccttcacattgccaatggcgtcggagctctccacctcgagggtaatagtcttacccgtaagggtcttgacgaagatctgcataccaccacgaagacgcatcaccaagtggagagttgactccttctggatgttgtagtcagcatgggtacgtccgtcctcgagctgtttgccggcgaatataagccttgtcggtctggggggatac

SEQ ID NO: 29551 - DNA, 503 bp, Glycine max
  Clone ID: jC-gmst02400017d12d1
gagctcaaaatgagaaattttattaattaaatcttatcttataatattacattggaaaaacatactcagactcatctatccaaagaacaagagggcgaagaacaacaatagtaactcctcaataccccaatgcccccattctcttacaacctcataaacactatgtatgtataatcaacctcaaaaaccatccaattcacgcacaacagaggtatcattctcattatcattataaattataaaatctcatctcattatcaaattcagacaacaaaaaagaaaattcaattaatctgatcacacctgcgcctgatctctcctttcctcccagtctgcacattcaagagactcaacttgtgcatcgccctagcaaaaacctgaaagaatctattttgatccttggcgaaggtctccacaaagggtctcgtagaagggtcaccatacaaaccatggtcagatttcaacacacccaaacccttgggaaggttctggaagtaagcatt

SEQ ID NO: 29552 - DNA, 528 bp, Glycine max
  unsure (1)..(528): unsure at all n locations
  Clone ID: jC-gmst02400017e01d1
actgcaattcacatagtaaaattgtatactctctataatttgagattattacatatttctagcataaatcttgagagaacatttttttttgtttcatcatataaaatatatatgttctgaaagaacacatacaagtacacaaaaaaaagggggaaattcataaaaaaatacagaaaaaaaaaaacagaattgagtaagagggaaggaaacatagagaaaattttagcaatcagataataagaagccagtagtagtgcaaaagtcccttgccaagagtgttggaaccccttttagttaagcaggtaccttctcccccttgagtggcttcaccacttcccatgtgaagtcagggtcatctctgccaaagtgtccatatgcagcagtcttcaagaacctgccatttccacccctcttgagatcaaggttgatggagatcatgccaggcctgaagtcaaaactctccttcacaatgctgaggatttccttgtcagggatcttcccgtgccatngtgtaacaaacacagacaa

SEQ ID NO: 29553 - DNA, 502 bp, Glycine max
  unsure (1)..(502): unsure at all n locations
  Clone ID: jC-gmst02400017e05d1
aaccgaattatgaggagatccctcatccatatgaaccaaatatagaggacttctggaattacatttcacaaatccatgcacgaactagaactgtatatacatcaggcactatttatcacatcacttgcaattctgcaattgaaaccagcttagaatcgtaaacaggaatatagttcttgaagactggcatacatgggttgagcagcctttggtctgtccaccattcccagtagaatatcagatgtggtgaggtaaggatcaccatagaagcgcaaattggcatccatcctggttgcaactatatttccttccaaagaaactcccacaaatgcacctttactgcaactgtaagtgtaacacatgccagagcctctgtcaccagcacgaatatctgcttcaagcactctcccaacaggccctgctgcagcactacaaccagcaccaagagaaaaatgcatatgactgcagaatgtctntacagctttcatatcacgaagaacac

SEQ ID NO: 29554 - DNA, 322 bp, Glycine max
  Clone ID: jC-gmst02400017e09d1
ccccctcacaagtttttttggggtagttcttttaaaccctggaccccttttaccggggaaaactaaattgggcaacggggggacactccccggggaaaaggggcccccccttttatttaccccccctgggaaaggcccaataaacattccaaatgggtgggggtccccccggggaagggcccctgtttaaagggccttttaagcctgcaagggcgccaattaattttttttgggggttccttttgcaggaaccgggcaaataggtggggccccagcggggacccccactggggcttaaggaactttaattgcggggtaaaaa

SEQ ID NO: 29555 - DNA, 402 bp, Glycine max
  Clone ID: jC-gmst02400017e10d1
aaaatcaaaactgaaaattcaatctataaataaaacgaaactcaacaacattggtcttatccgccaccatttaacccccccggaatgcccaaccatagtaacagaaaaccccagggaaaaggctacaacgtatgaagaacaacctaaatttacattttaaggcttaaaagtcaaaataataacccttctaattcaggaaatccaattaccaaagtttttttcctgctttaaagcccaaatccaagaacccaaaattgacaaaaaaaggacagggaaatgtcaaaagggttcaggaaaacctcatttgccacccaaggttgggaagtgcccaggatcctcaattgatggagctggagcattgctgtatgcatttccactggaacctcctctagaaccacggcc

SEQ ID NO: 29556 - DNA, 520 bp, Glycine max
  unsure (1)..(520): unsure at all n locations
  Clone ID: jC-gmst02400017e11d1
gtattcaaaactacagtcaattaaattaaaacttgaaacaatcaaaatccatacagagacataccaccgtctatcaaaaccaaaagtaaagcacagaaccaacaaaggtaaataacaatgtctctaaaacatccataaaaccaaaactagcaaatcaagcatccaccctttcctcctccaagattagagtcttccctgttggttttgccaatagatctgtgtactcttggaatggagatttggagaagcgagtctccttccagaattctggtgtcaggaatccataggttttcatcaagcaatcaaaagtagccttaacgaagttgccaagggtcttggtggatcccctggaggaggtgaaaacatcatcaataccagcaaactgcagcaccttcttgggaaccctagccgccacaatcccggaacccctaggcgcgggaaccatcctaacggtaacggacccacacttcccggtaaccttgcacggaacggtgtggggcttccaatcntgttcccccag

SEQ ID NO: 29557 - DNA, 397 bp, Glycine max
  Clone ID: jC-gmst02400017f02d1
gggcaaaaacttatatcattgttcaagtaaaaacggggaaaagtccattaaaaaaaaaaagagaaaaataaaatcgcaataaaaacataatgaccccctgttatctaaacttcaaaagggtctttgacaaaatcaagaacaacccatgagaattttttgcttaatcgacttcctcaattttgggtccagcaccgtttccactgccagctgcaggaccatcctcatccatgggtccacccgcattaccaccagcaccctggtacatttttgctatgatgggattacaaatgctttccaactccttcatcttatcctcaaattcgttagcctcaacaagttgggttccatttagccattggatagcctgctcaatcgcattttcaattttcttcttatt

SEQ ID NO: 29558 - DNA, 524 bp, Glycine max
  Clone ID: jC-gmst02400017f05d1
aggtcttgaaaagaaacctgcaatatagtaaaacatgtgattttggttgggggtaaaagggagagacaaagcaaatattacatacctacaattcccaattccatacagatcaaggaaacaagagatgggaaaacagagagcaggattctgaatacatacgccttgggatatttttcaatttctcttttacttttcctaactggaagcctacaactacaaatgaaaacaatcaatagttccaaatgtaacccatttccagagacaccaggaggaaagaaaagacagaccatacatgtaacatcccaacctcaacgtttggaatattgaggggctttacgagctttcttgagaccaactttcttcctctcaaccactctggaatctctggtaagaagtccttcctgtctaaaggtgctctatgatcatcgctcaccttcagcaaggcacgagcaatgccaagagagaatgcctgagcctgaccagacaggccaccaccctcagctttgacaaaaacatcataatta

SEQ ID NO: 29559 - DNA, 481 bp, Glycine max
  Clone ID: jC-gmst02400017f06d1
aagaactaaactacaaacatagaccactagcaatggctttatttgtttccaaattggtagtttcatagacaggaagctcttcttggtaccttgcagctccaataagatgatccagctcaaacatatctgaacttgaacaactcacatcatcatcatcatcttcatcatcatcatcataaaaacctctaaaatcaaattcaccctgaccagaatttcgataaccttttacaaaaccacgcgctgctgcttcttcagctccattttcatttccccgagcagtgttcttcttcagctcctttatggaagaacttcttacaccaagattaggttcactctcgtaaatgatgttacatttatgataactagattgtggttcagaatcctcacctaggattacgctaacggggtaaaaccttacggatcttatgacttcgttgatgttggattttttagcccgagagggtgttttgcttatgcaaga

SEQ ID NO: 29560 - DNA, 548 bp, Glycine max
  unsure (1)..(548): unsure at all n locations
  Clone ID: jC-gmst02400017f07d1
ctcactaccaaaaagtaatatcttctgaaaaggaaaggaagaagaaaactcccaagtatcattgtctgattgacaaattgtatctggaactgtttttatcaaacatttacatgctctgagtagaatgaacatcctatattttctcttttcacacctacggctctcatttatgctaatccagctattatggatggattaggttcgccatcccagtggctgagggagctgagatgggactcccagggcttaaatccaataagccttcttattgactgtgccaaatgtgttgcatctggaagcatcaagaatgcagatattggccttgagtacatatctcagatttcatctcctgatggtaatgcagtgcaaaggatggtcacttatttcagtgaagcacttggttacaggataataaaaaatttgcctggtgtatataagtctctcaatccatcaaaaacatcattatcttctgaagatatcctngttcagaaatacttctatgaactgtgtccatttttgaagttctcatacctgatcacaaaccatgc

SEQ ID NO: 29561 - DNA, 423 bp, Glycine max
  Clone ID: jC-gmst02400017f08d1
ggaaccataaaaaagggtttaatttacgggaaaaaaaaacgggaaatagcaatgaaagaaggggaatttttcataactccatacaacttaggggatcagttttaaaaaccagattttaggggcatgaacgcaacctttacgcttggacccgaaacaggactttgggcaattaaacctcaaaggggtttgggcatcgaaacctttaatttttcgcacatggggcctagcccttaaagaaatttaattaatcagttcccaaaaaacgggccaaataataacaataataagcggaaattttattttaaaccctggggagaaaaactttttaagaaaggtaagtttattatgggattttggaaacaaactaaagtgcttgcaaactaccaattcaaacattccatgttttaaaacaaccggggcctt

SEQ ID NO: 29562 - DNA, 453 bp, Glycine max
  Clone ID: jC-gmst02400017f12d1
atagtgaaatacttttatttatagtagtgattgattggccatacagaattttctagatcgacattttccatttcaattgaagcttttacagtaagaggagaggatgattctatgtacaaagaatacattggatgatggattattttgcctcctctctacttctagaaggatgtcagaaaggtccgtagtcatatagaagatgtagttttctacgcttctaaattcttgagagaagccagccagtgttccatgtaatttttgccagcagaagaaaattcatttggaaggttcttgatggcactcaaaagctccttggttgaactcttcaccttcttcctatagcaaggaactagcacagcaaaactattgtccaaatcatcatcactctgaaggaaatcagagccatgaggctccaaccacccaatggaaaaatctgagtatcagattcagagc

SEQ ID NO: 29563 - DNA, 536 bp, Glycine max
  Clone ID: jC-gmst02400017g01d1
gacatcaaagaatggtaaaacatcaattcaggctaacacgaaactgacaaaaaaaacggctactccaacttcaaaaatagtatccaaaatttcggacctagaaaataaacagtacatgtgaataaattttcaagaaaatgattccctagacgcagaataagatagtttctagttgtgcaacgatgatacggaatcttgaatgaactttcactcatcatcttcatcgttatcagcagcagagttgagagacgccacacgtgcaatcaacttagccttcctctgctcataagtcagcttcttcaagttgtacctcttgtgctccttcgggggctgcttatcagatttcttaagagtaggatcagcacgaatggcggcatgaaccttcttatacagtgcctcaataccatcagcttctatcccacgcttgatgtattcactgaagtgtgactggtatttctctggatcatcttcagccaagatcttcatataggcagcaacatgtccaccaaaaacatatttgcgatgaacctcagcat

SEQ ID NO: 29564 - DNA, 391 bp, Glycine max
  Clone ID: jC-gmst02400017g03d1
aacagaactcaattttattatttaaaaaaaccggaaaaatacctgacaagcgacaagaaaaaaaggggaaaaacccggaatttttgaaaaagggaaagtgggcccttctcatttttcaaactataaggccgggggtaaaaaccgcaggcaattgaaaagccaaactgggttttaaggcaggggaaacagcttgttcaccaatcatgggctccaaaacccccgttgatacaaccttggtctttataactggggcctccttttttgggattggtgcatttttagagaaactaagccccaagattccatcaggggattgtctgtaaaaaacagaggcccccggggcaaaattcacatttttgaaggctttaacaaacttttcaaaggctggggt

SEQ ID NO: 29565 - DNA, 464 bp, Glycine max
  Clone ID: jC-gmst02400017g04d1
gtcctttttttttttttttttttttttttttttttttttttttttttttttttttttttttttttttttttttaaccaaactcaattttattatttaaaaaaacaggaaaaatacctgacaagcgacaagaaaaaaaggggaaaaacccggaatttttgaaaaagggaaaggtggtccttttcatttttcaaactataaggccgggggtaaataccggaggcaattgaaaagccaaactgggttttaagtcaggggaaacagcttgttccccaaacatgggtttcaaaaccgccgctgatacagccttggtctttatcactggagcctccttttttgggattggggcctttttagagaaactaagccccaagattccctcaggggattgtctgtaaaaaacagaggccccaggggcaaaattcacatttttgaaggctttaacaaacttttaaagggctggggg

SEQ ID NO: 29566 - DNA, 531 bp, Glycine max
  Clone ID: jC-gmst02400017g05d1
cacgtaaagacttatttcataactctgaaatctttgcttaaacatgtcacccggcgtatattcagtaattgtgtatacattggacattattagcattgggcggtcggttcggtttggcattacagcgtacaactggtgtggcacgaaaatcgccttgtttgtaaacttacgactattataccacgtgcagcaggatgattttgtagaatttgataatattttttttataagtattggtttattccaatgttggatccacactatagcataaaaaagaaaaatataaaacaccagctttattaaagtcaaattatgagccgagtaaataaaacacgctatgtggaaaggagccagatacttgattctacaactcctcccaccacaactggtaaagactatgaaatgatactgaccttaaggagctgcgggaacaatcttgcccgagcaggtaccaaacccaatagtgtaaccatttcccttgaatatccagtaagatacttcatctcatcttaagaaatttttatttaccca

SEQ ID NO: 29567 - DNA, 474 bp, Glycine max
  Clone ID: jC-gmst02400017g06d1
gaaaaaaattttgatcaaattaataacttgtgcaaaagaaaccatcaaattcctttgagaaaaaggaacaatagcaaacctagctcattaatatacatacacgattaaataaacgacacagatcgatgtttatggccaaagccaaaattaaccacggtaagtagacagtcaacgatttgattccacagctacaacaaaatagcaagtgttaacaaaattacggaattaaaaaccgaaaccaaagcgatcggatgcggatcagaactacaaatccaaaagaggatcgtaagatcaaacggtgccgccagatttggagcggtagagtttgccgaacacgtggagcgcggtgacgaagccgatgaagcagaggctcatcaccagcaccaccgtcggcgaaatcttcagccccggagcatcgtacgtgtagaacctcagcatgttgctgctgccgactacgacgctcgtgctggcgga

SEQ ID NO: 29568 - DNA, 511 bp, Glycine max
  unsure (1)..(511): unsure at all n locations
  Clone ID: jC-gmst02400017g07d1
gaatgagataacttttaatattgatcaagttcacggaatttatatacaactgtacaaaacatcgagagtaaggttcttgacatgagtactataacaaatttatcagacagaccaatgagaccacaaggtcaaacggtgtgaatttataatggctactgaatggaaatcagatccccaaaggtgttctcgccactgtatgtaacatagagaaacccatcctcgtccttcttctcatcatatatggcagacataattgctcctgtaggaggaaggacgttgtccacaaatataaagattgccttttctgcacttaatttaatccttttgcggatcacatagacaaactgtcctacagtcaagtcagcagggacaaggtacttcttcttgtcaatacttgngatgtcacttctttcagccttctccacaattaccggaatcctgtcagggtatttctccctaatcctagcagcctcagctcttcttttctcaagatcatgttcttgcttgaagt

SEQ ID NO: 29569 - DNA, 378 bp, Glycine max
  Clone ID: jC-gmst02400017g09d1
aaccgactataggtgcattcactggcaattcatttttaaccaagtccaaaggttctttctttacttgcaattcgattttaaccgaatccaaaggggcttttactggcaattcatttttaacccagtccaaataacctcctcccatgttgctcacatccttaaatccttccgatagaagatcagcagttgcatacagagatctcacttccactttgacaacccccgatgatctgatcctctttcttgcaagcctatgaaacctccttaagaaattctggatacttcactctgccttctggcgaattaaacatgtttgccacgttaatgatcttctttgcatccacatgccctttttgaaactcttccaccgttctgaca

SEQ ID NO: 29570 - DNA, 541 bp, Glycine max
  Clone ID: jC-gmst02400017g11d1
gatgaacaatatgattttgatttcacattataaacattgacaaactaaaaagtacagttttgccaagcttataccagaaacatccaagaacctatagaaagatagcagaaaaataattctacaagggggaatcaaccactgagcattttacaacaataacttattgtatcaccatgctcccaatcttaatattttatctgtgtgtatcacatggaaaagtaaattaatctaccagtatacttgtttctgatctgctctgtggcttgtttggtaattacatggccctatgtagaccttacggctacatagatgatgtggtggtatcattgacaaggatactctgtttcctctatatattgtgttctttttatgttcaaaattttcaacccccacttttggagctttatggtaataaatgaacattatggaaaatgaatatatgtatataatggtctaatttattcaaaacttcaattctttttagcttgcctgtctcttgaagaaaggtttctggcagatcaggagtctctgatcactggca

SEQ ID NO: 29571 - DNA, 489 bp, Glycine max
  Clone ID: jC-gmst02400017h02d1
gcacttaaaaacgacaagaaatttattcaatcacgagcggtaaaaatacaacatacaaataaaaataagggagagtgacatctacacaaaatccacacaaacttaaatcaaacgaggacaataataataataataataatgatgatgataaaaatgagaaaagcttgaacctttagacttgagctttaaccttctggtttggctcgaagacatacttaataagagaatccttaatagacaacagttctggaaattccttcttcaatttggcagcgtcaagctcattgttgctcctcggagcaacaatcaccttggcctgttcctcgagagtgaagttgttccaggtgaagttcgggtcaacataatctctgtacatctccaagatttcattgtgactaaccactcctgggttagtaaagttccagatcccagtcagattcctcttccccatctcaattgaaattggaagcagttcatccaatatagtca

SEQ ID NO: 29572 - DNA, 431 bp, Glycine max
  Clone ID: jC-gmst02400017h03d1
gaaaaaataacaagaaattgtgagaaagcttcccacacactctagagactttagttatccaacagcgataggagtgtaggccgatacaaacgaataacttaatctaaaatctcataggcctgggcagtgatatgaaattaagctttcaagatcactgacattgaccaaacttccttgcaaacttacagattaaagtttggtctgcataattagaatctactacatctttcccacattgttactttaaataacacgttggccaagttaatttgcatgaatgactcaacataacaacaccacctgatggctgtcaagcattatcattttattcattacaccgaagtttatgttacacttgcaagttgctggatcaacgtctatcatgccagtcttgagatcactgaaattttacaacaatgcaggagatatca

SEQ ID NO: 29573 - DNA, 452 bp, Glycine max
  Clone ID: jC-gmst02400017h04d1
gatgtaataatataattaagcagggtcggtccatcaacatatataacatgataatatgaaaatgtcgagataagactccacatcaagattgaattaaatagacattagaaaacccaaatcgaaagtagattaataataacagtattactgaaattaattacgtaattaattctcattgtcgaactcctcgtattgcctgaggacctcagcacagccagaagcaacctcctgagacatgaagcccatggcattggcgaacctatcatcggatgcaatgccgttgtagcgggtgagaataacgacggcttcgtcgcggcccggggtgacttccttgcattgagggtgagggctgcttacaagcttggcactgcatatttgatctgcgtgatcctcgtccacgtacattgtgtatgctccagttgagtcagtgtaccccttcttgggtacacaac

SEQ ID NO: 29574 - DNA, 445 bp, Glycine max
  Clone ID: jC-gmst02400017h06d1
attctggtcaaatcgcataacaaactatgaagcatggacaccgacacgaacactggacacgacacagagacacgtggacacttgtaatgtccaaacattcgaacgtagtttagatgtacaataggagtcggacactaacagggacgcttgagatacggcaaggagctgaggtgatcgtgcttgcatagatcacgaaacagtttacatgtacacagcataggccagggagatatcagattggttgggtaggatgaagatgaaaactggtttcatccatactgactgcaaaataaaactgtgatgacagataagcttagtaaaagaataacaagaacgtatagcgtagcgataaccccattaaaggctaggactatgagcaggaagaggctctggcaccacataatcaaccgcgaccacactgtggatatgatccctaagcttatgc

SEQ ID NO: 29575 - DNA, 512 bp, Glycine max
  unsure (1)..(512): unsure at all n locations
  Clone ID: jC-gmst02400017h07d1
acttgttcaagaattgaaatttgctttgattgaaatcaggttacaagtgtaaagttgtgcgtgatttggtgacaatgatagatgattagttccaaatccctcaatggtcagggantaagagaaactagagaaagaaaaaaaaaagaaaaaagaaaaagaattacattccaccctcccagtatacacaaggaaatgacatcaatatctatgcagcaatagagggatggttttggtttttgtgctgtgagtgcatcatttaggagagacattatctccactctttgtcattgtcagtttcccttgcatccagcttcttagcatctcaagtgcagcttttggttgatccatagggaccatgtgaccagcctcgtataccttgaggaaagatagaggtccatggcttttcagcgttcctgcttctgcaccatcaactaaaaatgggactgtaccagacgccccaaatgtttttgaccagaccactccattgcattaacccaccttgaattcccgag

SEQ ID NO: 29576 - DNA, 457 bp, Glycine max
  Clone ID: jC-gmst02400017h08d1
cacgcgagagctacatcttttgtagattggcttcaaacaatacaaacgcgttacaaggaaaagaaaaaaagcaacaattgctgaccgtctactctttcttttctccgattaaaacagaagatataatatgcaggagattgtatcccttttgtaactagttacaaattcaatatgcaagtaggtaataggtatattcacccacatgacaaaaaactgcaagtaggcattgccgatgtaaaagaatctcctctgcaacgcaaaaacatgtctggaaaaagggatatagggtggaaggggctcggttgcttgaagttagttaggaacattcacgaatccaagttcactcgtcgcatcttacagacgaggtttgctgttggcatatcaagttggtttcctgaatctgtcttcaaaagatcttttagctggtttcttggagtagaaagacaactttggaatg

SEQ ID NO: 29577 - DNA, 509 bp, Glycine max
  unsure (1)..(509): unsure at all n locations
  Clone ID: jC-gmst02400017h09d1
ggaccaacagaaataatgtcattttttcattccacccaaaccttgctgtgttcattatgttatgggcaaacgtggctgaggccatcagcattcaattaaaagcttgatgtctattggcaacttaaacaaactattgctatgttttcttttaacaaataaaagagagaaaaaaatacaactcaactaactaagacaaccacgttacacaggaagagcttcttctaatgaatctggggcaccactactaccgttgagcacaatcacattaccatcggagtcagcatcaactataactgagtcaccctctttaatctctctagcaagcatcttctcagccatgctgtcctccaaaagtcgcattatagctcttcttagaggcctagccccataactcggattatatccttcgtcaaccaccctctccctaaatctttctgttactgagagatcaatttccttggctttcagtctatcaaacacctnctttcacattatgtctgctatctcct

SEQ ID NO: 29578 - DNA, 455 bp, Glycine max
  Clone ID: jC-gmst02400018a01d1
acgaaattataatatcatatctatatatcacatcacatgtatatacaaaaaaaaaagatgctataagaggggacaatgaaatttggcaactagtgtcttaggtcctttaattgcttttttaaaagtaaatgtccataccgtatcctttcaagcctactctcaaccatgtacatttcatctttgaggcgatgaattcttttctccagccacgctatgtctgaaggacttctagtgacctcattgttcatcctgttcatgatgtctacaggagtgttcctatgtatgtgctgaggcctggccaataacacacgtatgctaaactgaatgaagaaaatcagagtgacaatatttttaaggagcacagaaagattgctatgacttctcacagatgacctgaacttcgtcatacactctttaaacagtgaaacaccatgatggttcgatgaaatttccct

SEQ ID NO: 29579 - DNA, 508 bp, Glycine max
  Clone ID: jC-gmst02400018a02d1
gaataaatctcttcatacataaaataacttcaaatggataacatattccaactagttaaatatgattcaatgcgtaacactgcgtaagaaatacttgaataactcaatgtaatcaaaaatagcaaaaccatagtttatcataacaacagccgtcataatatagcaaacaaaaactacatatgatgattaaacttcaccatatctctctatcgaaagcagcttatacagctgctgccttagcagcactggaaagcttggatctcctcttggccaaactctcactgcggcggtctctctgctccttcaacctggaggcaaggagtttctggtactctgctgcctcagattttgccttggcaatcctcttcttcttatcagcaattcttgcccgctttctttggagcgtaagaggagtgaccagtctttgtatcttgggagctttgctcacctttttcccagcttttgtcgtaaatgtacgaccgtaggtgttgacatacttcctaacatc

SEQ ID NO: 29580 - DNA, 451 bp, Glycine max
  Clone ID: jC-gmst02400018a03d1
aacgtattgaaattgtaattgcactgaatgtagacacaagatttaagaaaatctattagtactattattatttttcaccattccataaacaatccatctatttggaaagagtacattgtcactgtcttttttcctaagccactatttacacccaccccaaaacttacgtataattgctctagaaaccaaacctattatgttcctcatcttcctgtactttggttgaaaggaacatttgcttattttgttgcaccattctttttctctcgaactatttcacagatcacatgtctcattttgtctctactttctcaaccttggcttcacttctattggattattcctatatagacaaacgctattcacaaggaacagcgtagggaacacaattccagcaccggccttttacagcaaaaagctcgagtgtgttgcaacggatgaaactgcacgg

SEQ ID NO: 29581 - DNA, 428 bp, Glycine max
  Clone ID: jC-gmst02400018a06d1
aacttgtaactttatagtttttaatagattttaaccagtattacaaagtatattgcttaattatttgaattggggtaaaatcagagagggcataacccataaatgaggaaattaaatactaacaatatattaacagtagaaagttagaaacttaatgcttacacgtggaagacctgccagagatagctataattctagaggccatactgtttcgaagtaattatctatagaagtgccttataatattgcttgcaatcactcttcattcctggtaagtggaaacaacatagaatagcactaacttgaagcagattttacaccagccgttattccactaatatttggcagacgcttctttatataatacttagaattgcgggaaagattgatcattctccttttttttcaggatgaatatcaattgaaca

SEQ ID NO: 29582 - DNA, 436 bp, Glycine max
  Clone ID: jC-gmst02400018a07d1
ggctgcatattatgattctcttcttaatagatgtagttgattttacaagcaattcagaaaggaaggtttcaacgtatcacatattaacattcgtcgagtgtaaccatatgaattaacatcgaattgtcctctatcgaatcattaaggagaacaccatgattttggaacatctgtgactatactcaattcccccttatggatgaatataatattcgactgccatactgacaatcgaaaccacacagactaacagtaacgggaatcccttctgagctcttatcatcttaatttacttcttcaacatgttcaactcttgcttagcaaatcttgttctcggatgtcttgcgcctcttttattcaacttattgatggtaccttaacctttgttagctttgatccattatactcaatcttgattcaatccctcgaatcctta

SEQ ID NO: 29583 - DNA, 376 bp, Glycine max
  Clone ID: jC-gmst02400018a08d1
aactccaaatacatacatatatactgttcatttgtttgggaggggaaccaatcattaaaccacatatgaacaaggcctcctccacatacaaaagaagtaatgagagaaaaaaataaaatcagaggaagaaaaaaaagagagaaaattttgcttttgtttacaagagatatctatcttgctgtaggctgtgcaattgattcatcaattgacatgtaactctcaggttcacctatatccattgaccccatgttcatggaagaatgaaaagaatatgttgcataatgtctgactcgccttgtctgaatgattttgactgtctctcaatccattttgcatatcggaactattttagagcatctgaaattgaaagttaaca

SEQ ID NO: 29584 - DNA, 489 bp, Glycine max
  Clone ID: jC-gmst02400018b03d1
aaatactaacaaatacaaacggcatttattgagataggtcaacgagttgcattcatggagttatgggtacacacaacataatattgcaagaaaaggattagttctttcaggtaatccaaaatcacatccttatcgcactctttgcacgtctgcaactctaacaatcattctggagttggcaacaacattaaatatttggcctcgtgctgagatgataagctatcttttggcctatagaacggtcagcctgagaccagtatgatatccagacactgcggatctcatgggtgacccgtgggtcagataaagcatcaacccatcggtgagcaaatctatcttgcctgtcaggtgcccaagaccggtgtctctctccgggctgctagaactcgtactccttctcaattccacacttttcacgccttccactgcatatagcacgacgaatggggaaccttttctgatgacgaacatgatcataccttgaaggga

SEQ ID NO: 29585 - DNA, 495 bp, Glycine max
  Clone ID: jC-gmst02400018b08d1
gagcattcaaaagtatccattgcaccgagatgagtcctatacgcttacttgacaatatacaatacataacagtatcaagagaatgatatcaaactcaacgtgacaaaatggcttttgttactttgctacctggggaacatataaaagtaaaagaactatataaattaatccagctgaggaacccaaaaattcagatctgggccaaaacaaataggaaaaactgagtaaaaaaaatctccctcatttgctattacgctgctgtggcataggtgggggctcttaactcgattttctatcctttctttccgcaatacccaaacttaacatacttttgaaccctttattttctccacaaaagaacattcgaccagaaccttaaagaattatgttctaggtctttcttattcttcaattcatgaagctccgagcttctctttgtaagaacacaggagagacaggaaaagtactgaatgcaacagcacaacgcaggacaca

SEQ ID NO: 29586 - DNA, 438 bp, Glycine max
  Clone ID: jC-gmst02400018b10d1
agttaacatatcctttaactttgtgttttcttgaatctaaagcacaataaaaacattaaacacccatagtggatactcaaaagtatagtgaactctttactttgccaatgatccaagctcatggctcgaagttctcatgttcatcttcaaactcctgctggttctggttcccgttgtagttgccacctctgttgttgtaccagttgttagtgttcacttcccttgatgagtcaccatagtttgttggattgtacttctcggcggcaacgtcatgaaagtattttccaccctccaaaaaccttgtgtcactcattccttgcctctcaccattgtacccgttaacggcattgttgttgttgtaagtattgtacctgttattgttagcattgtaattgttgttgatgttgttgatgagtatatgccattggcagcaatcgt

SEQ ID NO: 29587 - DNA, 445 bp, Glycine max
  Clone ID: jC-gmst02400018b11d1
aagcacaaaatacttcgataactttatattattgtacatgcatgcatagcatagatagcctgctctcaaattagtcagcaggaacaaagatagagagatccaacgatctttaaatttcacatttgccataaatatataacagaaaagagggtatgggatatgagttaagttttgatctcattcaactacagtatcccaaaccattactcttaagactttgaacttcacttgtactccaggatcatgttgttctcaggagctaatccaacacaagcccttaggatgttttccagcatagcttgctgctttgacagtgcattaaccactggcgtactcggtggaaccagaggggccttggtcaggtaactgaggatggtcgcaactgggtggaatgagtggaactttccctcatattcagctttaaactcgattcgagtgctaagct

SEQ ID NO: 29588 - DNA, 476 bp, Glycine max
  Clone ID: jC-gmst02400018c04d1
gttctcctcgtaggcggcgcggaggcggccgatgagggcgtcgaggctgccccaggcttggcggagcgggcagggacatggggcaggtgggttggggagaccgaagaacgggcaagggtggttatgaaccttagtcttcccgaactggtcgaggtagtggaggaattccagcacgtgcgcaccgctgcacaaggtcaaggagagtggtggacggtggttcctcaggtactggcagaacgtgttccagtcccttcgcttttggttctcgtagcggctcggagtagtagtgctcctcgctgtgttgcttcccgaagacggcgacgacactgtcgccgccgtcgttggatgatttctggtggtcggggtgggaactgtttccattttgaacctgctgatggggtttgtaaccgttgaaacgacgttatttgatctagaacctaaatccttggatctgatatgcttttctttaatccctt

SEQ ID NO: 29589 - DNA, 469 bp, Glycine max
  Clone ID: jC-gmst02400018c05d1
aacaaaacttccttataaattaaatgcaaatttaagacatccctcctcagcagcaaaggaaatggactaaaaccctatggctgcttgtgaatttgaaaatctcagacttttaccatcaaaacaaaaaacagtactcatcaaaaacaaacagcaacgaaaatgttaccgccgatcaagaacccagttttgaaggctactgctacatgaaatcggcggacacttcaaaatataactggtaaaacaaacacctaagactctgcaaagataaactactgtaaaggaacaagtttttttgaaaccacgttgatgatcacatgtgctagcaaaattgccaaaatgcaatcactttttcttggcggcagctcttgtgaccttggctccggcggggtctttcttcttaacactcttgatgacttcaacagctacggtctgacgcatgtcccttacagcaaaacgaccaatgggagga

SEQ ID NO: 29590 - DNA, 535 bp, Glycine max
  Clone ID: jC-gmst02400018c06d1
acacttaaccacaaatgtcattttaattgataagtttatatacaagtctatatgtatttctgtgttacaacttacaaggaagctgtaatgaactgtttaaccacccaacattcttaatcaacaattttgatggctggggggagttgatgagagggggaagagtgaaagaagaggcaaatagctgacatatcatccatcgcaatgccactttttttccgtttccattcatgtatggcacatttcacaagcctttgagcagctttttctttatgtgacgttgctgaaacaatcttcactgcttcctggttggatataacatcccataccccatctgttgccaagatgacaaattgatccctggtggtaatttttctgtgtgtgacattaggcacggagattagtccaaagtccttcatgcagtggtctccaaagctctagatattgctagtcctggtgtttaccatttggatccaaccctgacacttctggttatcttcatacaaaataccttcttggatgtgtatgctttgcctct

SEQ ID NO: 29591 - DNA, 450 bp, Glycine max
  Clone ID: jC-gmst02400018c07d1
gaacaatccaactgtgttattctcatgaagaacaacatttattaacatacatatatatggaaatccagatctatacttccaactgtattcagaaacataaattgaagcaataacaaagctcaatctccaactcacatatacaagtaaaagaaggcacaaagtgacagtgctcacttctcaacaacacaacaacaaaagaaaaaaagagactagttatgttttcatcatcatgttattatatctaaaacaccaagctcgaaaaccacgtactatatattcaaatccatatatgtaaattttaatcacgtaataaaatcaacccaaaactgaataaaagtgataagattatgtaagtatgagaataaaccccatatatttatatagagagagagagattgagagagagagagaaaggagcaaggtgaaatttttaaaccagtttccaggtaa

SEQ ID NO: 29592 - DNA, 467 bp, Glycine max
  Clone ID: jC-gmst02400018c11d1
atggaatcaaagattcattttcatttaaaatatcaaaagcacataaaccaacaaccacatcacctaatttacaaaaaatctaattatttttttaaaaaaacacctctcattcattcactcactccagtacttctcatcaccctctttctccttcccctcatcactctccgacccatccccgcccatcttgaaccgcgtcacattctccaccgctgcgctccggaacagccccacgtctacggcgccactcaccatgtgatacccacgcgacctcaaatcccttgccccatcatacaccgtggcgaaacctgcgagataagccccaatctcaacgttgtcgtttcggctcttcaacaccttgttctcagcattcttcaaaaccttcctcactttcttgttccctgagtccacaaggaccctaaactcgcgctcagattcaacggtccatctgcacgcagtctacgcca

SEQ ID NO: 29593 - DNA, 355 bp, Glycine max
  Clone ID: jC-gmst02400018d01d1
acaaacaaagctagtagtcaaaatcctataggccccattaggcgtggagaagaaaagaacaacactctctaataaattgaaaacagaattttcatgtattctactatctcttattttatcaaccaccaagtgaaaccaattttcagtttcacctagtgccactgagctagctagctttagctgcatgccgaaagaagaacatttgggatattgagccaatccaatagatagagggcccaactattaattgggcttcttggagttaccatttagggggatccaaaggaggaatttcaccagctgagtttacacttaaaatttttcatttagcaacatgggttggctatgtaaaatc

SEQ ID NO: 29594 - DNA, 464 bp, Glycine max
  Clone ID: jC-gmst02400018d03d1
aaactagattgttctgttcaattatattagccaaattaaaagggataatccctacagagattcattttatgtcagtctaatttcacctttagtgtggaaactgcatgtggagatagatgacaacagacacacatgaataccctttcaaaatctgaagcctacacaagaacaaattacatttccttttctataattctacaaagattaaacacacttcaagttcacatccaccaaaagctatggtggttgatataaattagaggcacaaagactccacaaaaatgatgcaacacgattcttcattgaaaacatcgaagtgagagcccctgtgaatcttgttcaaatggcaacccaaattaacccattttgcaactgtcccagcactgctactcggaactatttagtctagaatcctttatagcatgtatttaccaaggcaatttttgcattctctaccttataag

SEQ ID NO: 29595 - DNA, 356 bp, Glycine max
  Clone ID: jC-gmst02400018d06d1
agctccaaatgatagtagcattttattcatatagagcaagctcgaatcacaaaggtaaagcctttgagaacaattctcatatgtatgcaactggttcaataatatgcccaaacttcatggtcatatttatatataataccataaaaggggaggtttttgaagagcaaaaagacaattccaaaacgtgtattggaggaggcaagaaggaagagagttttagcccatggcatacttctgggtccagcttctagcagtagactcatacttgaatttgtcggtcttgcacaaatgagcaatttcaggcactaaagggtcatcaagatttggatccgttagcagagaacatattgagaagc

SEQ ID NO: 29596 - DNA, 436 bp, Glycine max
  Clone ID: jC-gmst02400018d07d1
aaaaagtgatcttatctccaccttatactattatagaatgaggcaaaaacatttttcactcacaatattttcatcaattaaactctaatgtgtaagaaaagggctaatttacaaaacaaaaattatactctatatgtttatatggaaaaatcaaaaagccaatttcctaaatctccaaaacacacccagtttggacatggcccctgaacccctctgggctctccagtttcctcccattgcaactcttcacatcgaacgcataagccacgtggacttcaccatagccgctggatccaatcaacaccagcgtcccatcaaacgccccaacgtacgacacgtttcgtatctcccccgggagggacgccatcttctgccacgtgtccccacgaagggcaatcaagtcctcgccgctgcacaagaacaccctctcgtcatc

SEQ ID NO: 29597 - DNA, 98 bp, Glycine max
  Clone ID: jC-gmst02400018d08d1
tcgctcgcgatctagaatcctcgagcccgtatttttattgtttttatgattcttttttatttgtatttttttatggtttattttttttttcttgcacc

SEQ ID NO: 29598 - DNA, 436 bp, Glycine max
  Clone ID: jC-gmst02400018d09d1
ctgtggtcgatcctttttataacatgtctttgttatttaataatcatttatttttgtttataaaaaagggaacggccatgggggggaccgaatctaatccgccaaaattagctaccaaaatggttttaaatgtaccaaacataacccagaaaaaacaatttctaattaaataaaaccaaacaccttttaccccctaaccaaatatcccttctattcctacaaaattggtggctggtttttaactttctttgaaacagcctataaaacagattaattttttaagaaaggaacttttggcaatcacaagaatggcatttacaattaattatcttcaataaagtttttcaatttatcacgggtcttatcagacaaattgcaatctttgaaacattaactttgggggggacatgatataacaatgttttaaatgggtgat

SEQ ID NO: 29599 - DNA, 393 bp, Glycine max
  Clone ID: jC-gmst02400018d10d1
caaggagaaactgacatgataggatataattatataaaattgtacataggaagtggaaatgtgaatgtgtggcagggtgataaaaatgaaaagagaagcaacaataataaagtgaatgagaaatttaaatatcacggactaaaatatctattcactcgaaatttaaatgtcacggtctcttttgcactcaggaggagagatatgaggatagcgtttagtgtcagtgcagtagttgtagatggtgtatttctggcgcacccatctgagcctacgccactgggcggtgtcaaggtcacggaactcaggctggtcccaccacctcttgccctgcgtgtcgcagaacttggcgttcaccgaagcctcgtacccgtcgatgtgaaaccccttgtacgc

SEQ ID NO: 29600 - DNA, 521 bp, Glycine max
  Clone ID: jC-gmst02400018e04d1
gaacatcattatttatttatttatttatttatttatagctcttaacacatataattccctggatacaacatgtatactggtcatattcaactctagagagctttatctgatatgatcatccttaacatattcaaagatagctaaatacttaactgtataatatatcacacaaacgtagagtgacatatatagagtaaataataaatataagtttaatttatacacacaaactatgagtatataacatcgttatccaaatattcaacaagaatttactttattaccgcatcatgttaaaatgttgcgataaagtggtgaaatcctattgaatgcttgagtcaagatgctttgtacgatcaaagtgtgtatatatcaaactgtctatctatatatatatatatattccacactttaattatcagaaggctcaattaattaaccagttggaaagggaattccacaagaagcaacggttcttcgggcattatgagagtaacatactgtttaagctagcgttttga

SEQ ID NO: 29601 - DNA, 403 bp, Glycine max
  Clone ID: jC-gmst02400018e06d1
attaaacactgggtttttactcattcgattacctgcagatgctagaaatattatgttcgctggctaaatggaatctgccacgctagatatcgcataagcatctactactaccttataaactaacttgtaacagggaagttatgaacccataaaagtaaaaacatggaagttagaagccaaattcgtacacaacaatacaaagaggaggctttactaaactaaattcacttctttcttttctttgggggctgcaatgcttcctcatcttcctcgtcctcttcattctcctcatccttagcaccatcttcatcctcttcttgacctgcctcgtcctctttcgaatcaatatcgacatcctcatcgtcgtcatcttgatcatcaccatcttcatcttcatactctt

SEQ ID NO: 29602 - DNA, 441 bp, Glycine max
  Clone ID: jC-gmst02400018e10d1
atcactctaatattttattttattcctctcttctcatcacattatattatatatttcttaattaacacctaggacatatatatgtctacaccaaacatatagctacaataatttctcacagaaaagacattaatccttgatgagctcccattattggttggctggcgtgtcttagcatcccctccaactctgtagcaaacctctccatggctttggctggcaagctaattggtaccactatcacatgctcttctttgtggatcttacatgacacgtacacgcttgtcattagaggaaaacttgtcattccacccgtggcaggcccaccataaatgggcttgccccacccaaaatcaaccttatatagcccaatacgtgtaagattcgaaacaaggtaggacctcgtagttgcttgaaggggtctttctttcaccacaatta

SEQ ID NO: 29603 - DNA, 328 bp, Glycine max
  Clone ID: jC-gmst02400018f02d1
ggagggaaaaaaacccttttttttttccccaaaactcaattcaatctcccaaaagggggaaaaaactccccaactcaaaaaaaatcccaaaaaaagggcaaaaaaaccgtgccccaaaaaagacaaaaaaggggcccaaggaaaaaatctttgggaaaaaaaataccagccccccccaagttaaaacaggcgcgaggcccctttaaaaggaaaccccctcccttttaaaaaaatttggggggggccctaccaaaaattccccaaaccgtgcaaaattttaacgccccccaaggggtgaaaaaagggccgggttgggccaaaaccaaag

SEQ ID NO: 29604 - DNA, 413 bp, Glycine max
  Clone ID: jC-gmst02400018f03d1
cattcgctcggaacaagaacgtggaacattggtatcgcatgtgaatgcaccttttccacactgtttggtttattaactgaacttcaaatgtgggaaaaggaaactgaaatgggagtaatttataattggaactgcaggaggagttttcagagtatgagaaaatatctggaaaaagaaatatgcattaactttcagatcttttatgaccctgatccccattcgccctttggatcatcagcgtttttttgactttgtgcaaggcatgtttaaggtttttcaggtcttgactggcgaatttggtattcacgaataatccactatacaaattaaaactatttttgatcatcgtcgactttaatttaacaagtgtcttcaagcccttaacgtcaataggtgtggattgatatccattt

SEQ ID NO: 29605 - DNA, 464 bp, Glycine max
  Clone ID: jC-gmst02400018f05d1
agcctgtacctttcttccctctccctttcataggtcccttgccagtgtacctcccctgtcattggccacaaccacatttcccttggatggtcaccatcatctgcagcctcggccagatcttcgtccatacttttcaacaatgaaaaattgaagtattttgaccacataaaacctttccgttgttcaatagggtgctgctcttccatagaaccagtgttaggatttatatataccatctttcgtgcactatgataagcccatacattgatgagaagttccaacacgcgacagtagcagtgcttcttctcaatctctgaagagcctaacaagcacaggctgtatttagtggagtctctgtgcttaacatcaatggaatcaacaaacattcgaaagaacattatgaactccaagaaagaagaggttggcatcacccagctgtgcagtgctgaccaataaccaccatc

SEQ ID NO: 29606 - DNA, 209 bp, Glycine max
  Clone ID: jC-gmst02400018f08d1
attatgtcttttatgctgtgttatttttgtttgagctaataggtaaaagtgtaaggggtttatagcaaattttttacttacaagggtggttttccatttttggaaaaggggtctaaaccaagggaacttggaaagggagcacaaaatctcctttgctcaaggccatcgaaattggccggggcaaaattcttgggtaatggcccaacctt

SEQ ID NO: 29607 - DNA, 54 bp, Glycine max
  Clone ID: jC-gmst02400018f09d1
tttgttttttttttttttttgttttttttttttttttctttttctttttttttt

SEQ ID NO: 29608 - DNA, 446 bp, Glycine max
  Clone ID: jC-gmst02400018g02d1
atcaacaacaaacaaaaacacaatgcatattatccaaaagaataaaacagaacaaaacaatcaaattttacagcactgcctaatgcatggcctagttcatctatatacactacattctgcacacccttttgcattcaaacaaattcaagagaaaaattacaatgtataaaaaccaacaaatatgctataatgctatgcgccacgacaatgaaaaaagaaaagaaaagaaagagaaagtaaatacttaatgctgcaaacttgttcagtcagttccattatttgactttaatatcgcccttgggctcggaggaaaggttcttggaggatggagattttccagtgatagctatctttgctttcactagtgactgcttaacctttgaaatgatgttatctgattgcttttgagctggtttggctggagtttcttttggaaggccctggat

SEQ ID NO: 29609 - DNA, 464 bp, Glycine max
  Clone ID: jC-gmst02400018g05d1
caaaaataaaaagtggggggaagcgcaaaagcattttctatacgaaagcaagttgcttttctcacatggccctaacagcttggaatcttggttccttgggaaggaacttctgctcagcatagacagacatgtagtcaccaaaaacaaacttaggataagtttcatctacttgttggtcttctttctccacaagttgtggtgcaggacatatggtggccttgaatgaaggattatagaaggaggcaattgatcttctgttcccatctggtgtggccagaaccctgtgccagcaactcttgtatctaccattgctcaagacctcaatctgatcaccagtgttgatgacaatggcatttggcaaaggctgcacatcaatccattgcccttctttcagcatctgaaggccaccaaccttgtcatcttggaagagtaggattacgcctcctgcatcggtgtgagctcgt

SEQ ID NO: 29610 - DNA, 455 bp, Glycine max
  Clone ID: jC-gmst02400018g06d1
cgtcgaataaccccttgtattgtattggattggattgggaaataaaatacacaacatgcgacaaacagaaacattctccttttgttgaatcctaattttctccttcagatctagattgagatctccccctccttctctaatctaaccttgttatttaatattaaaaaacaaaagaagaaagagatggcaacaataattgatattcataattagagaacagcagggaaagagttgctcccatttcctaagaaaacttaaacgcaacctttcggtgcaaacccgacccgtgaacccgtcagatcatacgagatccggaaactctgttgctggatgttaccaattatggacaaaccactcatagttccggcaaacgcgaagcagaagcttccactgttgaccaccggaatcaagtaattcgttgccggtatggacacgtcagcacctctgaaatgcat

SEQ ID NO: 29611 - DNA, 473 bp, Glycine max
  Clone ID: jC-gmst02400018g10d1
tcgtccttcctttttttatttcttttttgtaagaatgcgatcaaatttccttcatgctatggcaccatgttacaacagaggacaccaatttaataaatataaataaaggatatcaaaattaatacccaacaggaaaaaagaagaatacgttgatatttctaactaacatggtgcatatgactcatagtggaagcacagttacacaggaatttcgagtagccaaaaaacccaagaatttgggaatctcatcccaggcttaaacaatagcatactcgagcttttcctgctccttaggtcgccacttggacttcttcacacataacaagccctccttatccttggagtaagtcatgcgaacctttcattgcatagacctagccatgctctcaagctcttcaacgatctccacagtgtcacgaacaataagttttccttcaggcctaagaattcgatcagtcttggacactacagct

SEQ ID NO: 29612 - DNA, 507 bp, Glycine max
  Clone ID: jC-gmst02400018h01d1
atccttccccttctttgtttccgcgggatcctccttcacaaactcagattgcggctgcggcttctgctgatcacccgaaaacttcttcgtggttttcaaatccttaggctcgtcaccacccttcatgtttctcttgttccaaccaaaccataccttcttctctttaaccccaccaccattggaaccattctcatgcccatcaaaccctcctccaggctcctcatcttgacaaatagcatcagaattccccattcgaagcgcggaatccagttgcatcctctcctcagcagtcaacacatcatcatactgatcatcattgttgtctccattcaccatactctccccatcatccacagcaaaaagctcctcatcggtcattgccccgggcaccctactggactttacactcaccatcacatgaagcatgtcatataccctagccttccaattcccacaatctcggtcttctcctgccgccgccattcaaatgcggaacaagctctgcct

SEQ ID NO: 29613 - DNA, 571 bp, Glycine max
  Clone ID: jC-gmst02400018h02d1
cgtacccaagctagcacaatcaaaatgatatgatttaatgaataattgaactcataatatctgaaagaaacaggatatagatcagcaaaaatttcctttatacaatatcccttctttgatttatgtccataattcgcttctctcccagcttttggcatagtaggcatactcaaagcatatctacatccttgcagtcagattaaagtttgtgctctatgatatgctgctttctatcttcaatgctgtcataaagactctcaacaaggtgaagcaaaaatttatctgcaccatgtctggccaccagagaaattgataggggaaggttattatacatccctagcggtatgcttacctgacaaaatcctgatactccagcaatggacagcaggctaaaagcccttgcacgaaaaatttctaagtcggatgtatttgtctgtagttctggtggaggacctggaactgtggggatcattagaacaccaaagtccccaagaagagccgaaagagcatcgtgtagttcccttttatagaataacggatataatgttttccccttgtcctaggcatttga

SEQ ID NO: 29614 - DNA, 304 bp, Glycine max
  Clone ID: jC-gmst02400018h03d1
accggaggtcgccctttctttcttcttttaaagtctttaaaatctgagatttgaatgcaaagtaaacctgatacattctactgagattgacccaaattacttatatgggaagtatatcttcttgctaaattgctatagttaaacattgattgatctaaatattagaaaactattagggagtagactatcactttaaggttcttattttactagattttctatttaatatacccatttatacgttattgtggcacaattagatgccttactggtacatgggctgcttgtgttattgccgagaact

SEQ ID NO: 29615 - DNA, 378 bp, Glycine max
  Clone ID: jC-gmst02400018h09d1
cacaccggaattataaattttcatttgtaaggggaggaaagtggaataggagtgtttaacttttggggtgaagtgtaaactacaaccaactacacatgaagcaagattttcgtacaagttttgtatgcacacttcgcaaaaaaaaagatgctttcacctttatgtgcaagcctaaaaatcaatatactatcacatgaatgtcataaagtgactacacaaccagagaacctgaaaaacaaaccttttatttttaattacaatggacccggggtacaataaaagccaggccaggaggacacttggaagattcatgtgaatttgggtttaggcacagggccactattttggtgcaagggaccaagcttttgaatccaatga

SEQ ID NO: 29616 - DNA, 365 bp, Glycine max
  Clone ID: jC-gmst02400018h11d1
gtctaacataattctgaataaataattaaatactctttgctacaagaagtccatctatgaaatacaggattcaagataatccacttccaccaaaaattccacctatttgaatccggaatccgattgccgaaggcacttcatgttctaaaataactttattctcctaaatacatattgaaagagcaagtttcgtttcttattttcaataaacaaactgaggatgactgaaacacatgattatagctacacatgagactagatcaaaagccaaaccagcaccaacaaaggaatataatgtgatatgaatgaatcaaacagtcaaattttagaacactcgggacggtgtaaccctgcaatgctagact

SEQ ID NO: 29617 - DNA, 102 bp, Glycine max
  Clone ID: jC-gmst02400020c04a1
aaaaaaaaaaaaaaaaaattaaaaaaaaaaaaaaaaaaaaaaaaaaaaaaaaaaaaaaagggggcggccgccacctaaatgaagctcctcaacccgggaatt

SEQ ID NO: 29618 - DNA, 472 bp, Glycine max
  Clone ID: jC-gmst02400020da03d1
gggtgacttagggttatcctgcatttcagtggtgtggtcaatatattatcaagttcagtcactaggcccagtcagaaagaggacacacaacacaatcatcataacatgaaataggtccaaagctaagccattcaactggtcccaaagcaaatacttggtaaactttgagcaacaaaagaaaatgtcgccccaacattagggggggtcctatctgtttttgtaaataacagtacctcacatctagaagcccccattaaaaatggatccctttaatgcagagcacttagccagcaatgacaaactgcatgaagcagcagtttgctaaattttctgtatgacaactgaatttgccagtcctgcctgctctatagtctgagtttcatcaattagaatctttggggggaaacccatcaactgaagttgataattctgccgacccccaggtctagatgcatcaatgaaagcacggatg

SEQ ID NO: 29619 - DNA, 294 bp, Glycine max
  Clone ID: jC-gmst02400020da04d1
attcttccccactttatatttacatgcctctcccaaatctccctccaaacaaatgtcttgggggggggggaaaaaaaacgcacccggcccccccccgaaaaacaagcaagcctttcccaaaattcacctaaaacagggggctcctaaaaattcaccccaccgggttcctccccccgggggaaaacccccccccaaaattttttgggttgagacccccgccccctttccaaaaaaatccaaagcagaaaaacccccggggggggggccctccccccccctttttcttttgggggg

SEQ ID NO: 29620 - DNA, 562 bp, Glycine max
  Clone ID: jC-gmst02400020da05d1
gacatagtgggtattgatagtgaaggtataataaaaattttacacaataaatatgattttatgaccatctcaggaaatatttttttattactttctaacaaacattattgaaatatatattaccatctccacactcacaagaatccaataagatttcataaaataaatatcccttacatacccttcaaaggtcctagttcctagttccgtaactgtgcagattgaatcagttgggccaatgcagcagcatactgaacagctgtatgctgagaggtataattgtcagaaagcccatattctgcataatttggttctgtatgcatgaactgaccggctaatgattttttagacacgacttctttccatatatcaatgaactcttccaaaatttgcttggatttttcaactgacgagatagggagatactcaatctcaatcataattcctctgagactctccgcttgactgggaacaactttaatcaccctgatctgaaagtcacccaacttatacagcactccctcgaaatgaagggcgactttggacttgtaggactggagtt

SEQ ID NO: 29621 - DNA, 452 bp, Glycine max
  Clone ID: jC-gmst02400020da07d1
gtcgatcaaaaaactataaattttaatgcattaagtttcagaactacaccagtatattaaaataatataacacattcaagaaaggagacccaacacagcacccccacaaactcgcagacaaaagaacactgcaggaatacacagtaggatatcatattcttgtcttcaaacagcgacctaaatcctctttcacgggaccaaaagttgaaccctgatccacacgagcttttccctttcgcctccaaaattttcttcattcgctcgcacccaaacaaatcaaatcattcgctcgtcgagactgcaatcaaatcaaacgatcaagaaagctctcaacagccgctcctcctcccgtgactctcacttgcgtgagataaacgccgaaatccaacaataaaatcaaccaatgaatccatgatcaccgcctcatagcgaggaacccagggaccggaacg

SEQ ID NO: 29622 - DNA, 498 bp, Glycine max
  Clone ID: jC-gmst02400020da09d1
gcagaaattggagaattttctattaactttcctagtaaaacggcagtgacttttcaatatacattcataaaccctggccccaatatcactaaacaaatgatcctattcttaaaacgacctaaatttatcatctctatcattccatttacataaaacgttgatataaaaaaataataacaaattatattgaaaatggaggcaattttcatcaattacccaacttaaattgatatgttgaggtcaatcctaggtttcttcatggaaggaataggaacaagagagttacacctaggacacttagggttgttcttcatgatcattacatatgataagcaaccagggcaccctgcagccataggtgatgatgaaacattcagcctctctttacattcatcttcttgaattgtggtttccctaatcgacgacgacgaggaggaatacgaaagcgacgacaccgagagaggtgacttcaaaatgaggttcttttcctgacaatag

SEQ ID NO: 29623 - DNA, 388 bp, Glycine max
  Clone ID: jC-gmst02400020da10d1
gaaggctgaaggggaaataaacccccttttcaatcaaactaactaaaattcttggggttataagaatttttatttccaaaatttacttcggttctttgtaacatgaccaactggccacatgatgtcaaaccaatttcgtaatttaagaaaaaggaacagaaaatgtatacttggggttccatatgaaaacattttagccaaccttttaccttagccaccatttttgaattgtaaatataggagttttcaaaaatggcccatggggttggatgagcggattaaccgaccttccaatttgggcccaaacactttgatggtaaggggcggttacaggaatttgatacatgagctttaaaaactgccagtacatgaatgcttgtattatgtt

SEQ ID NO: 29624 - DNA, 506 bp, Glycine max
  Clone ID: jC-gmst02400020da11d1
gcagtaataatgtcaagcatttgattaaattaaacaaaacagaaaggcctcacaatagcggaacccttgagatccaaaccacaaacaaaagcagcaaataagaaagtacagagagggcaaaaaagtaaagagagaaattaatcgacggtctgcatgacatcctcaggagcgaacttggtacccttttccttgtcggcggcggcgcgacccttggccttccgatcgagcaaggatttgcggtccttgtccattcgaagcttggtgacgacaaccttggaagggtgaatgccaacgttgacggtggagccgttaaccttctcgcgggtgatgcgctcgatgtggatgacccacttgcggcgatagacctggaccactttgccctcgcggcccttgtaggttcccctcaccacctgcaccttgttcgtccttgcgaaccggaatggaccgcacgttgtacttcgaccggagatcggtcgagagaggcgcgctcataagacgcgacgcac

SEQ ID NO: 29625 - DNA, 532 bp, Glycine max
  Clone ID: jC-gmst02400020db01d1
aaagattgcaacagttataataattaattaattggatatcccattatacagtatcctttccaaaatatcatgagacataaaaataaaaaacaaagaagcctggtctctgttcatacaacattatatcacagattgccaatcattttataaactagggcgattcttaatttagcacaaagaaatgacattcaaagcccacctccatgagaggaagaataccacccatcaaacctataatggatatcagggctcatctagctggtcctggacatcagaagtccaaagggtgaggttgtctcttaaaagctgcattatgagcgtgctgtctttgtaggattcttctcccaaggtgtccagctcagcaattgcttcctcaaaagcctgtttagccatggcacacgctttgtcagactggttgaggatttcatagtagaagacggagaagttgagagcgagacccaatctgatggggtgagtagggggaagatccccagaagcaatgttctgggcagccttgtaagacaacatggta

SEQ ID NO: 29626 - DNA, 367 bp, Glycine max
  Clone ID: jC-gmst02400020db02d1
ggggaaaaaatatcggccccttttctccttaaattgaaaattggacccaaaggaaattttattcccattggactaaaatacccccgattaccaaccggaaatttttaacctaagggtggtttaaaaggtttcccttaaccccccataacaaacttccctttaaacagaaatttcctttgggggggccctttttttgtttaaataattcccatcttgggggccccatccaggggggcataatcagggggcaacccgacataggcccttttgggtccatcaggcctgccacaaaaaaattaaaattttaaaaaaatggccttttgtgtaagtttgaatgccagtttttcaaaaaattgggggttcattt

SEQ ID NO: 29627 - DNA, 543 bp, Glycine max
  Clone ID: jC-gmst02400020db03d1
aaaattatactttaataaattttatattattttacttctacatattattcatccaacatatggtgtacatgataaaaaaaaaaaaaagtaatgtcttgggtctttttcatgtctttttcaggtgttcgttcttcttcttgtcctgtattcatatcttgatgtgtatccaacacaatatgattattatggcaatgaaccacctccatgaatgttaaccgctgtctcaggttcggagccattgatggatactgctcccaaattagtgtctgtgtcattaccggcaacattaatagtaacttcgatagaagcttcatcaggtacatcagtgtcaggatcaacatcaacgttaatagtaacttcgacaggagcttcatcaggtacatcagtgtcagggtcagcatcagtgtcagagtcagcatcaacgttaatagtaacttcgacaggagcttcatcaggtacctcagtgtcaggctcaacgttaacagtaattgtgacatcagcttcaacaccagcttcattagatgtgccattgtcattgtcgac

SEQ ID NO: 29628 - DNA, 497 bp, Glycine max
  Clone ID: jC-gmst02400020db06d1
aagaagggtcagaatctgaaatggggcatgagtcattacaatggaaataaattgaacttgttactacaaggttgctgactaaacttgaatcatctctgctacaatttcgtaggtcacgcgttccaaaaccgcttcagcaacctcaacgcaaatatgtctcacttgcggtttcaactcactccattcatccatcgaatccaaactcagtaactttgttattagatttgtctcatttccacccaactcccttgtcctttcccatattatcttccccagctcttcgggtcccctagtcaattgtttcaaacattgttgttgtctacaatcttttctcgaaagatttataggagtactaatctctctcacacaataaaataaaagttgctttgccttatgcaacaacgttttagacttcaacacgtggcaaacatctggatttgccccaaggaactctcgcaactccttgctacacttttctctctggctgattgaataag

SEQ ID NO: 29629 - DNA, 511 bp, Glycine max
  Clone ID: jC-gmst02400020db09d1
caccagacaatgccctcaacggcgtatacttggcacagtaaataattctacaataagaccattatatataagatccatgtgacagatatttactaatagttgctaacataactagcattatatgatgcaattgctcctgttaaagcatttttgttaacttcgtaattgttcacaaatcacaattgttaaaattcctccgacacatccatatttaacaaatctcccaaaacactcaaaagcatcctgtttaaattccatttagcagaaatgattcgccatctcaatatctgccagggtttgtaatgcaacaccatcaatcttgaccgtaaatcaatagtccctagaaaacttcaacatctctgcctcaaaggcactctttaaatgatcaagttccctgttcagatcattaatagactggttatatgcctgcattggcgaagactgactagtggggtggattctgacgatattttgatttgagagggtgaggaagcttgtatcggcaaacaaa

SEQ ID NO: 29630 - DNA, 421 bp, Glycine max
  Clone ID: jC-gmst02400020db12d1
aaacatattacacgttttacagggtacaatgaacacaatttaattttgggttgggtgcctttactacattatgccgttcaaaaaaaaaaaaaatttcatttgtacacattataggtaaaaaaccaactaacaacagaaattgtctggacggaacttttataaacccctaccgggaaacgcttatatattccttaattttttcatatgatgctgttgaagactatagaaaaacccgtataaaacaaaaagcatgacacaaaaaggtggaccgaacatgataaagtctacttagcaagcgcatccacttgactgaggttgaaactgagcactgccatttggggactttaagtttacattaaccatgtatttttgttttgaaaagatagtgtttttattccaggttgtgctgcttaatctttcg

SEQ ID NO: 29631 - DNA, 422 bp, Glycine max
  unsure (1)..(422): unsure at all n locations
  Clone ID: jC-gmst02400020dc02d1
aaaattcgaagcaataatcttctaaccatatcactacaaataaatgcatgtatatacatatctaagctctcatagtgaagtaggctacacattacagaacaaaattaacatacttcagaagcaccagaacgaaactatgagggtgttattgctctgccttgcctcttgcttctgagttcttcccttggtcacgattttgcttctacttaaataattacaaggaagaaagtacccttattgactatagtaactattgagcagctcctactacatgaatttcttcattntccattgggctaaaactcactcgtttcccacgtggtttgtgattgtacaccgtctttgcgccaccttccttcggcaccgacgcaacgccaccacccttgccggcattggttcccacatacaaactcatgattttc

SEQ ID NO: 29632 - DNA, 414 bp, Glycine max
  Clone ID: jC-gmst02400020dc07d1
caaaataaaatgcttcacgtatataacatgtagaaccaatagtgcataattgcatattgataagataccatagattgaaacaagtgcttgctgagattctcactcccagcctgaattcaatcacagcataggatacaacttcaataagaggtacagttgggaaaataaaccaataacgatgtgaaaacaaaatagaagacaacattcaaaaaacgttttcttctccacctcacaaaaatggttcccaacaattgcctcccttcccacatatctaaattcatctcagttttttatagctgctggtgtttcttgtgatcagtgttcaactcagatggggggcgggagggacatcaagagtgattccagcttggatttgtccccacccgataagacgccaatgcttttcaacacgtc

SEQ ID NO: 29633 - DNA, 458 bp, Glycine max
  Clone ID: jC-gmst02400020dc08d1
aacaattgctttattaaattcataaatatacatgagtgctcatatatcagattttaaatattgatcaccgttgcggagcgtttattaaaaccttagtacaagtgacacgcatatataactaaaataacttgccaccacagtattatgcaaagagctgtacttccatgcagaaagggttaacactcatcataacctcccagtacagaaagactataaggtctcagactctcagtaactatcagcgatactcattagagaggaatatgttccaaggattccacaaatgacttcgaatgcagcaattgcaacactgagtacaacctgtgaccttgaagcttttttcccaataattttgagaaaacataaacttggcattaacgctgacacacgtatactaaagagagaaccaattgaagccatcacaagcccaaaaaagggaacccaaaaggcaacacaaa

SEQ ID NO: 29634 - DNA, 345 bp, Glycine max
  Clone ID: jC-gmst02400020dc09d1
cccaaaaaaaaaaaattggtttttacgaactaatcttccgatttttttcttcccttcccattaccggggggggggataacaaattgcccgataaaagggggggtttcaaaaggggggggagaaggggccacaatggcaaactttgccgggcatataagttatgttttttttgaataaaacattaagtttaacaggggggggtttggctccgcagaaacccccctggaaaaaaaaacaggggaagcgccggtaacaaaacaaaaagatactggtgatttgggcccctcattttttggggcaagaccaccgattaactcttttaaaaaaaaatttgctccattttac

SEQ ID NO: 29635 - DNA, 478 bp, Glycine max
  Clone ID: jC-gmst02400020dc12d1
aaaccactccaatcactgtgcttcttattttacattctcacatcttcaagccattacatagtacatatgatacattacataccacagggtatttttattatcaatacattcttcaccacttcttttattttgggagggggtggtggtttacaagaggatattggtatttttttatcaagcacacatttgatattatacaagataagtgaaaacaaattaatattacacataaagtttgaatatccttgacagaaagctggacggcttattcacaacaaggtagaacagacaattacttttgcatctcagcaaactggctgcaatcgattcccttgtcagaaaatgcctctactagctttgggaagagcttagcaagcattattttaaatccagtagaagttcccttttggttttcatgctcagcttttccaccaccaaaaccacattcaataggagcttcttcaagatatgccttaca

SEQ ID NO: 29636 - DNA, 472 bp, Glycine max
  Clone ID: jC-gmst02400020dd02d1
gggaataaggatataaaacataatattaataacaagcagggggctgggagaacttcacgagactcaaactaggagaggcttccctcacatctttggtcttattattatggggttgccacattttcctttgcctgtggagcaatttcttctccatcacttccaggttcactgccaggaactcccaagcttagcagcacttcctcccactccttagcaggccccttgcatgaaagatcttgagccatgccgttcttgataatttctgtaaaagctggagttccatagactgcaagggcccttttgacagtctttgatatagcatctcacatgagccggatccacagtatcacattcaacattgaaggcacccatttgaaatccagggaagccttctttgacagggtccactaatccacctgttgaggcaacaattggtacagatccatagcgcatagcttgtaactgaatgaga

SEQ ID NO: 29637 - DNA, 470 bp, Glycine max
  Clone ID: jC-gmst02400020dd07d1
caagcgaaattgcagttttattattgaagacaagcaaagtggtctgctaagtacaattcaaaagcaagacaagcctacaaaaacaaggacttgatttaaaagggaagaaaaaaaaatagcaacaaatggacgccctgccaccacaccaaagcccttgaatatgaggtacctagccttaaaattgcacaacataaccacactgacaagaccaaaggaagacaagctaaagccttttccacactctaaggcatggtgaagatgcttgattagtataaactaaaaagacagaagactttaaaagacatgaactaaagcttaagtctaagcaacattatagcaaatgtgcaacagaagctaaaacatgctttttattgtcaacatccagctgtacataataagacctagcacaagcttgcactatctagcagtggataccatcaaccaagacttagtaactgttttctagggga

SEQ ID NO: 29638 - DNA, 125 bp, Glycine max
  Clone ID: jC-gmst02400020dd08d1
gggttattggttaatatttttacattaaaaattcatctattttcccacgttaactaaaactttactaacacggcaaaaaaaaaaaatctcaacaaacgtttatccggcatctacttaaaaaatac

SEQ ID NO: 29639 - DNA, 393 bp, Glycine max
  Clone ID: jC-gmst02400020dd11d1
aaaacaacatagttcaatattgccattcagtttaggtacgtaacaggagcagcgaagcataaaagcaatgcatccaaattaaaaccacattggtactggttcacttttgaacatcaaacacaacataaaacagaccactagaacaagaatctgaagtagattctagtagtcttcatcctcttcctggccctcaccagactcagcacccacttcttcataattcttctcaagggctgtaaggtcctcacgggctttagaaaattcaccgtttttcataccctcacccacgtaccagtggacaaaagcacgcttggcttccatggaaccaacctgtgatcaatgtggtcaaacacttcagccacactggtggagtttgaaatcatgcaactgccc

SEQ ID NO: 29640 - DNA, 477 bp, Glycine max
  Clone ID: jC-gmst02400020dd12d1
attagcaaaataaaatcataactcaatgggatggcgcattgattggtatcaattacagttataaacattgaatccaaactcaattaaaaaaaaaaaaaactcaaaagtattttagacatcccatgaaacaaattcctactataattttagccatcaagatgtcctaagccataaaacattaacataaagccaatttgtctcatgagagaaccaaaaaaacaaactagataatattcacccctgcatccagaatcaccaatccacaagaagactcccaaaaagcatcaagccttgttggctatgttgttggaaagccagtccaaaccctcataaagaccctccccagaggttgcgcaggtgctctggatgtaccagtggcgctgtctgagagagtggagacccagcttgtcggtaatttcagcagcattcattgcattgggaagatcttgtttgttagcaaatacgagcaatactgca

SEQ ID NO: 29641 - DNA, 512 bp, Glycine max
  Clone ID: jC-gmst02400020de01d1
cacatccacacatttatagaacagaaggaacacgtatccacaaagtacttcatgaataattcttcatttttagatagttacatggactaagtttgagcttaaaacatcgatttgcaaagtttattgcgccaaagcacttgtgttgtagacaagaagtgcaccaccagcaagaagaccaagtagagtcacagcccatatagccaagccagtcgtaccgccagcgtagacatcaccggttggagaccagtccttggtgtcgtagataggactgtaaccatcgacattagcaccgtatttgtctacaaactggtaaacgccctttccctttcctttcctgccagatgcatcaactccttccctcaaagccatgccaccattaattccataaggcttgtcagtcttgatctttttgccaccactggccacaactctgaatgaagaggagttccttgagagggagggaaggcctttaactgaggacttttcaacagtgaaaggggcaggtttgaggg

SEQ ID NO: 29642 - DNA, 523 bp, Glycine max
  Clone ID: jC-gmst02400020de02d1
gtcaaagtgtgaacccaaatgaacatatatgattctttatctatatccaaacgtatcactatcaatttctccagtttaaacatcaatgccgttatgccgctaagactgacttataagaccgtaataacaaaaatatcaagcaaatatcatggatctcgaaagtatgtaagaagttacactgtaaattgtacgtaaagtaaaagtactgaatcactgccttcctctaaaattttctcttccggatgggagccgatgatggtgttgtacagttaatttgcagcatcaatttattctttgaccttttcaaatgataaacactgaaatatgatttgcattaagaggcctcgaatgaatcctcgctagcatcctctgaatctgaactatcaaccatcttctcaagtgcatctaggctgccagcttcagagattgtgtggattctgagtttgtcagcatcttcatctgtaacaccgaagatttccttgacaactaaggagctatctcttgaacaaaactctggcagctc

SEQ ID NO: 29643 - DNA, 455 bp, Glycine max
  Clone ID: jC-gmst02400020de04d1
agataacaaagatatagaattttgatatgatatcttgatcatatgaaactagtctaaacataatatgtgccattaaacaaagatatatagataacaaagtaacctaatgtccaatatatagaaatactaaccaagaattacacacctaaattaagctttaaccgcaggccaaaacttcataagtcaaccccaatgcatttactaagaaataactagggggtgggggtaactaaaactgcactctagtgtgacacgcatatgttttactattattatatttcaacaagccattttaatttaatagaagaaaataacaaccttggtttataaagtatatgatattcgcaaattctagcaagcaaaattgagtgacgatttttactagatatgccatagtattttacctttagctcgagtcaggagaaccatctttttaagaatcagggccctttttt

SEQ ID NO: 29644 - DNA, 338 bp, Glycine max
  Clone ID: jC-gmst02400020de08d1
ggcaaactctactttcacttgatatttttggtctaatatatatctacactctccattctatcacgtgaatgaagggatgcgtttctccactttcttgcgtgacagcaaatactgtctacaagaataccaaaatttacatacaagaaagagggactcacgcgtccccccccccacccacccacacagacactggactttttggtttttgacggaaaatttaacacaatctattctttaacttgtaaatctcgaaaaggaataaaatcagactgtaacacaatcaaggcattcccttgttggcgtaggagttgacgagcgccaaggcattgctggggaac

SEQ ID NO: 29645 - DNA, 441 bp, Glycine max
  Clone ID: jC-gmst02400020de11d1
gagaagattaaaatgaatatcgtcattaatgataaaaaaaagcatcattaggggtatgatacatagatagggtaagtaagcaaaaaaagagtagctggcagagcttgtaatgtatgaaggaattcaatccaaagcattgggcccagcacaagccttcaaaacggggctccaaatccactgcactagaaacttccgtccattcctaccggttagattaaaggttctcccttcaccatctttcataacggaaccaatataacacggcgccaccacccgttccgtacaacccctcgcacaaatctccgatttctgttggcgcggaggggtcctcgccggcgtaccacgcgttcaccaatgggttctacgagagcttctccagctcgtgcccgatcacgctcaccatgccgttcactccgacgttcacattcggcggtttgaggt

SEQ ID NO: 29646 - DNA, 373 bp, Glycine max
  Clone ID: jC-gmst02400020de12d1
atgtgtgagaatcaaaaacatattaaaagacttataataatttatatatatttttaatcaactgagtcgcacttttttgttactaattcacttaatcaccactttgaatctcacatttcttttaacttacgaataagaataataataataataataacataggcccatctacctgggcctaccggcattggatccaggcccgggataaacaggcccaccctttatagcaccaccagccacttgatggaagccggcagaaccgtacacgtgtccctgatgcatcatgattccaccaggagcagcagcataactaggactctcgtaggcactgttggtagcattggaggaggagggcgcgttcttgtcacgcgcc

SEQ ID NO: 29647 - DNA, 426 bp, Glycine max
  Clone ID: jC-gmst02400020df03d1
aaccacaaaaaaattattttccttgtttcactctgtatgggcccatagcatttccacgggtacaatttctccaccccaagtatctacaatgtgaataatgattcttcttctacacaaatacctccggctaatgggtcatcagagaccaccaacaacaggtataggacaaaatttggggtatctgatcctaactctctgtagggggtttttgttttaccaccaaatcatcagctgagtagtattcagctttgagccggttcatataggaaggattatgccctcctgtgtcagttataaagagactaatcaagtttctggcggtcacgtatccaaaatgttggtttaacaacatgaagagaaccggtccctcttgtagaatccatgcaatctggagaattcctcaaagtccagtagctcagatgggga

SEQ ID NO: 29648 - DNA, 521 bp, Glycine max
  Clone ID: jC-gmst02400020df10d1
acacaaaccccgtatagtgcattaagcgatatatttgttaatatatacattttttgtagtatgtacggttacttaaggatcacgagcctgaaaagtaatgacaaaacataatataaagcatgaaatatattccacgcttatgcctgttaagtattgcactaagcaatgcaacactagagatgatccaactcagcggtcttcctttcgtacagcatttggatcagacatcatgtccatcatcattttctcaggtgaatcctcccaactcgcaaatgtcttcaagtcaacttttcttctttgctcagtgaaaagcttttctctcttcttgtaagagttctgcacttcctttgctactttcccaccaagtccccaaactttaacttcagaaatcagaccctcgacaggaaggaaaccctgatctggaaagagagatccactccggtaagttttgtcaatagcatgatggcgaacagtaacttttgcaaaatcttcatcaataaatattctctcatttctggagt

SEQ ID NO: 29649 - DNA, 375 bp, Glycine max
  Clone ID: jC-gmst02400020df12d1
acaaagcaatgcttcttcttctatacccaaataataactctggggcacaaatatatataacatcaaatcaaaagaaatctttcaaatccatctacgtacctggctacatccaataccatatacaatatatataccccatccccaactttatgaatcctataattaatattaagctaacttaaatctctgcaagtatagttctatatgctactattcaatgtttacagggagctagcatcccctcccatgccaggaattccagtataccagaatcacggtacaatatttcataattagtgactgcatgcatgtgtatatatatgtaaatgaaaataacataaaccctctccttttcttttcttggggctgctagcg

SEQ ID NO: 29650 - DNA, 391 bp, Glycine max
  Clone ID: jC-gmst02400020dg01d1
gaacaaaccaattttttgtgtctacacatagttaattgtttggttcacgccaacatatcctggatattactatgcatacatatttaatgatcaggagctacaactcagcttaagacaagcgaaccacacacgatgtactgacatgacctatgacagactgtacattatgatccttgtaatagttcaggtttctttactgatcgggctggttaaaaacaaccaaagagggtcgttggggctgttccactagccctgaactttggagtagcaaactttgccttaaagaatggttccctttttagggcccaagtaagggttctttttttttatgcttttaggtggattgagacttttaggcttttaaatcactttccgtattctggagctcttt

SEQ ID NO: 29651 - DNA, 489 bp, Glycine max
  Clone ID: jC-gmst02400020dg02d1
atatgactctggtgttatttttgattttgcaaattaaattacacaatcacagccgtacatcacacatgagttgggcctcttccaacttaaaagcagaggataacattggcccatgacgcgacacatgcaccacctaataatcataattgtacatctttacatacaaaatacaaagactttaaattttaaaaagaagaaaagagataaacagatcatcttaatgaaatgaaaccaaaacccacaaacattggcttgatttttgttgttgttgttgttcccaacttgattaagcatgaaccgtttgattgaatcacttggacttgaagggaatggccctgattacgacctggtggtagagtgctgcaagagctgcaccgatgaatggtcccacccagaagatccagtgttcatcccaaccaaggtccttgttgaagatgatagcagcaccaagactacgagcagggttgataccagttccggtgatgggga

SEQ ID NO: 29652 - DNA, 408 bp, Glycine max
  Clone ID: jC-gmst02400020dg03d1
aaagtaaactagcactacatattcataaatgatcagttctcactaatcacatcacatctgaaatacaaagtagaggggaaaccagtaaaagagagtttctcccatacaagtaaaagtaaaaacttgaaagcctcagccacataataatagagtagctgatgatgcatatagttcctataccataccatacaactcttacattaccactgtttttgaatactatactctttacaggtaaatgaaaagatatgcgtatgactaactataggttcatattgtgattgtgttgtttggctggagaaagcaactagccatccacaacgttctcactgttcataacttgttgtccatgcaacaaaagatgcactaaaatgctaaactatcctcctgtttaccttaaggagcatg

SEQ ID NO: 29653 - DNA, 500 bp, Glycine max
  Clone ID: jC-gmst02400020dg04d1
gatgctataataaaaacataaataagatgacttcaaaatcaattttaaccaaaatcaatattgtcaaccctcatccaaacatgcactaacccaaccaactaactagctatacacactattatgcataaccttgtttaaaacctacccaccaaaaaaggagaaaaaccctcgtttgggttgttcttccaccaccacggcctgcatgctatcctgctccacgagcctccaagcggcttgttcgaacgccaagccagccagagtgggaggcttgttgagcacaagagggtagcctctattggtgcttctaataacctcagtgtcctcaggaatagccccaagcaagggcaaccctaacatttcttgcacgttcaacaccgacagcatgtcttctgcttttatcatatcggttcgaacccggttgacgatcattttgatgtcccggattccgtcgcattcgaggaggccggtgacgcggtccgcgtctcggaggctggtgatgt

SEQ ID NO: 29654 - DNA, 527 bp, Glycine max
  Clone ID: jC-gmst02400020dg05d1
acaaaacaaacgccatgaaataatagcattaacaataacaaacaaaacccacaacgaagccaataagaaagaaaaatatcaaaacaaaatccgtaaaaaatactactcaccccacatctcatatgtacctagcattaactatacaaacacatcctttcctttcctttcccttaccatcaccatatggcatataccaagtgttttgatttgcatttctcatgacatcactagaaatcattaaatagtaataattttgatcaatcttcacattgcatctaatcaaaatttgttattgtatattaaaaattttgattaatgtaacagtgaaaattgagtcgaccatgatgacgtggtaatctagattatataataatttcttccggagaggctttaatgaggctctcatgcagccatggcttcctcgtcatcgatctcgttctcgccttcttcgctggcggcggcgtcttgatactgttgatactctgccaccaagtcattcatgttgctctcagcctcgggaaactcca

SEQ ID NO: 29655 - DNA, 333 bp, Glycine max
  Clone ID: jC-gmst02400020dg07d1
ggaaaaacataccataaatatagcacaaatggagtatctgtttcccctatcgggaagtattgggcaattcaacaggaaacaaagaggaaacattagaatccctatctctagctaatacacagataagagatcggccctcatgtttcattcccaaacgcatgcatcgaatcctatggaagattccatcatccatcggactcactctgcattctcaccttcaccaagcttggcagtgccattcactttttgggcatcttctccatcttttgggatgtcagaagttcacaaagttaggttggccctgagaagatgcatgataatgtgctttttttg

SEQ ID NO: 29656 - DNA, 360 bp, Glycine max
  Clone ID: jC-gmst02400020dg08d1
gggggggggaaaccccatattaaaattttatttataatttccattggtcactgatcagctttataacattttcaacggaacactttttaatttcattgcagcccctttttttttgaatagattattaagcatgcctgatacataaagattcaacagcctttgttggaaacttttttccaattcagtttcttgagaaattaaaatactcatgcaactatcactttaaacccttttgcagcatgatttttaaacttttaccccacatactgtaagggttataaagataaaattttaaaccttgtaagctttacgagatctaaacaatgcttttttttattaggcattggtccaaccttctga

SEQ ID NO: 29657 - DNA, 439 bp, Glycine max
  Clone ID: jC-gmst02400020dh01d1
gaaaattaaggacaccgtttttacacaatgtcaactaattttcttaaataacggaaatttagttataatcgagacaacaatcaagcacggtggaagaactaaagtccttatgaaaagagaataaaagaaaataatagacttaaaaaagcacactgcatattcatcaaagcatcatcaaagcacactgcatcctaacagcacacgtacgtagaaaggtgaagttccaggtcttgcacaacatacacaacacaccataatttattttatatacaatcttatggtgcccaagatgcagaagcatggactaattaaacaacaacgttagtctgataggcagtgtccatagataaattgggtacccataaaatgggccttgcttccaaggaaatggcaaaccagggttagtttccggaattcaacctcccatgagttcatgaag

SEQ ID NO: 29658 - DNA, 65 bp, Glycine max
  Clone ID: jC-gmst02400020dh05d1
tttattttttttttttcaagggtagaaaattacttaacattattagtaaatgagtgaaaaatggt

SEQ ID NO: 29659 - DNA, 203 bp, Glycine max
  Clone ID: jC-gmst02400023a01d1
agctcacttatttcgtcaaccttatgcacgagggtcacaaaatgccatggggtcatacattcataacctaaatacattgcccaactagagagacggccaactgaatggaaaatttgctcgtgtccaaactggcccaaagaccagggaccatggcgcctcaataacttagaaccgtacccctggtgaaagagctttattccctt

SEQ ID NO: 29660 - DNA, 368 bp, Glycine max
  Clone ID: jC-gmst02400023a02d1
gcaactgaaatctgaaaattcataactctttggctttttgataaaacaaaaaatacatcagaatatttaccccttttgccgatcaaaacttttggttttggttcaaatcaagctggcttgaataatagtttagccgtatattattatggatgtccgtagtagcatcatcaatctttgggtaattaatttatttccgcccccagagagggacccttaagcgcaagaatcccagttgaaaatatttggtcccttggatatggggaacttgacatttccacagaccttgaagcttttgaactacaccgttcctttctttgggccatcggtttttgacttgaacgacacttagggctacaaaacgctttctt

SEQ ID NO: 29661 - DNA, 342 bp, Glycine max
  Clone ID: jC-gmst02400023a04d1
ggcattgaaagcaacttaatggatcttaaactcgagatgcataattctgaatgcattattctttgcaagagtgtcccaacagacattattcaaaacactcatttcattcaagtaaataaattatgtacgggcaaaacgaacaaaaatacgcctctggatggggctcctgcaagaaggacagtcttgcattccttggttctcatggagctcattgcatgttgtgcaaactacctgatgagcacatgggaggaatacaacagacatcttcgcagaaaggcacatgacacattctctttcccgttttacaccccctatcaaagagcagtcatttaaatttgaaac

SEQ ID NO: 29662 - DNA, 454 bp, Glycine max
  Clone ID: jC-gmst02400023a06d1
agtgaatctcttgatataatgtttaagatattccccaaatgaatatgttgaaatacacaattttctcgtcaagagaaggaagttctaaaatgaaaaaaaaaataaaaacacatatacacaatcactcgcggaacttgagtgccaaagttcaaagcacagaataagataaacccataatttaaatagccctctagctagttgccaaaggtcagtagtaagtcatcaccaaaacagcccctttattgcgactcttcttaacttcaaggttgtgtgatcggatagaacaatggggtatctaggtcattcaactctatgaagtccaagttatcagagttcccaatatcacctgtattctggccagcggagaaaccagccagagcagcccagtagtctttcaagccctcaaaaaattcatcagagttaccaacatcacctgtagtagcccgcattccgt

SEQ ID NO: 29663 - DNA, 518 bp, Glycine max
  Clone ID: jC-gmst02400023b01a1
tcggctcgagggaagtttggtgcttgaacttgaacgccgaacattgcgattcagagagagagagagaagagaatggccatggcccgaagagtccctcgtaatgttttgggattggtcaaaaggaacatgtccttcaaatctttggatcccccttcctgcctcacccacggaatccacgtctttcattgccccgatgccgttggaattgtagccaagctatccgactgtattgcctctagaggtggaaacattctcgccgctgatgtttttgttcctgaaaataaacatgtcttctactccagaagtgattctgttttcgatcctgttaaatggccacgggtgcaaatggaggaggacttcctaaagctttcacaaacattcaaagcaataagatctgttgtaagggtgccagctctggatcctaaatataagatagcggttcttgcatcaaagcaggaccactgcctggatgatttattacatggatggcaagatggaagacttccagtagatatcac

SEQ ID NO: 29664 - DNA, 355 bp, Glycine max
  Clone ID: jC-gmst02400023b03d1
gacagaaacgttgaagctttaattaactatggaaattaaaagtagttgcaatgtaacatgaatacactaaaataacacctgaaatgaaaggcaaacacaacttcaattctaaccaaataaactcaacaaaagcattacataaattagtcaaacagactgaaacccatgtcatcatcagattcttcagctggttcttccttcttttcctcttccttggctgcagcaggagcaccagactcagcagcaggagcagcaacagcagcgacagcaaatttacttggatccttcagatactccttgacctatgctgcctcagggaaagaataatctgtctcaacccgaacagcaagaacat

SEQ ID NO: 29665 - DNA, 406 bp, Glycine max
  Clone ID: jC-gmst02400023b04d1
gacagaaacgttgaagctttaattaactatggaaattaaaagtagttgcaatgtaacatgaatacactaaaataacacctgaaatgaaaggcaaacacaacttcaattctaaccaaataaactcaacaaaagcattacataaattagtcaaacagactgaaacccatgtcatcatcagattcttcagctggttcttccttcttttcctcttccttggctgcagcaggagcaccagactcagcagcaggagcagcaacagcagcgacagcaaatttacttggatccttcagatactccttgaccttgtctgcctcagggaaagaataatctgtctcaaccgcaacagcaagaacattcttgtaggcattgacaaacatgtgtggtgcagcagcaagtgttgggtatg

SEQ ID NO: 29666 - DNA, 466 bp, Glycine max
  Clone ID: jC-gmst02400023b05d1
atataaaattgagcaatttccataacagactgtactgaaaacagtataatccagcatacacataaagcccaaaaaaataaatccaacatataaaccagattgtctagcaaactgatctactcactagtaatactgagtaatctagctaacgagaatatcccttccaattttccctcctattgttcctgaatgcacagcaccctatggagtatacaataatgagaagaacaaggaatacgatgttaacaacagccaccctcttccattcagtcttgaagttttgcagaaagccagccttgcatgattggcaattgaagcacagaactgtttgattgttattccaagcatcacagtcaggattgttgtaactggtcacatttccaggcttcgtccagctcgttgaattctcataggtaaataggcattcttctgcaggtttacagcatccagactgaagcgcggacag

SEQ ID NO: 29667 - DNA, 313 bp, Glycine max
  Clone ID: jC-gmst02400023c01a1
ttgagctcgagccgaatcggctcgagagctatgtgaaaactatgggaatttggaagcagtgaaaaattctaatgattcaggtggtgccattttggatgatgagggcgggtcttttgattctaagcagtagtgtagtgatgagtgcaattatgttttttttttttttttttgatgtagatctcttttgtccagcaaatgtagatatgtgctgtggcacttttgaatggtttttaagttaaaatttcaccattcaaagccttgatgattctttcttgattagatatttggaatgtggctgaatcagattttggct

SEQ ID NO: 29668 - DNA, 254 bp, Glycine max
  Clone ID: jC-gmst02400023c02a1
ggctcgaggaagaactgatcagcttggatgaatatgttgagaacatgaaacctgatcaaaaggatatttattacatggctgctgacagtgtgactagtgcaaagaacacaccgttcttggagaaaattgcagagaaggatcttgaagttctgtttttggtggatccaatagatgaagttgctattcaaaatcttaaatcatacaaggaaaagaattttgttgacattagcaaggaagacttggatctaggtgat

SEQ ID NO: 29669 - DNA, 207 bp, Glycine max
  Clone ID: jC-gmst02400023c03d1
caatctggtcttacataaaaattataatgggaaaacccaattatttctggcaaaatatagcaaatatacttttcgacacattttgggggtctacaattttttccatgggatcatagcaaattaaataaatgggtaagggctcaatcttaattgatacaagccctgtaatacagggggcaattttcaggacaatagcctgacttgact

SEQ ID NO: 29670 - DNA, 385 bp, Glycine max
  Clone ID: jC-gmst02400023c05d1
gatgcaaaactgagatgtctatctataaagaaaaagggaactcaacaacatcatttatgtcttacccacaccatactcccccaaaatatcaaacgcagtaaaagtaaagcacaagggggaacaggcttcaagggtacaggaccgtttgaagaacaacaacataaatttacactttcaaggcataaaattaaatgaaccttccaatccaggaaatccaattaccatagttcttttcctgattaagttcaaataagagaacccaaaattgaaaataggacagggatatgacaaaagggttctagcaaggcctcacttggcacccaagtttgggaaatgcccaggatcttcaatggatggagcaggtgcattgttggtggaacttcca

SEQ ID NO: 29671 - DNA, 493 bp, Glycine max
  Clone ID: jC-gmst02400023c06d1
gaatcttggaaattctaataaaaactgaaaaactaaatgggcttgcttcatgttcctccatttatgaattcatataaggcccataaaaggatgccaatgattgtgtcccttactaaactcttgattagatcatcaatccaaccatttgaacctcctccatcatatgaatttttccctacaaggtctcgaaacctcaaatttcccgtgtcggataacaatgcatatattacaccgttcatatggccttttccaatgacacccacaacatttttactgttattcacagctttgctccgcttcaatgaccatgcaagataagtatctcgttcatgtatgagaagtggcaataaagaaggatatgaaaaactcaattgctcataaagttgaaatgtaccatcatctgaacttgcttcctgcaacttgagcttatttatagaactgttagatgaagatgctatcccccgaataaattgatacactaaacttagtttct

SEQ ID NO: 29672 - DNA, 557 bp, Glycine max
  Clone ID: jC-gmst02400023d01a1
tcggctcgagagatgatttgctgctgtaacaaaatggatgctactacacccaagtattccaaggccaggtatgatgaaattgtgaaggaagtctcttcctacttgaagaaagtaggatacaaccctgacaagattccttttgttcctatctctggttttgagggagacaacatgattgagaggtccacaaaccttgactggtacaagggtccaactctgcttgatgcacttgaccagattagtgagcccaagaggccctctgacaagcccctcaggcttccccttcaggatgtgtacaagattggaggtattggaactgtgccagtgggacgtgttgagaccggtgtcttgaagcctggaatggtggtgacttttgcaccaactggactgacaactgaagtcaagtctgtggagatgcaccatgaatctcttacagaggcacatcctggtgacaatgtgggattcaatgttaagaatgctgctgttaatgatctgaagcgtggttactgtgcctcaaactcataggatgaccctgcaaggaggctgctaacttacag

SEQ ID NO: 29673 - DNA, 386 bp, Glycine max
  Clone ID: jC-gmst02400023d05d1
gctaaaatgagatagaatataacataaaaattctgttttatgtttcgtacattaaaaaatgaacagaactggatgtgatattaaaaagtgatagcttttgattccactttcattaaaagtgaaaccaaaatgaactccattctgttttgtctggcgagccacacgctaccgtagtgttcctttctctacattaatttattaacataatatcatacagggaaatttttacaagaaactatatactgctctaccttttcaacacaaacacaaacctatgtcattctcttattctttatgaactattgattccttagtgactcactttcggagattagatcaattgtggtaggtgagcccgttgcagaagtagctgtagaaattgaatt

SEQ ID NO: 29674 - DNA, 429 bp, Glycine max
  Clone ID: jC-gmst02400023d06d1
aagcaaatcaatttggagcacttcctcccagccattcttttctgaaattcaggtttcagtagaccatggcaaactctttgaaggggtagaatgcaacagaatgttctaaaatctaccaacacctacctgacaaattgagaacctagcacccagtgtgtttagtaaaataaaagcaggaacttaacaggatgtctcagttctacgttggcatggttatatacaccaaaaaagtaaaatgtttaccactcttatctacagatatccattttggccaaagcataacacaattaaaaagccatgatgccagttaagcactctgaaagaaatgatatttcagtgacttccattgctgcctttcttctcggatgaaactccacaaccaaaggtagggtctgggaagtgcagcttgtagaatgaaatacgaacatg

SEQ ID NO: 29675 - DNA, 457 bp, Glycine max
  Clone ID: jC-gmst02400023e01d1
gggagccaaatgacatgcctttggtttattaagattaaaaacagtttttgcaagaaaacaatagctggttttttcctaccaaagatccttaaagaaacaaacaatttcaactcaaatgctgcactggaatgcacgaccttttaacaaacaaccaaaacccaaaatcaatcaattgggggcaccaacttcagccccacttttgggagcgagtttcgtccactcgggatgaaaagccccagggggatcaaccctttcgtaagtatgcgccccaaacaagtccctttgagcctggacaaggtttgccggaagtcttgccctccgattgggttcaaagtaagcaagactggcacacattccgggagtgctaatcccagccgaaaccggcaaccccacaaaccttcttcacgcagcgtgtgtttgcaccatttcccttggaaactccgggtccacaataaac

SEQ ID NO: 29676 - DNA, 499 bp, Glycine max
  Clone ID: jC-gmst02400023e02a1
tcgggtcgagtggatgtcctggcaagattttcagattcattttcgatcaatatatatttgccgtatctacccatcagagatgcgtcattctgttcatggtcaatggcgtggttacagtgccggggggtgtcaggattatgatacatggaatcaaaatccacagttcagactgactgcaactgggcaagatgcatcatttcctattcatgtattcattaccttgactcagggtgtgggattttcaagaacaacagctggttttagaaattatcaatccagccatgattcacagatgttctacattggaatgaggatactcaaaactcgtggcagacgtgctgctttcaatatctacctacatgaatcagttggtgggacagactatgttaattctcgagaaatatcctgtgaaatggttttggaacctgagccaagggatatactatagttcctactactatacacccccgtgaagaagcaccatttgtactttctggtt

SEQ ID NO: 29677 - DNA, 378 bp, Glycine max
  Clone ID: jC-gmst02400023e02d1
cccaaatgccaataaatgataggaactgataattgttaatgtttgtacaatattttgcaattgtcaaaacggcaactgaatttacaatcagtcactcaatgcttgttactatacctccccacaccgtccttacctccatttgaaccaggtgttagtaaatttcctacttattttcagttatttcttttccaactttgcttaaatggttacaagtatacccctatagtaccactttttttttatgtacacaataaacaacccgagagccctcttcaatgctggcagaagtatagttcaaaatgacgaatcatcagattcaaagaccaagagtgtgcgcgcagctatacctcatccatctctcgaacagatgccatcatt

SEQ ID NO: 29678 - DNA, 330 bp, Glycine max
  Clone ID: jC-gmst02400023e03d1
gtaaaaagcaagtaacattaagttggattcggatacacaagataattcacattatctgaagtacttcaccaaacacaaatctaaaaactctcaaaagtcatttcgttctttgacgctcactttccggggacgaagttggtggcataggcccaggcgttgttgttgacagggtcagcaaggtgatcggcgaggttctccaatggaccctttccggtgacaatggcctgaacaaagaagccaaacatagagaacatggccaatcgtccgttcttggggtccttcaccttaagctcagcaaaagcctttgggtcatcagcaggcccaatgggt

SEQ ID NO: 29679 - DNA, 336 bp, Glycine max
  Clone ID: jC-gmst02400023e04d1
gccaaaatgctactggtaccctccatgaccgtgagaataaaatgatgccaataaattctacatttggtccacaactagcaaactgtttcagacaagttgaaccggggtacaagcaaatacacaccaactggtccactacaagcctaagtgaggaagaaaaacattaacaaaaaaggattaacatgagaagcaatgaaattacaagagacctgccaattaatttatatagttacaactggatggcttttgaaggatgaattcagcaaggcttaatttcaaaacctttgctcaaaagcggttgagctgactccattggtttcttacccccaagcttca

SEQ ID NO: 29680 - DNA, 309 bp, Glycine max
  Clone ID: jC-gmst02400023e05d1
gattaattaggggcttttttttgcaaattccctatatattttggtttatatgggaatgattgggactgaaaaaaaattttcatgggacaacagaaaagaaagcataatcgggcggaaattttagacagacaaactgaaccattaaattcatgccaaaaagggaaaattgaagccaccactaccgatttttggagaatccacgtcaaagagggactctataggatggatccaccattttcaagatgaacaaattacctctatttcctcttgatattctgtcaggctcaggcttaagaaagaaattcagac

SEQ ID NO: 29681 - DNA, 469 bp, Glycine max
  Clone ID: jC-gmst02400023f01d1
gaaaaaagagagtaaatgaaagggcaacaaggctttattagtgattctatatggcatacaatatcttgcggtcattgtttagtagctcagaatctgacataactgatactgaaaaagaccttgacctgcttcccattgaagatttccgaatgctccttaagtttgaggcctcaatgcgatgcctaatgacccagtaactcatggtgcccaaagttgtggccattatagttgtccctatgatagtgactccaattgcaagccacttctgatccttccccaccactacaaatgacagtgccaagaaggccacagaaataagcacacaagccaaccacattagcttgttaatgatggccatcatctgcttctttgctttgctttctatgatcacaaccgaggtttgcaccaccaccacggccagagaaatgaagagggcgatggaatcaaagacgaagaatatgagaaatgc

SEQ ID NO: 29682 - DNA, 414 bp, Glycine max
  Clone ID: jC-gmst02400023f04d1
ggcaaaaatatatattcttattctcaatagatgaaaaatcatctagtagcaccaaaacacagaacatgttttcccaaacaatgacaatggctatactacaatatatggttttgttgtatcatcaaatgaatacattccaatcagacccaactttcctcttttaagactatgtacacagataactcttctaattaaggcaaaccactcaatagcagtaagaaaataaaagcatgcacacaagtgcaattaactcttatcattgggacatcaacatggcctttccacagagtcttattagcattccaccccacattgtttgagcactggaccaatttgcttgggcaagaagggatcaatcctgacccaaatcaatgagaaaattgatgctagaaggattgaccacaacactacaat

SEQ ID NO: 29683 - DNA, 504 bp, Glycine max
  Clone ID: jC-gmst02400023f05d1
tattcggcggccgccctttttttttttttttaaaataagatttatccacctttgctttccattttgagttaataattgtagtacataagaaactatttctttaacagttagaagatagtgatgcttccttgtcactgatgatctcatgcaatgacaagggccagattggggcgagagaaaaaatagaaactaaaatcaagttgaaaaatggcagaaagaaaagagtgacatatgcaataaagatacaaagcctagaagaaaatttaaagatttttaaactacaaggtacgtcatcagcctctccaagcccatctactaatatcttgcactcggaaagacacactttcagttcaattcattggattaccatatgctgaagaaccccctaataacccttcacccgaagctgcataaacatcattaggatccatcattggagaggacgatgaaaccccttttcttcccgcaccaccactttcaccattcccaccacccaaatgcaac

SEQ ID NO: 29684 - DNA, 306 bp, Glycine max
  Clone ID: jC-gmst02400023g02d1
ccaaaaccagactttattagattgaaaagcgtaactgtccattgatagaaacagcaaattttttatctaatgaacaaagttacccccctaatatttcccaattccagggatcactccccatgccatttaattacattggccctaatggttgccttttacagtctcctccactaatcatcatatggcatcttaccagcagaaaggaaaatttatggtctggctacaacaactgcgggcccttccaccttgaaagtcgctccccaaatttcctcctcattagcaggaactgcagtaatcttattttta

SEQ ID NO: 29685 - DNA, 475 bp, Glycine max
  Clone ID: jC-gmst02400023g03d1
agattgactgccaactaaatgaaatatttgctcctgtccaaactgtcccaaatcccacatcccaagtagcaacaaaaactcaaaaaaatatcaatgatgtaagagctttattactctactttgaaacttgatgctttaattgctttacatgattttcatgtgtgcctggtagtcttccaccagagaagtaaccatctgctgataatatgatgagaaaagaaactgcaagccaagaagaaaccacaaaatagcatgcatcatagctaacatcagtgaggattattggtctacgtctgtcccaaggtcaccccaccgcacattgtgtctggctgcaagatagtgagcaccaacaggacccctactaccataaggatagtactctggaattatcttcttctcttcaagctccttcagtacaggtgttaagagtgaccaagcagcatccagttcatcgctacgtattaagagtcttctt

SEQ ID NO: 29686 - DNA, 487 bp, Glycine max
  Clone ID: jC-gmst02400023g05a1
tgagttcggaattcggctcgagtgccatcttgcaaagcaagcctttgatgatgctgtctcggagctggataccctgaatgaggattcttacaaggacagtaccttgattatgcagctgttgagggataaccttactttatggacttctgatatccccgaagagggtgaggacctaaaaatggaaagcgcagccagggttgatcaaggagaagatgagttaggccgctaacccatcattctgtcatatgtctaagatttgatgcattaatttttctcaatcatattttctccattgtcgtgaagcctctatctgaatggtgcactgcacctcatcaactttgagtcattcttatttctgagtgatggcctatttgagtcatctacttcatttttatgctattgatgagtagttttattcatgtgcttgtgacacagaaacaccattggtttgcaatgccatattcccctatttgaatgctggtatggt

SEQ ID NO: 29687 - DNA, 449 bp, Glycine max
  Clone ID: jC-gmst02400023g05d1
ccgggcccagatccgataagcttgatatggacgccctttttttttttttttttttttttttttttttttttttttttttttttttttttttttttttgttttttttttttttttttttttttttttttttttaaaaattaacccaattgggggggtttaaaaaaaggggccttaacaaagggttaaaattgggaaatttaccggggctcaaaggggaacagtttttgaaggggccccccaaaaacagattttacccctaacggggtcccaatggggaaattttgccttggaaaccaagggggtttttggggcaaaaaccccgggaaaaaaccccccaacaatggcctaaaaaggggggaggggccccaaaggggcccttcctcaaaaataaaaaggccccaaagttgggggggggccgggccccttttaaaaggggggttcccccccgg

SEQ ID NO: 29688 - DNA, 512 bp, Glycine max
  Clone ID: jC-gmst02400023h01d1
cggaaaataaacagcacttctcattgattaatagaataacaaaattgccatcctagaactacatcactagtactattaaaacataacacaaacagaaaaagcatcttattgaaaaggaaagtagcatacatcttctcgtcatcatcctcatcagaaatccttaagcaacttgcgaacctgttccagtgtcacgaacagcaccacagtgaacggtccctgcctcgagatcgtaggaataaaccccttataaagcgccatgggaccctccgcgcgcacagtcttcagagcacaatctaacgcgccggcgtagggcggcgtcgccccgggctccaccctcatgttcatcaccctcgtcttgatcacgtcgacggggttcgacgccaccgtcgccacgaaccccgccgcgaagctcgccgtgacatgggtcccgagcccgtcgcgcatcatgccgttctccaagatcgtttctttgaactggtcgtacgacgcgagctgcgacgccgtcacgagca

SEQ ID NO: 29689 - DNA, 375 bp, Glycine max
  Clone ID: jC-gmst02400023h02d1
aaaaagaaatttctgaagtgaataaaaatggccgtatctaagaaaattccagatacatagtttgtcatcactctaaagcgtaaaaacagcctgtttccaaccaagttaccatgtctctaggtatgcaggcatagaactaacaatttctaagccaagtacaagggactgctctttccagcaatcattcaaaaagcaaatgaagcatataaagttagctacattcattgcccatgtcacttggaagtctcttcatcttttgtcgccttaggatgtattcccttcaacttaagaaattgttacaaagaacagaaaccatattaaagaaaaatcacgatccaattagatcaggtgtttcagcctcaatggacagcaatg

SEQ ID NO: 29690 - DNA, 348 bp, Glycine max
  Clone ID: jC-gmst02400023h03d1
aatattataagcagagattcataattcagattagccgaactttatacagaagcgaccaattaccaaacattaaaaaaaaaaaaaagaagcaaccatgagcttaacacacccatcacaagtccaaaacacttgaacttgctgaaaggcaagacatgaccactttattctaaggatgtttggttaacacaaaacaccagagtgcacgaaaaccatcacagacataatacataagtttttagctacacattaatagtttatcattattcctaattaagggctatctctgcttgaagcttgctctcccaacaccttacttgcaagtgcaggggttgcaggagcagtttgggc

SEQ ID NO: 29691 - DNA, 407 bp, Glycine max
  Clone ID: jC-gmst02400023h04d1
ctggtatgtaataagaacaactacttgctgctcatcttaattccctcctctagcctttctacagaataaacagagtcaaagttcatgttgttgaagggaccattgactattcacttatggagcaacctggtcttggagctcccaagagtgagctcaagatcatctgttccaaaagaagcttcatggatcctctctcctttccaggcattcactaaacctgatgagctgcttccaaaggcaaattcatctgaaactgcttcagccattggaatgtcagaagtgttttcggagcctgcagctacggctggagaacatgttccacttgcccctggtgtcgtccacatccgggaaccgctgccaaccatagcatcttccttgaggccaaatgggttggaagagaccaggct

SEQ ID NO: 29692 - DNA, 426 bp, Glycine max
  unsure (1)..(426): unsure at all n locations
  Clone ID: jC-gmst02400023h05d1
aaataaattgactcagacaaaaatccaatgcaaatttaagtgaaagcagtctagttataatgtgagcagactagtacttgttcaaagcaatttcactggaaatgctattcttaatttcgcctcatgggaaaaacccactacgtcattttaaattttagaagcatttcaaacattctcaatccaagacaggtatctccaacaacaatttcctgtaaagcattagtctttccttaggtccatgtattcacgatgaataccactggcatttaggatgacgatttcaaccttatctccggtgtatatatctctctcagttgcagatgcaaaaacagttttgaccagatcaactgcttctgcttcagacaatggagtaacagcatcctgngcaggtaacaggagtgggctaggagacttcagctggttatc

SEQ ID NO: 29693 - DNA, 547 bp, Glycine max
  Clone ID: jC-gmst02400024a04d1
gagtcccaatattttacaaataataaatacaatgtcgccattaatattaaacaataactttgacatcataaattcttccaaaataattatacaaaagtgacaagggaaaacccgatctgccagttgcctactgaataaaaacacacatcattactatgtgttggcatacacgcatgaccttgtgccttgtcatgagtgaatattccaaagcaattggtcctttatgcctccttaatccttatgccacaaaatgctatcatcccttgaaagttgtaattgcttcttcagaaatagatttatacaaaggtagttgcaatatctatttgccaaactaaaaatgtaaagacccttcttcccaatcctagtagtgtcccaattgtatttacaaaggcgggacaaaatatgtatatacaagtacaatcatatagcataatgtaacaataatcatactttggtctttactggtgcacattacaggaattattatgcactgaaacccctttgcagagaacttcaaagattggagggatagagacacaagctgtgc

SEQ ID NO: 29694 - DNA, 538 bp, Glycine max
  Clone ID: jC-gmst02400024a05d1
aatacttgatatactttcatttctttattaaaatagcaatgttgatgtgtgtgtacaagtacaacaatgaatattttgctccgaaaacagtcaattttgagacaaaaatcgattatatccactgttttggggcctccaaactagatattaaaacataagtcactgcaaatacaatcaaaaggaaaatagaaagccaacaatgggagctgtggaggttctataaaagaatctcatcctgaacacccacatttagggtcttatgtggcaaaataatgctattaaaaaccactacctcatcctcaacagtcacagattcaccaagtattgtgaccccgagctttgcattgtaatctccactagccttaacacaggcccatcgaccaatagatgatttccatccaacaattgcatgaccaacaagagcattttccttgatttcaacgtcatcaaggatgatacaatgtttgagccttgcaccagctcctatacgagcatttgcagatatggatacacttggaccaatcttagcagatggatg

SEQ ID NO: 29695 - DNA, 456 bp, Glycine max
  Clone ID: jC-gmst02400024b02d1
agcaacaaaaagctctcagacttaaattattaaatcatggcgtatacctactctaaataaaacaacaaagtcgccacaccactgccggcaacaatacaacaatggttctgagattgcaaaatttgatttggttcttgaaggaataacattaacattagcctaccagacacgtatgtgataacatgttcaattactggttggcaaatttgattcccttctcaattgatgatttgagttcaggcttaaggctttcgaggccttgttgctcaaaatctgagagaggtcctaagcccagaacttcctccactccattcttcccaagcctcaccttggaagcaaagtagggaagttcagtaacagtggattgcacgaatgagcactccacaacatctgggactccattgaggcccttaaggcaagcatcagcaaatagggcaccagcataggccattgaca

SEQ ID NO: 29696 - DNA, 390 bp, Glycine max
  Clone ID: jC-gmst02400024b03d1
atgaatccagccatttgctcttaaataaaaatttccaggaaaaaagaaaaagaaaaagtggaagtcctatcttagctccaaacagaaatgggagcagctgtgacttttgagttaagtgtactagaactagaacagaatcccataagttatgcttactttttccaactgaaatctgagctgaaagaacccaccttagggcaaccggggttcacatggataaacctatatgttgaaattggaccggtcctcggatcatatgcctgaacttttctccacatcgtgttctatccagccaacattgagctccagagcatatcccccttctggttataagaagcggtctgggagcctggagagagctatggactgaaggtgtcacgagggcatatt

SEQ ID NO: 29697 - DNA, 475 bp, Glycine max
  Clone ID: jC-gmst02400024b04d1
gtccccatgacaccatctcccacacccaccagatgcaaccacaccgcgttgttgccggcaatgcgtcgaccaccgagagccaacttccgccgactccgtaacgacactgaaaccgtcgtctacgacgatccctctcttttcaaatcttgaaaccacaaacacatttctcaaatcaggaaaaaaagtcacctttctctagcgcgcacattaccggcaccaaccaccacgaaccacgtcggcacagaattccgaatccaccactccataacggcgcgacactcagacccaaaccaaatgcgctcaccaaaaaatcgtgctgccagcgtcagcaccgagcaaccagcgccaccgtcttgcgcgacatcatgtcccctaacctttgtcttctatagcagaacaccataaccacccattaacgtccaagcaaaagtccgttacatacctaccagaaaccaccatccaccattagaaagcg

SEQ ID NO: 29698 - DNA, 482 bp, Glycine max
  Clone ID: jC-gmst02400024b05d1
acattgcaaccaaggaatgtatatataataaaaataacaaaatcgcccataacgtacatatacaccagatacaaatttttcaagacgtatgatattgcaaatgacttaaacttttacacaagaacgaacaaaatgctataatgaattcccacactggcacacagttcaaagttattgcataccaataatttcaagaacccttattaacttacactttcaaagggattggcacaacaatattatatgctaataaatataataatcttaagatgatgaagcaggtttggaagatgggttgaaaggaacctgctcagcgcatgtaaggatgtcatggggcccagcctgttctcgaccaacaccaagaaggtcaagataatacaggtaatgggaaacaatattgttcattgagtccacatcaccttgtccacaaacaccattcccatagagaatgttcattggagtgccaaattcaggaacccgat

SEQ ID NO: 29699 - DNA, 445 bp, Glycine max
  Clone ID: jC-gmst02400024b07d1
ggaaaggaaaagggatcatttttattccggaaaaatccgccccttataggttcaaataataggggaaactaatatggggggaaaagggatagattcggaaactagcaataaaaccccccaaaaccgggtttcagttcaccaagcaaacggaaaaaccctgggatcccaacttttgaaaccccgagttaaaaacccaaattttttcccacaaaggaaatttacaaacccccagccttggcaccaagaaaatttttggctaaaaaaaattagggccccattaacttcacgaatgtacccagaatcccaaaattacgggttctggaaggaccccatattttttgagaagcccctgaccgggtaaaatagctccggccttttttgaacacgtttggtagaaatatccccaaatttttttgaggccccaagtggaaacctctgaaatgcc

SEQ ID NO: 29700 - DNA, 433 bp, Glycine max
  Clone ID: jC-gmst02400024c02d1
atgaaacctgaaacctaaagtaaaccgttcgttatgtgaaaatccaataagcactggctgcagtgtccatccatgtagagattcacataaaacttgaagtatggaagcatccatatgaaccgtctacacaatagacaggcatatgctacatatgaaataagggaccaggattgatcaggccatcatttggtaaaactgatccagatcaaggaccccgttgtgatcaatgtccaaggcatcaatcatggtcacacactcattataggatctgtgatcaccaaggcgatgcaacattgtttgcaacccttgcggggtgatgcaaccactccgttgaatgtgccacacaaacatctcaaaagccattcttagagccttctcatggacatgagcatcaccaacaaagcgcttgatgagcttggtgaaatgctggaag

SEQ ID NO: 29701 - DNA, 467 bp, Glycine max
  Clone ID: jC-gmst02400024c04d1
atagacaaaagtgtaggtatattaaaaaaccatctcaaaaccgtgcatcacttcaagttcagagatttacaatacccattagcaggccaaatatatatgacatttttggaacaaccccattttcaagcattgatacaatacagagtaaagaaatgggaaaagaacaaagaaacaattaaggggattgatcatatgatcatgatcatgtggtggagtctaaaatgaccttggctttgccacaatggcggaatgcttgagtatgcgcaagctaaattgccctccttactcactagtgtcaatctgtgactggcctgggggaggcatgagctcaaagttttggaccaaacgttccaaagtgatgccaagaattggcaatgcaggaatgattccagggcaggttcttctggcaacaccaatgggaaggtacctaaagtcattgacattggctttaacaagcgactccttct

SEQ ID NO: 29702 - DNA, 542 bp, Glycine max
  Clone ID: jC-gmst02400024d04d1
atagacataagtgtaggtttattagaaaaccatctcaaaaccgtgcatcacttcaagttcagagatttacaatacccattagcaggccaaatatatatgacatttttggaacaaccccattttcaagcattgatacaatacagagtaaagaaaagggaaaagaaccaagaaaaaattaaggggattgatcatatgatcatgatcatgtggtggagtctaaaatgaccttggctttgccacaatggtggaatgcttgagtatgtgcaagctaaattgcccttctttctcactagtgtcaatctgtgactggccagggggaggcacgagctcaaagctttggaccaaacgtcccaaagtgatgccaagaattggcaatgcaagaatgattccagggcagcttattctgccaacaccaaagggaaggtacctaaagtcattgccattggcttcaacaagcgactccttctcgaagaacctattaggccggaactcctctggctattttcactgtgcatggttgtaggccaggcaccatgcattca

SEQ ID NO: 29703 - DNA, 453 bp, Glycine max
  Clone ID: jC-gmst02400024d06d1
gtaaaaagcaagtaacattaagttggattgggatacacaagataattcacattatctgaagtacattgcaataacatatacttcaccaaacacaaatctaaaaactctcaaaagtccacaagtcatccttttctttcatgctcacttgccggggacgaagttggtggcgtaggcccaggcattgttgttgactgggtccgcaaggtgatcagcaaggttctccaatggacccttaccggtgacaatggcctgaacaaagaacccaaacatagagaacatggccaatctcccgttcttgagttccttcaccttaagctcagcaaaagcctctgggtcatcagcaaggcccaatgggtcaaagctgccaccagggtagattgggtcagtgacctcaccgagggacccaccagcaatacgataacccttaacagcacccattaggataacttgggt

SEQ ID NO: 29704 - DNA, 575 bp, Glycine max
  Clone ID: jC-gmst02400024d07d1
ggtgaagcttcagtggtattaatcatgagaaagcgaacccaaaaaatatataaactaaaagacaatactagaaagaggtgtcttccgtgtaactattataccttgaaactctagagattttttttacaaagaagcgaaaaagtgcagaactgtacttcattctcctgtacatctctgaatatatatattcacacggcaaggctcctgctccacgccgaaacgaagcatcattttgaactgttggatttaccaaaaacttaacatccaggttcacatttctaatgcttctatttcttttctgtcataaaccaggttcatgagcccaaaaagcatctggatccggacaaaatagagaataatcttccatttctagattcgctatgtgccaattgacaaaacgggcctgtacagacttgaatagaaaaaggatgataggcaaaagccagcatttatcatcttccctcttaacattacgtgtgcttgcctcatcagggtggtaaaagtgggataatgaataatgaaggagacaacatataatagccactccaatattagataaagaagtagcattccac

SEQ ID NO: 29705 - DNA, 146 bp, Glycine max
  Clone ID: jC-gmst02400024e03d1
gttacacatactacccatatttttacatgctgctgggttaacacaaactgcttaggttattttcggaactacttaaaggcgctcatttcaaaccgatgcaggctgatgtacctgggcactcaagtcttcgccaatctcgggattag

SEQ ID NO: 29706 - DNA, 346 bp, Glycine max
  Clone ID: jC-gmst02400024e04d1
atgttagtgtattaaaattccatataaaaaccgtgcgttatttcaagatcagagatttacactacccattaacaggtcaaatctatatgacatttttggcacaaccacatttacaagcattgacacaatacagagtactgaaaagggactggaaggcataaaaataccatgggattgatcatatgatcatgaccatgtggtggagtctaaaatgaccttgtgtatgtcacattggtggaatgctagagtttgagcaagcttagtggcctttattccttactaatgacaaacaggtaatggccacttccaggcaagagcgtaaactttgtgacctaccttgccaata

SEQ ID NO: 29707 - DNA, 388 bp, Glycine max
  Clone ID: jC-gmst02400024e05d1
catataagtcattggattaaaattccaagtgggaatcgtttattttgtcaggaaagtagacatagactaacctattaacacatccaagctaaagggctcctttgtcacagcaaattttaccatcaatgactcattacggagtcctggggacatactgaaaggcttaaaagtgccatggacttgctgatacgatcatcctcatggtgatgcattgtccatatggcctgtgtatgtcactatgcttgatgggtcgattttatgcaagctttgaggctttgaatcattgacatagttcagagacgtaatcgagtcaacccgtgtcgagcgaaaactttgggagatactttgcggatgactgatctgtaagaccagattctatactgattac

SEQ ID NO: 29708 - DNA, 512 bp, Glycine max
  Clone ID: jC-gmst02400024e06d1
agctaacacaaaatattggctcttaattaaaaaaaaaaaaagtttgttatgcttggaaagctctcagagacagagtgataacacatccaagctaaaggtatccttgtacagtacgaatattagcatatataacttatagcttagccctggtgaaaaactgacgggctaaaaagtaccaatgactctaaaatacagtaaaatcaatagcttaaaatgaaaatatggcagatgtaaatcacttcactttatggctttctcttaatatgtctttgagcctttaagtctatcacaattacagagatgttatcttggcttcccctgtggatggcaagcttagttagatactctgcggcggactgagctgcaggatcagttccttcactgcgtgctgttgggccattgtcaccaaacttcttgtgccaaagaaggattcgcttatttgcaacctcacatgcttcttcatttgtcattacatcccataaaccatcacttgctagaatgagacactcatc

SEQ ID NO: 29709 - DNA, 576 bp, Glycine max
  unsure (1)..(576): unsure at all n locations
  Clone ID: jC-gmst02400024e07d1
acaaaagaagaaagagaaagcacattgtttcttattagatttatattattatacacttgataaaagccataattaaagtagaacaaactgttacatgggacgggactaacactgtaaaaccagattgacaatgaaagggggaacttaacttcaaccaagcacacgagaattttgttttggagtgaggggattaataagatcaacaccacatgtacaaatagcatgtgtgtgaaataattaaaacattgtaaactctttgcacaactatttttcgtagctacaagtaggactcaattatggatgtggggatggtgtgaatagctctatgctagagggccatagtgagttcaaatttgatttctattcttgcatggtacatagctacaaggaatgcctatgacctactataataaactgattttgccacatcccgtcttttttttatccatcaccagatatacactagccttcgagtgaaggacacttagccagagttactatgagaagatgcaccttggtttgacaaanaacgaacgacaacgcacgtaatggtgtcagaactacctcgctgatatg

SEQ ID NO: 29710 - DNA, 282 bp, Glycine max
  Clone ID: jC-gmst02400024f04d1
caccatgcttttttcttcttcttatgaccacaatggtgggtctgagcacaatgcaataagggcttaccgttaaatgtaggaacatgccacactgtccttatagccccacatgttccctttattttcttggggggccttgatataaattttaataaaatgaaaacaaaaaaaaatgaactggttgagcgaaacttgcgcgtctagttaaatagtagtagtgagatgccacgcgtgagcggaaatcatgggccttgtgtgcccttccaacttgggacaaccatt

SEQ ID NO: 29711 - DNA, 493 bp, Glycine max
  Clone ID: jC-gmst02400024f05d1
aagcctcaaaactaatagtttgtgttgttataaaataaattaacaacatgcgaaactagtgttaaagttttttctagccaagcaaaattgtgcttatatcccatgattctataccaccaagcgcaaaacaagaaatttgcggtacatgattaaagttatagaatgtttatcatgttactgggtctggatgccaacaaagaaacataaagtttaagtactcaacatgagagtcagaatgctagagccattcatcaagagacttctgatcatgaatccgggacttcatgacgccttcatatcattcaaaccacaacgagccagaaacttgtgattctcttcaaagataggagaaaagtcagtacaaaatttctgtatatcagcactgatatcaccagggccttgtatcacctccatgaattctttcctatcaggagcaagcttcatcgctacactgaagctagaacttgcaagccagccatgccacttctttaga

SEQ ID NO: 29712 - DNA, 344 bp, Glycine max
  Clone ID: jC-gmst02400024f07d1
aggcaaaattcaccattttaaggttaaattaaatgaaaaaaaaaggggcaggaaatggggaatcaaaaactatggggttccctcaaaatcaaaacctaaaggggaaaagggaaaaaattcctaaaaaagggggtctctggttagcgggaacaaaaaccaccaaaagaaaaaccaccgtttgggggatttaaaagggggatttacccaaaaagggattaaggtgaaactcccacaagatttattcattaggggggaaaaaacttgggggtgggggactttggaaaacaaggctttcaaagtccaatccccctgatgttgataaaaagggctgtcacttcataaaa

SEQ ID NO: 29713 - DNA, 136 bp, Glycine max
  Clone ID: jC-gmst02400024g01d1
ctatcattattatgacacactgatggggaaggatatacttcgaaagtcaatgccggaactattaaactgtaatcatttcaaaatgatggaggctgaccagcaaaggattagcaacatctgcacatttggccctaaa

SEQ ID NO: 29714 - DNA, 480 bp, Glycine max
  Clone ID: jC-gmst02400024g02d1
gtggctatccatttactacaatcaatattggctactcaagggcaatcacaatttgagtggaatacgatcggaactattgaaatgccaacattgccggcaaaacaggaaagacagcgtaaactatataattaacgagacccagggagacttgacacatggaacctggaatcttaaaattcatgcgacgcagatgtacaaaatacacagccatgaatagacgacacgcattagccacaatgatgcatggatccccatgagccggttagtcacgaacgggatccatcgctttgcctgacctggcttgtgagattggagacgcataagaggtgaccaagtccgactgtgtgctggaaagcccttggaatatggcctgaatgctttcccaagcatgatgtacgtctacacgagacagaatacaactgttttccgaacatctgtacttgggttaccaaaagcttcgaaatgagcaggccgaaacga

SEQ ID NO: 29715 - DNA, 149 bp, Glycine max
  Clone ID: jC-gmst02400024g03d1
catagtgtatcctcacttctatacactgcttggaaaacataaactgagcaagccgacaggggaagtcctaaacggcgattttctagaagaccagaaggctgagggctctagcgagatcggaagagacactgataggactaaagatcatg

SEQ ID NO: 29716 - DNA, 427 bp, Glycine max
  Clone ID: jC-gmst02400024g04d1
acaaattacaccatgcgtattccgtatccgtatcccgtacgtgtgtaagtgtacaccgaaaattaatcaccgatcatcacatgattgaacatgcattggggttttcatcgctgaacatctgcggaggaggagcgtgcgggtgcatgtagtacggtagaggtggctgcagaggataaccctggttcacgtaccctggctccacgtaatgattattagcactagcaccataccctggatgaacctccatagcgtaacttgtttgaccgggaaagtgtcctccgtcgtaccagaacgaaggaggtgccatccggtgcatatactccattttgttaataacctccgcagccgctgccgccgcaccgtctttctctttcttctcgccgtcgccttctttctctttcttctcaccaccgccttctttcttctc

SEQ ID NO: 29717 - DNA, 449 bp, Glycine max
  Clone ID: jC-gmst02400024g07d1
ggtcttgcttgatctgcttctacctacactccgaacggggaaatgctgcatccaccctatacatattgatgtatccaccaggtgccaaatgacaggtgcaaaggccacaagtccgaagaaagtgagaagtagcgtgcatgatgatagtgatagttgactggctgtggatgtaagagccacgaagataatatgaggctgtggtgtattataaaagcagaaccgttgaacttgaacaatctactttctcataccattcacttggcaagttcgtcactgaggagtcttgctgcggcaaccatgtctgtgagggctggcttcacttcactgcacttgcgggttttgagaccacagtcagggttgacccacaagatgttcttcttgagcactgcaagcatcccattgattctgtcagcgattttattagttggcggtattcttggcgagtggat

SEQ ID NO: 29718 - DNA, 535 bp, Glycine max
  Clone ID: jC-gmst02400024h02d1
gatatccattaactacaatcaataatgtttactcaatgtaaattacaatttgcgtggattaccatcagaactatccaaattccaacattgccaggaaaaaaggaaagacgaaaaaaactatatatttaaagagacccaaggctaaagacaatggaacccgcatctaagttcatgcacgcacatatacaaaatacacagcaatgaatagacaacacccaaaagccacaattttgcttcttccctatgaacctgctagtcttgaacggcatcaatcgctttgcctgtactggcttgtgagattcgatttgcataaatggcgaccaacttcaactgtgtgctgttaagcccttgccaatttggcaagaatgctttcccaagcatgatgtaaatatccacgagacagatgacaaaggtcttccgaacatctgtactctggttaccaaaagcttcgaaaggagcaggcagaaacgagggtaactgagtcatcagttcctcctgagaaagccgacccacatgctttggtaagcaatttatg

SEQ ID NO: 29719 - DNA, 568 bp, Glycine max
  Clone ID: jC-gmst02400024h04d1
attaattgtaagtatagaataatcaactattgtctaaccggccaaattccaaacaattcaaaagcagaacatatagacgaaattggcaaaatgtaaaaaaacagagataaatgggaatgaaatagagttcatatggcagtagatacacgaattgcagcaaatgtaaatcagtgatggtatagatcggtgccagtagttatcatcacgccattggtaattaccatcagagcattgcccaagattgatccatctactattcaacatactgctcctcaccttcatcctcgtattcatcatcctcctctgcggttgcatcctggtactgctggtactctgctaccaaatcattcatattactctttgcctcagtgaactccatctcgtccataccctctccagtgtaccaatgcaagaaggctttgcgccggtacatagcagtgaactgcttactgaccctgctaaacatctcttgaattgatgtcgagttcccaataaatgtggatgacatcttaaactcctgggtggaatatacacacacttgactttacattgatgggaattcattaac

SEQ ID NO: 29720 - DNA, 452 bp, Glycine max
  Clone ID: jC-gmst02400024h06d1
ggcataaatggatgtccgctttcattcgctgcaatgcaattacaagctttttggaacccaattatacaatttatacccggtttcctgagattgaaaacaacattttgatttactatataggggtaactgataaacaagttttgaaggaacaatccaaccgagcccatttaattaattaagcaaagaaaagaaagaaaaaggaaatagaagtgacaaagcaagttgcaaaggattgtaggtcatttggaacagcaagaaaaatagggttgattttgcttaaatgtataagcaccattgttgaccaggctgaccctgttgacagataactctgccttggatggttcggagttgagcacctttctggtcaccttggggtatatttttcgaattaccattttaaatgccgttttcacatttgtggagtccaacgcaaacggtttcatgaaaaacaa

SEQ ID NO: 29721 - DNA, 510 bp, Glycine max
  Clone ID: jC-gmst02400025a10d1
gcataaaaatactagataatcctcacatctcaagacatttttacatacagtggtaaaaccgtctcattacataaaacttttattccatgcataataaaacacgcaatgattttgagggtttgaacagagtatttagtttggtagacaaagtaactgttcagaaaagttcttcatcaccctgaccatcctcctctctgaggacccaccgagctatgcacattcaacctgtcaagtaccgagttgaaatcaatggcctgtccactctcctccatcctctggatcacacttgcaacatgatcccccctgaatcccatgctcaccagtttctcaatcaactcattgtagggatggttgcggatgaattgcgactggttcggatttcggaccatgagattaagacctggtggagggttctgaagggaagcacttgttgggggatatccaggttgagcaaaatgaggttggggtggatgatgtgttcttcctccttaccatcatacatcatgtatg

SEQ ID NO: 29722 - DNA, 387 bp, Glycine max
  Clone ID: jC-gmst02400025a11d1
agaggaacaattttcttgatactatatatccagcattaaagccgtcccaattattcatgcaagatgtttcgacaaattacattagaaaggttagtcattatcaagctgaaaaaaaaatgcataataataaaaccaattgtttgcaacagcaacgctgccacatgctggtataataatgcttatacctaacaatcgctcaaaattgatagtaaccccccaaaaaaaggaagaaaaaaattaagcgctcacacaaagttttgttctcatcatataggcacgtagcgtttcaaagcctgcttcgccgtgacagcgacttcaaccacgacgccgacgacggcgcccgctaccgccgccgaacgcacccctctagctgcacgatacagcgcg

SEQ ID NO: 29723 - DNA, 560 bp, Glycine max
  Clone ID: jC-gmst02400025a12d1
ctgaatgagtgatattaatatgatcctactatctttgaaacatatatactatcaatacagaagcaagttggactggtcccaacaaacttttctatatgttgttagttgttgcctgggattactccatcctcaccctcttttatccactttcctcaagtggtgttcctacttttctcaaaacatgcagaaatgtattgaatgtgaccgattgcatggtaaccaactcattactctcatttcaattcattccaatatgatataaaaagaattggatttcaagccaacaacattttatattatcaatatgtgtacatatgatgaacttaatttgaatgcatttgtagattctttacttaatataaataggatagtttgctatgatataccgatcgataaatcataaggtttaagtctaagtaattgatttaattttttggaacaattgttgaatgagtttaggtatatcaaatgagagatagaaggagagaatttctctttattgcttgagaaacttagtgtaaatctttgaattctttatttaaatagaccctattctttct

SEQ ID NO: 29724 - DNA, 448 bp, Glycine max
  Clone ID: jC-gmst02400025b12d1
ccaagaatggttcatcaatggctgcaactgaatatataagttctgtattatatacacacagacacacgcaaacacagagacgaagcacataatcagttttcgcttggatttggaaaccgttcgcgcatccattagatctcaaaccagttcggttggatccgtcgtcgacgttttcgtcgccgttcgcggtggccggaaacggtagaggtaggggaagtagttcaattcaaatgacctctctctgccatggacataacggagagcctgctaggccttgggtaaaagtctcctggccttctctgctggtgcgaggaatgtcgaatcaacgcggtgagagctcgcttcacgagatctcctttgacgccgcgaattctcacgagcgagttcgtcatcgcggatctgggcgcgttgaggcggtgcggcgagtacggtgccggagcgtggctct

SEQ ID NO: 29725 - DNA, 522 bp, Glycine max
  Clone ID: jC-gmst02400025c10d1
aaatgcagaagcagaaagacattagaattaacatgaaaactggtgaagatacattcttttaccataggatcaccacaaaagaaaaaattgtgggattgattagccgaaaaaagctagtggctaccaaatgctatatcctacaagctacattttacaagtaattacaaaatacatagtgagcaaaaattcagttcaagttaattctagctggaaggcatactccaggagattgttcttccaaaaaaaatctttcacaattaaccagtttcatcacaaattcaggtgcaaagtggtacttttgatgagcttcaccaaagcttcttccaagaacatgttcaacccaatcttccaaagattttttcttgtctgataaccaagcagctgcaagtatctgtgtcatgacctcatactcaatttcaagtataaactctgatcctaacatcttttgaaattgtgtgtcaatgcttttaattacttgctcagcaatagaatcaaagttgaaaggcttaaaaacaacttttt

SEQ ID NO: 29726 - DNA, 417 bp, Glycine max
  Clone ID: jC-gmst02400025c12d1
aaagattaatgtaaaactatagctaaactattttacaaccattttagttgagtgattaatttccagcattatggtttctttgagaaccaaaacaaacagaatcatcagatatccttagaaacctattggctctcctaaaattcataaatcatccctgaaaatttcctcaagtagtttgacaagaaagaaaaaactatggtagttggtaagtagcatgtaatggcagatttgtacacattcttagaagagatgaagaagttgcagacattgagaaacatgctgtagctcttcccttatcatgaagaagctttgctcccaagtaacaggcttgacggtttaaagcttcaataattagcatgttcttacaagctttggtctccaattctaacaaaccaattacttttttcgagcttttga

SEQ ID NO: 29727 - DNA, 563 bp, Glycine max
  Clone ID: jC-gmst02400025d11d1
ccacaacaaacatctaatactttattaaatggggataccaaaagagcatgaagccactaataaccataacgtattcaactgaaatcagagaagaatggaatgtcggtggaactcaaccattcattcccttgaatgaaattgcgaactgtgaactggtttgcctcagtggcgttcttgataaccctataaccaggccacgtaactcttgcacttgtgtttgaaccgggacccctattgttgtactctccataatacaacgtatccaatgcaaacgtgccattccactccaaccaccctttggggtctatcagatcctccatgtaagaattaagataaacagttctcgaatacttcttccaaggacgacccaagtagttcttgaactgagatttgaccgggattaaatcagcagctgctgcaaccttgcagttcaagatggaaatgccggtgttttggttagggtcttctcttccttgtgcagtgaacatgttcctttggttttcatcgtgcttgcgtgcgtacaagttgcagttctggagcactgttgctgcattgcccaagat

SEQ ID NO: 29728 - DNA, 346 bp, Glycine max
  Clone ID: jC-gmst02400025d12d1
attgggcctacaataagaggttgacatcgtctattacattaaatgctgtgaccgccataattcaacaatgaaaggttctacgtgcccaattattttaaacacccaatgaacttgcgaacggggaccaggtttgccactaagcattggtagcaaagcattgaaccatgcttccttaaagtgcattggaaagaaccaagaccgttgaagtgggcctttgaaatttttccagactgcaatacggacgtggcaaccttctgaaggaaatctcccaggtatactggagcctgggggaaccatttttgatcatccattgaatatttccatccataccgtgcttgaaaaacct

SEQ ID NO: 29729 - DNA, 542 bp, Glycine max
  Clone ID: jC-gmst02400025e10d1
gaaagtgaacacttttctgtgcaaataacataatgcaaaatctgttttcatgtctaacacgttttgctggaatcgtgtatgggcatttcaaaaccatgggttatgtacttgtattcgttgaatttaatgataacactaaggttaggtagatttgagctcttttcatcaaaatactagtgtacatgtacttgtcttcaactctatttacaactaactagttgaagttcctttggagggacgtgcttaatcgatttccgcatgcacgtaatccacgaattcaaaattcttttggagttggtttagggcaaaagctatggctgcgctgacaactgcgagtccagccaaaagtacacgcaactggaaatctgatgggatccctgatgttgcacaaaacacaactgttgccccaattaggactttctgccatgtttggaatccctcatatgctgctttacatgatgaacacttgagagtgtgctgttcaaatctatccaacatttgacgttttgataacacagttgatggcaatggctggtcgctgc

SEQ ID NO: 29730 - DNA, 557 bp, Glycine max
  Clone ID: jC-gmst02400025e11d1
aatgctcataattaccaacaccaaaaataacaaaccaaaaaataaacggactccaaaaataatcatagcacgagatttgccacaacgaaaaaagtcgaacaaaataagtaaaaacaatcccggcacatagtaaaaaacttacatcattaatctctgctgttttagtactaaagacattatcggggaaaaaaggcatgattcagggatccaaaactgacgattttcctccaaatactcagaaaatgaagcaacatacgattactgcaacaaaatcaacggtagcgaccaaaggagagggtattggttctcttccaggttgacctgcgtgatggacgatttttgtggtagagatgacctctgccacgtaaacccctattgcttttcccagcagaagtgaggccacgcagttccctgtgattatggactggattgcagagccagatgattcttggatcatttcttacagcagtgtgggcaacatccaccagaatgacctcaaaatatttgttagtggagtcctcattcacccagtatgaattgagaaccctgaggccacc

SEQ ID NO: 29731 - DNA, 484 bp, Glycine max
  Clone ID: jC-gmst02400025e12d1
cagaaaaatctcacatttctcgagtatcatatcatatttcaagcacaaactaatacaagaaataaggataaccactaacacatacttcaggcaaagtaacaatttgattaagcatcaagtgtctacatataaccctcagatacgatacaagcaaaacacagaattcagccgtacacagaccggacctaaccaaacgggtttaaatgggtgctactttattccacaattctaaagcacggttccaacctcatgtgattagtttatccttgcagaccaatgataccacaagctactctgccaccagcatttccagtagttttgctaagctcatgaccaccttttccaaggtcatcagaatcagcatggacaacaacagccctttctatgatggagtttggtccagtgagaggaatctgactgtcggtaatactgaagctaacggtaccatcatcaccgacattacattcccaagatcccagcatga

SEQ ID NO: 29732 - DNA, 475 bp, Glycine max
  Clone ID: jC-gmst02400025f10d1
atgaaattaatagttgccattatgaatcaattcaatacacagcacacaggaaaaggccccaaagaccatttttacccctatgtgaagagggttctcctctctcttgaaaacacataaatgcattcaaggtttaaattaaacctatatatacacgtgtttccatcacacgcgcggacaccatccattggagtcctgtatagttaggccaaaactagctcatggcctaaaaaggaaacaggaatatatgaacagctcccgcacagaaaaaggaaaaatcacacgtgcacacttaattggcacgcaccataaccgactgcgcacgtgccaaaaaaaaaaggctactatttgtagccaaacttcaacttattggccttcaaatgttctttatactgctgagggtatgccatcaaagttgtaacgtggatgttgaacaagcagtgatgctggacaagaaatgaagctttacttgacttat

SEQ ID NO: 29733 - DNA, 497 bp, Glycine max
  Clone ID: jC-gmst02400025f12d1
cccttatgaacatcgacattttcattcatatatagcaggcatgataagccataacaatttgtttcagcttgcacgaaatcagattcacaagccttaaacaaaacttgaaagcaaagcaaggctctgcttgtagaaaactacaaatagaatcactggtgaaacttagatcattacataccagctacatggaaagaagaaaaccatattaacatctcttcagtgaacatttcggcacgatgagacttctcctcggctcccattgagaaacggcaaagtggacacgtcttgtggcgacccttaagccatttatttacacaaatcttatggaatttgtgcgagcaaggaaggacacggatttcatctttggcctttaaccttgacaagcacacacaacaccaactatcctcattaaaattggatgctgatgctgattcagatgattgctgcttgttattttggatatggctagatagcatgtaacacggtaaagggggggc

SEQ ID NO: 29734 - DNA, 518 bp, Glycine max
  Clone ID: jC-gmst02400025g09d1
ggtgtcaatccatggttatatgtattcaagacatcctactatacataccacaagtataaaaggagggccacccaggacccacttcagggtggatcctctcttgaacccggaaaaaaaggatgactcatgagccctcactaggcagggataatgaataatgaaattgatagcacaaaaagatattttacatcaataaaacatgctacattaataaacatttgaagaacccaacgaacccctcgaaggatatcaattacacccaagaagattttagagacgccagacaaggaagcagtatttcaccattgatgaattgtaacttgaagtagatcaatgtatcaaaaggctagaaaagctcctcagaattgaatttattccaggcttccttgagtagatcaaacaccttttctggacatatttctgctgtagatgggcacccttctgctgactttatcaggatggatacacaacgtagctttcctataggcttttttaacagcagcagctgtaatcaaatc

SEQ ID NO: 29735 - DNA, 536 bp, Glycine max
  Clone ID: jC-gmst02400025g10d1
caagcataaaacgtaattaaattaaaactgcaaacatgaaagggaaattttcacacagatgaatatcaaacttaaaatgactattatacaaaagtccctaaaaaatggcaaaattgcaattagcacataactctgggtggccatgtcatgatcaatgaagagaaatctcatgataatattcaattaaagccattgaaatttaaaccaaggacgaccatatcaacatgtgaattcaatgggtttcttctcctttttgtcgtcaagtagtgcctttctttgccctgcttctgccaactgattcccataacaggttgatcaggagaaactagtcccagtacttaatcatcccatcccagccacatgtcgctaccttgctctgttccaagggatgccactcgcaaccaatgcaaacaccttcgtgacacttgagagttctgtagaccttgcaagtcttccaggcccagaaccaacacttccccttaccattccccgacatgacatattgtccatccggagaaaaattgacctgacatgca

SEQ ID NO: 29736 - DNA, 511 bp, Glycine max
  Clone ID: jC-gmst02400025g11d1
aggcaacaaacaattccctttatagttgaaaacaaatttgaacaattggataagacatttgattgtatatacactcacaagaacaatggatcaataccaatgattgacaaacctcacaaccacaacaatgaataacttacccttcatcctattgatgtaatttttggaatcctcttgaacctctagactggtaaagctccagcctacccttggattcctgcaacaatgcctcgagggtttcgtcctgcgtcacgtttggttgcttggaagcccattcaagcactccaagcaccttagccctagcaagttcctcactgtctggcacatgcaatgcaatgtaggagagcagaactagtgctgaaatctgaactgtctgttcttcaagatacacaagctggaccaagtgtttcgcaccaccggcacttatgattgccttggagtgatcaaggtggaggtagttttccgaggaagcaaatttcgtgagagagatagctgcttccctagacacttt

SEQ ID NO: 29737 - DNA, 171 bp, Glycine max
  Clone ID: jC-gmst02400025h10a1
cacgcttgggtttgctctcgaggatggtttatcaggaaatcatgccacatgcccttgctttgatgactgatgtctttggtaattatgtggttcaaaagttttttgagcatggacttgcatcccaaagaagagaattagccaacaaacttcttggccatgttctgacactta

SEQ ID NO: 29738 - DNA, 461 bp, Glycine max
  Clone ID: jC-gmst02400025h10d1
gaaaggggaaacaaagtcaacaaccatacatgattaaatgaaaatgaagaaaaaaactgccctcgcctaaacaagagcatcatcattttgtacagtcgcgtcaacttataaactaactcaccattttacaatctttacaccgtaaatgggcttgtatagtcataatatttcatttaattttatctctctctcctctgcagcagggggcatcaggcgcattaaaacatctgaggcctcatctctcgcttaaattctttgtataaacttaaaagctacaaaatgtacagtttctgcagtaaaaccgacaactttatttccaattggctacacaacccatcttgagagataggcaaacatgacctcttggatttgggaggggcggaggaagcagcagcagcttacactagccttagttagctgtccaagaatattttttctagccacctaagcaggttgaggag

SEQ ID NO: 29739 - DNA, 520 bp, Glycine max
  Clone ID: jC-gmst02400026a03d1
caatatgaactactttctaccatttatttgatagtcccacagtactatccactacattttgtgcagccaataaaagggtacaggcaacaaatatgatcaaactagccgttgtaatgtacaacaaatacctggttagctaatatgaacaaatgagcaaatgatttaagccaaagaatcataatgagtttaaattactttctacacgactattaaacaatgtttgaagagtggggagccccatgccagggatcaaccaaacttgcagtggcaattaggcccatgagaatcatgcaacaaatttttgaccctgtactttgaatccatgtcatagtccagcaatcgcatttataagagttgccaatcatcctcattggttcctgtatcattgccacggtccatgccagggaaatcttcctcttggaatccaatgttgccacctgacacatcattactggtgacttgctttgagaaactccgagactgagttacagtaaacaatggtgcaccatttgattttttt

SEQ ID NO: 29740 - DNA, 283 bp, Glycine max
  Clone ID: jC-gmst02400026a05d1
catgaagcatgcttttcttattgaccttataccgtcgtcaggtacacatggaaattatacatgaacaatgagtgtcagaaacacattcactaacactcttttttaacacattcttctattgcttaaaatttaggtggatcctactaatttgcgaacaatacccaccatatagaaaatgaaactcaccggacttttaactaacaggagatgtatgccacagacagttttccaatttacctactcgtgcctacgacactatagctctgctataatgtagcataaa

SEQ ID NO: 29741 - DNA, 505 bp, Glycine max
  Clone ID: jC-gmst02400026a06d1
cctctaattctattgcaatgtacaataaatatgaataaacgagattaattatggacttctccccgtgaatttttcctaattgatgctccattccaaggaaacatcgttgattcaatggtctgtagtttcctcatgcatctttaatcagcacaatgaactatctatgtgtagttcattatatcattaatctattttgcattgccatttccaaacgcaggactatcatcttgaacgattacttcaactgggttttcctttgcccagacagcggcatctagatatccaagctcaaagagtcggtcaagaattgcatcttctgctggttcaagtgcccagttgaaaaactgtcgtgggctacacacgttttcaggattgcagtctggactaattcctatcccttgcaatcccaatcgacttgctggaaaagcacaaacacgaaccgtttgtgcagcagatgtcggtggcataaacaatggtcaaccaccatcaatgcatagtcgattac

SEQ ID NO: 29742 - DNA, 424 bp, Glycine max
  Clone ID: jC-gmst02400026a08d1
ggtaacaaattttaaattcatccatgaccatgaatatttatacagactggagctgctgaaagtgatgttattctccaaattaatttgagcaccttccattcattaataagtaataactaacatataaaaagcacataatgcaaagatatatgagaacaacatctacagaaaactcaagtcatcaactgataactttacttgcacaaaagtgcacaaagactaatgcaaacactgctgacttgcaaatgggggataggggaatcccgtattttcctctagcaaacagtgctttaaaatatgggcagtagcacactaccaaatacgtactacagatgaatttcccaagtgcactgccattaccactatgagttggttgcaacccccaaaacttgatcaacattgctgtcaaatgcaccaacaaaat

SEQ ID NO: 29743 - DNA, 471 bp, Glycine max
  Clone ID: jC-gmst02400026a10d1
cccccggggattgcccccaaaaaaagggccggggaaaatttaaccccaagggccccccccaaaaaaaaaaccccccgggggaaaacaaacaaaaggggggggtttgccggcctttttttcacccaaacaaattgccgaatttgagggggggtttggggaatttttttttttaaaaaaaacaaggggggggggaaaaaaccttttaaaggcccaaagggtctccactggggcaaaaaaaaaccccccttggttttttgggggaaacactggtccctttaaaaaaccaaaatttccccccccttgggtgggggggggggggcatcaccccccaccccttcaataaaaagggggttgaaacggcttttttgatccctaaaagccaagagaacctcgggggcccgggggaacatttggaaaacccccgggggcccaagaaccttgggagggggggcgggggggccccccccccca

SEQ ID NO: 29744 - DNA, 417 bp, Glycine max
  Clone ID: jC-gmst02400026b02d1
ccagataaaaaaagatagttaaaaataaaataaattctgaagtaaaaaatgtaaatagtaaaattattttacccacaatacatgaaaattaaactcctgaatatatacattgcacaaactacacagatgttcatttatgttaacaagatagaatagaaatagacttgaagcagacaagattcatggcttccacaacttcattgtgcagtcttcactaaaagttgcaacaagattcctatggggatgatgagtgacacctataacttccttatcgtggaccttcattagatgctccaatttgccagatagatagctgaagcagtatatattcctatattgaccaacacagtaaatccattctcctttaggtgaaacacaggctgcaacaaagtcttcgtcttctttttaccagatgag

SEQ ID NO: 29745 - DNA, 484 bp, Glycine max
  Clone ID: jC-gmst02400026b03d1
atccgtgcttgttcatgagtcagacacttaacaaaccatcaataaaaattagccaattcagttattaagtcctaacgttagggccgtgtataatggtagacaaattaggcattagcctaaggcccctaaaaaaaaaatttttagacccctaagatttttttattgctaactattaacaaattttaactgatcaaaatgaaatagtttagaatctctctcttacctaaaaattaatcaatcaatattatgtttttaaaaattaaccaatatcacaattaatgtcatttaaagtattttatttatcccaaaaaagtaaatccctattaactttcctttaacccatcacaattccctaactaacggatctcactcttcagactccatttttcacgtgggttcatctcctcatcttatgttcatgaaaaaaatgtattcttctactttccttgaatgaaacatattggctattgatcaaactttgttt

SEQ ID NO: 29746 - DNA, 534 bp, Glycine max
  Clone ID: jC-gmst02400026b05d1
ataaattatttactatttaagatttgaaagcccattcgtctcatattgtacaaatatttatacatcaatatcattatggtgacctcaccattatactctatacagcagaaattaaaacaccttatatacagcattacattgccccatactccaatgattcccagttgaagggctggaacacatagtaaactctaggtgagcttttgaagagcaaagccacacagacacacacagctgctatggtcaccatggtgagcataactggccaataaaccattgctgttctcatgcccgacattgacgtggcattgttgttgtttcaatcttctcagtctgcaagcttgaaactctacatgtcctatgtccatttgattgcttctgcgtcgtgtaactatctacaacaatgccagtgatatcaaccacatgctgtctttcaccttatttgatggtcttcttctggactagttgaatgtaagagtaataagccctaaagcatgcatagtcgttaggggacaaacctgtactgtccaggga

SEQ ID NO: 29747 - DNA, 451 bp, Glycine max
  Clone ID: jC-gmst02400026b06d1
acttcaaaacgctaaaatatatcaataatatatcaggtttcattctcctcaaaaccatcaaataataatagaaaattttctccgaggactaaagcaaacaactagaagaaaatataatatccctacacaaaactgaaatttaaaaaataaacagcaaatggagtataagtttgtaacataaaactgaaccaacaagccccaaaaaactttggaatttgctttttaagttcgggcaggagctcctactccagcaggacgtggggcttgaccaggctgaccaggccttggtgcatcatccctgcgtctgataaatcgctgtggaggctcacgcattctcctatcagtgcgggatcgaaccctaacacatgagagtggatagcacaggaaacacaatactgcatcttcacataaagctttggaagcgtgtattgttcatagacacaagccttct

SEQ ID NO: 29748 - DNA, 419 bp, Glycine max
  Clone ID: jC-gmst02400026b08d1
acaattggtgataccagctaccaaaatttagtgttgatagcgataagtaataagtacattaaacctcattgaggtttatgacaatcatggcccgaacgcgagcatgagaaaatcataatctttatggatccctaggaaaccttaataaactcatctacaaaatcatagtaatggactcataacttcgtaatttttcagcagatgcattattctttttgccccgaacgcgagcaggttgcttcaactacttatgcatccaaagcatgtgctgttgatagtaggtgtagccttgcctttgttctgtttttcccttgcttcattagctctataaactccctaaaaatgtagtcagaatcatgaggtccaggggatgcttcaggatggtattgaagagacataagctgttgagcagggaaagc

SEQ ID NO: 29749 - DNA, 542 bp, Glycine max
  Clone ID: jC-gmst02400026b09d1
gtaatatcttcccctttattgtatatatgatcaacaatctgattcaaaaacaacattaactctgtggtgctgtgaaagccaaattattgtctgcaaaatagtattgacctctcctcgtgctgaaaataagaccagatttggccatcaagaagcttgaatccgcatccctcaaacaagccacaaagtccttatcataccttcctccatcttcatgttttttgaagaaaggtatgtcctaacattactttttaaaaaataatacgataaaatatacagtttactccacccatagcacatcaaaatttctctcaaagaatggataaaaacctacttaaatcaacatgaaatttatctagaatgcaaaacggttgccagttgcatgcaaaaacctatgagtgtgccaccctttgttctgcaattcccttgagaatacaggaaagacaccattcattttctgataagcctcatgcaggacactaagagcactgagctcatgagagaaactatgtgtttgtgcagcatatgcagcaactagccacccc

SEQ ID NO: 29750 - DNA, 493 bp, Glycine max
  Clone ID: jC-gmst02400026b10d1
actatataaaattgagcaatttccataacagactgtactgaaaacagtataatccagcatacacataaagcccaaaaaaataaatccaacatataaaccagattgtctagcaaactgatctactcactagtaatactgagtaatctagctaacgagaatatcccttccaattttccctcctattgttcctgaatgcacagcaccctatggagtatacaataatgagaagaacaaggaatacgatgttaacaacagccaccctcttccattcagtcttgaagttttgcagaaagccagccttgcatgattggcaattgaagcacagaactgtttgattgttattccaagcatcacagtcaggattgttgtaactggtcacatttccaggcttcgtgcagctcgttgaattctcataggtaaataggcattcttctgcaggtttacagcatccagactgaagcgcggacaggtgctcggtgtaaaactgagtaac

SEQ ID NO: 29751 - DNA, 370 bp, Glycine max
  Clone ID: jC-gmst02400026b11d1
agttattccgatattcggacgcatcaccttgttatgaaatcacattgatagcctctactcgtgtcctagctcgtctaagagctagatttgcctcaattgttagtctcttgccttccgccttattcaaattagcttctgctatttcaagagtttgctgtgcttcttgtggatcaatgtcactacccttttccgcatcatttactaaaacagtgatctcattattgtttattctagcaaaaccgcccatcagagccatcgttaaccatttggctttaagaagacctattctcaaaatacctatatctaccgctgtggcaataggcgcatgatttggtgatactccaatttgtccgctattagtagataaaat

SEQ ID NO: 29752 - DNA, 169 bp, Glycine max
  Clone ID: jC-gmst02400026b12d1
attcattcttgtttacaggccaataaaacatttcctttttttttaggagggagaacatatagtttttgttatgccccatacaagagcccccattgaatggggttattgaccccaacctacccaccacataatacctgttttgaaaaggaaagggggagggtttaaaaat

SEQ ID NO: 29753 - DNA, 590 bp, Glycine max
  Clone ID: jC-gmst02400026c01d1
gttaaacaacaaatgtccactcaaatacttggatatatagacaatgaaattttcaacagaccgggcaaaatagcgcaatcagcaaagtgcaaactcaacatttgcaaatagtatcccacatataaaatggacgaatatgttattgaggagttaattaaaactaagagcagagcataggctaccccaatttcaagccgaaagaagagcacaagtaaacccatcttgcacaagttgattaaccgcattcctgaacttataatagtcctcaaccttgttgtaaacctgacgagaaattcgtgcatacgcagtaacagagccatctttcccaccacgaaaataaattggtacttcaacatcaaattcatccctcaaacgggtcctaagcttttgagcatcagagtcactcccaatacccaaagaaggaggcaaacccaccatcaccatgctagcactcatatgcgaaggactcccaaggtgggtcccccaagccttcaccagcatctcccccatcttaacaaccaaatcatggttcctctttctgatcccttgaatcccaccctggaccttttcacgaactccataaccgccga

SEQ ID NO: 29754 - DNA, 462 bp, Glycine max
  Clone ID: jC-gmst02400026c02d1
cagttgtaaagtttggaccctaatgtcacataacagaaaatgttaacctacaaaccgatcaatctctatatactgtacaaaaatgtgtgaattgcacatccttgtcagcactttattttttaacagttactcaattacaagaggaaaaaaaactatgatatttaacacattgcagtttgatagaaggtgaattgaagaatatacaccttaaaagatttttctacacggaaaatatcccagtcagccaaaaaaatcagtcatccaaaaaccagaaatttcagggacctggcttccaaatccatcaactccaatctaacaaaagaatgtgagaaaaagtttaacaatcagtagtcattaacatttggttgtgaccatggccattaagaagtcctgtaatatataggtgtggatcattgtgattcacttttttcaggaacttccatttgaggaggtaagaggttt

SEQ ID NO: 29755 - DNA, 490 bp, Glycine max
  Clone ID: jC-gmst02400026c05d1
aatcaccttaaacaataaaaacattctgatttctgagtgtactgcaaacataaaaaccaattatgcatataataaatataaacagaaactgactcaaaaatccctgtgagaaaagatgcttagactatcgtcctcctaactcgaggcacctaattcttggccacaacatgaaaatcgaataaaaggaaaaaccaaaccaagcagaacctacaaagttccaataccatccgccaattgcataaaaagtctggcttccaaggtgacctaacggagaaacttataacatactcaacttacaaatccattcattaaactagatatatctattaaaaacccaaagcttcaaataccaaataagtcaaccaaactttactgaaatatggcacaggactgggtgcatgaagaacttgatcaccatccagctcgacttgacccaactttagaagcactttcgatgaacgatggctggcccagaatcatcatattcacc

SEQ ID NO: 29756 - DNA, 482 bp, Glycine max
  Clone ID: jC-gmst02400026c06d1
ccatcatatcatccatcttctttttgttcctttctttgtgagaatgtgtcgttaaaatagctctactcttaacgcacatgatccttaacactggcaggtacagcactaccaaacaattgagttttcttcctcagctaattgatatcagcaataagcaccaacacagaaggtgtcgtaattgttttcaatgatagatagtcttgaaaactccacccaagctataaaatcatcacccaccaaccttcaattctttagaatcaaccctttcaatgtcctgcatttttcaacaacttcacctacaccctttggtgtaacatgtcagcaactctggatgtccacaagtagtacgtccactacacctcttcgagattattgagagtgcttcatcctcgattcttgaccctgacaacttcaacacctcaagttgagaaacttcaagtccatcattttaaacactttcattcctgtataggccaggttca

SEQ ID NO: 29757 - DNA, 494 bp, Glycine max
  Clone ID: jC-gmst02400026c10d1
gatgattaaactgagcaatgaagatgagaccgctcaatctttcactaataactgcaagagtaaattaaaactctcgcaaaacattgatatcgttacaaccactgatccaagtgacccttattttagaatacagttacacgcacaagtgcacaacacaagaccataggtaaaaacataaatggcatgaacaatgagtcaaagcaatggcagaacaataatattaacgccaccaccacttgtaacagtgcactcagttcctctgcagtagcagagaaattagacatagcccctgctctgtaaactctgcactgcatccttgatgatttgctcaacaggagtgaattctagacctaaatcaatcagcttctttgatgcatcctttccacttgctgtgaacaaccctggttgggtatgctgtggcaacttagccacatcgtattcagggtataactcagcaaccttgtccacaagatcactaaagtgacgaatagatt

SEQ ID NO: 29758 - DNA, 459 bp, Glycine max
  Clone ID: jC-gmst02400026c12d1
gacttaaaaaagcacactgcatattcatcaaagcatcatcaaagcacactgcatcctaacagcacacgtacgtagaaaggtgaagttccaggtcttgcacaacatacacaacacaccataatttattttatatacaatcttatggggcccaagatgcagatgcatggactaattaaacaacaacgttagtctgataggcagtatccatagataaattgggtacccataaaatggccttgcttccaaggaaatggcaaacagggttagttccaggatcaactcccatgagttcatgaagcatgtgatgattcattccagaagtatcttgagtggcaaacagcaagtgcctgagttttggttccatcaccagccaccaatggaaccatgaaaggtgttggttcacggactttatggcagtaaaatactgcagttctgaaattaagcccatgacacatcact

SEQ ID NO: 29759 - DNA, 416 bp, Glycine max
  Clone ID: jC-gmst02400026d01d1
ctgcaaagatctggaactttatggaacatactactagaaacaaccttaacaagatcattccctgcaatgaaactacaagaattctgcaaattaattaaacacaagctttgacataaagaatctaacgaatacaatccaggagtataaactaagggccttgcccaacaaaatatactcatacttcaatctgagcaccactcttgattaacaaaatctcactatttttttaacaattacagataccaagcgttaaaatcaacttctgcttctgcgcatttccctaaggccatttccattagcatatggtacctcttaacgcccacgataaggaggggacctgcttgtgctactttcacaaggtgtcaaactacggcgcctatgggaccgaccacgaggacctgaacttcttttcccat

SEQ ID NO: 29760 - DNA, 458 bp, Glycine max
  Clone ID: jC-gmst02400026d02d1
ccaagctgctaaaatacctatgcgagtcttatttcatcttactgtcactacaatttagctaagcttctaaaaagatatatgtgggtaattctatgcatctatgaagggctttacaggatgaatcgccaaagaacaatgaagaatcgactgaagcaggcagattgatcaaataatgcctgtcctgttgagtgatgatctttaaatcttgggctacgcctgctgattgcaacgttgcaaaatagggaggccaaagctcaaatattcggtccagggacttcggtatcttcccattgcaatgtgcaaccacggcttactaattccatcgtcaagtataagggcagatggctcaagctcgattgtatcggctactgagtcatgaccaaggccaagaatgcgccaccgtgtgtccaaaagcttactcttgtttagaatgtgagccagcctaaaggcggacttcc

SEQ ID NO: 29761 - DNA, 466 bp, Glycine max
  Clone ID: jC-gmst02400026d03d1
aatcaagaacattttaagttaaaaatcatccaatattcaatcgagagacatgcattggttccaattaaagtgcagagagacacattgaaacatgcgtaaatagttcccccgattagtaacagccgcgaagaatgctaccaagaaaataaaaccatacagggcaaagtggttctcaaagattacttcttctcctcctcgtttgatggcttgtcgtcattcttctgttgaggctcagactgattttgcatggaagccagcaaatccttgacagaagggtcatttgggtcaaccccaggaagcgatgcaaggatagaagatacaaaggattgatcggccaacaatttgctcatgtctgactggctgccttgatcctttgtactatctgctattgacaattggagtgccagagccaagtcaggatcacttgcagaagcttctgacatatctggatcttttacatcatggc

SEQ ID NO: 29762 - DNA, 405 bp, Glycine max
  Clone ID: jC-gmst02400026d04d1
caacacaaaccaaacttattttcaaaggtcattacagacccattacacatcacatttcttcttaaaatgttggggaaaatccaacatcgaacatcacacagaaatcagctccagtttaaaaccccccacgaagacccaacaccaagggcaaagttgactccttctggatgttgtagtcagcgggggtccttccatcctttagctgttggccagcaaaaataagcctttgctggaccggtgggattccttcctggtcctggatcttagccttcacattgtcaatggggatggagctttccacctagagggtcatagtcttacccgtaagggtcttgacgaagatctgcataccaccactaagacgcaacgccaagtggagagttgactccttctggaggttgtttt

SEQ ID NO: 29763 - DNA, 388 bp, Glycine max
  Clone ID: jC-gmst02400026d07d1
aattaaaacacttggggggaaaaccccttttattttttgaagccacaaagtgtaggggaaccaccgtgaacaccgggaaaaattaatgggtcatcccaagggttttttttaggggggagacaatgtaactcaaaattttaaaggattacaagcccatttgaacaagataaaatattgggttttatcaagggataccttctttttaaggggagaatgcttaggtcctcaggggggggataagcagggtccctcctcacttcttgcagaggggtcgaagtttgaggcatttggatcattacaacctttaggaacgggaattttctcttgcagggccgctttggcaaagaaaggccctcttttggaggcattctggttggcattaccaaaa

SEQ ID NO: 29764 - DNA, 383 bp, Glycine max
  Clone ID: jC-gmst02400026d08d1
aaaaccaaaaattgtgcacgaagcatcacttcataaacctatctgattgatacactattgtactcattacaatctgggtctcataactagcaaaatcttgactacacaataatttgcaaagtgggaacgcctctctgttaattaaaataagaactgaaggatgccagagatcaactattgcagtgtagacgtgggaaacagaaatagacgatgtacacaaaagggaacaaggatgtacagggtggtttcctatatgatatgtttcaactcctgcatgatgagtcgaatcagcacaacatcgatttgataggttaatgtaaatcgttagatccaagggaaacagcatgaagagcttacacggttatattgataagcaactattt

SEQ ID NO: 29765 - DNA, 514 bp, Glycine max
  Clone ID: jC-gmst02400026d09d1
gaatagcaattttaattaggaagaagtaagtagatacaatatatatagtagggaaaaagaataagaccatctaattttttaattaatttacattattccatgtttatacacttataaattattccttaattttcaatatatcacgtgtaataaatctataaggccaaatttggtaatcccgcgggttactcttaaactcgcagaagctgccacggccacgtttgaaacgccatgttgcacgggaatgaacatagaacatagttgaggtagttggcttataagacataggtatggaggtctacatttgtggtctggtctggacaacatagacttttgcatccttgatgacaccttgaatgtcctgaggagtgccatacaactctttaattttattttctgcacgggcaatgctggacaagattgactggcgaaaactgccatcaaggatcagtttgtctggaaaataatcaagcaccaccttctcggctttatacattggcacactgtcataaga

SEQ ID NO: 29766 - DNA, 426 bp, Glycine max
  unsure (1)..(426): unsure at all n locations
  Clone ID: jC-gmst02400026d10d1
gaatagcaattttaattaggaagaagtaagtagatacaatatatatagtagggaaaaagaataagaccatctaattttttaattaatttacattattccatgtttatacacttataaattattccttaattttcaatatatcacgtgtaataaatctataaggccaaatttggtaatcccgcgggttactcttaaactcgcagaagctgccacggccacgtttgaaacgccatgttgcacgggaatgaacatagaacatagttgaggtagttggcttagaagacataggtatggaggtctacatttgtggtctggtctggacaacatagacttttccatccttgatgacaccttcaatgtcctgaggagggccatacaactgtgtaatttcatttnctgcacaggcaatgctggacaagattgact

SEQ ID NO: 29767 - DNA, 119 bp, Glycine max
  Clone ID: jC-gmst02400026e02d1
cagattcaaagccattatgatacatacatacagatgcgaccattatctttttctatgtacaattattgttattattccatatataaagttttctcctgaactttagcccttgggccaat

SEQ ID NO: 29768 - DNA, 520 bp, Glycine max
  Clone ID: jC-gmst02400026e03d1
ggctctccttttttttttgaatagattggttccggcctaccaattttatagcaaacactttgatcttaatgcatatagtaacaattgacaaattcttgatattgacaataacattgattttgaggatacatatttgacaatgacaccacaaacgcattgaacccaagtgttgattactttctctctctctctcattctctctctttaattaacatcttattctgttggaaattatgaactggaaactggacatatgacgcacataacttttttgcttgcttaactatatagaaacatgaaatggttgatgtgtatagatctcactgatattatcccttaagcttcttacccatgcccacaaagtactatccttgatgaaaagcttgagccaagtctaactcatttggtatgttggaaccatacccggcataggtacctgcaccataaggggatccaccctttacatgcttcatctgaaacattccagcaccaaatgtgttaccaatgggcacaaaaatca

SEQ ID NO: 29769 - DNA, 437 bp, Glycine max
  Clone ID: jC-gmst02400026e04d1
aagctcagagtacttcgataactttatattattttacatgcatgcatagcatatatagcctgctttcaaattagtcagcaggaaccaagatagagagatcccacgatctttaaatttcacatttgccataaatatttatacagaaaagagggtttgggatatgagttaagttttgatcttattcaactacagtatcccaaaccattacttttaagactttgaactttacttggcctccaggatcatgtggctctcaagagctaattccacacaagcccttaggatgttttccagcatagcattgatgctttgacagggcattaaccactggcgtactcgggggaaccagaggggccctggacaggtaaccgaggtaggtctcaactgggtggaatgagcggaactttgccttattttcagtgttaaagctccatttc

SEQ ID NO: 29770 - DNA, 449 bp, Glycine max
  Clone ID: jC-gmst02400026e08d1
acgaattatttgttgtctggtttgctgaatttcatatgccaaaagtgggaatgaaagacaatgagatcctctctgaacagtttcaatgttccgcaatatcaccactctatacacacattttcacacaagtgaaatcaatttcctcccatttatcattaacatcccaatgctcttctacaccatttaggcctacttttttctcaatttctctgtttgtaacttaacactcccgggctgcaagcatttattacagaatcagtgtagttgttaaggatctttctgtaatttcaagcctcactagttgggtagagcatcacaaaacatgtcatttatgttgtctcaaactgatcattgactagaatcctcaggtgggtcagcagggaagacttgttttggcaggtgtgaaactttgagtgagcctccaagctctactggcacaagagggatca

SEQ ID NO: 29771 - DNA, 461 bp, Glycine max
  Clone ID: jC-gmst02400026e11d1
atggggtgcagcacgtatttattattttattactatcataatgaacagctggctatgtgggccagaatggagtacagaatataacatcctaatgccttgaaatttaattaccacacaggagaatctcctgaaacggataaagaactcatgacctctgaatgaaatataaatcaataacaagggatcatcacatgttgagttatccacacaaacaagagaaaactattggtgttccttattcgtcactcttccatttctctgttaagatcatgttcaccacccagtgaagcagatggccaatgatcaatttgactccgcactaatagtgaggttgagtcttgaataggggagaaaccattgggtccataggtggtaggacattggttccttctgtaagtacttgcagctcttctctcagctgaagggagtggccaagagagggtgcatgattcccaatcact

SEQ ID NO: 29772 - DNA, 261 bp, Glycine max
  Clone ID: jC-gmst02400026e12d1
attgtgtgctttacttatttatttttttattacaaacacaacagacattttttcattttggccagcatactactctattaaataacactgccatggcagagaacaaacattcctcacaggatattattctgtaacgcgtaaggaactacttgcgtattgtacatatatcacttggtcacaacgcaccaacaaatttttttttattcacacaaacctgggaaaactataggaggaacgtattccttactcataccttggggg

SEQ ID NO: 29773 - DNA, 424 bp, Glycine max
  Clone ID: jC-gmst02400026f02d1
aatcaaataacaatacaatcttatttaattaatgtttgtacaaactttattcccatagaaacatgataaaggatcatttaattgataataaggactcgaaaagttttcagggttatcaaatgtgctctgacacaggcaacatcgtatcagcaccttcgcactaccatgtgcacgatatattagcccttgattataacgtgaaaagatggggaacaaagaaagtggataattacactaaacaagaatcctgataccctttttatcatattttgcagcgccttataagaacattgactagttagcagacggggagagaggagaacatgtactttccaatcattaacaagacttaggcccaataaattgcattcatgatcactcttgggtgctgattgactggagctctaaacaattgttttctgtg

SEQ ID NO: 29774 - DNA, 412 bp, Glycine max
  Clone ID: jC-gmst02400026f03d1
gggtcaaaatcagtttttttaaaaattccaatgggccctgggatatcttttattttgagcctgttaaaaataattgataaggccccaaacaggtatcaattacccctttatgagatagaactgcaagtttttatgaacaagggaaactgggaacagactttatggaaagcaacacagattaacaccattaagcattacacacccccaagttttgctcggggtcctaaactttgaatgtcaaatgcccttaaagaaaaaatgtttaatctttttttcccaacaaagagggaaggaactttttggaagcccctgggatttgcttgggaaaagcccgcttaaaaaaaaccctgtttttattggatgaaacctttgagaatatttttcgggccctatagggccgggttaaaaaccc

SEQ ID NO: 29775 - DNA, 406 bp, Glycine max
  Clone ID: jC-gmst02400026f09d1
caatatgacagtccacaggttagctattgatgtggggcaactaaaacgagttaaatagtccaggaatacaacaccaactttaagcttggtccaaaccagtctggtgaagacttgactatttgacatgagtggcattactactgcacaaatctggcgtagtctttaacattattggcatttacttactactagacaagtctgacaaaggcattattaacataagtcactcaccaagctgaataagctcatatgctgagatacatatactgtcaagattttgaccgacgaaacataaatattaatgataacatacacatgagaaacaggtgttcagttatgtgatgatagacttcaacggttgccttgattatgatccacacagcctccattttcaggggagactttt

SEQ ID NO: 29776 - DNA, 405 bp, Glycine max
  Clone ID: jC-gmst02400026f12d1
ccataaaaataaatcaatgacctttaatttaggaaacatttgataaatgttacaactgaatatggaaagacccccccctacaacataaaaaagctttttttttcgtataaaaggtctccaaatatgtctaggggccccaagctctgggagaaaatcacattggagtagcacatattggccttgataattaataaaaaattcctactttttcataaaaatgcaataaataaggcatgggctacgttggctacattgggtaccaaaaccaagggggaaattaccatgtttataaataaaatcaaccattgaactttttataagtgcccctataggcggaaacactcttgttaatgcaattgaataccatacaagtttaactttgcccgggctttgaatgactttttt

SEQ ID NO: 29777 - DNA, 500 bp, Glycine max
  Clone ID: jC-gmst02400026g02d1
gtgaacaaggagtatgctagatactttcttagtcaacttgacaagagattataaaacaatcagcataaacactaagcacaataaacaatcagaatgttttcactgtctgaggaaatttacagcagcccaaatggggaagatcatgataatgccttcaacttgtctgaacattcgtcatgatctgctggtgctttgaagttcttcactgatttacccaagacatttaaaacagcatcacgctgcaattctttacctagctctaatgaaagctgaattgagctcttctctaactcaacagcatgcttgcttagttcaactgatgacagggagcgaagcatttggatatattcttcttgatctgattggtccaatttcctcaaaaacatctgcaattgttggtattgctctttccagtgcaaaatttttaatccctttggattaccaatgggagttgggcccaaagaagctgttacataattggacttaactgggggaaactt

SEQ ID NO: 29778 - DNA, 540 bp, Glycine max
  Clone ID: jC-gmst02400026g04d1
ggagaatgagaattttctatacaaataacaagacatacgtaattacatgacaagtttttagataattcgcaccttctcactggccactccgatctcttcactagaagaaatgatactattttcataaatatcttcaacatcttgcttacataccaaacgacatccgcacctcactatttccaatgattggcaaccataacttttcaatacaaattcaatttcactgccgacaacaccttcacaaatcatgtcacggtatttatcaatggacaagtagagaatataaaggtgagggcaatctagctccatgggaggtaaattcctggaactgataatcgccttaccattaggtccaaacaagtagcactcaacttcatgatggcacgcctcaggaggatttacataacttactaataggaagcacagagcatatcccacccattcatttacagggcaattatgagggactggtattttagcttatgaaacacattcttgagggacaaaccatgatggaattcactccctgggattaacatc

SEQ ID NO: 29779 - DNA, 475 bp, Glycine max
  Clone ID: jC-gmst02400026g05d1
aagattaaatactggggtccattaaaccgttttcatataagtcttcaaagcaaataacacacaatgttctgaaatccataatcccacatcacatggtaaaacataagaacacattagaaataccacaatcacatccacacgactcagattatatattatgcctaacacatagtcaggcaggtaaaatttgacacttaagactccaaccgctcagaaaccatgaatcttgatatgatccttcttcacgataccagcctggactaggaaggtagaaacattcttcctctgatcaccttgaagttgaataacctgtcctagttctgggtcctgaacaactgttccattgcaacagaactctttcttgacgtctttaagtatcttgatatagctgaattcctttttcaatccctgaacggttgtcaggcttttcctaccatttcgatgctgtacacgaatatgcacatacttctttgac

SEQ ID NO: 29780 - DNA, 392 bp, Glycine max
  Clone ID: jC-gmst02400026g08d1
ggacccataaacgacattgcattagccttttataagcatcaaattaaacctttaatgataaatcaacccatccaattttggccttcaaggatcaatttgaagttatttgaaggacccttttgataacccaatgaaacgaacattggggggaagggggggaaccgatttgatattgcatgtcttttagggtacaaattcatgtttttgtaaattatggggcaacataatattgttgcatctattttgaaagacccaaatagaaagataccctacacaggaggttttgagaacttgtgactttgatgaaaatggggcaaagctcacattaaccgacatttcctgaccaattcatataattatgggacaaccatggcccctgatgggaaccattt

SEQ ID NO: 29781 - DNA, 374 bp, Glycine max
  Clone ID: jC-gmst02400026g09d1
gctgccgcccttttttttttgtttttttttttggaagggggaaacactgtcaacagccatgcttgattgggtgaggacgaagaaaaaaactggccccccctaaacgggagcatcatcattttttaccgcccccttgaaatgtgcacctaactaggctttaaccttctttacaccgggcttggtcccgggtagtcatgagctccaatttgcttttggggggaggggctctggtgttcggggaaaaaagagctttaaaacctttcccgcctcctgggaagggggggttctacctctaaaaaggggagcccctaaatggcctgggtccccctggtgcccccatttgttttgcataggcacacctccctttttgtgag

SEQ ID NO: 29782 - DNA, 447 bp, Glycine max
  Clone ID: jC-gmst02400026g10d1
cattcttcacctcctgctcatatttctgtaacaaagaagtccacagagatttacactgcccaggacttctgctgatcccattagccaacaaattctgagatatttcttcccagagggccatccttcccttcacaacttgaaatctgtcattcagttccccacgcatatcaatcagcttcttaacttcttcatgtttccatttatttctctttgctgattttgaagatttgggttcagaatctgatgtatttacagaattgcattcttcagtgtcttcagaacagtcatccttcaatggggatgacttctcctttcgtggaacataaccattgttagttttaattgacttctcaactggagaggattcaacaaatggtttaaaataatcatttggatcctccgcatcagacaagccatcctcagctccacttgagatagcattgtctt

SEQ ID NO: 29783 - DNA, 292 bp, Glycine max
  Clone ID: jC-gmst02400026g11d1
cccccgcccaattggggaacaaaataacatccttaaagaaaatcatcccccccccaaaacaaaaaaaccccccaaagccccacaaggggttttttttttcccttgggggaaaaaaaacccggggaaaaaaagttattttcaaaaaaaaccttacctttacccccaggagggcaaaaaattccaagggggggggaccccctggggcgggccccaacccttgggaagcccattgtgccccaggggggcttttttgtgttttaaaaaaaccccaaggagccccttgaaaaacccc

SEQ ID NO: 29784 - DNA, 296 bp, Glycine max
  Clone ID: jC-gmst02400026g12d1
aagattcaaacaagggggacccatttttcccttaactgaaaggaaacctgtaaacctgaaccttttcccccttgcctttgggtcggcatggtcacttttcttcttacatttttccaagctttcattgctgcctaaacaatctaaaaaaaaaaattaaaacacctcttaggttccctttaaaacaatattttttaattaaataatttacaaatgcccaccctgcttgcttttttttggccgaaaaaaatttggttggggaattttcctcaaaacatcctccaagaacagggttccag

SEQ ID NO: 29785 - DNA, 403 bp, Glycine max
  Clone ID: jC-gmst02400026h01d1
gttaacaatgtttttctttatactcttttattcaactttgacaagacattttctaacattcagcataaacacataaccacaataaacattcagaatgcttacactgtctgaggaaatatacagcatcccaaatggtgaagatcatgataacgcctacaacaagtctgaacattccacatgaacagctggtgctcagaagttattcactgatttacccacgacattcaaaacccccaacacactgtaattctttaactgtcacccaatgaaagcataacaggtctcttatccaactcatcagtaagcttgcaaagtcaaactgaagaccatgagcgaaacactcggatatattaatcttgaactgattggatcacatttctcaacaacatctgcaatatcttgg

SEQ ID NO: 29786 - DNA, 482 bp, Glycine max
  Clone ID: jC-gmst02400026h05d1
aaaaatgtatactctctataatttgagattattacatatttctagcataaatcttgagagaacattgttttttgtttcatcatataacatatatatgttctgcaagaacacatacaagtacacacaaaaaagggggaaattcatacaaaaatactgaaaagcctaacacagaattgagcaagagggaaggaaccatagagaatattttagcaatcagatcataagaagccagtagaagcgcaaaagtcccttgccaagagtgttggaacccctttaagttaagcaggtgccttctttcccttgagtggcttcaccacttcccatgtgaagtcagggtcagctctgtcaaagcgtacatatgcagtagtgtttaagaacctgccatttacaccccttttgagatcaaggttgatggagatcatgccaggcctgaagccaaaactctgctttacaatgctgaggatttccttgttagggatctt

SEQ ID NO: 29787 - DNA, 417 bp, Glycine max
  Clone ID: jC-gmst02400026h08d1
aaggccaaaatcaactattttaaaaaataactataatttatggtcgagattatccctactaaccaattcgtagcttctgatgttctaaacatttaacaacggagaaacttaggaaaattttacgggtatataatcaaactaaacacccaaatttagggcacatcagtaacattccgctccccagctatagtgtagttctaaattccacgaagtgttttgattcccatatagtcactcaagcagttgagcatcttgattccctaccaattgatacagataatctttataggaaactttcgatgttaagttcaacaaaggagcagggatcaggaatgtcaaagttgtttaatacctctggatgaacaatgccaaaagtgccaatatgttttcctttgtaaatgattctagcttgtctac

SEQ ID NO: 29788 - DNA, 473 bp, Glycine max
  Clone ID: jC-gmst02400026h09d1
actcgaagcattaacttgatttgcttatcttgacataggttgaatagaagcaagcataatatcaaattaaaggcatagtagaatgagtagcaaatccattctcatccagcatggacagagaatgaaatcctcctactttagtattcctaattacaatccaaaccatataggcttaattaaacatataattaatagagtatcaaggtccatctcgatgtaaaagttggcagacagaaagcagggagaagagagatagagagtgatgagattcacctatgtcctaaccatggttggtgagtaagtgaagtacccaagggaaccaaaatatctcccagggttccatgcaagtgttttgagttccacatccattgacgtagtcctcaagatgatgatgaaatgtactacttatgctaagcgggaaattaaaacactatccctcctaaagattagtggattgggcttaaactcccata

SEQ ID NO: 29789 - DNA, 460 bp, Glycine max
  Clone ID: jC-gmst02400026h11d1
gggtatcttatcccatttcttgaagctgcttattttttgcttcaaacaaatacaatgtaaagagaagcaaaagttaaaacaaaaaaaaccctacaatatcatataaacaatccatctaatgttggctccccgtagtaggatcgatgccacatgatcgctgcgttcttgttctgtgtacttccctttcatgagaagaatttcagtaattccttatatatctttgcagcatattcacaagaaaagtaactctttagagtcactgactctgattatgcaacaccttaaagaatgaccaccctttcttttttatactaacaagctgtgattagccagaactatgttgaaaacactataatacacgttgatatgaaggcacagaagctgaaatagccgaatgaagtgccaaacccttctaggagttgggaacaatgggtgccacatatgcaaatgccatgatgag

SEQ ID NO: 29790 - DNA, 471 bp, Glycine max
  Clone ID: jC-gmst02400027a01d1
gagtaaacagacacacttgagcattaattatgtaaatcatactttgcgccatgtcttgcgaggtaaaacaaagtacaaattcgagaatagaggcaagtacaacttagcaaagcctattgataaaaagaactacgactgtataagcaaaactgttataggaacccaaattcaagagggaaagtcaatcacacaatttggtagctatccgttatcagctgtgttctctgagcaaatttgggaggattaccaccctttaatggtatgatgttggtaaccttcaagtcactaaacgtgtcagttgccataaagcagactgaaatgggaaagaatgttgatgaatctgctagtggaacaacaaactgcattgacccactgcggttggaattatcaatcagaaggacagaccactccaaaatggaattgctagagtcatacctgcattgcccatcaatctgcctaacagatggtgct

SEQ ID NO: 29791 - DNA, 584 bp, Glycine max
  Clone ID: jC-gmst02400027a06d1
aacaccatactaatcaaataaaataaaaaaatccttataaactcaaaacattcaaatagtagtgatgacttgcagtacaaggaaacccaaaacatatgacctcctactttcccaaaatttatactcatttatgccaactattatgggaaagtgaaaaatggcaaccaagaaaattgttccaaaaaacaattgccagtagtaataaaattgaaccaaactgaataatgcctcaaaatccttgagatgaaatgtctctcttatgccacagctggcatgtccttgagccatggatccaatggcttgccaattgagtacacaatgaaaccaatctcacgtagcttctccacattcacaatgttccttccatcaaaaacaaatgctggttttctcatgttgtcatacaccttctgataatcaagactcttgaactcatcccactcagttagaatgcaaacaccatctgcatcctttgttgcctcataagcatcccaaaccacactaactttcttctcaggtgtaggactagttggctgcaagtgaatagggtggtccccatcaaactggttcatccataaatccctctg

SEQ ID NO: 29792 - DNA, 525 bp, Glycine max
  Clone ID: jC-gmst02400027a08d1
aatatcgcaatcgctgaacaatgttatttaacaaaaggatcgaccacaaataaaaacaacccaactccaatcatcatcaccacgtccagcaaaatacattcaaaagctatctaaaaatttgaggaacccacagtggcgcattagaaaccatgaccatagaatttatgagagaaatattatgggcaccgtgcctctccaacaatccccaaaacgttgcttaggcttcagcaaacccaagctcagaaagcttttggtgagcctcagcgtaatcagcgaagaaggcatcttcgtccgatgcatatttctcaacaagagggcggaacacagggtcagacaaaagtgccttgtcagaaggtagctgaaggaggccttctttctcaccactcaacaactccttgaagtatgagttgtcgaaaataagaggattagaggtccagggaccctcgaatccagaacgctccttgtgcgcagctccaatagtgtgacccccagacagagcaacgatatctcggtcactaagcccca

SEQ ID NO: 29793 - DNA, 523 bp, Glycine max
  unsure (1)..(523): unsure at all n locations
  Clone ID: jC-gmst02400027a09d1
gtctataccatagatatttatggggaggggaagaggacatcaatccaattacaaccttaagctgtggaaagaaacatccacgtcaatttaattacattccatttaactaatgtagtaaatagaaggatatgatatgtatccatcttcaatattattaccttgaagcgtttcttgcactgcgtgtactcctcttgattgactcaattctctgaagccttatttgctctctaaacttagcaatgaactcatcagccttcttatccacatctggtccttcatcaccatctgtttttgaactttctccaccaataacaggtggactctttccactgtcattgttcttagcaacggttcttcctccttcaacgtcttggtcctcgatttctgtgtcatcgtcgtcatcatcatcgtcagattccacaagaaggctttctttctcagctggctgtgacacaagaggcacgcttgcatgccctatgaacttgttacttctaacaatgtgggtngcatggatttattttct

SEQ ID NO: 29794 - DNA, 598 bp, Glycine max
  unsure (1)..(598): unsure at all n locations
  Clone ID: jC-gmst02400027a11d1
cacacaataatttccgtgccaaagcacgtaactttttattgatatggcaatttacagtcacatccaaatcgcaatacacacccaccaacaattaatgaggatcaaaaccttgcacaatcagtgcaccaagagtgctatatatgttatgagcactctccagttttatagaattaagtggctgagctgatcactggcatcatattttttgtgccctgctgaattatgctaaatatttatgatattaatctaatgttttctaactctaagaattaggaccccatgtgctcaaatacataactgttctgagagactcctatgccatccttctcttctaatcatctctcaggttatctgaagttactgaagaagaagaagtcgaaggagaaggagaaggagaagccagcttcttggcctcagttactgaccctatgtggttcttggcatgttgagccaccaacttcatcattgtgctgttcattctgcaataccctggatccttgaacgcctncaccagtccaacagtggttgcaaccacataagttccacgacacatgttgtatatataattggtgcagtttcaaactacaacttccctaat

SEQ ID NO: 29795 - DNA, 376 bp, Glycine max
  Clone ID: jC-gmst02400027b01d1
aagcaagttataaagtaaatatcatttattcaaacctaaagaaacacaataacacatgatgacaaactcatgtaaccctgccaataaaataaaccctgatccctaaactccagcaccagcaggagcttgctcacttcaatacacaactcctagaatttgtcatgtcaccacgggggaagcacgctgatggggagccaagtggtgggctcacacgtggggataccctccataatacaaccaaagacttaaccctcatataataataatatattaataataaagtgaactaaagaaataaattaaaaaaaagcttttcaacatgacatgcaaaatgggagacctaatgatccccacaactaggaccatttttaaactt

SEQ ID NO: 29796 - DNA, 221 bp, Glycine max
  Clone ID: jC-gmst02400027b03d1
gaacagacaatataaatatatataaaatgtgggaaggaaatattaagaaaattggcccatccaaaaggaatatataagaaaattgaccacccgggagagatggtaaacatcatcgtggttgtcgtcgttatcaacctcctctttacaaggaaaattttcgctgcaggctgagcctgcagcgagtgttttaaaactacatgagacctggagccctattgctg

SEQ ID NO: 29797 - DNA, 559 bp, Glycine max
  unsure (1)..(559): unsure at all n locations
  Clone ID: jC-gmst02400027b04d1
acaagcaattacccaactcatctttttaaataactaatctgctaacgaattttgttctatttatacaagcaattattacaatcatattacccttccactcaccaacaaaatgcttaaatctatttggaaaaattatgtgccttatgcttcatgaggttaaaaaaacattttggttgaaagcttgcaaagtgctcacaaaaatgggaaagaaagaaaacattatgaatggctaagttttctcagttttcatcgtccttcacaaagatcttcagagaaaaccacagtcctagaaatgttgtcattgtcaaaggcacttagaccagagtaaggacctgaagagaacattgaagatgttccatcaaattcaaaagtgctagaggactgtcgtaggttgggtcgtgcattggatgaggctaacacagaatcttggtattctgtgacgcgctgcaccattttaagtgactgtaccacttnacccattgtgggtcgttggtttgcttctagagcaacacaggctgcagcaatagtgcatacacgtacaaaatctttcttggatact

SEQ ID NO: 29798 - DNA, 583 bp, Glycine max
  Clone ID: jC-gmst02400027b07d1
aatatcgcaatcgctgaacaatgttatttaacaaaaggatcgaccacaaataaaaacaacccaactccaatcatgatcaccacgtccagcaaaatacattcaaaagctatctaaaaatgtgaggaacccacagtggcgcattagaaaccatgaccatagaatttatgagagaaatattatgggcaccgtgcctctccaacaatccccaaaacgttgcttaggcttcagcaaacccaagctcagaaagcttttggtgagcctcagcgtaatcagcgaagaaggcatcttcgtccgatgcatatttctcaacaagagggcggatcacagggtcagacaaaagtgccttgtcagaaggtagctgaaggaggccttctttctcaccactcaacaactccttgaagtatgagttgtcgaaaataagaggattagaggtccagggaccctcgaatccagaacgctccttgtgcgcagctccaatagtgtgacccccagacagagcaacgatatctcggtcactaagccccatagctttgccatacacatctctcaaatggtcagaacccttagtggcatcgggcaagcg

SEQ ID NO: 29799 - DNA, 484 bp, Glycine max
  Clone ID: jC-gmst02400027b08d1
agtaagaaaattttattcaatatactagaaatcttttaatgttcctcctctctctttcaaatcccttcaatattagagaagtagaatttagatgaagagcaattatgctctccttcattcccctttcttcctaaaagttgaaacaaacaatcaaagtttataaaatttctccattcctcatttgcttctaaccaaacactgttaaaaaaaaaagtcttattttcttatgatttgctaaaggaagggaatacaggcgattggcgagcaaacaaccttttgaagacacttatattacagacacaaaagaccaggcaacaacatataagattccaatgcttcccaaaaaaaaaaagaaaaacataaactaccgattataaaaatgtgataagacacctcactaggtaaaaagcactagttgttcctctaatcaactaatgacatctaaccttttgaagcgacagtggaaatattaaatatgataatc

SEQ ID NO: 29800 - DNA, 490 bp, Glycine max
  Clone ID: jC-gmst02400027b10d1
cgcggatcacaaatatattaaattcaagttttcaatctccaatatccagtaatctttcaacaatttatccttgaaggagggtttttaaccagtcacaacagaaaattctaaacacaacaggcacaattaagcgttcaacacaaccaaccaaaaagaacccaatttcaatttcaaatgtgcaatctgaaacagcttgctataggcaaacttcttctatggcctttccggtcatatgacatcttcatgcatagtttaaacggaatatgtcattcaacacataatagcttccctgaggtgttggtatcaaatggaacatctggctgaacttgaaagtgtgctgttcgccggcgagctgaaggtttccgctgacgaagacgagcatgccggcgttgacgccggagggctggcagtctacggtggagattgagtggtggcactgctgaaaagggagggaggtgagcttggcaacgatgttggaagcgccttggat

SEQ ID NO: 29801 - DNA, 401 bp, Glycine max
  Clone ID: jC-gmst02400027c04d1
gaattgcatttactgatctttgttttttctttatatcctattctgtttccaacaaggaataacacacacaggcagaacgagggggaaaaacctgggacgacatttaagacggcacctgaaaatttggatatccacaccaaaagttttaaaaaaacggccaactaaccactataggatcgaaacatgggggccctagccttaaaccggggggccaaggggtccagaaattcacccaacacccaggggaagaaactctaaaccaaacaggtgacgatcttacggggatgttcccctgaagcccttttttagatatagaaaggctttgtgcaaaaaccgggggcccttgtgttctgggccaactttttttagcccccaaaaattcggtggggaggccccctttt

SEQ ID NO: 29802 - DNA, 492 bp, Glycine max
  Clone ID: jC-gmst02400027c05d1
gatgaagcttctgccttgttatatacaatatgcgactattagcagtttcaagaattcttacacaatataaggctgtaccatgccagccagccagctcagacctgatcatagatcaaaacttaacagtcataaagacttaatcatcatattcacacgtatttttcaaaactaagaacatattcttcaactggatggaccaatttatcaaggggaaaaaaaggcttaaagcttacatgtgttttactgatttaacatcagcataaacgccattgtgcacaagcttaagtgtagtatactatatgttatgtactactatatctggtgcttactacctcgcgttagcagcaagtttttcatttctttgtaaccatggaactcttccaatgcatcagctgtagttttcctagtggctatgatcccagaagacattatgctcacaggccttgatggctcacggatctgattgggccctgagtgttatggttccgggtt

SEQ ID NO: 29803 - DNA, 593 bp, Glycine max
  Clone ID: jC-gmst02400027c06d1
caatgtagtatagttttgtgttccttttgataattcatgttcgaagtttagtttacaacattataaattaaacataacgatagaagaccctccaaatggcatttctttctaccgtctgtcttcagaattgagaacccaaataaaatgagttttgccactaattcttcacaaagatggcacgagcagacccccattttctcaaacattagcaacaattaattaaacgatgcatcaccaaaacaccgaagagacaagaccgaaaatattggtaatagaagggaacagatatatagaaacttctgtgctatacatagcacatatatttgataacaatcatcattcaaaaaccacacatgtccgacagaagacgaaaaagtagacatcaaacacacgatatttcagacactctaataatcatcatctccttcaccatcatcatctccatcaccagactcggcaccaacctcctcataatccttctcaagagcagcaaggtcctcacgagcctctgagaactcaccctcttgcataccttcacccacataccagtgcacgaaggccctcttcgcatacatgacgggtcaactatgatc

SEQ ID NO: 29804 - DNA, 458 bp, Glycine max
  Clone ID: jC-gmst02400027c08d1
actattagcatatcaggggaaggttgaccctaaaggctacaaatataaatttgctgcattattttaaattgccggggattcatttaaaccccaaatttcaaactggaactacaaaaattgaaccattgattgattataaaatatataaatgtccaagtccaataatttctccattgtttggttttcaaatcacattgacctatgtgaaacagctttagaattcacaagcataatcagggctaaactatttcctattcggccttgcagggactaaatccaagtatattggttttaattcttaatgagcttaaatatcttctaagctctagggatcagaagtgaatgttatcatgagtccatgaatagaagaaatcagacttagcctaatattcagactcccaaacattttgcccaacggaaacacctagcaattttctttggcaaagaatatgcggatt

SEQ ID NO: 29805 - DNA, 581 bp, Glycine max
  Clone ID: jC-gmst02400027c10d1
cagcatcttcacgtttccgagcttcctccgcctcacgcaatttttgttgtctctcttcttctaacttgagataatacttcaacttcctcattttttccctctcctgtctcctggactgtaaaatcctagagattcgctcttcacgttctcttctcaatctgttaaactctgcttggcggtgactaaccacccttgcttgatatacttccttattgcccatcattcgaacaagcctctccttctccttgagatctccctcatgcctctgtttgctcagttcaacctcttgctgctgctcacgctcatgaagaagtctctcttccactagacgctgttgatacgcagcttcaatcaggggagcagcctcttctcttttggctctttccaaataatccatggtttttgctaacttctggagtttcttttccatttcctgtctttcccggagttgctcggtcaaagtcaattccatcaaggtctgcttggttattttgtccccctctatgattggcttctttcccttctttttaatacgcttttcagcttcctggagtaaagcttgtgcttcttcattttctctc

SEQ ID NO: 29806 - DNA, 451 bp, Glycine max
  Clone ID: jC-gmst02400027d03d1
gtgaaaaatgtccagcaggatggacagtctgacatatccacctgaataatatatatctttccagcaaagcctatcaatgtttactaagtagacaccaaattattctacccattaattgtataatcccaccacaagatacatcattttcaaaacttccgcgacaaacggcgtcccctgaaataactaatggtttaacaacgcatcaaactttaatatactctaccttacccccaacttaaaaaagacaaataattggagtgtaatctaaagatcctggtgaaagtctcacgaagggatctttgattctgctcagaatatcctctattaatctaatgagagtgccggcattctgatcgatttgcagaaaacgtgatcttggattcttcggattataacaaattatactttcttgataatctgaacaacgtcttcatcttcaagttcatgctcc

SEQ ID NO: 29807 - DNA, 439 bp, Glycine max
  Clone ID: jC-gmst02400027d04d1
cccaaaggaaacttcctagccttcattccattttaagccagtagctcaaatcggccccaagtttcattacaattacaattcaagggttcaatcactgacaattcctatttatcctctttttaaacattctaattccactttcccattactaaacattcatatttaaaggtcattaaaatcctctagaagtccctactttattccgcaagaatgaaagatggtaatataatacaaccctcaagcccattgttttcccaatagctagatccccttgatactccgaattctacttataagataataattggaatttattggataaaaattaaaaacttaatttttattgaaattaaaaatcaaatgaaaatcaaaccaaatttgtcgcatcgggctcacggggactcaggtgcgagtcaccgactccggttttggtggcggt

SEQ ID NO: 29808 - DNA, 515 bp, Glycine max
  Clone ID: jC-gmst02400027d06d1
ggttgtgaactttagatcaaaattacgacagatcaagagatttaatacaagatataatatatatatatatatatatatatatatatatatatatatatatatatataaagaggggaatcactgtacacttagttaccctttcaacaatctgtggtaacacaaatcaacagcagctgcattatgcagcagacaaatataatggacataaggaaggaaggagagacccgtgccaatggaatggtactgacatttacaagattcaaactttgaccacatcaatgaaatgggtcccatgcctcacgcattttcgtcgcaaatgtcagattgggacccactggggtgtaactctggaggggaccattgatctggcaccataagaaaatacaagctcatggctttcctaaaccgtttcttgtactgctgtggtgatataacagttggagaagtgttcttgggtccaccaaggatgcctgaggtcttcacccaagtttcaaggtgtttgtcccatgtatact

SEQ ID NO: 29809 - DNA, 593 bp, Glycine max
  unsure (1)..(593): unsure at all n locations
  Clone ID: jC-gmst02400027d07d1
ggcgttaactaacatttctctttatcacctttacgatgttttcacaagtcacaaatattagttttctatctctatatatacaatacttcttttttaattacttaattataaatactcgtgccacttatttaagtagataatatattttcgccaatcataggagatattgcatatgtagaaaactaaaataaaaatcgaacaacccctttcatttattttttctcttgtttctcaactatcgaaataaacgacctgttggaaacttgcttcattctataaaagtaatcctgcctctccatttattcaggttttcgacatgtaatgatggcaaacttaattagatctttcttgtatccctctatcatcaatggcatagccaaagctccttttatcgttttttgtccactgctcaagagtgaagttagacccttccatgtgaaggctgagcgtatcactgctggccaaaatggagcaacaaagcgagaccaatcttctgacttgatgtcctgaagtgacagggattggagcaanctaacataatcagaagttgagcaccaggcagggaggtaatatgcatcgcatatcttctttag

SEQ ID NO: 29810 - DNA, 490 bp, Glycine max
  Clone ID: jC-gmst02400027d09d1
agagacaaaagtgtaggtttattagaaaaccatctcaaaaccgtgcatcacttcaagttcagagatttacaatacccattagcaggccaaatatatatgacatttttggaacaaccccattttcaagcattgatacaatacagagtaaagaaaagggaaaagaaaaaagaaaaaattaaggggattgatcatatgatcatgatcatgtggtggagtctaaaatgaccttggctttgccacaatggtggaatgcttgagtatgtgcaagctaaattgccctcctttctcactagtgtcaatctgtgactggccagggggaggcaagagctcaaagttttggaccaaacgtcccaaagtgatgccaagaattggcaatgcaagagtgattccagggcagcttcttctgccaacaccaaagggaaggtacctaaagtcattgccattggcttcaacatgcgactcctcctcgaagaacctctcaggccggaac

SEQ ID NO: 29811 - DNA, 434 bp, Glycine max
  Clone ID: jC-gmst02400027d11d1
aaatccccaacaagattaaacttgccgtaaaaaaaaggaaaagaacctatattaactctaactatgaatgagtaatccatactttgggatccccaatctcaaggaccatgggttccatgtttatccattccctttttgaccttccgacttcaacttttaacaacttcccacggcctttaagattcctaccattcccaccctgggtgactttaaaacaaagagacgcgagctttatcccagaatttaaacttaaacttttgcttccccctgaccaaacaggatccaaagacaaacgacctttgtgggccaaatttttacggggtttggccaacttaaaaaaatgtgccgagaaagctcttgtaaaagaaccctaaattgtccggtcctaaattcgctagagcataactctaaagaggttttgggattaaaagaag

SEQ ID NO: 29812 - DNA, 463 bp, Glycine max
  Clone ID: jC-gmst02400027e01d1
atcatataaagtttgttattcaatcaggcgaggaaaacagattctccatgcaatgccttgttctccatgattgtttgccattagtcattgttcacaactttttgttctctaatgttcagtgacagtcatggagcaatcacaaaagatggcacgtgtttcaaaccaaacaagtaaaaaaaattaaaactaggccatggtggtaaaaatagatgagcagaaatataaaagttttatcattaacaagtactaagcacaatcatagcattcaagtatatggtaaagaatgggatcatctaggccaattcccaaaccacaggttggattacgtgacactggtccactatttagtgaaatagcatatgccccttacatgcaaaaggtaagtgtggaccaagcagcaccacctggttaggaagagcagcaaccacttttttgtccaacaggttgccctctgatctgcact

SEQ ID NO: 29813 - DNA, 525 bp, Glycine max
  Clone ID: jC-gmst02400027e02d1
aacagaaaatggaacttgattcaaatacgaccgtacatgatatcactatgtggtttgtaagtgcaggatgagctgtactcaaactccgtacagggtatttcaaaagaaaaggaaaatgaataatgattagccaaagggagtagtagtagtggtgacattaggcagccaggcacaggcaaaagcaataataataagcagccaaagggtaaataaagtaaactagaagttggaagggttggaattagagcattgctgccactcaatgaagctttggagggtagcaacatcagccctatagtgcttctgtgtgaattcaaacaaattggaccatgtgaaatcagggtacttcctttcctcatttctgcataacaaattgtctgggggcctcactattttgtcttctcttggacacacaaaataaacaagggaccttctctgcctgtatgtgttcaccaatgccctgtgtagacaactcttgtatctgccatttgacaatgccatgaaagtatcacctatgtttatgac

SEQ ID NO: 29814 - DNA, 501 bp, Glycine max
  Clone ID: jC-gmst02400027e03d1
gaccaaaaaaactaccaatgaactctgaagaaaaatttgacagaccatttcaaaaatgagaagagtatgatagtatcaacacccaaaagtggggtgagtgaacaaaaataaaactaaccccccaccaaagtagtagcatgttcttagtacatatggcacatgataaagatatcaaatattacagccttgccagcagcccagcacaagtgcaagaagatgctcctgcggtgtttatacggtgtaccgaccctttgttgctcctttgcttctagaatcatcatgaaagttgtatgttatcttgtcgttaacatcaatgatttccttccacttccttccaatgctcatctgggcagcttcatttgctgctgtctttgtccacaacgaaagtttgtcctgccactggcgcacactagcaaccacaccacatatgtcctcagcatcctcaaattgttccccaatcaaagccatcatagtttcaagccacatgttatcaaggttagc

SEQ ID NO: 29815 - DNA, 570 bp, Glycine max
  Clone ID: jC-gmst02400027e05d1
caaaaaaaaaaagtggggggaagcgcaaaagcattttctatacgaaagcaagttgcttttctcacatggccctaacagcttggaatcttggttccttgggaaggaacttctgctcagcatagacagacatgtagtcaccaaaaacaaacttaggataagtttcatctacttgttggtcttctttctccacaagttgcggtgcaggacatatggtggccttgaatgaaggattatagaaggaggcaattgatcttctgttcccatctggtgtggccagaaccctgtgccagcaactcttgtatctaccattgctcaagacctcaatctgatcaccagtgttgatgacaatggcatttggcaaaggctgcacatcaatccattgcccttctttcagcatctgaaggccaccaaccttgtcatcttggaagagtaggattacgcctcctgcatcggtgtgagctcgcagacccttcacgagctctggatggggacatggagggtagtggctcaccttggtgccaaagaaggcattttctccatctgcaccattcagtgccttctcgatgtatc

SEQ ID NO: 29816 - DNA, 544 bp, Glycine max
  Clone ID: jC-gmst02400027e06d1
gacaccaagggtgatattctaacagaaggtaagttgagttagcaaagattggcacagaaaagctttagttgtgtaataactttggctaattcaatgccttaggaatgttccatgaaagatgtagttttttttctagataagacattatgaacatgaacactcaggtagtgggaaaactacagccatgcgggattcttcaaagcagtgacaacagctttaacttgaaggtagcttctaaggctgtagattccccttactctcccttgaccactcatcttatatccaccaaaaggtattgctgcatcaaagacatcatagcagttgatccataccgttccagcttgcaatgctcgcatcaaggtgttggcagtgtccatatttttagtaaaaactccagcagccaggccataggaagttgcattggctcttcttatcacttcctctagatccttgaatttcaagatagattgtactggaccaaatatctcatcttttgctatcaacatgttgtcctgaacatttgagaaaacagtgggttggatgt

SEQ ID NO: 29817 - DNA, 578 bp, Glycine max
  Clone ID: jC-gmst02400027e07d1
gatgaggtaaaacttttttttttgtagtatccaataaatttcagcaaataacaatgttatagtgtatgctgctagcatttatcataaataaagaatcttagtttacactagaatccatacatttcagcaagttcaaacaactttgaaaccagcagttgtcacatctttgcttctgacatactgctcactcaagtcttgtttattgctgtggcttgtgtcgttgagaaaactagaaaaccattgaacagaacgtttgggaatccgttcgagagtgtgtctatccacataataaagtccatatctcacgccatagccgcttgtccattcaaagttgtccatcaatgaccatatcatatatcctcttacatccgcgcctttccttatggctctaagcagagctgcaaggtaggctttatgataatctattcgtttgaaatcttgtagtagatcatccattgtcacatttggtttgtgcggtgacgaatatccattttctgtaatatacatgggcatgttatggtatcttatctggatgtagtctacaatcttcttaagcccctggaaccacaaaaatctgg

SEQ ID NO: 29818 - DNA, 548 bp, Glycine max
  Clone ID: jC-gmst02400027e08d1
gatgaggtaaaacttttttttttgtagtatccaataaatttcagcaaataacaatgttatagtgtatgctgctagcatttatcataaataaagaatcttagtttacactagaatccatacatttcagcaagttcaaacaactttgaaaccagcagttgtcacatctttgcttctgacatactgctcactcaagtcttgtttattgctgtggcttgtgtcgttgagaaaactagaaaaccattgaacagaacgtttgggaatccgttcgagagtgtgtctatccacataataaagtccatatctcacgccatagccgcttgtccattcaaagttgtccatcaatgaccatatcatatatcctcttacatccgcgcctttccttatggctctaagcagagctgcaaggtaggctttatgataatctattcgtttgaactcttgtagtagatcatccattgtcacatttggtttgtgcggtgacgaatatccattttctggaatatacatgggcatgttatggtatcttatcttgatgtagtctacaatct

SEQ ID NO: 29819 - DNA, 446 bp, Glycine max
  Clone ID: jC-gmst02400027e09d1
ggccttcaatagaaacacaattgattcattaagtcatgaactgcataaggaagtaatggtgtgatctcatggaggttacaaatgaaaagtaatgccacaaaaaaatgtgattttatcaaacctttcaagcaaaatgcaaaagccttcctacaaacctaatttgccccccaattttttcaaataaaatgaaagaaaaacagaccgattaattaaaaggatgtaaggaaaggagattgcctaatccctgtgttaaataaaaacgcatttgcaaaaacaactttaaggctcaaacacttgatagatgcagcccaggcaaaattctcaagggttatccctgtacaaaagatttgaccagtgtcccccaaaacaggttaacagctaagtatcacagcttattatgatctttatgtagcagagaaccttcagacatcagaccttttgtttaa

SEQ ID NO: 29820 - DNA, 499 bp, Glycine max
  Clone ID: jC-gmst02400027e11d1
ctgcaccaagtgaatgtaagcataatggccacgtaaacgggcataatcctcaggtgtcgaacctgtgctgtcacgagcatttttccacgcttcaattccaaccatgcaaggatcattagtcaaagcatcaagtacatcctcagaaccatctttcccggctgctatatggagtggtgtcaaaccagcagtaccatcaacatcaggtctaaacaagaaggtctgattctctccatcaaccagtgccttctcttcaggtcctagtttatcagaaatattctcaggaacatatctcaaaagcaactccactaaatgcttgctatttctccttacagctttgtgaaggagacccatctctgaaagcgcaagatacaaggaaggatgatctcctgtatttacagttccatcaaacagtaggttcaacagttttctcactgctgcacaccaatcatgatccatggaaaactcaataagccacttgaaccgtttcaatggaaagaga

SEQ ID NO: 29821 - DNA, 508 bp, Glycine max
  unsure (1)..(508): unsure at all n locations
  Clone ID: jC-gmst02400027f01d1
acgttctattatatatatatctatctatattctatatatagatatattgtttaggttatcaagtattaatctgaaataaataagaattgctgcttctaatacttataataattactacaaattctaataattactacaaaagggatatatgttagataaaatagattaattaatctatttcacaaaaaaataatgtatccatagcacagtttcgtcttataatacctcgggtgctaatgaaactatcttagtgaaatttaactgtctcaattcccgggcgattgcacaaaagattcgagttccttttggatttccttcttgatcaatgacaactgcagcattatcatcatactgaattattataccgttgctacgtttgagttctttacaagtacgtacaattacagctctgatcacttctgatctttctaagttcgcatttgggactgcttgtttgttacagcaacaacaatgtgaccaatataagcatatcngccattactagctc

SEQ ID NO: 29822 - DNA, 479 bp, Glycine max
  Clone ID: jC-gmst02400027f02d1
aagtaatgtaattagttgcttcaattcccaacgaaaaatcaaatacaacagttcagtacttagacatggacagtaagaacaacacaataatgttactagaagtttagcacttagaaaaactgtaatttgccctttatttattagtagcacagtactgaaagtcacagcagagtggtaagggattttgatcttgggttgatgatataatgagttcacttatgagattgagggtcacaaaccccaggctctttgaataagtgagataatctggaggccaaactctgttttgctgcaggggaaacgccattcttacctatcattgactccaacacagcctgtgagagtagtttattctctataacagcactcgtaacttctggaatggtttcatcactagagaaacttatcgttaatgatccattgggtgagacagtgaaaaggatagaggagcctggtgggaatgttaggtctttgaaaac

SEQ ID NO: 29823 - DNA, 521 bp, Glycine max
  Clone ID: jC-gmst02400027f05d1
gacacctcgggtgatattctaacagagggttagttgagttagcatagatcggcacagaaaagctttagctgtgtaataactttggctaatccaatgccttaggaatgttccatgaaagatgtcgttccctgtctagactagacattgtgaacatgaacactcaggttgtgggaaaactacagccatgcgggattcttcaaagcagtgacaacagctttaacttgaaggtagcttctaaggctgtctattccccttactctcccttgaccactcatcttatatccaccaaaaggtattgctgcattaaagacatcatagcagttgatccataccgttccagcttgcattgctcgcatcaaggtgttggctgtgtccatatttttagtaaaaacttcagcagtcatgccatacgaagttgcattggctctccgtatcactttctctagatccttgaatctcaagatagattgctctggtccaaatgtctcatgttttgctatcaacatgttgtgctgaacatt

SEQ ID NO: 29824 - DNA, 575 bp, Glycine max
  Clone ID: jC-gmst02400027f06d1
aaggaactaaaacactaccataattcttttattgcatataaggtcacaacatagcaagcatacacactaacacacatgggatatgatataaggtcataattacctacctactcatttgcagaaactgaagagaaagcctgattctagtcatctgcaaattgagtgttatggacaacacaagttggtatgtagcttctcaaaggaagaacatctttgtttattaatacattctaccgaaacaaagaagaagaactacaatagaatcaatacatacatagccataaggaccctttaatgagagagagtccattgcctttttgtgacttgccggtttgctaagatgtggccatagcttctctgcttcatgccactcagagaattatgttcctccatgtatacccttttgtggtgattgattagagaaaccaatggctaaagcataagcaaactgtatgaggtggaatgtgaagggtgagaaccctctacacaaaatccttcagcttcttaagaaccatggatggattttgccaacaagctcatgctatccaaatgatgatagatggtttgacgatttt

SEQ ID NO: 29825 - DNA, 485 bp, Glycine max
  Clone ID: jC-gmst02400027f07d1
ccaaaggaaaacagacccacaacatagttattttttccccttctttatttcatgaatgttttaataacttggggccacatattatacaagatgaaacttgaccagaaacaaggacagccaatcacaatcacgtaagtctcttatcttctatcaagacatcgttcaagaattaattattaaattaaaaagagaccagaaactttaacaccggggaattagtaggctcccattactaattccacaatacttcccaaggaaattcatatgccatatcaacaatctcacaaatgatgctactacttgtcagtaagaatgagtttgctctagcagccatgtcccctttgaatttagaccgaatcccacttaataacaaagaggagttcaatcacagaatagcacaactcatcacaagagactccatcaaattctcttaaataacaatttattgagatttgaatgcatcatcgttttagactagaatcatt

SEQ ID NO: 29826 - DNA, 534 bp, Glycine max
  Clone ID: jC-gmst02400027f08d1
aatacaaacacaattcttattcacaacagagtagcacgattcctttcaccaattatcaacaatacactgaaaaatctactcactcattttcgtgaatggattgtgagggaagaaaaagtcgtgtttatcttctctaacacaattactttgatggggtggtagcaaacttccaagtatattgcgataaagaaccaaggcctggtgcttccccagcaacttcataaacaggaactgcatcagaaatttcactcaactctgcatttgtaagtttcacagccacagatccaacgttgttttcaaggttcttgattttagtagtcccagggatagggactatgtcatttccctgatggagaaaccatgctaaggctaactgagaaggagtgcatgaatgtttagaagccaaatcagcaattcgattatagaaaagcttgttcttttccaaattttctccactgaacctggcatcttcagccagtgcgctctgactaggccaagtctctaccgctgccttccctgcgaaaaagccatgac

SEQ ID NO: 29827 - DNA, 508 bp, Glycine max
  Clone ID: jC-gmst02400027f10d1
aatatgaatggaaacaataattacttggctacaaattgttcttaaacattgccatcaaaatgatgagatcaaaacttaaaagacaattgagacttcagagaaaagtatttatcatactcaaccaccaactagcaggaagaaaatggggaaagaagatagattgggttaaaatatgattctgttataatatggtagagattaaaatatgattctgttcaccatattataacagaatcatatattatcatatctcccaaatcggtatcatatctcaacaaattgtaacagtacttaggcaattaaatgtgtcggaatacataatcacattcacacaggaaattttccaaattgtgctctatttttataataatggtgttcaacaaatagtggcagagaataaaaggctataaacctttaaaagatcgatttcttatctgcctgattccttaagttcttcgaacgtatcaaagactatcaggaaaaagttgggtaagtagaaatttaaaaa

SEQ ID NO: 29828 - DNA, 405 bp, Glycine max
  Clone ID: jC-gmst02400027f11d1
aaaaaaaataaaaaaaaaaaaaaaaaaaaaaaaaaaaaaaaaaaaaaaaaaaaaaaaaaaacaaaaaaaaagaaaaaaaaaaaaaaaaaaaaaaaaaaagaaaaaaaaaaaaaaaaaaaaaaaaaaaaaaaaaaaaaaaaaagaaaaaaaaggaacaaaaagatgaaggaaacaaaaaaaagagaaacaaaaacaaaaaaaaaaaaaaaaaaaaggaaaggaaaaaaggaaaaaaaaaaaaaaaaaaaaaaaaaaaataagtaaacaaacagctcagtaaattgacttacggacaaaagcaccaaaggtaaaaaatgttaaaaacagaagcatttagaaaaaaaattagaagaaaaaaacagaagcactaagacacaagaaattaaaagaaaaccaccaagagga

SEQ ID NO: 29829 - DNA, 347 bp, Glycine max
  Clone ID: jC-gmst02400027g01d1
cttggcaaagcatgaaattaaaacaacccaaaatttcccgattaaaatcaggattgggggacagttttcccatcagagaaatgggaagagttttacccatgcaatatttccagctccaactttccattatagacccttgacattgaaatgaaaaaataaattttgccacttgaagtgagacaacaaacaatacccctttccaagggtcattacattaatcactagtcattaatcttgggtaatttcctcggaaggcctttgtgcattacacgtaccagtaaggaaaattatttgccccaaacaagaaaagaattttactcctaccctttgatttgggaccctactac

SEQ ID NO: 29830 - DNA, 362 bp, Glycine max
  Clone ID: jC-gmst02400027g02d1
cactccaatggctgcatttcttattccatattttacatccacaaaccatgctgtgatacatacacatactacaagcacatgttatgttgatttatctatcaactacaccacagtaacaaaccacaaaagtacaaaacccagagattaaaattgatattatactgagaatgtaaatatattgatattacacataagattgggatatctcggtcgggatttttggcagatacttacaacttagtaagtaaaggttctttttgtagatcaacaaactgactgcaatcaattcccttatcagaaaatgcctgtacaagcttggggaagagcttagcaagcataattttaaatcctgttgaagtccc

SEQ ID NO: 29831 - DNA, 521 bp, Glycine max
  Clone ID: jC-gmst02400027g03d1
ggacaaatgatatgcgttgtataaaaaatccctcagttctcatttattacaacaaaccaggtcaacaaataaggatttttagcgagctaaagacaatgttatactttggcaattaagctctctctaccttggggtaaaacctgatcaaataaaagttacatctaagacaaaaacagctacagaaaactaaactataagaatagcatgataatcatcatatataagaggaggatgggggcattctctctgaaagaccaacaacaaattcaacatccctaaaggaagctccagattgtgctttttccctttaagccactgcaggcatgttcttgagccatgaatctagaggtttgccaatggagtcaacaatgaaaccaatttccctcagcttgttaacattcacgacgttgcgggcatcgaaaatgaatgcaggcttctgcatgctgtcataaaccttttggcaatcaaggttcttaaactcattccactcaggcataatgcatatgccatgtgcatccttg

SEQ ID NO: 29832 - DNA, 557 bp, Glycine max
  Clone ID: jC-gmst02400027g05d1
aagctcgaatctcagtacgttcctttatatatatatatatatattcaacaaggacatttacaatttaaaaattactgcaaacaatatatgatatactctaatgctgggcaaatatattacatcataaccttggacctaaagtaaaggacactgaatttcgaattctgatatattgctcatcaactcctactactaaataggcctaagttcaaaatttagtgttgaaattttctggtcattttcaggtgactaccaaaggtgtaggagctcctgaaattctgaagtaagattcacttgcttgtgcatggggatatgttgcaactgaacccaaggatttattagaattgcatatttgattgaatcctgaccacttcatttgcatgaagctgctcttcctccacggacccacgtgcattttcttttccttcattgatttctttgcagcattgcacattactcgaacaatggcagttaagtactccagttttccaatataaaattcgggcaaacaggacactagttttccggtaattttcacttgcttttgcaatctgaaa

SEQ ID NO: 29833 - DNA, 538 bp, Glycine max
  Clone ID: jC-gmst02400027g06d1
gagcttaatatatttatgcaattgcaaactgtcttcaaaaagttgaagattcacaagagcattatttatagcatagtagctcattacaaccatttgacagatccgtttattaaagggaaataatgacacgtatgtttaaatccatatatctgaagtacagtcaccaccaggatatctcatctcatgggcaagagaaggaccatcaggctcagttccaaagtccacaaagaagttggggttgattttcagtccacctttctcagtatcaacatcaatctgtattatgtgggagcctttctggacaagctctggataaaattgtttgtcccaagtactaaatagtgagttggtagcatagagccgcttcccatctaaactcaattgaatcatctgagggccccctctcaacttgtttccctgaatctctggaacttcagcttgccatgtttcaccatcatcagttatagctactacagggcttcctttctggataagtccaccaacccatacttgtccagtcaggttaagatttttaacg

SEQ ID NO: 29834 - DNA, 511 bp, Glycine max
  Clone ID: jC-gmst02400027g09d1
gataacgatgcacactaggcggtaggtccttaccagaggaaaaacctatagggtcagataccaactgatcatattgcactgatggtgaatgatatatcttacagcacctcaatgggggcactccgaattcacactataataaactgaattaagattaatcttcggaacggtgttgcgatgatatccaggctcagactcaaccatttaagccacggatgctttgcggtcactcaaatccatcacacgggaactgttacccgattcggtggcataccaggaaacacgttttacaaaggtgtcattcaaggaaattccggcacttggcgttaaacctgctagacctgttatgaccaacgtaattgagagactcagcatcatcttacgtgggacccacattacccttcaatttgccctctgattcctccttgatagcagacatgatatgctcatacgacgctggcttatctagcctaacagtgcggtcaacatctgacacatctacagtggggac

SEQ ID NO: 29835 - DNA, 515 bp, Glycine max
  Clone ID: jC-gmst02400027g10d1
attcagcaaagatgtatattgattccatgtctatctggtctaactatgaacgatcgtgtaatcagtgaacaatttgttcagaaaacactaaaagttaaatggctgtatattgattcctaggagctacttggacaacagtccacaggtataatatactcaacgctatcgtgaggctggtcaaacataacatcaaaatggaaaagcttaaaacaaaatggttctgtcacaaagttggggagtaaaattttttccttctctgttttaagattaaaaaaaacttcaccgggataaaatctagatgcttcagagaattgcttcagttgaaaacgtactttcacctaactaccaaaccttgggctgcctgagacccatcctccgttattttgttggcctgaatggtactgataacatttgcaatgtttcctctgcatgtcgctagctttgttctcagtgcttgccattggtgctgaccaaacacacgatcagtaggatgactaacaactactgatcgatgc

SEQ ID NO: 29836 - DNA, 411 bp, Glycine max
  Clone ID: jC-gmst02400027h01d1
gcaagttgcttcctctgatttgcacgcttcttgatttcatctataaatggggccaatgcttcaggaggcaacatctcactcaaatcaacttcacaaagctgaaaggttgtggttaatggaaaatgactaagaaatcgataccgcctcctgatggcttcagtctgagtaactgtttccaactgtagaatccttccacttattctgtgaggaagcatatcatagctcccataatggtgaagcaaacacttcatgttcagaggatgaagaattagatgctgaccatcagcagcctggtagaaactgtatgaactattttccttcacatctccaataacaccttctgaatgcctttgattatcatttttctcctcatatgaagaagataaattcatttcctgctctattaattct

SEQ ID NO: 29837 - DNA, 562 bp, Glycine max
  Clone ID: jC-gmst02400027h03d1
acatacaactctatttttattaaaattgaattgatgactaaattaaactttaactctttttacccatgtctcttaccagaaaagcaaatacaagatgtatttaaaaactatatatcaaacttcaatgtgcgtggaacttcaacagtttgggatactataatggaggatccagcctcagacagcaaaacctgattggttaccttccaggttcactggtacaatatagtgacttcttcttggctgatagcattttttcaatctcaacaattgcaagtctgaagcacatggatgccaagtctgaagcgctcatgtgtgaagtgtcatttactgccagaattttcttgggacaccagtaaagtctgaaccctcttcaactgatattatgccctgtcaagctctttccatagttccatcacccacatcatttcaagttgataaaccccaccacaccctccttttgtttactgcataccttttgccataaagcccacaccacactcttttcattttcggcctggcccgtcacagtgtctttcttcttcaggtttcttccctccctctc

SEQ ID NO: 29838 - DNA, 557 bp, Glycine max
  Clone ID: jC-gmst02400027h09d1
gtggaagtaaatcacataagaaaaaagtcacttgcatatagaacgtttaattgtccacagttttccacacgagtaatagagaaaagtacagacacatatttttttttgaaagaaaagtattgattgcttttaaatgcattagcaggtgccactcaatgatgaccagtcatcactatagggtgtgcagaagaagcaacggtggtccacgattatgatgatcagaaatcacttgatccgacggcagatagtgattccatcaccaaccgggagcatgcaaatctcgatcctggggtccacagcgagggctttgttgagctccagcacgaagtccctgtagtacctaacatacttcctaagaggagcatcagggggtgccaccacagatccgttcatagggtgttgtcgtacccgatcacgcgcccaacttttacaagctctatcaacctcttgtggcagttgaagtaagtgtccttgtccgcatcaacaaagatgaagtcatagctttcatggttcttctcatcgttatcatttcatcaagaactggtagagcaggacct

SEQ ID NO: 29839 - DNA, 178 bp, Glycine max
  Clone ID: jC-gmst02400027h11d1
acattgtgttaagactaatggggtaaggtcaaaattccaatggggaaagtacgatgccaggaagactaacgtcctccttgaactacttacgaaatcaaaactcatgccaaagaagccttaaacggacaatcttcaagctaaaacaaaccatggggaatcggcagcaccgttcaaacca

SEQ ID NO: 29840 - DNA, 550 bp, Glycine max
  Clone ID: jC-gmst02400029a09d1
aaaccaaaatatggacatacaccaattttattcataggcaatacccaaacatagataggaatcattcatacaacttttacaatagcaaagagtacatagcttcagttgtttattttatttttaattttcctatactagtagtgcagccaaacaaagatatcaactgcccccatatagataagactagtgatggaagcgagttctgttcatcatcgtgatgaactcctccgcactaacctctcgatcattatcttggtctgcttcctcaaccatctcctgaatctctctgtcagtgaaattttgacctagctcttttgcaatgcgcttgatgtctaatgcggatatctttccatttttatcatgatcaataatatggaaagctttcatgagctcctctttagtgtccctttctcctattttggctgtcatcatgtactcaaattcttgataatcaattgctccacttccatccttgtccacatctgctatcatttgattgatttgctcttctggcatctcaaatccaagggccctcatagcaacattcagc

SEQ ID NO: 29841 - DNA, 310 bp, Glycine max
  Clone ID: jC-gmst02400029a10d1
cccccaacccgtttggtaaattgggggacaccaaaaaagggctaaaaatggggtgggaaaaataacaggggaataaaaatttcccccccctttgggttttaaccctggggcccctttttttaaatttccttgggtattttttttttttcacccagaatttcctttttttaaaccccttttttattgggggtttctgggacttgggaaagggcttttctttagggaaggtgggaaaaaacgggggggctgtcttggggttaaaaaggggccctttggaaccggctactttccgtgggggaaaggtacccct

SEQ ID NO: 29842 - DNA, 482 bp, Glycine max
  Clone ID: jC-gmst02400029a12d1
ggtccatgaaaatgctcatgttcttcttcatatatactattattattattattattaaatttctataaatttgttcctcataaaatgccaacaatctctgcttaggtttcgcggaaggtctaatctaattccattaattaatgattcatgaatggaagtggggaagtagcgctacgcagagatggttggcaatttaacttgttcgtcaaaaagagaaacaaacgaaagatacagggttattaaaacaggggaaagcctatatatgttttccataaaagagttgacattaaaggcgatggagaaaatctgagttggaatggtttgggtctggtagaagaagctgctcttgttcttcacttctactcttctttgacaaaggttccggcgaggaagagaccgaagagtcattggagctactatcacagctaaacgacacatccatcacgccgtttgggctttcaagaatcgaccctattccaaac

SEQ ID NO: 29843 - DNA, 517 bp, Glycine max
  Clone ID: jC-gmst02400029b06d1
caacacaatagcttattcattagttctcatccattaatttccattgaagtccgaaaacagaaaccaaaaatacaggatgatgaaatctcaaaaagcaaaaacaaatgggaatgtagtttaagtacaaacaaacaaagtggggtggcggctacaaatgctttgcaaatttttcacacttagaagcctgggggcttgtaggcgatgaagctgatgcactgcacttggcgaacgttgtcgaatccgatgatacggatgaagccgttggggtatgcagtcttagcctcttgaagctccttcaacacctgagaagcatcagtgcaaccaaacataggcagcttccacatggtccagtagcgtccatcgtagtatcctggtgacctgttgtgctcacggtacacgaaaccgtgctccaactcgaatttcaagcaaggaatccatcccttcctaagaaggtattctacctcctttgccaattgtgcatcatcaaagtctggcaggtaggaaagagtctcaaact

SEQ ID NO: 29844 - DNA, 342 bp, Glycine max
  Clone ID: jC-gmst02400029b07d1
ggttaaaaaccaagcttggaaaaaaaatcgccctgaggaaagggacaccaaccgaacttgtggcttaccaacgggccttttaattgaaacccaaaacctgggcttgggaacctttttgggccaaacacgacccttaaggaccggacaggtaccctaaagggaatagggctttgcatgccaaagggccaagtccaaggggttgaaagcccaaacggtaagtaccgaattctctaaacttaagggtccaaaaagggctgccaccggagcgggcatcccgcaagccatggtggaccctcaaatgggcccaagtggggacccactcagctggctttcaaggaaacc

SEQ ID NO: 29845 - DNA, 384 bp, Glycine max
  Clone ID: jC-gmst02400029b10d1
cataatacaaagcattatatgcttattacagccaaagttaacagtgatttgccccataacagaacgcatgattgacctgcaatactggagatttcgtaataaatagcataagaccactttaacttatgcgtaaggtcccttagacaactaacatatgccaccaaaacatatgaatattacagccaatgttaaatgacttgccccataattcacctatagtttcagtcgacaggggtatacatgcagctctcaggatacttcacacgagtctgaggacgagggagacgagtagccaagcctagctgatatgccttggcaggtacacttgcagctatgtgagctgaaatttttctgatgatcgagaatggtggataaatcaagccc

SEQ ID NO: 29846 - DNA, 501 bp, Glycine max
  Clone ID: jC-gmst02400029b11d1
ggcaaacaagaataagacgaattaatttttgtctttaagcaaaacatcaatgaagtgtaagcacaacatcttcatttgttacacttttccttgctgtactgcacatctagtgctgtctactaggatatgcaatttcctatatcccgtgtttccacttttgttcgttctaactctaaacaaaagggtaattgtgcactccatatatactacaactccttaaaagctactacagactaaaatgatcaagcttttgagtaagtaaataaagcaaccaaagaaacaaaattgttgcttcatatgatcatgtatttacacaaacgccccgaaacaaaactcaagtattatgcatcaataatattcagcattttaacttccaaaaaaaaaaaacatgaggtactaaatttccaaaaggcaaccagattgaacgtgaccagtgtactcctttgggctcacaagtttagtccaagccccaacttttagatccaacacaaagcccacatg

SEQ ID NO: 29847 - DNA, 555 bp, Glycine max
  Clone ID: jC-gmst02400029c06d1
cagcgttatcagtatctcctgtaggattataagtatcgtacttcttaaaaaatttagatttattagtcaaaattactacacgtttggcttttctagaacgaatttgataattctctgcttcattttttccctccagttgttccaattcgtcaataaatttgtatgaccatcgaggaacttttttacggatttcgtttattctaatacactttgttctatttccatttactattgttttttcgttcaaatcagttctaattgcatcaaataatatttttattatttgttttttttcttcttcataatttatttttacttgttcatgttctggaaataaagaaagtgcttcaaaactcaagcttgatactaatttttttgaaaatttactgattagattgaaaaaaaaaaatgtcagtactaaagattttctatcaaatatatttatttttttctctaattctggataattactattattttttttataagtattattagaaataaggtaccatgaattttatttatcaaatggtatttttttttcattttttcata

SEQ ID NO: 29848 - DNA, 407 bp, Glycine max
  Clone ID: jC-gmst02400029c07d1
gaaaattaaggacaccgtttttacacaatgtcaactacttttcttaaataacggacctttagttataatcgagacaacactgaaccccggtggaagaactaaagtccttagtgaaaagagagtgcatgaaagtgatagacttaaaaaagcacactgcatattcatcaaagcatcagcaaagtgcactgtatactaacaggacacgtacgtagaaaggtgaatgtccaggtcttgcacaacatacacaacacacgataataaattttatatacaatcctatggtgcccaagaagcataagcttggtctcatggagcaacaacgtgaggctgatagggcaggtccatcgataaattgggtacccataaaacggccttgctttcaaagaaatggctaacagggttaggtc

SEQ ID NO: 29849 - DNA, 581 bp, Glycine max
  Clone ID: jC-gmst02400029c08d1
gactataaaataaagacttatgatagaagaaaaaaactagtactacaaataatgtacaagactatcattattgtcactctacaaagatatattgctatcaggtatcatataaacatcttaagcaaactgcccaaatgacagcagtttactgaaatctaccactttgagccctcttgcaacacaaccataataattatctcagttggggttgtgatgattgtcacattgagtgaacattttcttgatggcctcttccttctcatcaatgaagttaaagaagttaacaacaacctgggaacaatgaatgcccgatggttctgtggatgaagaagcaacatctttttgtctttgtttgaagcgggcatattggcgaatcattagcagcagaaacagtgcaagtgcaacaagcaagacaataccgcatgagagatacagaccccaaaagctaatcaagtgaagctggtcaggcttggagttgcttggcctatcttcagcacaacccattttacagaaccacttctcatgtatcttacggagatcctcattctcagagaggttcaaaattgctgtagacatgtcat

SEQ ID NO: 29850 - DNA, 421 bp, Glycine max
  Clone ID: jC-gmst02400029c10d1
aataataataataattggtcatttattaattgaaggctttaggccaccataaaacaaaacttaaatgtacctgagcaataaaagaaacttgaatacacataagcatcggatactcataaaaacaaagatatggcttcaagttttccaccatacttgacagtgctttatgaaaagtacctaacagccacctattgtctacttctattcacattaacgagaagaaacaatacaatatcacattcaaccatacaaaaatttagaagcttaaaaatttagacatttgaccttcatgatacaaatacaggccaagaccaaaccgggcacaagatttgcagaaagcaattttctcagcagcagaaactggatcgccaatggagccatcactgggtgatatcgtcccagttgactcacgatatgcctc

SEQ ID NO: 29851 - DNA, 463 bp, Glycine max
  Clone ID: jC-gmst02400029c11d1
agccagaaaaacacccctattacataacagattgtccacaaatataattctttttccactatgcccaagtcaatcaacagatagaaaataaacagaagactaaattaagacgaaaaactcaaacttaaaatccaactatatttttcagtatttcccaccttgcttctacccctgttgaaagtaacaaagtaaagctgctctgcaacaaagtagatctaaatttacatgacaggaaacgaccaacatagtaaaattaaagaaagaacatagaataaaggcctagagaaggattaacccgaacaaaaaccagaagatataagcatcttaggcagaaaccctaaaacccaaaaaaccctaggagtaaagcctgttaggagctaaccactgtgaacaaaacccaatgagaagggattggtgctagcattctatgaagtaactccgaccagccaatctcaatatacag

SEQ ID NO: 29852 - DNA, 540 bp, Glycine max
  Clone ID: jC-gmst02400029c12d1
gatctcttgctcttgtaatatatttataaaaatttttcttattaacatgaattttttctgggtatttgtgataaatttttcgtttattcttttgaattaatgaaagacctatggtttgatacatcaaaaattgtttattgtcttttctagacaggcgaactggttcgataacaaatatttcttttttcataaatttgctatttttctttttccttaagcctagaagaattaaattcttctgattttgaatcatcataatatctagacctagttctcctctttgaatagaggctattgtaatgactcttaaattttgtaatctaatcaggagacaatatactttgacattgttaaatattctttgacctaagaaattattccaatttaaatgtaaaatcaaaaaatctcttagtaagaaattaagttctgcctccaactcgtacttgacttctttatctttatacccttactattcttttcactgtctgatcctacataaatcgtttcaattatcttttcttggtttgagatagatgattc

SEQ ID NO: 29853 - DNA, 505 bp, Glycine max
  Clone ID: jC-gmst02400029d07d1
ccttcaagaggacactgttttacatcccatacaaaggctaacacaaagaggcactacaagccaaatcaaactagctagattaaagctacactcagacgactcctatcttctgcaacaattaataaacataataaatgatcatcatgttactcaaagcctggttatttatttatcctaaacccaggctggaagaaacaagctggatcaaagctagcacatacgagaaacattcaaaccaaagaatcaagcttctgtttgctgtttctgagaaaaaggtacatgggatggcatgccaacatacagatgatgttgaattagttggcatttacgagaacagggatagccctgagggactgatccaagtccatgtcgatggggtcaatgttgttctcaagcttccagtcaaagttgttgatcaaggaaccgagcatgttgtgcagcatcctaacggcgaggggggagccagggcaaaatcgtcttccgctcccgacggcgtgagcttgaa

SEQ ID NO: 29854 - DNA, 531 bp, Glycine max
  Clone ID: jC-gmst02400029d08d1
gacgaacaatgattagatttccaattcattcattgcttaaaagtagccgagagagagaagcgaattataaaaaacaataatcaaccaaacctagggcgcaatttatcaaagtagtgattaacacatttgcaagccacgaagcaacatactcaactttcaaaaatctgacaataatgcagtcaactaaaattctgttctaacacctcaagaaatgcaagagttctgatattaacttgaagagcatcaaaaggccaccattctctttggcatcgaaagtaaaatatagcaactccagtcgtataccatacgaagtttaaagtcttctaccccttctaccactctttctacgtgtactatccgaaggaatgggagtaacatcctctatacgaccaattttcattcctgaacgtgcaagggctcgaagagctgattgagcaccaggaccaggtgttttggtcttgtttccaccagtggcacggagcctgatatgaagagcagttatgcccagttccttacatctggcagcaacat

SEQ ID NO: 29855 - DNA, 488 bp, Glycine max
  Clone ID: jC-gmst02400029d10d1
gtataatattaagttctcctaattttaccatacacagaaaggttgtttcctatattcatttattcaacctccttttggaaatatacaagtactgcactagtaccttttcaacaaacttctaatacgaactaagaaccatgcttttaatagtgttctgtgctttctccaaccattaaagtacttaccaatcacctttttgtaactaagcctttgctgaaccaaaatccagtactcagcaatgtttggccttccaattatgtactcattctctaaatccaagagttctaaacgagctaatactggaacaagcatcacatcagccatggtaaactcttgacctgccaaatgaggtgtttcactcagctgcctctccacctcatcaagcagtctaaccaaatgatccttgctccttttcaaaacatctgcttctttcaatttctcttcagtctcgtaggcttctttcaacttcctatggtaatcacttgcta

SEQ ID NO: 29856 - DNA, 478 bp, Glycine max
  Clone ID: jC-gmst02400029d11d1
atagaatcgcttcttttcctctctattttcttatttttcaaccttagaaattgattctgtcgctgaaacacttcttcaaacggcatcgtttgggaccacaaactcattctccacatcaacaccaccatcaccgtacatttccaccggcgaacactcaatcttatgccgcaacttccaatccagcgcctgacatccacgtgaacagtaattcactttgccgcaaaccgaacaccggcgaaactcgtgtggccgcgtctccggtcgaccgcacccaatgtgcgcgcaaagcctcagtccttcttctaatttccccttacctgactcaaaccactctctcagaaaccaattcgccggttgcacttccggcggcgccacgctgtaaccgtaatcactcagcaacggacacgccagtgatgacaccgcgttgttgttttttctctgacatctcagcgcgccccacgtcagcagcgaggaggac

SEQ ID NO: 29857 - DNA, 567 bp, Glycine max
  Clone ID: jC-gmst02400029d12d1
gaatggagtgcgatttcattacaaaattaaaagacaacgaaagacatggtatggtggcatatatactattccctaacgggacaaacttagatactgcccccccaaaagaataccatcagtactaccaaaacggagatttctcctcaatagaaatctaatgcactacaatatttataccaaaaacactttaaaaaaattgttccactcgtcctttctgcttgttccttcaatcccttctctttgtgagcatcaggtttaccttcactcaaatcgcatcgtgcacatatgtagacggaaactgcattagtaagacttaagtagctaagttcggtgcctcctcaaaactcaggcaaaagccagttaaaggttcaatggttctgactctgcgtccctatccttcaattgccaatcttctgtttttggcttatcggaaatcaccatcagtcgcctttgcaagatacaagccaccaaaaggaaaattgagcacatgccaaacataacagtgatagggaatgcatcaacattgtacagcacaacacacacaaaaatgttgagaggaaatgcgga

SEQ ID NO: 29858 - DNA, 525 bp, Glycine max
  Clone ID: jC-gmst02400029e06d1
catcaatctttggagaagacctacttcccctgcgacgacttggagagccagaatcagcacgtgattgtttccttcctctatgaggtgaagtttctctatgacgttttggagaaacagatgattcccttgtctaagggcttacactcctacttctattccttcttgaagcagatgaatgatgatcaagtgatctatctaaatctcgtcttctgtatctatcactatgttccctaatatctctaaaggaccgcctttccctgtcatagcttgagtaatgatgggacctcaagggtgacctatagcggtgatccttagaatgacgagcaggtgaataagagcgagaccttctccttctccggtaattgataggagatcttgactttgatcgagatcttccatgaggaggacagggcgatctggacttctgctttggctctttctcttgagttccaactccatcaggattcaattcttacttatttctgcagctcgggctgctgctaactccgtggcagatttcatggt

SEQ ID NO: 29859 - DNA, 456 bp, Glycine max
  Clone ID: jC-gmst02400029e07d1
ggaaaacaaggataagagtaccaccaatagaattagtcaagcactgaactcaaagtttcaacagggataagagtaccacccattattgaaataatcactcaaaatacagtaatgcacccgtataacatatcaaagtggcgtgcggaaaacacacaggctccatgaatatgtcccgagagcaccatggaggaggaggaggagtcaaacacaacacaaatacaaattaaaagataatcagtactactaggcagaaccgaatttaagagaattcgagccaaatatcttagctaaatgggacaagagctgaaagacaagggaatttctttagccctgaaccttcaccacacttactcctccttttcagccttcttcagccaattaacaaagggttccagcgccttcacaaaggtttgcctgtaccggttccaaataagcagcagtaagtagcataacatg

SEQ ID NO: 29860 - DNA, 537 bp, Glycine max
  Clone ID: jC-gmst02400029e09d1
gccaaagctaatgaactcacaacatttcttgcaaatatagcatcttattacaacttcaacgtcccatataaaaacatatttaaggtaattcaaaagacttatttgttatcgatcgttgtataattcttgaataagacaggtggaagtaaagttcctataagtttcatggatctaactaaaaaataagcattccacgttcacaaaaacacatgtggagacactaaacatcagaaacacctgagagattgtcatgtaaacttggattattgggtcatgttttattgccacagctttataaaaattagaccccaaaggcaacagggcttagttgggtatggcagcctccctcccttccctggccttccatcaaaaaagggtctccaaaccaaaaaccaatacaaatgttttcatcctctactcttccaatattgctcccttctcgctgacataaataccatcaagaaacttccggatatccttggtcttaacatgacattcctggttaatgagagcacatgacctatgaacaagttcaat

SEQ ID NO: 29861 - DNA, 372 bp, Glycine max
  Clone ID: jC-gmst02400029e10d1
gggaatccaaaaccagactttattagattgaaaagcgtaactggacattgatagaaacagcaaattctttatttaatgaacaaagttacacccctaatatttcccaattccagggatcactccccatgccatttaattacattggccctcatggatgccttttacaggctccttcactaatcatcatatgggatctcaccagcagaaaggaaaatctattggctggctacaacaactggtggcccttccaccttgaaagtcgctccccagatttcctcctcattagcaggaactggagtaatcttatttttaggattctcatagcacattaatccttcaacagctgtagagtagaaacatccttgggggaaa

SEQ ID NO: 29862 - DNA, 375 bp, Glycine max
  Clone ID: jC-gmst02400029e11d1
catccaaaaaaattctggtctattgaagttaaaaaatcgcaaaggtacatctatggctacatgctctcactttcaaatattatcctctcacggatatggaatgcataaatgttctcagtttaacaatactaaaacacagattttcacaggcaaatctccccatattccatttacccaaaatccaaactatcgctaattcactagttagatcaatgctgactagaacgttgtattccataagcttccatgatccccgagggaaaaacaggatctgtagcagctttaacagcaacttttgccaccgcagtaccattgacaggaggtgtcaattgaggcccaccatgtgggatctgatacaacggtttaaccacttgg

SEQ ID NO: 29863 - DNA, 495 bp, Glycine max
  Clone ID: jC-gmst02400029e12d1
attattcaagagaaaacatccttcacatggaaggccatgtattgatatttgcacgcaaagctacggcaaacaaatggaattctattacattatgaattacaagttccttgcatggcatacatcaaggaaaactgggaagttgttgtatgtggattgatttgccacagccttatatagacaaaccaaatgcttaatatcaacacaaacacgtgtacagaaaagaaaccactcttcaagaaaacagaaaataagaaaaactaacatattggaagaggtgccccattccactccccaaggcattccaaaagtggatcaatgatcttcccttggcacaaagcagtgaacactttgtcacactcttcacccggtgagataaccctttcaccagttagcaatgctgtccccaactcctctctcacaaacttgtacaaggggtaagacctgcattccttgatcttgtttggaattgcacattggtcattctcatatgcaact

SEQ ID NO: 29864 - DNA, 490 bp, Glycine max
  Clone ID: jC-gmst02400029f06d1
gatggttgttaaataccatgttagatttaatcacaaaaaccaattgtaaaggttcttaatagatatataaaccacatccaagtaattgaggcaagcatgtggaactaatttccaacaattacttgatgcggttttgatatgattgcaaaggagtatctcaattcattcacggagacaaatttcctttgaggatctgaaacactcaaaatttgagttgtccctcccaatcaaattttcttagtacacaagagttaggattcaaattcggcatgttttaaatacatgttaggcaccttcatttaacgtcacaaaggtaataaaagaagccatgccatggccttattaaaatggaaaagcttacccagagacaaggcgcaaattgtcctcataacgctgtctttgtcgccctgttcgtgccggcacagacgacataagtttttagaaaaagacaaaaagaaactttgagcacacaaaggaaaacaggggagat

SEQ ID NO: 29865 - DNA, 498 bp, Glycine max
  Clone ID: jC-gmst02400029f07d1
gatggaaaaatgaatcgtttctgtgatgtatcccaaaagtacaattcgaagagaagcatcatcccaaaactcaaatttcggaaaatcaacaagcacaattttcttcagcagcaaaaaaaaaaatctatactttttataccctatcactgaaagtaagaaaaaaaaactgaccctaataataacaccatgatcatgattatcacataacaacagatctctgcgccttcctccgctcataatcagcatcatcagtggggaactcatagcgacaaacgggacacgtgtttcttatccccaaccacggcacaatgcagtcctcatggtaacgatgcgaacacggcaacaccttcaccccttccccaacgccaaactcgtctttacaaaccgggcaaacgacgtcagcttcggtcacaaccaccgacggaagattcctcacgaccgaggcggaagccggaggcttcccattaaacgcatcgtcgttgaattgcccgagcatca

SEQ ID NO: 29866 - DNA, 420 bp, Glycine max
  Clone ID: jC-gmst02400029f09d1
gaataaggaaacaagttacatactaagctaataacacataaatagtcataaaatgtgcaatccaagtatttagcgcaaatacagtgaagtccaaccaacaaagctcaagtgtcgagtaaatctttatctaacactttagattacaataagcactactgtactcagaacaaaatgtcaaacaaaagaccagttcataaacataaagcacatacaatgagcattctcttcttcattcagcaccttccaagcaacaactctttcgtacgagacaggtcgccccatgcttgaaagacaaataccaccttgaagacatacaaaaccctgttgaataatctggggaaactctgaaaaaagtatttttcgtccatgatcatcaaatattttctctaaaggtgtatcccgtaatgcaacaagggtggt

SEQ ID NO: 29867 - DNA, 305 bp, Glycine max
  Clone ID: jC-gmst02400029f11d1
gggtcaaacactttttttaaaacctacacctaaaaggattgcgaacttataatttcctaaaggagcgttttccctttggatacggttaggatggcaacttacaaaatgaccctggggcatttagctcaatgaagggtgccacggacattccaataacaggatcatgggaacactaaagcccctccaaggttggcacattgggatttccaaccggatttcgcttttacgtccgcttccatggcttgccagagccatattgtcctgggatctcaatgaaatacaagggccctttgagttcaacggcc

SEQ ID NO: 29868 - DNA, 375 bp, Glycine max
  Clone ID: jC-gmst02400029f12d1
aaaacaaacacctaaaatgattccgatctcatattttccttaaatagggctttcccattggatacgggttggatggggatttacaaattggccctatggctattaccacaagaaagggtgccatggcattgcaaattacaacagattagggctacaaatcccccacaaaggttggcaaaatgggatttcctatgtgccattccttttttgacagttacaagagctttccagggccaaattgccctgtgttttcaaagatatacaagggcccttttagtttctcgggcataaaccacgcttagtacaccaaagttatatgccaaacaaggtgtaattatgttacatctcaatcgaaccattggaaactgatgtatc

SEQ ID NO: 29869 - DNA, 319 bp, Glycine max
  Clone ID: jC-gmst02400029g05d1
ggaaaaaaccccaaaaaccaaaagggttaaagccccgctttttttaaaggggaaaaatagttggaaccccctccaaaaaaaattaggcgattaaaaccccattaaaaaagcctaaaggaaaaaagggttttaaaaccgggtttggggggaaagcagccccctttagcccactttccaaaatttggggcccacccccttttcccccaagggggggcccccttcctgatccctgggggcaccaactcccccaacgggggggccacacccccctggggccatgcgggaaaaaaatggggggcaaaagcctcccaaatcccta

SEQ ID NO: 29870 - DNA, 463 bp, Glycine max
  Clone ID: jC-gmst02400029g06d1
gggcatggatcaaagagcatatcatataacatgtatgatctgagcttctttagtagtagtagcgggagtagaaagaagcaacaaaccttaaatcctagcaaggaaaactaaaaagctatttacataagttgttaatccaaacgagcccaatcatttgcaacatgtagattatactttcgtgccaaacgatgagcagttttgtcagccataatgccctctatcatcttaaactttttgtaatgcaccttaagggtctcttcctgctgctttgctagcttctcttcggcttctagtagcagtttgtcaaggaattctacttctgcagcatgtttgcgagttagattctttacttcctttgccagctcaaaatcaggatcactaagcttcaaccaacggatcttgatctttctggtaggctttaatggttgatcatcaaacatttcccttacagcaggcccagccc

SEQ ID NO: 29871 - DNA, 385 bp, Glycine max
  Clone ID: jC-gmst02400029g08d1
ggggagaacacaaaccccttcccattttcaatttatttaccctaaagccccttggattcaaaccccgggaaatcattttatttttccccccccggggaaaaccctatggggggcaaatttagcaaaaggggggggccgatttttcaaaggggcccctttggccccaaaattccctggaaagccttttcaaaccaaaaccggtagcccctacccccggccctgaaaaaaggccccccccccctttatttaaatgaaagggcccccttttatgggggccctctcaaaaaagacggggaatcccgacccaatggaaaaacccccctcggggcaaattggtttttgaaccccccctttggtcaaaaagaagacccctttcccgaacttt

SEQ ID NO: 29872 - DNA, 339 bp, Glycine max
  Clone ID: jC-gmst02400029g09d1
ggcaacacattgctgctgtaaatcatctggaaacaaatgttgcaagtgtgaagatcgagttacattacatgaaacttgggaaatcaaatgttgcatgagtaaagccatgttccatattgaaatcaagtcatattttgagaaaccacacaatcaaatcattttactttggccgaatcaactttagcgggaatgtttccattgccagccagagtctcggagttttggggtcggattttttgggcaatttacttagctttgactgaaagcttattacaatggcaactttgaactcaactgagaagggacccgcttaagttgttggaccggtcaaaaggggcg

SEQ ID NO: 29873 - DNA, 451 bp, Glycine max
  Clone ID: jC-gmst02400029g10d1
agacttaaaaaagcacactgcatattcatcaaagcattatcaaagcacactgccttctaacagcacacgtacatctaaaggtgaaaatccaggtcttgcacaacatacacaacacaccataatctatattatatgcaatcttatggtagcccaaaatgcaaatgcttggactaataaaacaacaacgctagccctagacgcagcgtccatagataaattgggtacccataaaatggtcttgctttcaaggaaacggttaccagggttagttacaggatcaactcccatgagttcatgaagcacgtgatgattcattccatagagttatgactggcaaacaccaagggcccgagtttcggatgcatcaccagtcaccaatggtaccatgaaagccgctgaatcacggactttatggcaataaaatactgcagtcctgaaatccagaccatga

SEQ ID NO: 29874 - DNA, 416 bp, Glycine max
  Clone ID: jC-gmst02400029g12d1
agtaacaaaccattaaaataataagtactgatttacatgactttacaacgattttttttttcgagaattgatatacctacatcctaaagatcaagtacgggttagtgcattccattcttctaaagctaatttacacagatcgaaacgtgatttgaaatgctcctgctatggcccaaaagaaataaacttaaattcctattgacaacataactagctgattaatgccggagtcctcattagtgacactttgagctccagccatgagtcattgttcgcgtgtgttacttaacagcttcaaaattatcaacttactgtttagcctgtgaatagaggaaggcgccaagaattgcaatggcagcaccaagagcattgatgggctgaacaggcgtgtgaaagataatgatggaagagacaat

SEQ ID NO: 29875 - DNA, 551 bp, Glycine max
  Clone ID: jC-gmst02400029h06d1
aactctgaaaacatataatttttttatataggtaaaaatgtctacaaggttactaagcaataaacaagtaagaccacattcctatagatttcaatctgcaagaattttctctttatttttctttcttgttgctaatgaaatctttgacaatggtgatcatgatcactaagtaattatcctattcaattagtagctggtgacgaatggcttgtaaactttaagatcatcaattaccccagcaatggaacctgctgcagctaatagagtaactaccaagcatgcagcactaagcatttgtaggcatatccatcttgggccccactttggtatcttagcttgagttatatacatctccactggtaaataaacagcgaggggccaaaatccaatggctccaataagccctacaatgtcattgaagaatggtcggagcatggctatcacagttgacaaaatcacaaaaattgtccttcaaaccaacctgtagaggctgagcctgtaaggtttgcaaccagggattggtactttcaactctctgcttataaaaatac

SEQ ID NO: 29876 - DNA, 554 bp, Glycine max
  Clone ID: jC-gmst02400029h07d1
aaggaatagatgatcacatttaaacaaactttacaggcataaaagtatatgacaatgcaaacagacattaattgtttcatgtacaaatgaagcccgtcccgataatgaaatagcaaaggttttatccaattccaaaacccaaatagcaaactaccgtaagcttaaatgaaataggccaacgccagacttgaaacaaaataattttataaagcaaatgaagaaaagaaccccaccccgtatgaaagaattaagttgaacagcacaatgttcttgttcttgtggttgtaataatgatgaacatataacagtaacagtaaaatccttattcttgagcttcaagttactctgggatgggcttggtcttggacctgtagaggagtttcttcttcttggatgtttggttatctatggtgagtacaatcttgccaggttcaccaattttgaaagcgttggtaataacggtctcatcagcgggacccaatttcctgttcttctgaactatgacagtgtaaccatcctcagcgccgggaacaaattcagcaccgtagctgaca

SEQ ID NO: 29877 - DNA, 547 bp, Glycine max
  Clone ID: jC-gmst02400029h08d1
aacacaacacaatagcttattcattagttctcatccattaatttccattgaagtccgaaaacagaaaccaaaaatacaggatgatgaaatctcaaaaagcaaaaacaaatgggaatgtagtttaagtacaaacaaacaaagtggggtggcggctacaaatgctttgcaaatttttcacacttagaagcctgggggcttgtaggcgatgaagctgatgcactgcacttggcgaacgttgtcgaatccgatgatacggatgaagccgttggggtatgcagtcttagcctcttgaagctccttcaacacctgagaagcatcagtgcaaccaaacataggcagcttccacatggtccagtagcgtccatcgtagtatcctggtgacctgttgtgctcacggtacacgaaaccgtgctccaactcgaattccaagcaaggaatccatcccttcctaagaaggtattctactttctttgccaattgtgcatcatcaaggtctggcaggtaggaaaagagtcttaaaacttcttcttgtcaactggtggccaca

SEQ ID NO: 29878 - DNA, 484 bp, Glycine max
  Clone ID: jC-gmst02400029h09d1
gggagtaacaaaataaatttattttcactttgcagacttgaagcctgggtatattgagtgtagagtcaatccaaaaattctgttgatactgtgatcagttgtacgggatagcagacctgaattatcctttcaccctcaaaggcagacatcaaatatgattgccaattaaaattgaatgttactattctgtaactattttagcagcttgcccgtaaatcatggtgcagcttcttagcagtatatacctgggaatttgttcattgcctactccactttcagaacaatcttcatgaactcatagacaaagaaacttatggaagctgaaggaagcacctgtaataagctgggaataagtcctgcatagagagctggaatgcctccctgttcaactattttggcaaatgttgcaaaagaacttaattttgtagcctgtacttgcaattgaagttgccttctcaccacttcaaatgggtatgtagcagct

SEQ ID NO: 29879 - DNA, 481 bp, Glycine max
  Clone ID: jC-gmst02400029h10d1
aaaaagtgaaatcaagaagcaattcttgttattaatgaagagattattctctaccatacacatggtacatggaggctcaaaagaccacttggcaattcctaactaaacaacaccttgcaaatataaaattttagatcaaatgactattgaacacacaattttaagtggtccaaatctagagacatatgactgtgttttcatggtttccagaggatggtagtctctgcgatcatggaggtgactacatagggatccatattagaagcaggccttctgtcctcgaagtaacctttgccatttttctctgtgtctcttccaactctaatggagcttccacggtttgccacaccccaagagaaggtgttgatgtctgcaggttcatgtcttcccgtgagacgtctctcgttgacttctccatatgctgcgatgcgctccttgtgcctcaaaccaagcttttcaatggccctcttgatcacctcat

SEQ ID NO: 29880 - DNA, 436 bp, Glycine max
  Clone ID: jC-gmst02400029h11d1
caaaggaagttaaactctcaataaaagcacattaatacaggagcacagatgttgaaagccgtgatatacggcagtttttgttgcgacacactaaaatacacctgatcacaagttcgatcgttttttcaagtccataaaatggcatttgatctacgcagctacttcttctgcacattatagagctaagtgtgctaggcaatggctgtgctaggatcggatgctgctggatcaccttcccagatggttgtctacttcccagttttggaaacggtcggaagaactgtgtctggctggacatttcccttgagtaccaccttatgttacttgaaatcaatgtgatatgattccacaccatgcaagtgtcctaagactgctgttactgctccaacacatacttgacatgacataccaacttcgaggctacagtctgagacat

SEQ ID NO: 29881 - DNA, 268 bp, Glycine max
  Clone ID: jC-gmst02400029h12d1
aaaaaaaaaaacaatttaatctattaaaaaatggaggaaaaacataaatacttcatgattatgataatcagtaacgaaagagaggatagatacacatgcgaaagtcaataaattgtgaaaaatcctcgatacacttgtctctcctaggaattcattctaatgtagcactaatcaaaacccatgatcgatgaagaatcacatgctcctctttcttcctttgaatctcatcagggtagcacaaaaaaaaacccataaaaatgacccgaaa

SEQ ID NO: 29882 - DNA, 489 bp, Glycine max
  unsure (1)..(489): unsure at all n locations
  Clone ID: jC-gmst02400030a01d1
atctgcagattcttgctaaatgaaacaaaacgttattctgcaaaggccaataaacagccatcaaaataaattcgaaagcaaagtcaacatagaatcaaatcaagtttcaggtttgaccattgttttttcctccttatcctaaatcaaaacaatgtgtcaaggtctaacaaaggataaataaaattttacatctaaagtaacgcttccagatataagaaaaaacaaaaatgaaaacagaactaagattgggggcataaaatgatctattgatgtgggaactctgtctacctccttttgcttgacaacctgaattctgaggcaattgtagttcccttcatcctaaccagatccgacaatgatgttgctaattggaatgaaaatgagcttcacgaagaaaccgacgaatcccatcacgacgaaaccaattgcagtacggacggcaaccttggagaattctntgcgatcgggtttgtggcaacgcttcacgag

SEQ ID NO: 29883 - DNA, 585 bp, Glycine max
  Clone ID: jC-gmst02400030a02d1
gttatatgaaatattatgatgtgtagtttatactttaaagcatccacaaaggaaagaaagaaaaaaaggcataatgaagtgtgaaaacaaaaactaaaatccaaattgatacaacaggaaaatatgatggagggtgtatttattgatttattttctttcttctatgccttttgttggaatcaggcaaacatgtcagagagggttgggagctttatctctcccttctgagaaagaggaatggtgaagttgccaatgacaggaaggtcaataactagaccaagatccaattggtaatcaatgtcccaatctgcaccaatgtcctttgccaagctcagtaatatgctatgaggcaccttcactggcacatccagcattgttgtgtcacttgccttcagtgaccctgggtcaagtattgtccctgatgctatctccttgccagcacttttgagggagtacttgatctcacaaatgggaatgggagtggaataagggttggaaacagagaccttagccaaatactcgacgctgtcgcggctcacgcgcttgaaatccacgtcggtgacactcgcctcgggcttggcatgt

SEQ ID NO: 29884 - DNA, 538 bp, Glycine max
  Clone ID: jC-gmst02400030a03d1
attctagatggattcttacacgtagataccacatttttgttacctatataatattttccacaatataaccacaaatctaataaaaccaagacatgcataaagttggatctaaccggacagtactactacaacacaagtcatgtggtgcaataagaataacgttaaggccacatgctagtcatagagctcacagcattattactattgattccactattgaaatcgctgcaaggaatattatccaagtttccaagcccaccaagaggtgaattttgtccactaactgtaattccacctccatatgaagcatcatcattcccacggacggtgatggttggcgaaacatgtgtcatgcggtgtagattatttgtgttgagttgaggtggggtgtttagtgaactctgattttgaagaatctggttgttgataggggtgagtgtgccacgagtgaccatatcctcagctaatttcaccttagctctcaaagcttcgacatctgattttaggactcggttattcgtatcagcgtcacgaaatt

SEQ ID NO: 29885 - DNA, 576 bp, Glycine max
  Clone ID: jC-gmst02400030a06d1
cataaaaaatatgaagtttctatttaaggaaaaaaatagatcatactaataatggaattctcatctcattctataaacattacaatgtggtaactagaactcatattctaagcttctttccaggtgttggttcatcatcataatggttacccccctcaccattcgtgtccttttccatcttctttctggcaagtatcttattgatcttgtgcaaatcattattgagcttctggtccttgttttgctttcgggtcttccggccatcttgcatcttcacaccgaactggaatgcagcttttggcattgcttccttctgctcattgtaagttgcccattcctcttcagtttcaaagtcccatctatgaagacgaccctttgcccttccacccatgtccattttggacaagtcgtcttcatcatcactgtccactatctcacggttatattcttgatatcctgggtaacattcagagtaactctctgagatgaagttgggatctttttcacgagcatctttctcccttcagctgtgaagtctctggtcatctcgcttaaacactgatcctaaaccccgat

SEQ ID NO: 29886 - DNA, 551 bp, Glycine max
  Clone ID: jC-gmst02400030a07d1
gcaacctcttctagtgcagctctcgccaatcgttttgcaattcctattctgggacttctggagatgatttcaacagccgcttcatcagttaaatgctcccaaagtccgtctgatgcaaagatcaaaaacagatcatctgccttcaatttacgcgccaatatcgatggttcagctgtcattacaggtctcctcaagtatagtggacatacaaattgttggaacagaggattagtgtcaaattctggcttctttaggtaaacatctcctattgatcttgagacctgaataatgcccttgattcgccaaactccacgagtgcaaaccacaatgtgtggatcatcagggtgaagagcttcaacctcctttctaacattctccactccaacattatgatcagtggacaaacgctctgccaccacagcaccagcaccacaattcacctctccttccaacgctttccgacccaaaaccgccctcgaatccccgagattagcaacataaaagactcccttttgaatcgctcccagaagacaacacgaacccacggaagc

SEQ ID NO: 29887 - DNA, 502 bp, Glycine max
  Clone ID: jC-gmst02400030a09d1
attcctagaattacataaccgatcaacagtctccataataataacagtgtcacatacattacacacagaacagatcctcagcttcgaaacacagtcagggcgctctctacataaaccctttattaaggaaaaaaaaaacaaagtgaactcacgaaagcacgatcaattactattaagtttaccgaaccgaaaacggcgccgttttggattcaggtcttggaagcttcgagatctgcagctttctgaagaagactattgggatcatcctcgaggaccatgcggatggggaaggagccgaggccgtcggcgatggcgagcatgatcttcctcatctcatcccggaactcgcggcggtcgacggcgccgctccggtcgccgtcgaacttgtcgaagatggagtcgtagagcttcgcgagctgatccggcggcgtggcgacgtcgatgccgaagtgcgtctcgatgaggcgcatggactcgaaggccgtgcggagctccgagcgcg

SEQ ID NO: 29888 - DNA, 382 bp, Glycine max
  Clone ID: jC-gmst02400030a12d1
acttctattcctggggggataaaaaaattaaaatctcttatttttgggccccccccaggaccccaaaaaaaaaaaaaaaccccctgcccccaaaaaaaagggggccaaaggccccccagaaggggtgccaaaaaaaaaaaacggtccaaaaaaaaatacccgggggggggggaaaaaaaaaaaacccccccgggggtccggggggggaaaaaaaaaagcgccaacaaaaaaaaaaggggggatcccaacccgggggggggggggggccccccccccccggggggggggccccccccccaccccgggggggggggaaaaaaaggggggggccacaaaaaggggaaaggctacgggcccccccacaaaaaaccaccccgggggg

SEQ ID NO: 29889 - DNA, 480 bp, Glycine max
  Clone ID: jC-gmst02400030b01d1
accaagccaactttcttctattcacgtctcacctcaccatttattgtgaaagcaaaatgaggggactctgtaaagagagagagaaatgataaaagcacatacatagaatatacttaattgacatagttagcaaaactctctttcacaagacctaaatgatatataaaagcgtgcacacacatatatatatatggatcataatcaagctaaagaccacttgacccaatcaacttggttagcccaaaagtaatagccatggctagccaccccccaagcaagactctcacacaagacctaaatgttggagccttacccaacactgcccccaaccaaccaaacaccacaagagctaaactcactgctcccaaaatcacaccaagccttaccttatagtcccttataaaagaggctgcaaggagaggcaccaatgcaccaactgaaaatgcaagagctgatgctgcttgcacatgtatagggttc

SEQ ID NO: 29890 - DNA, 527 bp, Glycine max
  Clone ID: jC-gmst02400030b03d1
ggtacatcttaatgtcttttgtccatctttctctaacttctcaaatttctactaagccaaaaaacttagttctcaaactacagaacaaagtttaaaaaataaaatagaagctagttatgtcgtagattacaaagaaaaagaaacaacataatctaaagatcaaaatgcttcccaccataatctttaaaaaggatgatgtggctacagcacagcttttgctaattattatcataggaatatgtaggctaaagagcacaaaatggaatcctccctccccatatgagtcctacttcaattaaagcactttcaagcttcaataaattctatcattgtaagttttgcaatgctctattcattccattcaggagaacattgccaccttattagtaaatcacacaatcaaggaggcaacacaacttgctgacacagaatgagatctgaaatggtctttccatgccgatcaattcgtcgagaacagttgacaccaccatccagtatgttcctaacaacaatgtttaatgactgga

SEQ ID NO: 29891 - DNA, 376 bp, Glycine max
  Clone ID: jC-gmst02400030b05d1
ggaaaaataagttgccactttttagaggctttaatgattaaacaagagaaacatttgggaaccatggattacatcaaaccaaggggaagggaaacaatttgactaaagccaagcttacaaatggattaaattttgggacccaaaagagaggctttgatggggcaaaactttgacgtggccggggattaacattagcagtgccaccagctcctggttttcctttacttcctgggcctcctgaacttcctccaccttgggcttttcttggagaattaagaattttttttttggacccgtctttagtttcctcaactttgtcggtcaaccttattgacttttttatgcttccatataacttcccaagaagttcttgggc

SEQ ID NO: 29892 - DNA, 207 bp, Glycine max
  Clone ID: jC-gmst02400030b06d1
caaaaggtaatacttttttatttattttactgtaaatagtgaaggaatccaaacaactgggcttgagagtacggaaaaagccataaacacatagaagacaaacagcggctactacaaaaacacaagatcccaacatgagtcgaaaacacatacacgctttaaataggcccgtgagcaaaccaactgtctgaaaactcctggatatac

SEQ ID NO: 29893 - DNA, 494 bp, Glycine max
  Clone ID: jC-gmst02400030b08d1
agcaaagggaaacatcccaaaattgaaattactgtcaataatgaagtttttctaataacagggcatgaatgtccagaaaaagccatcagcacattgaagacaaacaccagctactacaaaaacacaagaacacataaggagttgatatcatagacatttttcaaatatgcccttttgcaaatcaactctctaatcattcctggatattcctaaaaacgtattcttattgtttcttttgctcgccactgtcttcaactcctatgctcttcaatgctttcaactttctgtagcctatatcagtcccaaatatccggtccatgtaagtaaaagttgatgaatagttcccagacttggtgtacaataaacggtgatgatagtcatggaaatcagctcctccatacaatggaaggaagttggaaagactccatgggaaatggtaaccacaatgagcctcaactgtctctaggactctcagaaccatccataaccagaga

SEQ ID NO: 29894 - DNA, 445 bp, Glycine max
  Clone ID: jC-gmst02400030b10d1
ggaagctatagaatatttactagcttaaaacacgacatttagcgattctttcttaataccagcagcttaaagtttctattaagcgatcagatcccaggactccttctctttctcaaatgacactacctgaactcaaaaatactcggatgagtaaggaggaactacagccaccccctgttgggactctgatgtaccgaacgcttaatcaggtgcaatggtcaacaacgcgaccttaccgttcttcatagtcaatacagctctatcacgtccatcaacaacttgttcctaaaccgttttgaattcaaacagcttctcttcttaatcatggccctgtattaaaaaagcggcaccatggtgtagcttacccattagtttcactttaacaatgggcccctcatttggacgctcatgtccttccccttacttgaggatcttcggtatgacc

SEQ ID NO: 29895 - DNA, 157 bp, Glycine max
  Clone ID: jC-gmst02400030b11d1
gaacacaatagagaatctactaatggaaagcaagacttgcactattgaatacaaatacccagccatttcatttttcacaaaaaaggaaggggcccaaaactacgaatgattcataaacggcggtacataaccgcacaataacggggagggggaaaga

SEQ ID NO: 29896 - DNA, 157 bp, Glycine max
  Clone ID: jC-gmst02400030b12d1
attaatggaaagcttgacttgcactattgaatacatataccttaaccatttcatttttcacataaaaggaaagggcccaaaaccaggggtgattcatcctctgcggaacggctctgggcaatacggggagggggaaagaggaagtcaaccaaccacc

SEQ ID NO: 29897 - DNA, 430 bp, Glycine max
  Clone ID: jC-gmst02400030c01d1
aaccccaaaccaaacagttttattcatataataggaagctcgagtttatatcatagtagatgcatttgttttttgtatgtctcaatcctcagacttgcaccataaccaaagtacattgatttttatttagtaagtacttttacttagcatcttctctgctataattttttagggtttttttttaaaaactggacagcaacaatcaccccacacacacacacacacacatttatatattggcctctctgagactgagttgcgaattctgatctcgaactccaattattattattagcacaaagctcaatttcagtccttcctcttggggcaagtttcgttgtcgctctcgctgtcgctgctgtcgctgctggtgtcacctgataagcgatccttgatgttctgcaacatccctttcttgggctccctctta

SEQ ID NO: 29898 - DNA, 445 bp, Glycine max
  Clone ID: jC-gmst02400030c02d1
ctacctgcattttattcaacacaaaaaatgccttccattccccacaagctagtggttgtcacaaaaatctctgaacaaactatccaactccacagaattgcaggtgaaaagggggggaatagatggtatgtatgatatacttctcctgaaaatgtgggggaaaacaaaatatccaaaagaaaaaagaatcaaacttcaagtagtttagttgtgtaaaggctctgcggaagccgggaaggaattcaatgtagtatcatcttgtttggatgaatcttctgtagcagcttttgcatcagaatgctgaagcttcttgtcacttaatttagaaggagatgtctcaggtggttgtacatttgataaccccctggtgagaggagtatcaagtacattcatagcaggtgaggtcaagccatagttctgagggatagtcaaaactggatgatca

SEQ ID NO: 29899 - DNA, 598 bp, Glycine max
  unsure (1)..(598): unsure at all n locations
  Clone ID: jC-gmst02400030c03d1
cttggatctcacgttccaagttctcaatctgaattttggagccttcagggtcatttacagattgctccatcaagcgcttcagagtgctggtactgaaagcaatatctccggctagcattttgacttgttcaaccagtagatccttctgatcagacattgtcatcccacccactgtcaattttgttctacttatcagttcaccagcttgtgttgattcagtaacagtactgctagctggggagaactcttcattccatctactagatgatcttttatgtctaccatcatgaaactgatctgatgacactgcagaagaatctttctgactctcattttcaatatcatcctcgccaacagagtgacttcgctgatggttgggaacatcagttagatatccaggaattgcattctttgaggaaaccagaatgagtttggttagcctctggatcctactcataagagcagccttggcttcctcctcttcttccaatcttgattgcattttcacttgaccttcttctaactttngctttaagtcaaaatctcctcatgattgacaccaactagcatccccttcttagttgatcagttctacttt

SEQ ID NO: 29900 - DNA, 369 bp, Glycine max
  Clone ID: jC-gmst02400030c05d1
aaaaaaaaacaaacacccccaaaaacgaggggaaattaacccaacctgtttttaaaaaaaagaaacccaccccattgcccgggtttttacccccccaagaaaaaaccgtgcaccccctttatttccccagagaaaaacaaacgcggataaacaaaccataattcccctttttttgaaaacccaattttcccagggtggccttattttaaaaaaaaaaaacccccccccccccccgggatgttttttttttttacaaaaaaaggggggggaaaaccctggccacccccgggtacaaaaaaaccccctttggttgccccgatttttgggtctttttttgagaagaggaaaaaggccccctccccccctttt

SEQ ID NO: 29901 - DNA, 170 bp, Glycine max
  Clone ID: jC-gmst02400030c07d1
aacaagaaaacacacttatactgaattaacaggaaatagtgaagcaatacaaacaacagggcttgaaagtacgtaaaaagccataaacacatttaagacaaacaccggatactaggaagacacaagatctcaacatgagtcgaaaaaacatacacgctttaaataggccc

SEQ ID NO: 29902 - DNA, 274 bp, Glycine max
  Clone ID: jC-gmst02400030c08d1
gcaaaaggaaacattctttaattgaaataacaggggatagtgaagaaataaaaacaacagggcatgaatgttcaaaaaaagccattaactcatttaagacaaacaccggatactacgaagacacaagatcccaacatgagtcttaaaaacatacaggctttacattggccctagttcaggaaagcctgtctgcaaactcctggataaacctaaagagggcttaacaatggccgctttcgatcgccacgtgatgaaagatgcatggctcttcaat

SEQ ID NO: 29903 - DNA, 422 bp, Glycine max
  Clone ID: jC-gmst02400030c09d1
aaaaacaaaacactcttatattgatatattagaaagccgtgactaacaacaagatagagagttataatgttcctgtaaaggaataaacccaaattagacatgcatctgattgtatggagtgacgagatctcaacacgaaccatactgacacacatgaactatatttaccccattcagcaatgcccatccgaatctgctggagctaaactatgcatactttagtaggaccgcccacggtgcaccggtattacaaagcatggggctggaaatgaattgtgtgactagaatcgttctgtgttcccggatattgccatggatattgttgcaagagcaggaccaatggcctcctttgcgtaaatgatgcgtcaacgctcgcacgagacatcaaacatttcctatgggacatggacgacaagcttaca

SEQ ID NO: 29904 - DNA, 211 bp, Glycine max
  Clone ID: jC-gmst02400030c10d1
aaaaagataacactcttatacttaaataacagaaaatagtgaagaaatcaaaagaactgggcttgagtgtacataaaaagccataaacacatataacacaaacaccggatactacgaagacacaagatcccaacctgagtcgaaaacacatacacgctttaaatgggcccggtacactaccggctgtctggacactcctgtataaccctaa

SEQ ID NO: 29905 - DNA, 469 bp, Glycine max
  Clone ID: jC-gmst02400030c12d1
aatcaattgtatatgatattttttggatatttataataattggcaggaattttggtaatataattaaagtttagtttgatgtgaaggtagctgtaaacctagggaaaggactatttttaactgccttctgaccatacttccgccatctgtagccatcctcaagatgatcaacttcactcttggtcataaatgcaaaccgtggctgccgtattcgcttttgccccttgtttttacctttactcggtatctcaggcggtttatcgtcggagacggtggatttctccggtggatcctcgctggagctggaagaaatcgattggttgttcgaccgcgacggcgcggcggcgaccggttcaatcgaatcggtcagagaggactgaaccggcttccacaatccgtcgtcggtgccgatccggttcggctggtccggttcgaggttccacacgaattccctgagtatgctccgctc

SEQ ID NO: 29906 - DNA, 474 bp, Glycine max
  Clone ID: jC-gmst02400030d01d1
ccattcaaaatcttccgggaagaaagtggaataaaatttttccagtgttattattgtgtttctccccggtcatacataacccctacaacagaatccagtgtttcaaacagaatatcccccaccccacatgagaaaatatctaaagatacaaattttgacacataacataacataactgcagttgtattaaataatccaatcaaaatgaaatcatcaatagcaaaaacagaaaaaacctcttctgatgtaactgcagacagtgctggtagatcaaggaaaggggggaaatgatgccagaatctacttaatatattgagagacccattggaagccatctccatatcccatcttgcgtacaatgctgcacatgaacacttctagaggccgaaggttcgactccgtgaggttgacctttcccttccccgtggtgaaactggtcaggcctagatgataacgtagctcttcttctgatgc

SEQ ID NO: 29907 - DNA, 476 bp, Glycine max
  Clone ID: jC-gmst02400030d02d1
accaaaatatattcgaattatagaagagaaaggaaacatcaaaagccaagatatatggcaaagtaatataatctatacacaaattaacaatgagtagtgtccactccaaactcatttcactctcatttgaaggccaaagtagttgaaatatcttgtctacttgttgctttctttattaagaattttttgaaagattcaagaatggaccggccaagaatctcagccaaggaatgctcaatttgtggcagaagatggtgagccagagggcttaaaagcagcttgttcagcacaggagagaacttcattaggccctgcctcttctctgccaacacccaagagatcaagataataaagatagtgtgaaatgatgttgttcatggcctcattatctgatccctgaccacaagtttgatccccatagagcaagtttattgtggcaccaaatccgggtacccttttggacaatgtgtcatttt

SEQ ID NO: 29908 - DNA, 454 bp, Glycine max
  Clone ID: jC-gmst02400030d04d1
ggggggtaaaccaaattttttgaatggggagactaaaacaaagacttttccgggtttgagatctaacaagtaattaaacttaaatcaattaatcaaaacagtctaggacagtttaaatgcaattttaccgccattgcaaaacattgaaaggttgcttttaaatgccgaatacccaacattttcgaacttgggttcacaaaaaattatttaacaacgcagactcaatcggtggtccttttgccgggatctcaaaacagcaaaaagggtgacaactaatggcaattgcctcattggttcataaggttgggctcttctccaaatttgatatagctatgtacaacaatctaacagggtaaacacttttgaacagaactcggggctccaatagttctgataaaacaccccttattttgtcaacagaaacaggtgttaatataagggcattcataccaac

SEQ ID NO: 29909 - DNA, 216 bp, Glycine max
  Clone ID: jC-gmst02400030d05d1
cacattgaaacacactaaaactgaaattacagaaaacagggaaggaatcgaaacaactggccttgagtgtccataaaaagcaataaacacatataagacaaacaccggctactgggaagacaaaagatcccaacccgaaccgtaataacatacacgctttaaatagacccggttcagtatcagctgtctgaatactcttgaatataaactaagcct

SEQ ID NO: 29910 - DNA, 170 bp, Glycine max
  Clone ID: jC-gmst02400030d09d1
aaaaatgtaacacgatattatttacattacaggaaatagtgaaaaaattataataacactcctacaatgtaccgataaagccatcaacacatataaaacaagcagcggatactacaaagacacatgaaccaaacctgagtttaacacaccaacatgctttaaatagaccc

SEQ ID NO: 29911 - DNA, 241 bp, Glycine max
  Clone ID: jC-gmst02400030d11d1
cccaaagaagcactcttatacagacatgatactaaacagtgacggggtaaagatcacagaacttgagtgtacataaaaagccataaattcatgtaagaccaacagcggcttttgctatgacacctgagctcagcctgagttgaaaaaccatctatggtttaaatggacccggtacagaaacacctgtctgaataaccccggatatacctaagcacgattggcatgggcggctttcgatcct

SEQ ID NO: 29912 - DNA, 171 bp, Glycine max
  Clone ID: jC-gmst02400030d12d1
ggcatccaattgatactgatcggctttcatagcagataaaagtgaggcaatcgaaaggacccctcttcaacgtatgaataagactataaacacatgttatacaaccggcggttcctgggatgacactggtactcgacatcacttttaaaccccgcccaggattagcctaga

SEQ ID NO: 29913 - DNA, 572 bp, Glycine max
  Clone ID: jC-gmst02400030e01d1
aaacgcaagtatctgcttctctgttttggacttttaatgtattaattggaactcgtgctaacagattcacaaacttagccttagccatacgggatgtaaggatatgcaaaagtggctaaatttatcaaagaacctaaactttatattactgccatcaattattaagtgatcattgcaatagatattaccataatcattcactactacatatacaagaagaaccttgaaccactggtagtagtttctaacctaccaatgcacatttttggttttgttaccaccatacaaacggaagaggctgaaagcagaaatacaagacatgaccaccatgctaaggctagccacaaaagcactagctatcccttctcccacttggttgcagaatttcccatacatgttgcatatcttcatccattgcagctctggctggccaacccttgcaatcatacccgattgccctgccgccgtcaatgccaccactgttacataggccattacctgatcaccagaaaaaatggccaagctaggggcttgctgaagagtactcttcccctgatcatactaaagataca

SEQ ID NO: 29914 - DNA, 477 bp, Glycine max
  Clone ID: jC-gmst02400030e02d1
cgaaaaccataatgtattataacaagatcctaaacataaagccagaacgaaacctcaaagaaaatccaaaattgacaaggttttcatatttgttatcatccagaaaagaaatcagatataataattaataaggtaacatttatcttcaataaaaactggaaatcaaagctcacattccagtaaaagccttctttgcaccgctagaagatccagctgggatcactttcaacacattgaacctcacagtcttagaaagtggcctgcattgaccaataataacgtgatctccttccttcacacggaaagcaggtgatatatgagcaggaatgttggagtgccttttctcgtacctctggtacttcttgataaaatggagataattcctcctaacaataatagtcctgttcatcttagcactgtgacatgttccagccaagatacggccacggatggaaacattgccagtgaaggggcact

SEQ ID NO: 29915 - DNA, 214 bp, Glycine max
  Clone ID: jC-gmst02400030e04d1
cacaaggaaacacactaatactgaaataacagaaaatagtgaaggaatcgaaataacagggctagagtgtacatataaaggaataaacacatataagacaaacagcggctactgggaagacacaagatctcaacatgaatcgtaaagacatacatgctttaaattgacccgagacactaccggctgtctgaaaacccctgaattaaactaagcc

SEQ ID NO: 29916 - DNA, 200 bp, Glycine max
  Clone ID: jC-gmst02400030e08d1
aaaggaaaaacaatataattttatttatgggggagggtgaacgaatcataataacattgatataaagcaaacaaagagggatataaacattgaatagaaactttttattcttaaaagtcaatggaaccattcgtgccttttactaaacaccaggcttcaaataggcccgattctatatcagctctctggagatacttgga

SEQ ID NO: 29917 - DNA, 195 bp, Glycine max
  Clone ID: jC-gmst02400030e09d1
ggacaaagctaatgaactattaaccggggatggggaaataataattggtaccgactttaacggtccatataaaaccatattcacggttaatccaattacctatttgttatagatcgttataccaatatcggatttgaaaggagtaatatgggttaaaattagccgcatggatcctactaatatagtagcatttta

SEQ ID NO: 29918 - DNA, 216 bp, Glycine max
  Clone ID: jC-gmst02400030e10d1
caaaaaaaaacacacttatacttaatttacagaaaacagtgacgcaataaaaagaacagggcttgaaagtacatataaaggcataaacacatataacacaagcagcggatactacgaagacacaagatctcaacatgaatcgaaaaaacatacatgctttaaatgggcccgagtacagtaccggctgtctgaaaacccctgtataaacctaagcct

SEQ ID NO: 29919 - DNA, 205 bp, Glycine max
  Clone ID: jC-gmst02400030e11d1
ctcaagggagcacactaatactgaattcacagaaaatagggaagggaatgagagaaccgggattgagtgtacgtatcacgccataaacacatgttagacccacagcggcctctaggaagacacaagatcccaacctgacttggaaaaacatacaggctttaaatgggcccggtacccaaccagctgtctgaaaactcctggatat

SEQ ID NO: 29920 - DNA, 210 bp, Glycine max
  Clone ID: jC-gmst02400030e12d1
accaacagacttgataatagagagggaaggcaggaaaataatctaccgtgaaagcccgcaaaagaaggaaaacacttgttaacaagacggctgtgcctaagaaaacacctgatcccgacggggatttataccggctatacggtttagatacacccgtaccattgccaccggtatgaacgccctagaatatttctaggtgtgccaaacctt

SEQ ID NO: 29921 - DNA, 173 bp, Glycine max
  Clone ID: jC-gmst02400030f05d1
aacatggaaacacacttatactgaaattacagaaaatagtgaaggaataaaaataacttggctagagagtacataaaaaggcataaacacatataagacaaactgcggatactaggaagacacaagatctcaacacgaatcgtaaaaacatatatgctttaaataggcccgag

SEQ ID NO: 29922 - DNA, 294 bp, Glycine max
  Clone ID: jC-gmst02400030f06d1
caccagaattcaatcccttacaaaaatcacgggggatatcttcttaacttctacatcgttctatacaaattccaacaaaaaaactatatacatataattccagcaaacaagtggaaaaaatcaccatatcctacttaaactcgtccagacaacgctgtggaaaacatttctttctcattaacaacctatttaatctccatttggttacctatgttaaagcttttaagaagcccttcacaaactcaatgtattatcactctggcctggatgaatcttctgtggcagctttttgca

SEQ ID NO: 29923 - DNA, 215 bp, Glycine max
  Clone ID: jC-gmst02400030f10d1
gaaaaaaaaaacacacttttacttaattaacagaaaatagtgaagcaatagaaagaactggtcttgagtgtacgtataaagccataaacacatataacacaaactgcggatactaggaagacacaagatctaaacatgaatcgtaaaaacatacacgctttaaatgggcccggtacactaccggctgtctggatactcctggatataacctaagc

SEQ ID NO: 29924 - DNA, 214 bp, Glycine max
  Clone ID: jC-gmst02400030f11d1
cacaaggaaatactcttttactgaattaacagaaaatagtgaagggaacgaaataacttgtcttgagtgtacatatcaagccataaacacatttaacacaaacagctgcttctacgacaacacaagatctcaacctgagtcttaaacacatacatgctttaaatggacccggtacactaccggctgtctgaaaactcctgtatatgaactaagc

SEQ ID NO: 29925 - DNA, 416 bp, Glycine max
  Clone ID: jC-gmst02400030f12d1
ggaacaagggcgcataatttattaaagccacgaaagagaaaacaacatagggaagtctcttacatgactggttgacacacagctgaaacaacataaagtgaagctggtgcccctattagaacgcatgttattacatatagatagataggagcaagctctattgttgggaggtgaaggaactactgaatgtagtacaggggattaggaagcttaaaggtcctgctttggcctttgtggcctccgaggagatcgttccattggtctccaatgatcccaacaatgttgtatccctgccttatcagattctctctcgctgctgatttgtatgaaactgcatttggagtggacggatcttgtggatccttgagaattaatttttcccatgtgtggttgccagccttctttaagtttgcttc

SEQ ID NO: 29926 - DNA, 250 bp, Glycine max
  Clone ID: jC-gmst02400030g01d1
cctcctcttctcttttcttcctttcttcagcctcttgtcttcgagctagtgcctcttgcatctccctaacatgctttggcactttcttatcagctgcttttttagcctttgaatcattcttctttggttcaattacctcagctttatcttctgctgtttcattttctggtacagttcctgctactgctgctgctgctgctgctgccgccgcagctgccttcttctccttctccttttcctttttcttctt

SEQ ID NO: 29927 - DNA, 566 bp, Glycine max
  Clone ID: jC-gmst02400030g03d1
gcagcatgttttcttttgaaaacatagtcccaagttgaagtactaaataaataatgtaaatgtaccggggcctacataacgtgatgagaaatggaactttggggtaaacgtcaactaaaaaagcttacaaaggaagaggataaaagaaagactccaaaacgttccttgtaactaatggataggcagtagcatttggcatttgccaaaaaaaccaacaatcgtaactttttactccaatctaggacatatataacaaaggaaaaaaaaatcacgagactgagcattcattaattctatgaaatgatcacttggcagaaagaagactctagtattctctacggtggcaaaaaaatatagccacaaagcattttacaccatgagatatgaaatatcaggcattgcaaaaacccaaggcagtccagcaaccatgtatttacttgctggacctcgtacaacccaaggacattaggacaatgacaagacgttgacttgtcccccaactgctgtcgtgtcataaaggaggacttcacagatagaccaaccaaaactccccagtagagcatgaa

SEQ ID NO: 29928 - DNA, 514 bp, Glycine max
  Clone ID: jC-gmst02400030g04d1
aaatgcaaggaaacagttctatactgctggcagtaaaagcaaacaaaatcttgcaaatgcatgctaacagattggctgaagtggtttaaaaattacagagtggagctctggttactctaacaagtcagcacttaagcacaattgccaaaatcatggttgatacaacaaggcatacatattttgttaggaaacaaatcactgttctagagctaaagttgtttaatcatagatatttactattactactactaatactatcatgtgaatccaaataggcatgtcaagtatttccagatactttccagagtgcttctttgatcatcctcgttggtgctgttgctgctcctcgacacttagatttaagtgccaatgtgagaacaccataacttgttgatgattcaactgtttgagcatctaaatgtacgttgttaatggtgtccatgatgtcataccgtatgtgttccctggaaggacatttcatctcaatcagaacctgctgttacttgacattgac

SEQ ID NO: 29929 - DNA, 471 bp, Glycine max
  Clone ID: jC-gmst02400030g05d1
ataaaaagggagaaacagcggctctatccaatggggagttaaaaataataatgcccaaagctcagaaaatgcatttcatctctgaacatatcactcccgtcaattatatagaacatgatgttttaagccaattttttcagcaaggaatacaaagaaaatcccaaaagcttgctctctttgttttgattcttatttccatacaagcaaaactccaagctgacagatccgttgcagaatgacaaaaaagaacatcctccagaaatacccaaagacttcttaaacttctcaacctccaaatatacggtggaataaggaaggaactctgagtaatggtctctgctcagatcgtttatagccactgccagtttggggatttttaagatttcttcatgggtcaaagacctcacatacctggctggatttcctgcccaaagttcaccggctggaattcgcctccctggtggaactact

SEQ ID NO: 29930 - DNA, 141 bp, Glycine max
  Clone ID: jC-gmst02400030g06d1
ataggaaacagtgaagcaattaaaagaacttgtctatagtgtacataaaaaggcataaacacttataagacaagctcctgattttatgaagacacaagatctcaaccggaatttttaacacatatatgctttaaatagtcc

SEQ ID NO: 29931 - DNA, 211 bp, Glycine max
  Clone ID: jC-gmst02400030g07d1
cacaagaaaacacttttttacttaatttacaggggatagtgaagaaattataagaacttttcttgaatgtacataaaaagccataaacacatattagacaaacaccggcttctaaaatgtcacaagatcccaacctgaattttaaaaacatatatgctttaaataggcccggttccctaccagctgtctgaaaacccctgtttaaacctaa

SEQ ID NO: 29932 - DNA, 198 bp, Glycine max
  Clone ID: jC-gmst02400030g10d1
caaaataaagcacacttttacttaattaacagaagatagtgaagcaattgaaagaacctttcttgagtgtacacatcaagccataaacacatttaacacaaacggcggtcactaagaagacacatgatccaaacctgtgtcgaaaagacatatacgctttaaatgggcccggtacactaccggctgtctgaacactcc

SEQ ID NO: 29933 - DNA, 571 bp, Glycine max
  unsure (1)..(571): unsure at all n locations
  Clone ID: jC-gmst02400030g12d1
aaagaacaaattataatactatatgcaagttcagtattccaccaagttgacaaattatttaacgaggaaaaaaaaaaaaaagatttacagaagcttatatattacagcttaagtgaatgccaaaatatacctattaaggtcgtcgtccactactactaccacttaatgtgaggcagcccctcacagattggcaattgttttcataaaccctttatgcattagatatacttatgaggcttctctcctaaatggtaatgacaattttacaagaaacaaaatatatgcacattatttttgggatgtcaaacctctgaacaaaagcacaccaacagcaccaatggccagagtcagaagcagggggacggcgacggattcagcttcacgcattcttcctgtatggtctggtcttcccaggcgtgacctttctccaaagtattcatgcaaaagattgctcagagtgtctagttgatgcatgattngacgttggcctcgtgcaatcactaatacctcttccatcaggggagactctntagccaactgagaagatgatgatgaattaggtggcaatgat

SEQ ID NO: 29934 - DNA, 437 bp, Glycine max
  Clone ID: jC-gmst02400030h01d1
aagcaaacgcttaattaatatcttcaattctttattcatcataatcaaagacaactttatattataacttaaataagttaaagaagatattacaagtagtagcatcaagcaccatcagaaaggtccaaatacaattggagtggtcttaattattccaagaagaaaacaaaacaacaaagcacacataattttattactggtttattgatagatatttgataggaagaagcaagtgcagaggaaattaataggtgtaggtgggttcattatagatttagaccccctttgctgtccactgaaatttgtggggtttgcgattcatgttcatgccatagggattggcatagcgagtatccccaccaccccagctatgacgctgatatctcatttcatccaccttagccgtgactccaccaacatgctcctctgcataagac

SEQ ID NO: 29935 - DNA, 523 bp, Glycine max
  Clone ID: jC-gmst02400030h02d1
acccgtaagatgatgcttcattttatttataccccctcccggtctcccctatatgtttgtgcacagtgaaggcaaatatacatattagttcttcactcttttaaatacaaaatgcttacatttaggatcagtttttgtgtgaaattgtagtagatcctttgtaaattgtctttctaacaacattaggagttgcttcagcagctgcattatcactaggagcatcctgcatccatgcttcctagttcctgggccagttaggatgaaggaggggcctgcaattgtgacataatctggcaggacctgatacgatgggatgagggagcaatggcttttcaccttcccaacacaatgtaaggagaggagaaagttacggtgcagatagaggaattggctttacagaactttgaatgcgctggaaagctgctcttactctttccttgagaccttcgttttcactctcaacttccccactttctttgttgagcactgctacattcccatcaatgttaattatcaatttccc

SEQ ID NO: 29936 - DNA, 433 bp, Glycine max
  Clone ID: jC-gmst02400030h03d1
gcttacagatttggttgagtggtttaaaaattacagagtggagcttttggaactttaacaagtcagcacttaagcacaatagccaaaatcatggcccatacaacaaggcatacatattttgttaggaaacaaatcactgttctagagctaaagctgtttaatcataaatatttactattactactactaatactatcatgtgaatccaaataggcatgtcaagtattcccagatactttccagagtgcttctatgatcatcctcgatggtgctgatgctgctcctcgaaacttagatttaagtgtcaatgtgagaacaccatcacttgttgatgattcaactgtttgagcatctaaatgtaggctgttaatggtatacatgatgtcatacagtatgtacttccctgtaaggacattgcatttcaatcagaacc

SEQ ID NO: 29937 - DNA, 553 bp, Glycine max
  unsure (1)..(553): unsure at all n locations
  Clone ID: jC-gmst02400030h04d1
acaaaaatagaatataaatgttattcaatgtaaaaaatagaatacaggaatccaaaatcgaattcaagatagatgagcttgggtagcttgctatttgactactctatttgccctattcttgatcaagttctctgtttcaatataagtaaaccttggtgcagaggagttgatttatcctcttaaaccttactgctacatatctattgtgaggaaattatataaaattctatattaccattctatattttatatttattttcatttaatttccctcaaagaaaataaacaattcacttcaaaattccaactgaaaaatgactaactttatattgagagggtgtcccattaaaacaacattttggctcacccttttattctaggaatgcaggcatcaagtacatttagccaaatacgcattccatccttgaagacggtattcacgagctgcctcttctggatttactgctttgatgatgccacgccccacaatgatgatgtcactgcccctatcatggaccacttttgcanatctttatcttaagcaggaactttc

SEQ ID NO: 29938 - DNA, 580 bp, Glycine max
  unsure (1)..(580): unsure at all n locations
  Clone ID: jC-gmst02400030h07d1
ccaaaatattggaactacataagttatttatccaaactttttattcatgattacatagtctcaaaagcaataacataaataatcttacagttgctgaccagtgggctaacatttgccgggccaacatcagattttatgcaactgggcccaatttatttaaaggcttttgggtctggatgcacccaatgtaacatgtgggctatcatagattcaaattactatttgtcatgggcaatttctacttatagaattccattactcctaacgtagatgagatgtcactacttgctacatgaaacttggaaaaaccagagctcttgcacaagttctcaaattccttctgagttctttcccttccaccatgtgctaaaaacatgacattgtcgagagtacaagtatgcttagatatatagcttggattcgggacttctggtattatatattcgaaaacaatcacttttccatgttgtggcaaggctttgtgaaagtttcttaaaaactttatacaatcttcatcagcccaattgtgacatacaaacttcactaaaatggcatcnaccagtggaacactttaaacata

SEQ ID NO: 29939 - DNA, 421 bp, Glycine max
  Clone ID: jC-gmst02400030h08d1
caaaaaaaaagaacatttttacttaattaatcgaaaatagtgaggcaatagaaagcacctttcttgagagtacacatcaacccatgtacacatataacacaaacacctgacactcagaagtcaatagacccaaacctgactcgtacaaacatctacgctttaaatggtcccggtacactaccgcctgtctggacactatcgtacaacacaatgcctgcttcacatggaccggtcagaatcccagggtaagaccgaacatgggtcttacattacaccgggtgcaggatcacgttctgtacaaactttatccccttcgagatacctcgtaatgcactgttgaactccatgcccggcgtaaagtttaccccaaacaccctacgagaccttgttccttgcgtctgtcaacctgaccctctgttac

SEQ ID NO: 29940 - DNA, 223 bp, Glycine max
  Clone ID: jC-gmst02400030h09d1
aacacacctatactgaaataacccacaatagtgaagcaattcaaacaacctttcttgagggttcataacacgccataaacacatttaacacaaacagctgtttctaagaaaacacaagaacccaacaggaatcgaaaacacatatacgctttaaatagacccgagacactagcagcggtctgaaaactctcggactaaccaaagcctgtttcgcatggaccgc

SEQ ID NO: 29941 - DNA, 509 bp, Glycine max
  Clone ID: jC-gmst02400030h11d1
aaaaaagcacactgcatattcatcaaagcatcatcaaagcacactgcatcctaacagcacacgtacgtagaaaggtgaagttccaggtcttgcacaacatacacaacacaccataatttattttatatacaatcttatggtgcccaagatgcagatgcatggactaattaaacaacaacgttagtctgataggcagtgtccatagataaattgggtacccataaaatggccttgcttccaaggaaatggcaaacagggttagttccaggatcaactcccatgagttcatgaagcatgtgatgattcattccagaagtatctgagtggcaaacagcaagtgcctgagttttggttccatcaccagccaccaatggaaccatgaaagctgttgtttcacggactttatggcagtaaaatactgcagttctgaaatttagcccatgacacatcactgctttgtctccaagattctgcactccttccacagtgtattgctcttgcttattgac

SEQ ID NO: 29942 - DNA, 559 bp, Glycine max
  Clone ID: jC-gmst02400030h12d1
gtataaaccacagtatgaaacttgttattatataaaaggcagtatacattgaacttgtttattattcttttcctaatgaattaagagaaatttacatttttccgggaaagcttttgtaagtagcaccacatgcagagtctcaaagtcaaaactcaaatgcaacttatgaatccacgccaaagaacttaaacctttttgagaaactccatgacgtaggtattgaaagcacagcacaggactcggaaaccttggaatccagaccctttggccagagcctcaaactctttctctgttctctctttcccacctggattatgtgccaacatgatcacatcgatgtgaaccacaccttttgtggccaagctagagtctggagccactggaagaatgcattctgccacaattaccttcccattgtctggaagtgcctcatagcagttcttcaaaaacttcaagcagtgctcatcactccaatcgtggcaaatccacttcataaaaatagcatcagcttctggaacactgacaaacatatctccaccgacatgctccactcctggat

SEQ ID NO: 29943 - DNA, 589 bp, Glycine max
  unsure (1)..(589): unsure at all n locations
  Clone ID: jC-gmst02400031a01d1
aatgaagaaaaatttattataaaggttataaggtcttctaagcgtataaatagatttaatggccagtgaccaatataacttcacaccatttaacagaatatggttctagcattgatccaacacgtttaaaaatatagtaggtcaaggactcccaaataaagccattcaagtttgaccacatcttgtaagaaaggtacaaactttggctgatttagtatacaaacccacataaaagtgaaaaaataataataaatactatttatcatctcagtttcaacttctgctttccagatattcaactgacacaactctattacttggggccaatgtccttaagggcacaaatctgctcctcccccatggaagacataacagacacaaccagatctttgccctcagcaaatccatccttgatctgcgaaagcagattttcatcggttggaagcctaaggtcatccttagtaccaccagtctcagtcagcagactcacaaatccatcctctgagatgtcaatgagctggtagtcaatgcgaataacatggngaacatcacagttatgggaagatgggacaatattctcagctttttc

SEQ ID NO: 29944 - DNA, 470 bp, Glycine max
  Clone ID: jC-gmst02400031a04d1
ccaaagaaccttcaaatgttttcataatcttttaaagacgacacaaatagaaactcaaatatacagggaggatacggggtgtaagaaacaccggtaaatgtgcaattactcaaaggggggtcgatggggctatggtacgaatgtttatctggaagctacattgattacaaatgactaagaaagaataaatataataggattcatgaaggagcctcatgtaaatattgatcgttaaagtgatctagatgtagaactaagacctatgccagtgactcctgctgcggaagctgaacacttcacataaaaatttcaattgctcaaacttgtctgaatagaagttatcaccggcgattgtgtatgcgtggtctggtgcagaaaacacggtcattggccctcacaaatgctgctatgccgatgctaatgcccgcccacagtagctaaaagaagaagtgccggaaatcatatggaac

SEQ ID NO: 29945 - DNA, 505 bp, Glycine max
  Clone ID: jC-gmst02400031a05d1
gacaatgcatctatttagtgccaaaactatcacattgtataagagtcatttgaagctacaaaagaaacagccctttttcgaccgtaagagaaaataaattaaaaaaaacacacacacacaacaaattccaatataaacaaatgaaacaaaaatctagaatgtgttgagaaatcaaataaagtgcttacaggcagagcagcattcagggtgaggtagctactttggcttttcataagccacaccaatcttcaacaccagataagggaaatcttaatctttcttctcctgagaatcctggatcattgttggagcacccaccctagagcttgagcaatctcaattacccgaacgctccagtgaaaaaattaaaagaatatgtcctagcttctaaagttgcaaaactccatttgacttgactccactagtcccattgaatccatcattcagatctccttctcaagtgctgggaaacaggaatcccttcgaagaagtccaaaacagcata

SEQ ID NO: 29946 - DNA, 508 bp, Glycine max
  Clone ID: jC-gmst02400031a08d1
gaagtcagaagttcacaactgcgattgttaaaagcaaaacacgcgtaaatatctcatacaaataatttaatgatcaatatttatcgccagcaagaatggtgtcagcccactgattgaaaaaaacacaatggagacattttacatgtgccttaatttccagcaaaaaaacaaaagaaggaaaatgatcagaagttgttggtttaatctcacccttgtataagtaatatcacttctgttgtctgtcctgcaaagcatttactgatcaagcaccaaaatattgtgatcaatgagcagatgataatgttagtcagtcacttggcaccggaacttattcatgggtccagtgggtggatgcagtatagcaatatgaaggagacaatgtagaacgccatttttatggaaattttaagtcacaggcagaagattggcaatcattgggaagcagttacagacttagagtgcctggaactctcacagcctgggcagttatgtaagctcttatgaacgt

SEQ ID NO: 29947 - DNA, 607 bp, Glycine max
  Clone ID: jC-gmst02400031a11d1
aagcacaaaagacgtggataacttgatattattttattacatacatgcatagatagcctgctctcaaataagtcggcaggaacaaagatagagagattcaacgatcttcaaatttcacatttgccagaaatatataacagaaaagaggggtatgggatatgagttaagttttgatcacattcaactacactatcccaaaccgttactcttaagactttgaacttcacttgtactctaggatcatgttgttctcaggagctaatccaacacaagccctcaggatgttttccagcatagctcgctgctttgacaacgcattcaccactggtgtacccggtggaaccagaggggccttggtcaggtaactaaggatggtcgcaactgggtggaatgagtggaattttccctcattttcagctttaaactcgattcgagtgctgagctcagcaagaaggaccaagtccaagataataggagcagcttacagtgaatcctcacatgtgttgtgcaacacaattgtgttctttccacccatgaatatttcagaagtgtactcatccatggcccctttgctgtcccctacataaggcacgtacttaatgacaac

SEQ ID NO: 29948 - DNA, 574 bp, Glycine max
  Clone ID: jC-gmst02400031a12d1
aggaaaaaaatttagtatcggaatcagcttgggaaatatagacaaaagttaataggtttagaattttccagtcaaacacaataaaataaaattaactatgcatgaagatttaactatgcatgttttactattagttcctgcaattttctttttgcttgtatgcataaaagaaatagaagacacattcaagtattcaacttcagccgtgtgcaccacccccacggtcagacacaaggtaattaaaatgggggtgttgaaaacttgttcttccaagtgaaacaaacattttagagacgggaagatgattttgtagaccttggatctttactatattcatacacaccaatacctcgttttcttccaagtctttcagcatcaacatactgcacaagtagagggcaaggtgcatatttgttgtcaccaaggccagcatgaagaactctcattattgacaagcacacatccaatccaatgaagtctgcatgctctaaaggacccattggatggttagtacccagcttcattcctgtgtaatattccttttggttgcaacacccgtgtaaagagcaaaaat

SEQ ID NO: 29949 - DNA, 357 bp, Glycine max
  Clone ID: jC-gmst02400031b01d1
gtgggggttgggggggaagttttaaggggtttgagttatacaggggaaaaagggaaaagaagaaggggggcaagggggcaaacccgggacgggggggggggcaaaaggtgcccggggggcccggggggggggggagaaaaaaagggggggggggagaaagggaaaacaaattaaccaagggtggggcaaaaaaacaaagaaggggggggggggggaaaaaaaaaaccgggggaggcggccggggggaaaaaaaaaaaagggggggggggggaaaaaaaaggggggggggaaaaaaaagccaacaagagcggggggggggggtccccaaactgaagaggaagggggggggcgccccgc

SEQ ID NO: 29950 - DNA, 565 bp, Glycine max
  Clone ID: jC-gmst02400031b02d1
gacaaaaaatatataacttattgaatattattcactttcaccaaaatctgtcattaccaaccagtaatctgatttcatgtctaacagaaaccctataaaccaatagtacgtcactttacaacaatttgtccctgaattatgtaaaacaaaaataatttggataatgtattcttattagtttacaaaccctaaaagcacactagtgctatgctataatcatatcgctatacagatgtcacgcttatttttatgaggtatcgaagatctaacatacaatttggttacaatgtctctagtggctagcaagtctcatcccatcatctcctttggaaattgaaggatttaattgcaaaggcaaatataattgcaaaaaatatgcagaagccagccaccataacagcagtaacgcacaagaaatcatgcctgtacccaacacgtgtttgagtacctctcttatagtcatcgagtttccattagagagcttcactaaatgagtatcaccaccatactgtgaaagtaggagaccatacagactccaggctacagggtttgcccagtaatacca

SEQ ID NO: 29951 - DNA, 477 bp, Glycine max
  Clone ID: jC-gmst02400031b03d1
tcgcgatctagaactagcggctcgtgttttttgaaagaaaagtattgattgcttttaaatgcattagcaggtgccactcaatgatgaccagtcatcactatagggtgtgcagaagaagcaacggtggtccacgattatgatgatcagaaatcacttgatccgacggcagatagtgattccatcaccaaccgggagcatgcaaatctcgatcctggggtccacagcgagggctttgttgagctccagcacgaagtccctgtagtacctaacatacttcctaagaggagcatcagggggtgccaccacagatccgttccatagggtgttgtcgtacccgatcacgcccccaacttttacaagctctatcaacctcttgtggtagttgaggtagttgtccttgtccgcatcaacaaagatgaagtcatagctttcatggttcttctcatctttaatcatttcatcaagaactggtagagc

SEQ ID NO: 29952 - DNA, 442 bp, Glycine max
  Clone ID: jC-gmst02400031b05d1
gaatataaagaaatcaattatgtactagaaacaatgatctcacaataatactactcaaaccataaacgcaatatagatccagaaatcaacatatgtagtaataatctctacatagcaatatcaatatatatagagagagagggagggagagagagagagagagttatatactaatgctgctcaaatctccgcttctactaaaaatccacgcatgtaaacgagaaaatccatgagctacgttcagatccgcagagcagatccgaacgcaagagcggctccggcggcgagaacaccggcgacgaaggacggcgaaacggcggcggcgggagacgtagggctcggagctggagcttcggcggcggagatgacggcgacgagcaccgacattacggcggcgagaaacattgccttggagaaagccattggtgaatatggcagcaac

SEQ ID NO: 29953 - DNA, 533 bp, Glycine max
  Clone ID: jC-gmst02400031b07d1
gatcaaaccaaatcctccttagcacaaccacattcattatattacagagagttggcatgcacaattgcaccataagtgcaagaggctgtctaatgccatacatacagagagaggcaatgtatctgtgcctgtgcctccccagagttttaattattattattattattaaattgggccaggagtatgtatcttagcaggagaatacataaagcttaaggtttctcccaatcatgagatatacattataatacaagattaagctggaacagcttccggcactttgccattgcttgagagtactaagctatcatagtattcaaccagtaccttccaaccaccagggcacataaatccatcaggagggctttctttgttccttgccagtgtgcgcatctttgtgcctgatatgaacaggaagtcctgaggccttgaagggtcaaagaatgccattttaccctgagtcttgtcatatgcagcaaccctgaaaggaagaaatgttagacgctctagtcccggtgccatgctcaatactt

SEQ ID NO: 29954 - DNA, 516 bp, Glycine max
  unsure (1)..(516): unsure at all n locations
  Clone ID: jC-gmst02400031b10d1
aattgattaaacaaaatttatagaatccaatacaaatagcatcagatcacatgtctttgatctctaatgggtaaaatatatagagagaaaatgagcacaaataatacttgccaaatagaataagaacctgatgacttaacagagaacaaacattaactcatcagagtaaatcagcaacatttgatggcagctcctttacagtcacattgtagaacttctgaatatcagacagcatcctggaatcatctgtcgtgacaaagtttatagcaactccttttcttccaaatcgaccactacgtcctatgcggtggagatagttttcaggttgggttggcagatcatagtttatgaccagagacacttgctgcacattgataccacgggccagaaggtccggggtaatgagaactcgagaagagccggaccggaattcacgcatgataatatcacgtgtgtattggtccatgtcaccatgggtggcanagactgtgtggtcattgcttcgcatcttgttag

SEQ ID NO: 29955 - DNA, 451 bp, Glycine max
  Clone ID: jC-gmst02400031b11d1
acaaaccagtagttaatatgaatatataagattggtctggtggtgaatgacgaagggaagcaagccggagagagattgcaggttcgaatcccttcactaacaatactaacaactatttgccgataaaaagataaaacagtagttaatatagttatagcatcacacactacactgtcattcgctacttcacaattagtggtccattactaacaagagtaattaagaagtatcttgagcaacaaacacaaacagaagaaaattgataactgaactcacagagtcagagttcaaagagccacggcaactcctaggtcaccaccgccatgaaggttccagaaaacgttgcctgcgtcatcggacttgccggtgtcaatagcaacagcgccaaagattgctcggaaggcgccgcaaacgacggcgggggcggaagaatttgtcttgggcgagacgc

SEQ ID NO: 29956 - DNA, 539 bp, Glycine max
  Clone ID: jC-gmst02400031b12d1
acccaagtcccatgctatttaaggcacctccacaatccacataagtaaaattcattatacagtatacatattgttgatgtttgggtgagagggggtgcgaattccaaatactctgtaatgatgcaaagtttcaaacataacatgaaatgtgtccgatttactcatcgtcctcaagctaagtcctgatacacaggactaacctcaagctgatctgcgaatttctcgaggatattcttcacaagttttgccagctcttctttatctaattcggcaccatctttttcttgtgttatttcagcaaaaacagcgtcataaagaagaacaactgcttcatcagcttgagctagcggtaaacccaattcctttgcgtttctctcaaggaagctccttattatttctgtgctccctagtccatcctttgcttcccgtttttcctgcaatgccttcttccaacggtgtttaattcctgttcattggccaatagccgtcttagcttagagccattaatgattcgaatattctggatggaaacaacattc

SEQ ID NO: 29957 - DNA, 456 bp, Glycine max
  Clone ID: jC-gmst02400031c01d1
gccacttcaaccaaagggggaagccacgagtcactgcccttgcacattgttttagtacagtacttttaattcatgaacgttttttttttttaaagggaccttattattcttaagaccaccccaaaagagaaagaataatttgaacaatattgccactaataagggccttcaataatttttccttttgaggggtatacggggggtacctaatggtagaatctgcattaaaacttttatagagaactgacttcctgtggctgaaactatcaaaagagaattttccatgggaacaacccattccactttttttaactcctccaaaaggcaacccacgagttgcaacatggatgacggcgtcattgatgagcatccctccagaagatatcttatccacataatccttcttcagctgctcattgtttgtgaagagatatgcaccaagagggtttggctttg

SEQ ID NO: 29958 - DNA, 280 bp, Glycine max
  Clone ID: jC-gmst02400031c02d1
acaattggcccataaaaccaaagggggaagcccacacccaccgcccttgcataatgaaatagggcacaacttttaagacgggctcgcaagaaccattccccaagctcctaataggccttgctacctcccaatcaaaagcagcatatggtaagcaaaattgacactaaaaagggccctcgagtgcctattgcctattggtgaagccaaggcggaacctaaaggctctattttataacaaacttattaaaagaacagtcatatctgcggttcaaacaacttt

SEQ ID NO: 29959 - DNA, 574 bp, Glycine max
  Clone ID: jC-gmst02400031c03d1
aagaacttgtcgtaacaatattataactctcgctaaaaataggtcaaataatggagtcaaccagcacagaaatgctctacaataactactgttaaatatttgcaactataacttcaattccgtgcgtgacttgtatatgttaattatacatttggcattgagatccaagctaagtcaaaaatcaaagtctaataacatatacaattggtggtaagattttgcaatttacatattcaccatgatgggaattgagaagaaaatttttacccacagcgaagtttcccaatggtcagtgtcctagttttccttgaagattacatttataaatcatggaagttcctgaaaagtcaatttctcacagcatttttttcatgttctttctattttcaaatcctttgaccataattttgactttggtatatgtatttgttgcttcatttcaatatacccatttatgaagtagagcaagtagagacaaaatcatcacccaagttgatgttaaaccacaagcaaaagaaatgtagttgaaaccaactaaatggactgttcccgttcgctcatccctcactttaat

SEQ ID NO: 29960 - DNA, 377 bp, Glycine max
  Clone ID: jC-gmst02400031c04d1
ggggggggaaaaaccccaaatcacgggttttaaataggggagaaacaattattacattttttacaaattttttacacaaaataaaagatacattggtttctggggtgcataaactttattccaaaaattgcttttttgcatttggggggggcaaaacaattgggaaaactgggttgaaaagaatataccaaactggcttcatttgggaaatcagcaactaataaaatgactcaatctaaagcatttattactggatccacaaccttttggggggggcttggccctccaaaaacctttggtcggcatttgccctccaaaatgacttttttcacagcagtttccaaacgggtagcaaatgcaggaaactggagatgcct

SEQ ID NO: 29961 - DNA, 422 bp, Glycine max
  Clone ID: jC-gmst02400031c05d1
aacaaaaatcagcccaggttaattttaaaggcccaggaacttatttacccccgctttttttacaggaccaaacctttttttcacttgggggctaaaccccaaccttaattatttccaatacaagaaaaaaacaagttccccccgaatttaatttaataaaagacaaaagcttggtcccccagaagcctggtttcgcattctctccaagaacatttttattcagggttggggtaacaacttagttcccttaccccttcctttttttgggctcgacagggggttccttaaaaaaccaaagcctatttggtttttacccggcacaattgccaaagagccggggggttggcttctatcagggggccccgaagggagacttttgggacttggcagagatttttcgggttcaaattgaagaagggggg

SEQ ID NO: 29962 - DNA, 146 bp, Glycine max
  Clone ID: jC-gmst02400031c07d1
cgattaagcgaagttcttcatataacaaccacatttataacatcacagaaaggtggccaggataaacccaccatccgggctacaagatgactgatgccatacctccacggaaaagcaattgcttggacccagagacttctcatagt

SEQ ID NO: 29963 - DNA, 485 bp, Glycine max
  Clone ID: jC-gmst02400031c08d1
ccggaaacatccctctagggaataaaatcaactttaggaatagactttaactttaagtgacggcattaaaactctcaaaaaaggtagattcagtcataacataacatgacatccgcatgctgagatttaacaaaaaaatagtctaatagaagaaatcacattcatacatacattgaataacacttatgttcaaaaaaatggattcaaatcaaagcaagtggcagcaaatgtagatacataaacataatctaaattaaatattcaataggaagagtgccatcagaagagcaccagcacaccaaaagttgccaagacaaggttggcccagattccatagctgatgagcttgtgagaagaggagccatcatgagtggatgatggagatgatgctttgctatctgcactgtgttcagttggagaatcagcagcaggggcaataataggagttggtgcacgagcaggtgcaggaggtatattaatgccaa

SEQ ID NO: 29964 - DNA, 469 bp, Glycine max
  Clone ID: jC-gmst02400031c10d1
ccggaaacattcctctagggaataaaatcaactttaggaatagactttaactttaagtgacggccttaaaactctcaaaaaaggtagattcagtcgtaacataccatgacatccgaatgctgagatttaacaaaaaaatagtctaattgaagaaatcacattcatccatacattgaataacccttatgttcaaaaaaatggattcaaatcaaagcaagtggcagcaaatgtagatacataaacataatctaaattaaatattcaataggaagagtgccatcagaagagcgccagcacaccaaaagttgccaagacaaggttggcccagattccatagctgatgaacttgtgagaagaggagccatcatgagtggatgatggaaatgatgctttgctatctgcactgtgttcagttggagaatcagcagcaggggcaatatcaggagttggtgcacgagcaggtgcagga

SEQ ID NO: 29965 - DNA, 573 bp, Glycine max
  Clone ID: jC-gmst02400031c11d1
atcacttctgtttccttcttctcttccgccacttcaacttccttcttctcctccgtcccttcaacttccttcttctcttccgccacttcaacttccttcttctcctccgtcacttctgcttccttcttctcctccgtcacttctgcttccttcttctcttccgtcacttcaacttccttcttctcttcagagacttcttcctccttcttctccagtgctttgagttccgttttcttcttctctggttctggtttgggagcagttagctcatggttgttgagcgcttcttgaacaagcctcttgagctcatcaagggctttcctctgcgcctcggggaggtcgccaaccacgttggtctcctccttgaacgaaaccgattgggaaatcttgtcttctgcaccactctgggccttctctgctttcgccaccacttcttcgatgctttttgcatttgcttcaacttcagcttcagcttcagcttcagattgggaaatcctgtcttctacaccactctgggccttctctgctttcgccccacttcttcgatgctttctgcatttgcttcaacttcag

SEQ ID NO: 29966 - DNA, 164 bp, Glycine max
  Clone ID: jC-gmst02400031d02d1
attcaacaaacatttaattaataacaaggacaagtttacatttttttttccaccttacatatgtacaattgcaagcaatcgcacggcttgagagtcataatattcacccctccattcttcttcatgctacaaattatattatatttaattcccacatttttgtt

SEQ ID NO: 29967 - DNA, 553 bp, Glycine max
  unsure (1)..(553): unsure at all n locations
  Clone ID: jC-gmst02400031d04d1
gaaaattaccccttgctagttaggtgatgatatattcaaactctgtattgataatcacattccctcctctataaccaaatagaaaacatccaatcaaggggctcatactgttcacattcatcattcatcacaccctttgtggcagtagaaacatggagagaaatcatagaattagtattaacaaataccaataatgctagaaatttccattaattaggaaaaaagaagaacttattatcaagtttgaaattgcataagagattgtaggaactagctaggaacaaccataacagactacaaatagcagatgcacacacatgcatacacttttaaagatggaaaagtttatttgcttgaataagttgaggatcatgctggtgctttgacgaggttagatgggaaatccagcaccacaatcttctcaatagcaggtgaaaacactcccgagaactcaagatgatttgggtgagtctgaaatgcgttgaactcctctttcccatngaatgtcatcaagaaagcatgagtgaaaccttgtcttagcatatcatgactt

SEQ ID NO: 29968 - DNA, 475 bp, Glycine max
  Clone ID: jC-gmst02400031d05d1
gcaaaaactgcattttcttggacttatctctctttcaactgtaactgtacgcatagatgctacattttgatcaaacttcaaagcatgaatgaaaaaaacaaaaaatatttttacagacttctgtatatatttgcaatggatatttaatgagtacaaataaagattcaaacatgcgcggtaaaaattaacatgtcatcttcatgtgtcaatgcttgttaaaaagataacctgataaataccagtatatgtaaagctaaaatatagagcacgaacgccgacctgagtagcataagcctctgctggctttcagttcggccagcagaatgataaggaagcctctgatgaccttcgtaatctgacaaactatgtaacttatcagaggagcctttactgaaacgattcctagcagcagtgttcgcctctgaattgctactctccgttcgtcgccatagcccattcaatctttcgagctcca

SEQ ID NO: 29969 - DNA, 348 bp, Glycine max
  Clone ID: jC-gmst02400031d06d1
aattaagtgaatttttttatttataaaacagagttattatctaacagaaaggaggacacgataatcccatcctccgggctacaaaatgagatatgcctgacctctagggagaagccaactgcaatttccctgaccatcattattgtggtaactgttgacacacagagcaaattgacccaaaaattcgggtgtacccatgaaataccgattaccacacgggctcagattgatctgaacttgccattctcatcatggagggtatttgaggcacaatcagcactgttcgagttttcggtggaggtaaccaaagatggctttgaaccggtaaccgctatctccaagagggct

SEQ ID NO: 29970 - DNA, 86 bp, Glycine max
  Clone ID: jC-gmst02400031d07d1
aattgttgttttttttttatttttaggagtactgacattttaattgggtggaaccggtagggcaatgcccgggggcaatacatgaa

SEQ ID NO: 29971 - DNA, 479 bp, Glycine max
  Clone ID: jC-gmst02400031d09d1
gaaagcccatttccaatttaaaataaagctctaatgaccagcacatagccatgatttgtaaaaatccaggacccctctttaaaaaagttatgactcgtgcccaaatagaaaattcctttccaaccatgagattactatcccaagaaaaaaaaacatgaaaaaaaaggaaattctgatttaaaggccaagccctggccactcagtcatgtaccagtattgggcagggctgccattaaggaattgtaagaagactcaagatcaaagggaagctgccgtccctgttgttcagccaacttatcagctgcacccatcttggataaccccgcaatccactccttcatttagggtttccccttaaaatcaggtggcaggaaaggcaactttttgagtgaagcataaaggtccttgacaacgggtgcccctgatccacagcccccatgttaagtttcaagaaacctgggagttttaaaattttggac

SEQ ID NO: 29972 - DNA, 388 bp, Glycine max
  Clone ID: jC-gmst02400031d12d1
gggcttcatgatggatgaggcacttattataaaaccccttcatttttgattcacaaaattgctaactacaaaaaacttgaccaccacgttacgcaaatacatgttcttatctgaagaggccgaaaaaaatagtgataggtggcacctcggtctggaagagattgagccggcctgatactgaatgaatggagtttgcccttcgaaaaaggcttggaaaggatgctacgctgaatgcctgctccaaagttcccgcatctatgcgtgaactgggaggcctcgtaaaagcacttatgcggggtggagtttaccattatttaccacgaacatagtgtacgccaaagagtttttcggatgacgggactaagttgttttccttttgggtaccggg

SEQ ID NO: 29973 - DNA, 517 bp, Glycine max
  unsure (1)..(517): unsure at all n locations
  Clone ID: jC-gmst02400031e01d1
gattaatattaccaaagtcattctttaaaattccataacatacaaaaggagttcaatcgtaggatgccagctcttcaattttatttgtaatctagaattgcccttacaacttacaaggagtatttataaattatattatataataatgttcgtacattagttgaaatgatattcatacctgtaaacaacatcttatacaaccaattccataatttagatgtacaaaaagaaggtgttacatacaaaagaaactagaaaacaatagacattgccaactatgactagtgactacaccttcatattatattatccatttcatcttctagacaacttcattctgtactaggacgtggaataagtgagcttggcaccagacttttatactatgatttgctcttctttcaaacgcaaatgtacaggtctttggtcagtacttccaaaatccatatccttgagcaaaggatgtttctccggcaccacattatgtggttttaatggcattgaatngctactagct

SEQ ID NO: 29974 - DNA, 480 bp, Glycine max
  Clone ID: jC-gmst02400031e03d1
aaaaaaaaaacattatttctattaagccagtgatgttttgaatcttaagacattgacactagaactcgaagagagtccaagcaaaaggaagatacaaatattggagaaaacatcaaagatccactgtccgatccagactcgcgtggggtaataatgcgaacaacctatgtcatcagatgtcgtttaaatttctttgtcgtgggtagtaaaccatgattggggcagaacaatcatattgtttccaccaaaaccataactttctgatagactaagaattccatgtatttacagtgtgaggggggggcgggaagatataaattgttatgaaacagatgatgagtattgaatagagtagcagatttgtaaacattcaagtgcatcttcacctataacaagattgcgagaatatagacacatttgagctaacaattgcagttgatacctagattcggatcctagtctatgacagactcgcacaat

SEQ ID NO: 29975 - DNA, 480 bp, Glycine max
  Clone ID: jC-gmst02400031e04d1
aaacacacacatctgcactcctttttattgcaagagcaattcactgtctcggaagaaaatgaggaatcaaaaaagtagaaggaaagccccagcaaagaaatttcaacagtaataatgtcttgggagaaataaatgcaaaatttcataggagtagtgccataaaaccttttccatgatccagaaaaccaaaaaagcagaaaatccctgctctactcatactttacaagtgtagcaaccaaagcactgtaagtaggggggaggacaaatctttatcctcagtatgatttcccacaatgtatcaagcttccagcacccaagaaaagaccaaaaatagcagcacttccaagtgtagtttgtccaatatgcctaattttcaatagtccaggcaccttgtacctaatagcttcatatgttccatacacagcaccgacggcgccgccgacagcgccgcccatagcggcgccggcggtgacacgagtg

SEQ ID NO: 29976 - DNA, 121 bp, Glycine max
  Clone ID: jC-gmst02400031e05d1
ggggttgtgttgtaatatcttggcactcacttttgtcccatggtcggggaaaatgaataaccaatgatttatgtttatggcgggaccacttcgtgagatttcagggccgtggaaagagtaa

SEQ ID NO: 29977 - DNA, 385 bp, Glycine max
  Clone ID: jC-gmst02400031e07d1
gtcattgactttttttttatccacccccactacccctatcccccccgtccctctatttttcggcaaaacccaaactaggggaacaccaagggcaccgtctccccccccccccaaaaaaacaactctcggcaaggggaaaaccccccccccagaaaacgaaaaaaccgggtgggggccaacacccccccggagaaaatttacaacaaaaacctgggggccacaacaatgtacaacccggcgggcccccaggggttttgtcccccccccaaaaaaacaaaacaaagaccccccccccaaaaaaaaatcaacccccccccaagcctctctttttccacaaaacaaaaccccccacagggggaaaaacaagggaccccccaaacccccc

SEQ ID NO: 29978 - DNA, 540 bp, Glycine max
  Clone ID: jC-gmst02400031e10d1
ggagcaaagcactaatatgcagagagaaaattaataatccagcaagagaaaatggtgacatacaaaactgtatcgtaatggagttgtcaacaaagttaacagttgcactagaattgagtttaaaaagccaaataagcacaaaattaacacagaaacagctctaacaaatttcatgcattactataatcattaatcacccaaacctaaaatccctccaaaaagatctttatcacttttctcaaaactcagcccttcaaagcttgcttttcctttgtcttttggatcttcaatacctttttcacaatcttttgctcttcaaccaagaaagctcgaatgattctctctctaacagcactgccagacaacacaccaccatatgcacggttcacagtccttcggtttttgggtaaccttgatctcttatattctgttggccttaaatgtggaatcccttgaatccttttttcagtgacagggcacttgggtccgctggccctcttctcgtggtctgataaacaagcttgccaccgggagtcttga

SEQ ID NO: 29979 - DNA, 583 bp, Glycine max
  Clone ID: jC-gmst02400031e11d1
attgcaaaacaaatgctcttgttttatttatatttgattatttgactttggcattcctcctggcaaaattgtccatgcaaggagctattccgcaaaacaacaatttccgtacaggacacaattccactaatagtgggagggcacaatgccaaacatcgatcattgcattttacgtaagacagtgtaatgcacaactttgtggacctatatatgcaatggtgcagtacattatagataaggcccgtgaaggtgaaatcatgggtcagggaatttagaagatagacatgcatctacggcttcagcaacagtaaggaaaacccactgccttccgattttatccacaaaatgtgccactttgagcttgtgaatcactagccaccttgggttcaccatagccaattgtacgccacgcgagagcaacctcttgtgcagttccttcagtattagaatcccagaagtatcaacattcatcaagttgctcatgtctaagattactgcttggactcttcccttagcaagctcgttttcttcttccgcgacccattttagtattctttctctaacaaaatttgcatttgcaaag

SEQ ID NO: 29980 - DNA, 519 bp, Glycine max
  Clone ID: jC-gmst02400031f03d1
aaaaaaaaagaaatattttatatcaatttattataaacgttaataacattcattatcaagtccattacggatcccatcagcaacaaatcatgaaggaaggacatcaccgagttttctttactcttctgcagcactagcagcactaagatccacactcaggtcaataacctttccagttatcaatgtatacatgttgagaacatcatccacggtcgactcaaagtgagtagtagcatcataacttgttgatacaaagcagttgtccaaagtgggttcattgaccggttcatatctgtcatagatatcaaaaaatatctcatcaacaggtcctagaaggtcaattccaggttttagttcaattgctggctgatctgtctctgcctcggttgatacaaatgcaataaattttccctttggagcaacattgtgagtatatgaacaacaaaataggtacatgtctgacttccgacccaactgtttctgtggtaaaataatttgcaccgaatgggaatcatcagt

SEQ ID NO: 29981 - DNA, 399 bp, Glycine max
  Clone ID: jC-gmst02400031f04d1
gcgcaacatcaattttatatctgatttgatctccagaaggaagatgccccccttatttattatctatatatacaaccggttccatacatttagagaactaaggaaaatccaggtcgtgattcatttgacaattcatccctttgttggcgcattcgcgctgcccatgacatattccctccaacaaccttggtgttacttttttttttcagctttgacagttgaaatttccacctgactttccattccctttttgtgccaaccccctgatcgggataattatagcggcaacgagcgttgaaggccaagttaatgcccctggccatggccttatggaacatagcttttcgggaaggaacaaaaaaggtttggtaggcctcctgcacctgaataaaccttttg

SEQ ID NO: 29982 - DNA, 407 bp, Glycine max
  Clone ID: jC-gmst02400031f05d1
atgagaggaaattgtttttttatttttactagatataatgtaaaataataagacaccgtattataaaatgcacaggctacatccgtgagcaataataataatttatgtttaaactgctactagtaactactaagctcggcacatgcaaaaaggagctggatacatatatattgcttgatttgggtgcctcagccttagatccccttgtctattttggtgaccgtcacccactgcatcctgaaactctagacactgtatgggactattcaggacggggctgagccatctatgccgagaaacggccttatagtcgatacagtgcaagtctgttcggtgtccaaccaatgcattgtgcgtatttcccggggaagcagggatgaatatgtggctatgcacgccaacatatt

SEQ ID NO: 29983 - DNA, 305 bp, Glycine max
  Clone ID: jC-gmst02400031f06d1
aagagtggaaattgcttttttatttttactagatataatgttaaataaaaagacaccctattctaaaatgcacagggtacattcgtgagcaataataaatatttaagtttatactgctactagaaactactaagctttgcacatgcaaacaggagctgggtacgaatatattgattgatttgggtgcctcagccttagttccccttgtgtattttggtgacctataaccactgcttcctgaaactctgaacactctatgggattattcaggaaaggcggacccatcaatgccataattggtctta

SEQ ID NO: 29984 - DNA, 353 bp, Glycine max
  Clone ID: jC-gmst02400031f07d1
aagaaaggaaatatcttttttatttttattagatataatggtaaatgataacacaccgtattataaaatgcacgggctacatacgtgagcaataataatagtttaagtatcaagctactactagtcactactaagcttgtctcatgcaatctggagctggatacctaaatattgattgaattggcgtgcctcagccgtagatcccattgtctattttggagaccatcaaccactgcatgctgaaactcagaccactctatgggtttattcaggaaaagctgagccatcaatgccgtgagtgggtcttatagtggctaagacaagtatgctcggtgtccaaccaatgcattgtg

SEQ ID NO: 29985 - DNA, 455 bp, Glycine max
  Clone ID: jC-gmst02400031f09d1
agtgatgtgaattattcatattgaaagccattagcatacatacatacatacagatgcaccataacctttttctatgtacaaatattatttcccatatatcgatatatcgaagtggtctactgaataagggaggactattgaattctgcactgtcaaatgttgcatcctttaatatatttcggaaagcttattttggagtataaatacatattttagaattaactttgcaaaatataatggtgagaatgcataaatcgaatgttataagtgagatacataataacagcaagctctattgggttagaacaaaggcaaaccatgaagagctgacgacacttaagtgggcctttgaatttgggccatacattttgcatagcccataatgacacgtcatgttcagctgaacgcaattggacttccaagcctatgctatacatctgggcattcccaacgtg

SEQ ID NO: 29986 - DNA, 586 bp, Glycine max
  Clone ID: jC-gmst02400031f11d1
ggacagaagtacaacgcataatctttttttttttggcaacagttccattgaaataattcttatctcatgctgccacagagcatatttatccaaattatcttgatatctttttttccccaaacaaaagaaaaactacttggttatgctggatgttttctaatcacaacggaaaggataactataaatattactttggtaaaaaaaaaaactaaatattactatcaatacccatgttcttcaagaatacaatttcacccgtaactccgtaagcagtgttaaaagaaagaacagaaagtaacgcgaagaaaacaaaaatgtccacacgactgtcctcacttctgaccaccagcctcagttggttcaaccacctcagcttctaaagtttctggggtatggggctgggttactgtggactggaactgaccaggtgtggaccatttaccagtgagagccatacccatcatctcatatatcttccctccaagttgtgctggattatcaggcgttaaaccactggaaaccaaagcagcatcatacaaaagatcaatagctcttagggcatcttcatcatcgggatttggtttaa

SEQ ID NO: 29987 - DNA, 95 bp, Glycine max
  Clone ID: jC-gmst02400031f12d1
atcaatatatttatcatagtcataacggaaataataggtgctcacttcagttccagaataggggttaatttttaaaaaatgacttaagactatga

SEQ ID NO: 29988 - DNA, 456 bp, Glycine max
  Clone ID: jC-gmst02400031g01d1
gatcacttggcagaaagaagactctagtattctctacggcggcaaaaaaatatagccacaaagcattttacaccatgagatatgaaatatcaggcattgcaaaaaccccaggcagcccaccaaccatgtatttacttgctggacctcgtacaacccacggacattaggacaatgacaagacgttgacttgtcccccaactgctgtcgtgtcataaaggaggacttcacagatagaccaaccaaaactccccagtagagcatgaatatcttctaattaaagttgaatccaccggacggcacagcaggagcgttactgctaccaaagttgaaccctgactgagaagcatcccctggaggcataggctcatcttcctgctccaaccagtgtgtctcaagaatcttgaccgcctttgcgcaaatctctgtgttgtcatgactctggaggatctcaatttt

SEQ ID NO: 29989 - DNA, 503 bp, Glycine max
  unsure (1)..(503): unsure at all n locations
  Clone ID: jC-gmst02400031g03d1
ggtattcaatgttaaaaatagaatacatggatgcaaaatcgaactcaagatacatgagctagggtggtttgctattagactactttattcgccctattcttgatcaagacctctgcttcaatataagtaaaccttggagcagaggagctgaattatcctcttaaaccttactgctacatatctattgcggggaaatcctttgaaattctctattaccattctatattttatatttatcttcatttaattggcctcaaagaaaataaacaattcacttaagaatttcaactgaaaaatgactaactttatattgagagggcgtcccattaaaacaacactttggctcacccttttattctaggaatgcaggcatnaactacatatatccaaatacgcattccatccctgaagacggtatttaccagctgtttcttctggatttactgctttgatgatgccacgctccacaatgatgatttcactgcccgtatcatggaccactt

SEQ ID NO: 29990 - DNA, 372 bp, Glycine max
  Clone ID: jC-gmst02400031g04d1
aaaaaagacacttttaagtttcgtattatgaaaaaaatactttgccccatgcttgcaaaaagtaaaaccaaattttgaatttacgaatttaataaaatgatgcaacatgggaaaaaaaagccctttgataaaagaatcacgaatgtaaaagcaaaactgttataaaagctcagtgtcgggagggaaaaccatcaccccatttgggggttttctgggaacaactgggttctctgggaatacttaggggggttacccccatttagcgggatgatgctggggaccttcagggcactaaatgtttcagttgctataaaacgaactgaaatggggaagaatgctgatgattccgcttggggaacaacaaattccatt

SEQ ID NO: 29991 - DNA, 466 bp, Glycine max
  Clone ID: jC-gmst02400031g05d1
aggagtggaaatagcttttttattttcactagatataatgttaaataataagacaccgaactataaaatacacaggctacatccgtgagcaataataataatttaagtatatactactactagtcactactaagcttggcacatgcaatcaggagctggatacgtatatattgattgttttggcttcctcagccttagttccccttgtctattttggtgaccttcaaccactgcatcctgaaactctgaccactctatggttttattcaggaaaagctgacccatcaatgccatatttggccttatagtctttaagttcaagtatgtccggtgtccaaccaatgcattgtgcatatttcctggggaagcagagatgaagatgtcactatgcaagccaacatagtagtcaagtgcagctaatagagaagcttttccctttatctgagaacgctcttcagatgaagca

SEQ ID NO: 29992 - DNA, 415 bp, Glycine max
  Clone ID: jC-gmst02400031g06d1
gttgaaaagataatttattccattctctggcatgccattatatatttgatatcaacgatgacttgattacattgatccgaatcgaagagcaagcgatacacactgcatgtttgtgatctccaggaaacaaacaagaagaaaaactgggcatgcatgccaaaggaacaatagatttagatcacttgagaaggaattttttcagccaaaacgcagaggacttagggtatctactcaaattgttcttgtaatccacatatatgatgccaaatcgagctgtgtgaccagcatcccattcaaagctatctgaaaatgaccatatatagtagcccttcacattaactctatctttgatcgcatgaagcagggatttgagatggccatcatggtatctaattcgaataccattctttcgggc

SEQ ID NO: 29993 - DNA, 382 bp, Glycine max
  Clone ID: jC-gmst02400031g07d1
ggatgcagcaagttcaaccgttcatatttggaactcaaatggactacagaactgtattcaaaaggacgtccttcaaatttgaaattgtcattatctctgcctttccagcaaattttaatctataatgcaagagacgacctaaagatctatcacacgtgacaatttctggatccgattcagcaggaagcccccttgcttaatagttgcttggtaaagagcattcttagcatcagggcgattcgtttcacgaacacctgcaactttatcaatcttacaatgaagcttccctgctgcaataaaacgtgatagctccacatcaatgaaatctactgtcactccaaaggcttttgccatggcttcaatagtcacactcttgtaagat

SEQ ID NO: 29994 - DNA, 483 bp, Glycine max
  Clone ID: jC-gmst02400031g08d1
gaatagaccaatcggctagatattaatttaggttttcgtccaagtttacatgtatagattttaatgcttgacaaactgccaaaaatactcataacgatgctatgattgatgtgagaatacaaagaatggcaactgaaatttctaatggctaagcagataaaaaaaaaaaaaaaacccttaatcaaagttcaaaagaattacgtttttctatacctaactggtcatttatccagctcaccagaatgtcccaagattttcaagacaaactatccctccaacagataagtattgatcttgttcaaggcatatctttatattaaaaaaacaacaccaactggaatgatgtttgcggagactcttcatccattgctcttcaaatattgagcagtctgctttctcatcttttcttcaatgctctgccagtaactttggcagctgcaatgcaacatctttaattttattatactgggaactgtctcacac

SEQ ID NO: 29995 - DNA, 596 bp, Glycine max
  Clone ID: jC-gmst02400031g11d1
gttatccaaattgaaacaagaaattttattgccatcgtagctcaattacatttagtctccatcttgcatcttgtaattttgctatatctgagactcttttgtctgcttcacatttctatagcaaaacgtaaaatagaaacatctaacgaccaattcgtacacaaggtacacgtacaataacaacagtggaagaagaaattggtacctataaaaatacactggatcggatcgagtagagtatacataccacaagtgtcaataacatattctttattacactcattttaacacattttttatgattagtttaaatttattaaaaactataaaatcacattaaaaaaataaccatgaattttccagatttaattttcaataaattttagtgacgaaatatttcatatgtaacttttgaaaaattcatcactaaagtttttgtaactttagaattagtgacgaaaaggcaatacatcactaaattccgtcactaataaacatatttagaagagtgtattagaaaatatgttattaacatttttcttgtctgagattagtttagacactaacggagcacccgtggataatctggaacttga

SEQ ID NO: 29996 - DNA, 118 bp, Glycine max
  Clone ID: jC-gmst02400031g12d1
gatgttaaaattgtatatattaatttatttttattacaactaacggacatatttggtactaccaataaagctacgaccggggtaaattaaaacgagaaccctccaggttatggatcat

SEQ ID NO: 29997 - DNA, 570 bp, Glycine max
  unsure (1)..(570): unsure at all n locations
  Clone ID: jC-gmst02400031h01d1
cataacttctttggcttcttgataaaacaaaaaatacatcagaatatctacccctttagccgatcaaaacttttgtttttgtttcaaatcaagctgtcttgaataatagtatagccgtatattattatgtatgtacgtagtagcatcatcaatctctggttaattaatttatttccgcacccagagagtgacgctaaagcgcaagaatcccagttgaaaatatttgttcccttgtatatggcgaacttgacatttccacagaccttgaagcttctgaactacaccgttccttcctttcgtccatcgttatttgactcgaacgacactcagggctacaaaacgctttctctcctctgtacatgtatatgtctttgccgtggagtttctttccacataagtgacatgaactgagaaaactcgatgtggggtacgatgattcgggctcaatcaaaggttgtggttcggttcttctgagaactacaancgttgttttgttgttggtggtggtgttttgtcttcgaataatatcacctttcacaccatcatagtttaccttagtgaacgttttgt

SEQ ID NO: 29998 - DNA, 478 bp, Glycine max
  Clone ID: jC-gmst02400031h02d1
aaaaacaataaagtaactgggtaaacgttaatcatatgtacttacaaacgggaaattaagctacttatgttggttggtacagcactagaaagaaccacctaacaaaattaactggtgaaattaaactaccctgaactgaagatcctattcctaggttatgacatgtttagagccgccactttatgaccttactatgaagtattcttttttcaaaatctttttatgctcttcgatatttcttaagaggggttcagtgtctaccaagcaatgacattggagataagaaaaagaatagtgaatgtgtaatagccagcttttgtaaccattagtagcagaataaaaaaatcaggggtttctcatgattatggtatgccagccaaaagttctcgagaccctgttagggttcctgggacacgttgccttatctcttaaaagcacacattgtttgtgagtctaatcctccagtaaactgatgagc

SEQ ID NO: 29999 - DNA, 566 bp, Glycine max
  Clone ID: jC-gmst02400031h06d1
gaattgaaaaataatataatttaaatatatatcttcaagcaaacaaggtcgttatcctaactggatattccagtctattaatacataaatcaaaacgaaagttacaagaaaaaaaggtgggaatcatgaaatgcaaatttgactattagagtttacaataattcaaagaaaggaaagcattaagccaacttatgcttcaaggagatctagagtatttgtctgaggaacacccacataaactacaacttcttcaatagcaaggaaatgataaaaataaagaaggggagggtaatacagggagaacaaagggcagtcaaatgttaacacctagtgaatcacaatatcgaacaggccttttgtgctttacccttctttttcttctgcttaggtggttgaaggacaactcttatggctgcatcaaagactgccttcacgttctcctgtgtttttgaactgcattcaatgtaagctggcgcattaatcagcttcctaagctcttctccctgagctgtggtaataggtaccgcaccaggatggtcaatgcagaactgcttatcatcccgaag

SEQ ID NO: 30000 - DNA, 551 bp, Glycine max
  Clone ID: jC-gmst02400031h08d1
acaatataataataactttcaaataataattcgaatccaaagataatatacaaaccttaatttaaaaaaaaaaaacggacacaagaaccaacatctcctgtcagtattcacataacataaaaagacattcaatatgccgtgagcacttggtaactggcgtagaaaacatacgttacaacaagagggtcaataataaacttgatacctactccgggccttgcattggaaccatcatatgtcgaccctgagaattcgggtaagtaacattttgtgagaaagaaccttgatgagcaagctgagcattaggacttggctgaacatctctcttagcagatgagtctccacccttggcagagcccttcgtatcaccctccatctctcggtatctagtgaggtaaattttaagaggatccatataatcctcgaaaccgagagtggccatcgcccagagcaaatcatcgccgttaatagtctttctcttttctctctgacacttatcagaggcctcgctggtgatgaagctgatgaactcggagacgcattcctgaacg

SEQ ID NO: 30001 - DNA, 533 bp, Glycine max
  Clone ID: jC-gmst02400031h09d1
gaacaaatgaactaataattataaaaagttgagtttggtacaacatgattaggcaaataaaaaacatgcctaaaacaatgcaactcaattagtgaaacccaatcacaaagatgaaatcatatctttaacaaaacaagcacacatgtatactcacaccaagaatctgataaatctcacgtttgatggaaaaactcagtcagttaaattttgctcctacactagatcatctggcccagcgagcacgacattgcaatcaagagcatatttcctggcaaccataatggctgcatttctgtctctctctgattcaaaggttaatacaaatgagaggccctttcttgcttgccaaaacaacgccttcgctgcattagcgatatcacttctaactccacatagctgcattgatggggagtaaatctctcttgcttttgtaatccaacctctgcatagctttatcctcattctccccacattaaatgaatgagtagaatgtgaagagtgatcttttccattcatttgagaaataactacct

SEQ ID NO: 30002 - DNA, 349 bp, Glycine max
  Clone ID: jC-gmst02400031h10d1
cttatgcttattcttttgtcatttttgttttttttaaaaaccctccaaaacccaaatctcgagatatccataaaagctaaatagaccaaaaaaaagggtagaaaagatgccccaaaggttattgaaaaaaaacccaaagacaaaaaagaaaaaagggaaaaagaaagaaaacaaaacttttttgcaccaaaagggggggcccctagaacggcaccgggaaacgtccaggaagagatcattagggcccctcaatgtaaggggaggccaccctggaacccaattctcacaaagttgtctaagggggccgatcgggcgtttgcctaagggccgagggcataaagcctcggga

SEQ ID NO: 30003 - DNA, 564 bp, Glycine max
  Clone ID: jC-gmst02400031h11d1
gcacaagacaaaatattaaaaggaagaaggcaaattccaaaagttcctttcctgatcaactcataagttttgctacaatgaacagcaaaaagaatttgctacagggagggatatttataaacagaaattaaagacaaaaaaatgaaaaatgatgagaataagaaaagtaacaaagactcctcctgagtactgctacaattactagacctaaaatggctaacactctggtgactctaccctctttgacttgcatatctctatcccttgttcttcagttctaaatatagctacaatatgatcatgttctattttgctcctatccccccattccagccctgtacaaaaatccaatgagaaaaataaatgacagacaagaaataacacaaagactaaggttttaacttgcggttgccatcaaaattgtggacaaatatggctgatgcagtcacaaccggaaccacaacgcagttgcagacacctataaaaaccttaacattgcagtatgtacaatgcaattcaaaaccttgtataagacatgacttaagagaagacttgaaagagaat

SEQ ID NO: 30004 - DNA, 265 bp, Glycine max
  Clone ID: jC-gmst02400032a01d1
gctcctcgatttctattaactgtaacgtaaatagagtgcagagacaacgctgcaatgccctggcttaataatgacgcaccaaggaatcaatatgagatcaacaactagtaatgactataaaaaatatcttcattcaatggggaacaacacatttgaatatcgagcatatatgggacctgaacctgagaatccataggtaaatatggtgaaacaacacaacctgctgcaggatgtctgattggtctaaggccatcatctcctgctg

SEQ ID NO: 30005 - DNA, 591 bp, Glycine max
  unsure (1)..(591): unsure at all n locations
  Clone ID: jC-gmst02400032a04d1
aaaatgaacaaaagcctttaaaactatattgctaacaaacacggagatattacatcaagaacatacacatcatcactgaataagagaaatggagcctctcaacggggcactctttttctacttagtatctcttgttcttttagtcgatgttggaatcttgcaaggcgtgcttggagactaacgagactagctgctttgcgagaaagcacgaaactcaactgggttacgtagttgtcaataagacttcctggctggtccacttctgccagtagtttcatttcttcacgaacaatctccattgtgtcttcaatttccttcctatgagcagcaattagtgcttcttcctcctcaagtattgcactgatattcacatcagaagaggattctgtttcagactgccccgatccagtggtaatgctataatttcctgtgctctgctgcttggagcttgcagtggaatgatcagaaccattggcatcccgttttacccaatttacagatctttcagatttctcctncttagtcccctttctgcgtggnggagacaccccttgcactttctcattgtaacatctatggaaaagagtcatc

SEQ ID NO: 30006 - DNA, 467 bp, Glycine max
  Clone ID: jC-gmst02400032b02d1
atggggaaaatactaggagaccttatggtaccatatccattccgagatacacgttacagggaaaaactagtacttgtgacaagtgacggtccaggtgaagaaaatgataatgaaaaggacgacaacgtactcagctgatgacagatagacactgatcattcggtcgttagagaacataagcgtctgtatgacgttcccaatatcggtactagacacatattcactgtcgttcggattgccggacaaatagttgggcctccgtcattgaagccgtattcagaggtctggcatgatcagtgagaggttgactattggtaactgacggcctgggacgaaatctttaaaggctctcagtctgaagaagaactccacttgagatgccatgatgcatggcaaatgtttaatgattaggacaaatgtttacattagcaactgattgtagcaccttgtcatccatgaactgactg

SEQ ID NO: 30007 - DNA, 409 bp, Glycine max
  Clone ID: jC-gmst02400032b04d1
gaatgactcactttttgaggctgggaagtatatataaggtacttacatcgcacttggatgtatgcctattcctaatgaatctgcagaaaattacattggtacctggaagctttgttagtcccaccagatgcaagaggtctatgtcaacactaacatgctcctctatgaatacacgcctaatagcttaggcctttttgagaaactgcatgacattggtattgatagcgcatcacaggacttgtaaacctcggaatctaaacccttcggccagaaccttaaactctttgtatggtgtctgtatcccacctggattatgtgccaacatgatcacatcgattggaaccacacctttatgggccaagctatagtatggagccactgcaagaatgcatgctggcacagattacct

SEQ ID NO: 30008 - DNA, 466 bp, Glycine max
  Clone ID: jC-gmst02400032c01d1
caatgccattgcacatttgtagactttattgcgcttcaaaaagagtcaatgtcaatccattttagatctgcccaaaaataaaaaacaattcccgtatctagagttcatctgactaacggtgtctagcgatcgaacttgatcaataaagtgttatcctccatccaaacagggcttcccaagaacttaatattatgggagtgaaagctaaccctcgaccattttttctcacttgaaaccacataatgataacaaggcttttccatttataaatgaagctcgaatcatatcgaataattaataacagatccggatgtacctaatttagccctgaaaaatgggaaatacttaaactaaagtatcctattgtaaatattccctcctgactcgacagcctgagcaacagtgtccgagccatttgatgacgggtgactagtagataaagcaattggcatccgaggaggcgaat

SEQ ID NO: 30009 - DNA, 579 bp, Glycine max
  Clone ID: jC-gmst02400032c03d1
gaataacaaaagttccataattcataaacctttgacatgatgaaggggcaatagcttatgggtattatggcctcatgcttatgctaatgccaataaagttaaaagtatgttcatataataggtaaacagtgagaaattaatttatgctttatagtaaatagaattgggtagtttaaatgttctcttggccattggaagtccatcaaaagtgctccattgatctcccacaataccccatatgcgataaccttcatcgaccaattgttgcctcaccttggaatggtattttttcacgtccatcaattcatcatcaaaacccctcaatgtaagcctattccatccatggtatccaacactcacaaggttgtctacggtgggagatcttaggttttcctttcttgaagaaatcagaaagattttgaaccctttgttcttgatttcatggaagagctcgagtgtgtgatcaagagccggtgccttgcttttctccatccattcttctaaagatgttgcgttcagcttttctcccccaaaaccatgcttcttataataaggaattgtggacaaaagggtctcatc

SEQ ID NO: 30010 - DNA, 584 bp, Glycine max
  Clone ID: jC-gmst02400032c04d1
gagaggatataaaatccgtcaaaggaaccagctaagactttcacagaattccaatctggccgtaacccagaacgatacaagatagcagcagagcaatccacaagaacaagaacatgaagaaatcacaacataaacagattccatgatggaaaaatgaatcgtttctgtgatgtatcccaaaagtacaattcgaagagaagcatcatcccaaaactcaaatttcggaaaatcaacaagcacaattttcttcagcagcaaaaaaaaaaatctatactttttataccctatcactgaaagtaagaaaaaaaaactgaccctaataataacaccatgatcatgattatcacataacaacagatctctgcgccttcctccgctcataatcagcatcatcagtggggaactcatagcgacaaacgggacacgtgtttcttatccccaaccacggcacaatgcagtcctcatggtaacgatgcgaacacggcaacaccttcaccccttcctcaacgccaaactcgtctttacaaaccgtgcaaacgacgtcagcttctgtcacaaccaccgacggaagaatcctcacgacg

SEQ ID NO: 30011 - DNA, 531 bp, Glycine max
  Clone ID: jC-gmst02400032c06a1
cctaattttcactctgcccctgtcagtgttggctttcagttgcagaatttctcttcttctaacgctgttgtcgctgctgctactgctgctgatgcttcgcgcattgaagctccttccgctcctgttgttgttgaaggcaaccaggttcccaaggaaagtactcaaactaaggtgaagagaagaggtggcccaggaggtctcaccaaaatctgtggtgtttcgcctgaacttcaggtcattgttggccagccagcattgtcgaggactgagattgtgaagcaactgtgggcttacataaggaagaacaatctccaagatcccagcaacaaaaggaaaataatttgcaatgatgaactgcgtgtggtgtttgagacggattgtactgatatgttcaagatgaataagttgctatctaagcacattatcccccttgaaccaaccaaaaagcctgttccaaagaaacagaaggtagatgtggagtcaggaacaagaagtgctgaacctactccttctgtaataatatctgatgca

SEQ ID NO: 30012 - DNA, 617 bp, Glycine max
  Clone ID: jC-gmst02400032d01d1
ggacagagaataaaatgttcatattattgcaacaactaagagattcaatcatagcaatacgagttcggcaacagaacatcatcaaacaaacaaagcaataaaaacatatagtgaatatcacacactcacagctgatcacacgacgtaggaacaaaagaaatggtctccttttcaagatcatgattcaccaaaatgttctgctgttgaacatttccgaatatagacattccactagaagcacccatggctaaacaagccacacccaaattggagtcaccaatcatgtagttctcagcaggaagctccaaatccccacccttgaaatggaaaacaatctttggaatctccacttgtgttgaccctgatggcagagagaagcaaagatccaaccctgttgagctagttttgtccaaaggaagtttggtttgagaaatgaactcttttttgagtgcctcaaaggccttttgttcaatgtatgtgattgtggtgccagagtctatgatcacaccaccattcccatcatcccccacttcaaagtggacttctcaatggacaatcgagtgtccccaacagagatgcctctcagagaaagatagtataaagaaggttgcaaaggg

SEQ ID NO: 30013 - DNA, 552 bp, Glycine max
  Clone ID: jC-gmst02400032e01d1
gaaaattaaggacaccgtttttacacaatgtcaactaattttcttaaataacggaaatttagttataatcgagacaacaatcaagcacgggggaagaactaaagtccttatgaaaagagaattaaagaaaataatagacttaaaaaagcacactgcatattcatcaaagcatcatcaaagcacactgcatcctaacagcacacgtacgtagaaaggtgaagttccaggttttgcacaacatacacaacacaccataatttattttatatacaatcttatggtgcccaagatgcagatgcatggactaattaaacaacaacgttagtctgataggcagggtccatagataaattgggtacccataaaatggccttgcttccaaggaaatggcaaacagggttagttccaggatcaactcccatgagttcatgaagcatgtgatgattcattccagacgtatctgagtggcaaacagcaagtgcctgagttttggttccatcaccagtcaccaatggaaccatgaaagctgttgttcacggactttatggcagt

SEQ ID NO: 30014 - DNA, 541 bp, Glycine max
  Clone ID: jC-gmst02400032e03d1
atccatactcttctttaagtgtcaattgtacaataagagtcaagccctgacacaaatcacataataatttacccatacctcaatgggggagcctgaacctcaccactcacattttattacatagatatgtgataaaaaaaaataaaaaaatacatgtaaacatatagggctatgcatgaaattgcgctgcagagaatcacaggaagcaatagagagtgaacaatgaattatcaaatggtaggaggagtaacagtgctgacaaaaaagtcctcatcaattttttcatcgtggcagcactggaaggtggtgagcacgtgcatgttgcggcgacactcggggcacgtgagcctctctgggattctccccattgaatgagagaactcaaacctgcagcaaggactaacaattgaatgaaccttgtcgtagtgattcttaaatgctggttcaaacccatctctgtcagcaagttctttccacacagcatcatactccaccaaggtttgcaacccggttgtggcatgtccattgaccacaatgtgag

SEQ ID NO: 30015 - DNA, 577 bp, Glycine max
  Clone ID: jC-gmst02400032f02d1
caattcacaattctttgaagccaaatctctaacgtatccatttttcccttggtaggtgtacacatgtggaactgacaaggttcacatggaccaaacttcacgtaggagttggtatctagcatttgtggtggggtggcccccttgctctttgtgattattaccttttccattttcagtgactgttggagatgaaggaagcttatcaatgatggatgtaagaggggaatcaagttcctctagctcttcatcacttgtatatcctctactctgaacagctgatacatttcttgccaagtgagactttccttcagtctctgcaactttctctgccacattagcagaagagggagccatatacacaacaggtgcagccacatagggaaagcttcttgcagattctgctgacaatcttcgctctataatagtctccgcattcagggcctccaagacagttcctggaacaggatctggacagaactcatccggagtgaagttacagagaacccgtataatcaatgaaagaatgatggttggacacacctcctgtctgatattcctatctataaagcatgtttta

SEQ ID NO: 30016 - DNA, 549 bp, Glycine max
  Clone ID: jC-gmst02400032f03d1
ggcattcactagattgtgatcggcattgaaaggtgttagaatcatggatatcgatgggtcccattttcaactaattaatcccaatattccgatcgattctcaaacaggttatcatagggtagatactgatccttgccagtaccttatgcccccgtctcggattgtctagactactaatccgattgctaattgatttccagaaatgggctgaactcatcaatgccaaattcaatctgacttatactaaggctcattgattgatggtccacttcagtacggctgattgctggacttgtaccaccgcctactgagctgcttgaaaggttaccatcaatcccattatatcacggtttagaactaatgctctcctttttgctaatgaccgccatctgaaagctgatggatgaattttacagctgcaccaccgtagtggttctactgacttttgagtgtgacttctatgtatgggtataactggatgcttggaatgaacaggtggtgcctccgttgcccccagcatctaatccgtcatcccacttgggtatgtcg

SEQ ID NO: 30017 - DNA, 348 bp, Glycine max
  Clone ID: jC-gmst02400032g01d1
aaaattgtataaataaaaatatctacaataaaaataacgggcataaaaggcacacccaaacaatctacaaacaggcttaatgaacaaaataacccacatggctacggatcaccgattgcatatcgctagacaactttactcgatgtacatgaagccgaacccgtataatattgtgcgacactgcgtttaacatcgctaacccctgtactaatgataggcgcgaacaaacaatggcatcctgcaactaacaccctatatcagaaactcacatgatctgcagactgggcattgctaagaacgaagacgagcgggctagaacatcttaggcctatctaaaacccatgtagg

SEQ ID NO: 30018 - DNA, 340 bp, Glycine max
  Clone ID: jC-gmst02400032g02d1
aacgtgtattaatattactaccaaaaatgctactacatggaataactaaaacaataacataaaagattatgggttaataggtgcatattcacctgaaaattgttattagcccaactggatccaggaccatatataatgagacatcctggtgtacatgacgcaactacggaaaaacgcttttttttgaataaggatcagattgttgaaacttgatgcgatatacatcagcctgagtcttctacagtgagggcttttcagaaggagcatgaggagcatactatttaatgttcaggcctagctggaaccaaacggaggagcccgattccaaaagtgtcggggt

SEQ ID NO: 30019 - DNA, 435 bp, Glycine max
  Clone ID: jC-gmst02400032h01d1
gatgttaaaaatgtatatataaatttatttataataaaactaacgggcataaatagtactaccaaaaaagctacaacctgggttaattaacacaatgacacataggtttatggatcatcagctacttattccttgaaaattataatcagttcagtctgaatccagggagcagataatacatgcacaatactgggcgttacaatcgcagactacctgacgaatgcatgggagtgaatttcctacagcatgctgtaactcgatgccctcactggcacactgaggcttctgcagggggggcatttcagaaggagcaataggtgaatgctagacaatgtttacgcctagctttaacacatggaggatgccagctaccaaacgtgtactgctcctaaaaggtgccaatcaaaagtcagaatatcagtgttgtacagaaag

SEQ ID NO: 30020 - DNA, 539 bp, Glycine max
  Clone ID: jC-gmst02400032h03d1
gaagtgaaacaaggctcattcatacagctgaagaagtttcgtcgtaaaactaagcaaaaaagtaaagtacaagtaatttcacaaagtatcttatcatcgccaccaaaaaagccagcgcaggggacttcttaattcccagctatcataaaaattttaacagactccgactaatctagagctcatcgtgagaatcgtcctcgtcttcttcgcctgatgcaccaccaccgcctggggctcctccagatctctgatacacagcactaatgattgggttgcaaacggcttcaacctccttcagcttctcttcataatcttctttctccatactctggttgtcatccagccattccagtgcttctttcacagcagtctcaattttctccttttcatcagactccaacttgtcagcgagcttgtccttgtcactgatctggttcttcatgttgtatacataggtttcaagactgttgcgagcatcgatcctctccttcaccttcttgtcttcctctgcaaactcctctgcttcgcgaaccattctc

SEQ ID NO: 30021 - DNA, 515 bp, Glycine max
  Clone ID: jC-gmst02400032h08d1
agctttccaggtaggtttcccgtcatcactgtatgacgtcctcctgtctttgggggggggggggggaaccggggaaaaaatgggttctacggcgcagtctaaggcccattagagtaatacccagggcgggcgcagagtaatacccggggaaaattggccagatcgcatgatgagtagtaaagggacgaaggaaaataaccgacgcagcaataagggatcccgttgtcaacgtaggtgtttttgttgtaattgtagtagtcgatgtagttgtagtagtacgcgtagttgcagagcgtgccagatgtgcttattaaagtcggtagcggctgtgtgcttgtacgcaatgttagggtcgttaggttggtttccgcgattagcgtaacaacgttgcgtcttgcgatagcgtacgcaagcgtgtatgtatttggtgcaatagtgttgcaaggcaccgccacgggttaagcaaacgctatcatagtggtaacggtggcccacccagcgtatatatatggcat

SEQ ID NO: 30022 - DNA, 256 bp, Glycine max
  Clone ID: jC-gmst02400032h10d1
tgctaccgattcctttccaggaaggtttcccgtcatcactgtatgacgtcctccttctttgggggggggggggggtagtaaaaggttagtatcgcgatgaacctaatagcatgcaggaaaataagagtatgagtaaaaggaaacgtgttgactcaatgactaatgccgaaaggcttagaattcagcaacccgtgaaatgacgtagtacaggttatcccgaagtagcttccagcgacggaaaattagttcgggttaa

SEQ ID NO: 30023 - DNA, 466 bp, Glycine max
  Clone ID: jC-gmst02400033a01d1
aagacaaccaatgtatattattttttttgagaaaaaaattcaatggacagttcacaagcaaacctacgacaaataatgtggctagtgatgagaaaatcaccggggactgttctgcaaatcacaaaactcctgtttcctatgagtaaatgtctgctggggattgctccaagctcatacccttgggttctggcaccgaaacatttataactaatatagccagtgcattaattgcagcataaaggatgaaggtaccatacgagcttcagctcatgaggaagttgaaagtataggaacataaccatgcaccaaaccaggtagttaatgtggccacactttctgctagccctttgacattgacaggagatatgttagacatcacaacccatggaattgctcccattcctattgtaaatgaacctatgtagaccagtatgcctgccacagcaagcgctgggactgtcttaac

SEQ ID NO: 30024 - DNA, 586 bp, Glycine max
  unsure (1)..(586): unsure at all n locations
  Clone ID: jC-gmst02400033a04d1
aaggctcngcgttttgagatcttttgccggaaacaaattcattgacataaagcagtattcctgttacaacatttccaaaagcaatatgtttcctcaattttgagggatgttcaaatataaacacaaaatgagattaattttatactagagtagttatttatccttcgtatcctcaggcaaagcagatactttgcagataggacataatttcctcaaagataaccattttttaatgcagctcacatggtagtcatgcccacatgttttaagtgttccaacatcgtccatgttcttgtactcttccagacatattacgcagtttccttcgtcttgactttgctcagatgaacaatatattgtttccgtcaaacatttgttaagcgaatcctcagagattcctgtgttcacatagccaatcctctcaccaagtgcaagtagttcctcataactcatgttatctacgtccatcctcatgtctcgatgctgatctagcatgttcctggaaccatacactgatgcacgctcaacaaccatgaaaccctcagaggaaaaacgatcatgcagaccactctcagccaatgatcga

SEQ ID NO: 30025 - DNA, 542 bp, Glycine max
  Clone ID: jC-gmst02400033a05d1
gtaaaacgatatggcggcttttgcaatacatattatttcccttcccacccacgcaaacgctcagagtgcaagagctcaagtcattaatggaagtcacctcaattgactgatttttacaaagagaactcaaggggatcaacatttcaaatctgacaattacataataaagcctttcaataccttgataaattccatgtcattgccaaagcaccaagaaaaatcaatcatgtttcagggcacacattcagaaacataaagagaaacttcacgagtttggatatttttatctttacaaatattggaccagcggccatatgacaacaaccaaacccactataccaatgactgataaaagcatgcacaagcaggagcaaccacccttggtgcgtttgtttaacactgccaagttcttgtgcactctcctcaggcgagaatctgtcacatctacatgtgggtgcaagtcatcaatgagtctggtatgtagattcagctcttgattcacagccaacgcaatatgtttagtgctgagtacagtctcctcc

SEQ ID NO: 30026 - DNA, 375 bp, Glycine max
  Clone ID: jC-gmst02400033a06d1
atcactcatagtcatagcaaaatctgaatgggtcaattggatcaaaagaagaaaacagagtaaacaaattgaaaggcaaggaaaccccgaaagcactgcctctgtcctgactccataacatctcccctcaaattcacatcaaacgcaacacaaagtatgggatcaaagaagcaaaaaacatagcaacaattggggagccagcagcagttgcagatgatgtataagaagatgtggtagtggtggaggtttcagttgaaggggtagtggaggttgaagttttagggttagtggaggtggaagtgggagtgtcttctttgacctcagaattatgaggtgagtcctctacaggtggtgaaggtgcatttgcgcgtgcaa

SEQ ID NO: 30027 - DNA, 519 bp, Glycine max
  Clone ID: jC-gmst02400033a07d1
gagctcgtaatactcacacacaccatcaatttaaaccttgaattttaaacattgtaattggaggtcgatataatatacaaccatgacagtactctcagtagtgctaggaaagttgggtcaagggataatgcagcaacaccatgcatgaagttactaacaaaatctgagccaacaaacaaaacagaaaacaaaacactctatgactcaagctgagcataccagatgccctggatcttgacatcctttggagcctttgctcccaaatcagtgtcagatggttgaacactctcgaacacaccgataacctcacccgtctcaggcttggtcttggtgacactcaaggtgattttgcccttggatgatgaggcacttttattgttttccttggcaagttcttcctcatctcctcttccaccagcaggcaaagcaactgcattgtcataacctgtggaagcacctcttcccttggggtccaagaaagagcttccacggtaggatgggactagaaactccccacta

SEQ ID NO: 30028 - DNA, 547 bp, Glycine max
  Clone ID: jC-gmst02400033a08d1
gaaattatatataattattttaaaatcgtgagattacaagacatactaaaaaaggaatgtaccatacagcctaaaatggagttacttatggaccacagcaaatagcttggggactgccagactacgaccatggataagaactcaaatggattaccaatttaccatccaccaaagtattaactgttcttataaacctaagaataaaaagtatagactaaaattgatgaaatataaaatgctaaaacaaacagcatttctttacttttcccagaaatgatgggtatttatgagaaaagctatttacacaatcaatcccagcacaactgctaatgtgtctgcgtcagagtttaagcaagaaaaaaaaagggtgagagcctttggtagaaatcataactcatatgcagtcacattagcagttatgcggtggtgtaagtagcattactagcgattcctataagtagcacacatatattcgtgccactactagacttcatatagcccaacatacaggacgacacagagaaccagagacaactgccatgggaaa

SEQ ID NO: 30029 - DNA, 535 bp, Glycine max
  Clone ID: jC-gmst02400033a09d1
cacctcatattatagttaaagccgtaaaattttaccatgggatcccaaattaagatggctaaattcatcatatcaaatctttgggcaatatccggttaaccacgtgtttcagaaattcagtacagtattattcagtgcagagaacaaatagggttatatattaaactcaacaaaaacaaataatatgagatgtttatgagaatttcatccacccaagaccgttgtgttccttaattaatggacaaaagctaaacttagctcaatttcttctatcccaagcatttgagtttcaagcacaggcaaatttccatcttatgaagtttattttgcacacatgtatcggagaatatactacctgttagcaacataagaagaaaaagcgtgctatcagctatagctacagccatagcatcatattaatttttgggaccgatgtccttcagtgaacagatctgttcttctcccattgcagacataacagaaaccacaagatcttttccttcagaaaatccatcttttaatctgagcaagcaat

SEQ ID NO: 30030 - DNA, 587 bp, Glycine max
  Clone ID: jC-gmst02400033a10d1
ataaatcttaattcatttcaaactaatcaactttcattcttccaagcacagaatactcaatggatcacaaacgtcaaggaactagtggcattatgaagcacaattaatcaactgtataatatgcaaagaaacaagatgtcaactatatttcaaaacgaaaactctaaccattttcaaaacgaaaaatcacattctaaggctccactgtagtcacctgttgccattccccatctactgcttccttccacaatgtcacattgttgttcccatcagccacagccagtatgtttcctgtcaatgaccatgagaccctccaaacaggggtcttgaaatcattcaaaaccttgccttcccactgatctccctctttcgccacggtccatatgatcactttaccatcctgcgatgcactagcaatggtagatttaggaagccctaaattgggtgcccaagcaacatctcggacccaatccgtgtgcatctgaagagcagggaagcagtccatcttccagagtccattggttaacttccataccttcacagttttatcacaaccaccagagcacagcttctgtcaggatcaagca

SEQ ID NO: 30031 - DNA, 589 bp, Glycine max
  Clone ID: jC-gmst02400033a11d1
aaataattgttgttgtttcttaaggattatccatacattgttccaactctatacaagagtacaccaggaagaaatacacaaaatcatttatgtataaagggtttgtttctttgataaaataccataccacttgtatgtctgaattttcaagtgctttccctagtaagaatactaaatagtgtgtataaaagaaatgacaaaagtcaaccatttgctttgtcatctttatctttggaaattataactgcatttacttttttgacgtatacattttgtcctctccccaggatgactggcaggtgctgttcatcattgatcaatggcgtgatcaatcaactttaggcctagcagcttgaagcatctcaacaatgagagtcttcacatcctttctatcttcagcacgtcgagggaaaggtacacgaagcttgaaagtatcaccctggtaaccagccttaacattgaaaccaagactatccaaatctagtatgtcggcaaagtccactggaactgaggtccaatgctgcacaatcactttgttatcttcagcatgatctttgttcatatgagacgccactggcttggaaaactg

SEQ ID NO: 30032 - DNA, 568 bp, Glycine max
  Clone ID: jC-gmst02400033a12d1
gggagataaatataattcatgattcagagaaaatagtcaaaatacagtgaatcatacttgtacaaacgaaaacacaatttaatatttgcctctcatcaataaacaactgaaacagataaatagcttgactcaatcaaaagtacttactgcccaaattatatatataataaagaagtacaataaggcagaggcataggcacaacacccccttgaagctaacactaacaaacaccattcatcttgtcattggtcttcttcctctccaacacaaacttcttccaaatggcagtgatttccctctgagtctccataggattcttcttagcaaccactaccttgccattttcttctgcactgagtgtcacagtggtgctgctgatgacccttgcaggaagtgaatcaagctcatgcagcaccttctccacatgggacacgagacgctccgcgagggtccttgagaagtcctccctgatgacaacacgaagcactgtgacatgttgagcatctgggggcatggtgtatgctggcactatccacccaaagcgccttaaaaagtctgagatttgga

SEQ ID NO: 30033 - DNA, 597 bp, Glycine max
  unsure (1)..(597): unsure at all n locations
  Clone ID: jC-gmst02400033b03d1
aaactgaaatanatctttgctttttaatctccattaaccaaaagcaaatacatacttgtacacattggatgtacaaaaaaaagttatttacatcatagtggttatcactgaaatactatgtttggtcaggcattaaaagaaactcattattgggattgagcaggagatgctgatgtttctccagtcttctcttgaagcaacggcatggtgtttgacctttcaacgtttgatacttgatgttcactgtcttcatcaaatctatccacactatgcaaaaatattcctgacataatatacaagaatcacgacacatgttcaaaaaacttctcaaacgtttctgagaattagacatttatgatttgattatgattatagaaattcaatactacatcttgaagataactagatagtagacaagctaattttcatgtagccgagtaacatccatcacaggtataatttgcttttgttttaatctttaagttgggttggacattatttaaagggtgctttattttatttatgtcctgtagtgccacttctcagtattaaatattcttgctctgacaaaaagtatatgtgaacagaattacaaac

SEQ ID NO: 30034 - DNA, 468 bp, Glycine max
  Clone ID: jC-gmst02400033b05d1
gttctctgaattatcaacatttagattcagtggggaatttaaaaacttgtaaaatggcaaacctgttcacctcaaatgaacacgttcagacacttccagattaacaatataccagacgttacgagaacagctactgttacagtttactctaacaaatcggaagagaaaaaaaaagactagagtacaagatatataattaacccgaagcactgtaacaacaagctttttccgcctaggcccgatgaagctctcagggatatatgtatatgttatttatgccaaatcaaagtacccggaaccttggtgggggtgggcccaggcccaccggccttggagtttttggataatgggtaggactaggagggggtggagagaagaaataaaatgctccaggtggtagcggcgacaagaacggcaatgatggtggtggtggaatcttacgatgcctatgtgttggaggagtatgct

SEQ ID NO: 30035 - DNA, 514 bp, Glycine max
  Clone ID: jC-gmst02400033b06d1
attcgcgaatagaaaaacatttttataagaaaatgtctgagatgttatatctcctttatgggacattgtacagagaggagctgttccagccctctagtagacaggaacataggacgaaccatgcaaattcattttcacgctcaaattaatccaagctcaagttaatattattcgaattccaaaattattaattgcaagggctattaacagtacaccaccatgaagctgacaaattggttttgaggatgcaaccctgaacttgatgtcttccttgccacgtagtatgtactttgttatttatttccaagggagtttaaaagtatctttccaccatccttgttttgagcaatttgcaacgattttgtccaaccgtgcaatgacctgagaaaatgttggcctcacaacaggtgttggatcccaacattcctcgatcaactctttcaactctggaggataatggtttgttctgatcttgaatgctggtcttttcccttccaagcacatcagtctaact

SEQ ID NO: 30036 - DNA, 459 bp, Glycine max
  Clone ID: jC-gmst02400033b09d1
agaaatagggggcactaagggggatttttatgaaatttttggaacatacggaatatgccaccatcctgaaatttaatagggaactaaaataacaaatcgccagaagaaaagtactggtagaatagcctgtattagcatgtcaatattaactttcactacgcaaggaacatcaacatccaggttcgactttttgagaatgcaatgagggtctttcttataaacgtttataggaaaaacctaaagacaagtttcctccgtcattgtgaaatgccatatgaatcatttaagaagggaccttgcaagatgttccctggctggggccaatgcttgacttaaagtctgttcggacaaaggagctccaaaatctatactattactagcaactttcccagctataacatttggatcagtttcaagtgtgataccgccatcaacaatttcatcaatgcacaatagaat

SEQ ID NO: 30037 - DNA, 514 bp, Glycine max
  Clone ID: jC-gmst02400033b11d1
aaagttaaaaataacattcttattttttggttttcattatattgagataagtgtaaaaacaataatacatatacacccgcctttctaaccaataacattaaaaaagagagagaaaaaaaagccacagatataaaatacaaacttgataaaatgaaagaattggacctgcccactgtctagtgtcttcattgctacaatatgcaaacattgcaagaggcaacagcaaaatctaaaaggagaaactaaaaaacactctccatgcatgcggcgtcacattcaaacttggacactaaccacagctacgcccattatataggccgaaagcaaaacgctatgataagaacccaaactatggtatatacccaataaaaccacactatctcaacagataagagcattttaaagataactgaggaaaggtatagcagctaaagaagcagacgtcactctttcatttcaagtttagaacaattcgtatttctttttcagcatgtcttgcttccatcttggcaac

SEQ ID NO: 30038 - DNA, 511 bp, Glycine max
  Clone ID: jC-gmst02400033b12d1
caataccaagtttagtaccattgataattctcttagctctcataatctgtacaaaatttatgcattaatttctcaagggcctcctggtgtctttggatcatgccggttgtttgctcctgtccctggataatcattactctccaaatcaatccttccctctaccatgaactcttctgccatatctaacatttcttctccatttctcaattcctcaacaccctgaaaaccatagacacaaaaattgtactcagttggaccctttgcggcatgcagatacaggaactcttgaattttggaatatattgcaaggattatataagattaaattatgttcatgagggtctaaattataaccttatcagatgtaatctgggttgagagtttttctttgtttggcaaaagccttcctgcaaacaatgaaatttcaacatagaattaaatcaattttgaaaattaaaaaagaaagagagatgaaacaggtccatgttaatcataggaaaagtaatttaat

SEQ ID NO: 30039 - DNA, 502 bp, Glycine max
  Clone ID: jC-gmst02400033c01d1
atatatatatggtctgaaagaacacatacagggacacataaaaaagggggaaattcataaaaaaatacagaaaaaaaaaaacagaattgagtaagagggaaggaaacatagagaaaattttagcaatcagataataagaagccagtggtagtgcaaaagtcccttgccaagagtggtggaaccccttttagttaagcagggaccttctcccccttgagtggtttcaccacttcccatgggaagacagggtcatctctgccaaagggtccatatgcagcagtcttcaagaacctgccatttccacccctcttgagatcaaggttgatggagatcatgccaggcctgaagtcaaaactctccttcacaatgctgaggattttcttgtcagggatcttcccagtgccataagtgtcaacaaacacagacaagggctcaagcacaccaatggcataggaaacttgcacaattgccctcctagcaagttcatttgcaacaatgcttt

SEQ ID NO: 30040 - DNA, 600 bp, Glycine max
  Clone ID: jC-gmst02400033c02d1
actctccatacacaatttttggccaaagaccccagtaaatgtgattctgatttacagaatactgcacatatttgtctacctcaggtgcagtcaattatgaagcaaaaaggatgataaaaacactactgtactgcaagaatatgtctgccttatatcctagctctgaatcctagaatacatcacttggaaaattttgttaagttcactatacaagggatatgctacatagtgcatgtgatttgagctgggaattatagttatgatgtcatagcagcctaccatgatttcaatgttcatgttccatcttggcaaatcgacccttgactcttaccctgctttctgcccgaacttttcgtgattcataccttatgtgtttgtcaaatctcctagttttcttcttctgcttgtaccgtaataatgcagaatctctttcttggcttgttaactcacatgctgcagctttgggagtagttgatagggtttcagatttaagagaaatggatggttttccttcattgtcaccgtaggtttgagtttccccaacagcagaagtagaatgtttaaatggaattttttctgataaagtctcattaatgggtc

SEQ ID NO: 30041 - DNA, 591 bp, Glycine max
  Clone ID: jC-gmst02400033c03d1
gcgagagagacttgtcaatattttttattagatgtaacaatatacaaaaagaaaaagcttgtcttaaaatattagaaccacataggcataaataggaaggggattattatagaccatcaccatgtctatccgtgacaatcacattattacagggtgaggtcaggtaagggtgcatccaaatccactctcaaatagtatatatatattattaatttagggtagagagaaaaaaaaacaatgttcaagttgaaggagattgagaagcaagaaaattgttgaagtggcagcgtggcgctatggaatggagcagcaaccttgcagtgtgatcctgtttgatgaccgccccttccttcttcaccaacaccgccgcaacaatctcttcataatccccaccgccgccggcgatgaaggcgacgatggcggcctgaagcggtcccaagctggggttataagcagcggactcaatgtaagagcctttaaaaacattccccttggaatcgagaagcgcgacgccggagggggacgcgctgtaaggcgcgtgagagttattggcggcctccaacgccgcaatcgcaagagacgtgaaatgat

SEQ ID NO: 30042 - DNA, 523 bp, Glycine max
  Clone ID: jC-gmst02400033c04d1
ataacaccaaaatgagtccattttttagcagagattgatgattgaaatttacatatttatgatagaccaaccaaacactaagcaaccatacttcaaacactcgcaacaaatatcctagaacatttgaatttgcaaattcgagccatgatcactttattaaacacaacacgtaattcttattatttgttgatacatatattacagttatctctgcttcaagggtataaatcttgacctcacttgcagttgcatgggtcgcaggtgcagcttgatccacagttgcagccaccgttctcagctgcaacacccatttcagcaccctccaattgggccttcacagacccaacacccaaaacaagagtctctgtggttgtcttctcaacatagctcaagtcaaaagagtacttgttgcaaccgcagttgctgccacagttgcagctacttgcacacccacagctagacattttcaaaatcttggaattaaatcacacactaaagtactgaagaacacacaaaagatgat

SEQ ID NO: 30043 - DNA, 394 bp, Glycine max
  Clone ID: jC-gmst02400033c06d1
cgagccccccccaaaaaaaaagttttttttttttaaaaaaaaaaaaaaaacctttgggcctgggggggccaaccccctttcttgaggggttcccacaacaaacccaaaaaaaaaaagggagggggccccccggggaaaaaaaaaaaagggggggggaaaaaaaaaaaaaaaaaaaatttttttttttgggggggtatgaggggggaatttaaaagatccttcaaggggaaaatgggggtttacaccccgggcggcaaaaaaaaaaattttttgaggggggcaccaaaaataaaaaaaggggcgggggataaaaaccgggggagagggaaaaaaggggggggaccaccaaaaaaatgcccgggggcccacccccctcttcaccggggggaataaa

SEQ ID NO: 30044 - DNA, 524 bp, Glycine max
  Clone ID: jC-gmst02400033c07d1
gtctcgagatatctacttcttaccatatatatatagagagagagaatacgaagcacactgatcacaggatgatgctctctttaagtagggaagcagatcttatcagtacacataggtaggttgaaattctagctctagcaatctagctagagaaggtggtgcttgcacaacacacagcacatgatgatttattttatacacaatctcattctcatggtgctcaagatgcatggactaattaagcaacaatgttggtctgataggcagtgtccacagataaattgggtacccataaaatggccttgcttccaaggaaatggcaaacagggttagttccaggatcaactcccataagttgatgaagcatttgatgattcattccagaaggatttgagtggcaaatagcaagtgcctgagttttggtttcatcaccagccaccaatggaaccatgaaagctgttgtttcacggacttcatggcagtaaaatactgcagttctgaaatttagcctatgacacatcact

SEQ ID NO: 30045 - DNA, 552 bp, Glycine max
  Clone ID: jC-gmst02400033c09d1
gtaactactaaatctaataaagatatgaatattaagtttatctgggaagttataattattacacgcagacacgggtgcctagctcatacaaagttactcccctaattgagaatatttatttcctcaatggataaataaacaaaacggcaccacgtttgatgaaaaagctcccaggattccaccacatacaatgcccacatataccgatcactgactaggtacatcaaatgaaagaatcaatacaggtccaaagctatataactcctcgttcttattaatgtgattttagagcatatcattcctcatcatccagccacgagaacgagaaagggtggaacttgtacccatcgccctcataaaacttgttttgaaactccacccagtgaagacgtaacgcatgcaaaaaggcactgagagtttccatgacaagtaacactccgacggtagcaaaaatgaagacaatgagacccactatcaggataaaaacattattggacccccatgccatcatcagaaccttctcatagaatacacttgataactctgaatgag

SEQ ID NO: 30046 - DNA, 573 bp, Glycine max
  Clone ID: jC-gmst02400033d03d1
gtaaaattacggtttataaacgtttccttttggagccaaacatgcagatacaatgggcacaatgcagtacaagttggatatacagcacaactccttgtttgcccaacatagcctgtgtcatatctaggctattaagaaacgctttaatttatgctaatcttgaagacatgcactcactacactgatttgaatagtgtaatttccgtgtccatgtacatttctataatatatttagaagaaaacaaaaattggaagaaggataaaacataatattaataagaagcaaggagctgggggaacttcatgagactaagattccctcacatctttgttctcattattatggtgttgccacattttcctttgcctgtggagcaatttcttctccatcacttccaggttcactgccaggaactcccaggcttagcagcacttcctcccacttcttagcaggccccttccaagaaagatcttgagccatgcagttctttattatttctgtaaaagctggagttccatagactgcaagggcccttttgacagtctttgctatagcatccacatcagctggat

SEQ ID NO: 30047 - DNA, 465 bp, Glycine max
  Clone ID: jC-gmst02400033d05d1
ggtacagagcagttttttatttagtcgtaacagtggaaattacacgttcctatatattcttaactcaaactttggtaatccaaaaaccacaagtctcactagtgtattaatagcatttcccgcaacctaaaattacagagttgcagaatacaagaaaatgaacaaggagaaggggaggacaaagtccagcattggcgggaggcaagtaatctttatcagcaaaatacaggaagccaaaaatgtagatatatgaggacaaattgtcactaaaataatttttttcagaaaaggaagctcaatcatcaacttcagctttaatctctctcagcaagtcgtccttgtaatcctcaaatgttcctgggaaatttttgacagtaccatcttcgacaacccagatttgactcctttcttcatcctcacatacacgtgatatcaattcttgaatcatgactaaacagaacaact

SEQ ID NO: 30048 - DNA, 395 bp, Glycine max
  Clone ID: jC-gmst02400033d07d1
agggaacaagggccccttttttttttaagcccccaaagagaaaaccaccttggggagtcttttacatgacttgggggcccacaggtggaacaacataaagggaagcttgggcccctttttggacccctttttttacatttagatagaaagggcccagctttattgttggggggggaaggaacttctgaatgtttttccggggatttggaagcttaaagggcctgctttcccctttggggccctccaggggaaccctccattgggctccaaagaacccaacaaggggggatccctgccttatcaggttttctttccctggtggtttggaagaaaccgcatttgggggggaaggatcttggggatccttgaaaaataatttttcccatggggggggg

SEQ ID NO: 30049 - DNA, 496 bp, Glycine max
  Clone ID: jC-gmst02400033d09d1
atccagaatatcgggcaaatccaaataatgctggattgtcacatagtctacataacctgggaaactaacagcaatcaaatatgttcgccatttggaattggaatttgaatacaaatacagggcatcaataatataaccctatgtacacagccaatatctgactgaaatttgatacagaatagtatcaatttgtatcataataaaatggcacagagaaatttatgtgaaggtaaaggggaagtgtatcagctggggttttaattcttcgtctttcatttacttcatcattggctccttcctgcacgttcacatttcctttatctgcttaagcactgctgaccttgttcttacgcccaaaggtccaatggggtttagccggagtacgcctcaatgccttcactccgaatgggttgttcttgctcttgagacaagttccagcataagtgttgcagatgggatagtcgttagggcagcaactgtagtggtcatcacagca

SEQ ID NO: 30050 - DNA, 500 bp, Glycine max
  Clone ID: jC-gmst02400033d11d1
ggggactaatgatctgtgttaatagggatcatatttaataccataaacttgtacacaaacatattttacagtgtacttacactccagcaaatctaaaccaagagtctttgatatgtgcatggaagatattataagtagaaacgaaataaatcacaccagccacattttccataagttcaattgcatgtccaagaacataagttttgaactgataaattatataaattaataagataggtagaaattttgtagtggcagcagaaataggaacatctttgttgtgagtacccagttttaggctaaaccgggcactagttttcagcctttgcttcaatttttcattattttgacttgaaaggaatggccctgagcactatctgatggtataaagctgcaagtgctgccccaataaaaggccctacccagaagatccaatggttatcccaagcttggtccttgttgtatacaagggctgcacctaaacttctagcagggttgat

SEQ ID NO: 30051 - DNA, 514 bp, Glycine max
  Clone ID: jC-gmst02400033e02d1
aagcactaaagacgtggataacttgatattattttattacatacatgcatagatagcctgctctcaaataagtcggcaggaacaaagatagagagattcaacgatcttcaaatttcacatttgccagaaatatataacagaaaagaggggtatgggatatgagttaagttttgatcacattcaactacactatcccaaaccgttactcttaagactttgaacttcacttgtactctaggatcatgttgttctcaggagctaatccaacacaagccctcaggatgttttccagcatagctcgctgctttgacaacgcattcaccactggtgtacccggtggaaccagaggggccttggtcaggtaactaaggatggtcgcaactgggtggaatgagtggaattttccctcattttcagctttaaactcgattcgagtgctgagctcagcaagaaggaccaagtccaagataataggagcagctaacagtgaatcctcacatgtgttgtgcaacac

SEQ ID NO: 30052 - DNA, 563 bp, Glycine max
  Clone ID: jC-gmst02400033e04d1
agaaaatgtaaatgcttttattcaagagaaacaactgtgcattacattggatactgctctcaggactatcaagaacaaagagcatcatcatacagttgacgaaggtgactgcaaaggtgatgtcaagacagccaatttttcagcaaaaaaaccagaaataaaactgataacttcccattgaacacaagaaacaaatgctttttactcatgagaaacaacgagcacttgttttccaacattgcgaccgctaaaaaggccaaccaatgctgaaggtccattctcaagcccctcagctatgtcttccacatacacaaccttcccctctctgatatttggcaggagaaactccaagaacttgggatataggtgaacgaaatccatgaagttaaagccttgcaaacgaatccgcttatatatgatctgtgccaaatttgttacaccttcatgttgagtaagattatactgtgagatcattccacagacgggtatgcgaccacggactctcatgttcaggagtacggcgtcaagtgtcttgcccccacattctcaaagtaaacatcaat

SEQ ID NO: 30053 - DNA, 496 bp, Glycine max
  Clone ID: jC-gmst02400033e05d1
atatgaaacttatcttccaatttaatccaaaggaaatattgggccatattaaaatcaaagtaaaactatcagttgaaaaagattcccaagaaaagaaaactaatgtttgtgtgatccacaaattcgtacaaggcatcattaaataccaaattaaatccagaaaataccaaaatcaacagccagtagtctagtaacttctgccccagtatgtccactttgttgcgggctttcctgatgcaaagcacttggtgccttctgggagttctggctgatcaaaggggctgcaaagagtcttagctgctcccatctcaccctttgtcctggctttgacatcagcctccacctcctcctggtcacaccaaggagcaaagatcatttttctttggttcaaagcttgcacaaattcatcccaagtgtgtatgatctgaatgcattcatctcgtttttgttttgcaacatcaaacaagttctgttgaattgtatcaagcaacttttt

SEQ ID NO: 30054 - DNA, 457 bp, Glycine max
  Clone ID: jC-gmst02400033e06d1
gatatgaattctttcttcatatactgatcaaatgggaaaagagtggtctcacttccaaacccaaattgaaaatgggtgtgaagtataaaatctgaaaatcagaatgaaactagttcctcatcagaaacgattctataatagttattcactataacctttaaagtataacaacgtctgtcacaagttatgagggagaaaaaacaagctataaattatgtagtcacttctgttgagaagtctaactcactggttctcagattcccccgagcatttcttgttccagctgcctgaacacgctttgcgctccccgcgttttcttttgttcttgagaatgttcccatctctatacatacaggacttcagagttgattgctcttgagacactgcagggtttgttggtgccatatgaatatctgacatggggataggaacaggattcaagacttcttcttcccct

SEQ ID NO: 30055 - DNA, 531 bp, Glycine max
  Clone ID: jC-gmst02400033e09d1
gttatacatgttattatgattctatcatcttttataaagtagtacagctttgggtcttgagaagtgttgttccttgtaacgacttaaccccagatgggacaagcaaaatgaaaaaggctataagatcatccctcatccctcacggtggtgctgttacggtcccacccacccaatccaaaccagattgccatcattattcaaacaaagtgccataattttaacccggaaattaataaatttacatacaagtgaggagataagcttaggattccccaaggaaactgacaaaccctacggtcccgattgcttaataatcgtgaatgggacccaatctacggacaatatcaatccactcagtggaaagtccaaagccaaatttaccttgttattattaccatcacccgctgctcatggatgccattcctgtacacgtgtcacctcccacccgtatacggcgagtcaaaccagattcgttcactcacccaaattctgccataccagagagcgccgacttggaccagtttggggatc

SEQ ID NO: 30056 - DNA, 531 bp, Glycine max
  Clone ID: jC-gmst02400033e10d1
gagaaacatgttttttttattctatcatcttttataaagtaggacagctttgggtcttgagaagtgttgttccttgtaacgacttaaccccagatgggacaagcaaaatgaaaaaggctataagatcatccctcatccctcacggtggtgctgttacggtcccacccacccaatccaaaccagattgccatcattattcaaacaaagtgccataattttaacccggaaattaataaatttacatacaagtgaggagataagcttaggattccccaaggaaactgacaaaccctacggtcccgattgcttaataatcgtgaatgggacccaatctacggacaatatcaatccactcagtggaaagtccaaagccaaatttaccttgttattattaccatcacccgctgctcatggatgccattcctgtacacgtgtcacctcccacccgtatacggcgagtcaaaccagattcgttcactcacccaaattctgccataccagagagcgccgacttggaccagtttggggatc

SEQ ID NO: 30057 - DNA, 477 bp, Glycine max
  Clone ID: jC-gmst02400033e11d1
ctctcctagtagtgttttttaaacaatggtagaaaacgtgctttgatgtaatgtggtaaatagaaaaagaaaaaacagttttacaaaatatcaacatgtttgatgactcttgggatgtatacaacaagttgcccttctacttagtgtttgtctttatacaggagctatctttgaacacgaaattgagtctacactactttcttttttttcttaaaaaatgggccagtgcgagatgaactttttgaaaatcccctctttacaggatttgttaaaactaataccaatgttcgcacgaagggatgctgtacagtgccatccccaatttgcctgtcaatgaggagccaatcattttagccaaaggaacttcaaaagcaaatccccatacctgaagggcattatcatagtgccaatgatactagtctgttttatacagaattctatttgattcacattgaacggaagatataacatgatgcc

SEQ ID NO: 30058 - DNA, 471 bp, Glycine max
  Clone ID: jC-gmst02400033e12d1
ctggtcaaacttaattttagtcattacttatcatcattgctacacctaacatcatagatatgcccaaattaaaaaaaaaaattgaatatacccgacaaaactcgtaatataaacctcatagccattatctgggggattttattttaggggttatttaattggacaattttatattttatttcattcggggcatattatcctcaagccgctggtgattgggtaattgcacccaccatatccagtgctacgcagggctggtcagtaggtacaaaatgacccgctccaaggatccaatagaattgtaggtttttgtatgacttaaaaaaccctttgggcggtttggcacttccacagaagaggggggttgctgtctttctccaagaaattttgaagccctgtccactcgagtttttaaagccaagcttcagtccccttgggtgcacaaatgagatccacttgcccactgtgcac

SEQ ID NO: 30059 - DNA, 525 bp, Glycine max
  Clone ID: jC-gmst02400033f01d1
atggaacatatttttgaattatgttatcaaattctgtacacaccccaatattatgggttcttatcttagaaataccatccaccttcatacacaaacaatatctatcctatatacaaacaaaaggacaccaagaaccaatgcatgggaaaaaaataaaaaataaaaatatctccagctgtgccagcccctttgccatgcccatctgaggtaggcaaaaatccaagaatctaaaaagctatggaggaaaaaaaaagctaccaatttataaatcccaccaacccaccgaattcttggggtcatgtctgttgttcaccctcttctttcttctcttgaatcctgaatctcactcctgtctgtgtcagaatattccttctgggactcaatttctccactaccctctcgatttcttcttcggtgtcttcggtcctctcttggtaaagggtattcctctgactccaacattcgtacaacttggcccatcttgggccttttctcagaatctggatctacacatcttacagcagt

SEQ ID NO: 30060 - DNA, 382 bp, Glycine max
  Clone ID: jC-gmst02400033f03d1
ggggccattagggagagaacttttttttaaagctaattaacttagctcggaaaggggccatgccgacttcaaaaatgcagataaattaaaggtttatacctgccttttttaaaacaattattgaagtttcatttggactcggggcccttatttcacaccaaattatgcttttgctaaaaattaattgaaattaatcgagtttttgggctgcttaattataggaaaaaagagcccccaaaatttttcaaactctggctgcttctgattttcatcaaacatggcaaacacataagtttcaaggggggccccaggccttttaggggttccttggtttacattccgaaccaagtttggggtggaagttcttgcattatcaagggaa

SEQ ID NO: 30061 - DNA, 536 bp, Glycine max
  Clone ID: jC-gmst02400033f09d1
gctatgtaatgactttattcatttgataaagtaaaaaagggaaggacctagaacaagttccttaggtccggcacttgtcaaccattacctgccccttggacgaaaatttgtgatcggaaaatacagaaaaacaaacttatttacactgaatttcttttatcaccattaacaagacagtcaaaaaaacatatattgtgacctgagaataaacactactttagtgtcccaggctctgctttatgtatataaggatgaaatattaaaaatgtagctatatatggggggaactaagagccatctctgcctttgctgcatcagatagctgcacttcccatgaaaatctagcttaaggaagtttagtcctcatcactatcgtacacaaccgccatccgccgatgggtggttgttttccttggaggagagtcctcatcagattcaaatcccttccttttggcactgcctctaaactccttgttcttctgctttggttcctcctcttcctcctcatctgatgcatcattaacttgttcagcttc

SEQ ID NO: 30062 - DNA, 532 bp, Glycine max
  Clone ID: jC-gmst02400033f10d1
aaattataaagttttttttatttattcaaacctaaagaaacacaggaacacaccatcacaaactcatgtaaccctgccaataaaccatcacccctaaactccagcaccagcagcttgctcacttcaatacacaactcccagaatttctcatgtcaccacgtggcaagcacgctgatgtggagccaagtgttgtgcttacacgtaggtgtaccctccataatacaaccaaagacttaagcatcatataataatattaataaagtaaactaaagaaataaaaagaaaaaaaaaaaagaggcttttcaacatggcatgcaaaatggtagacctgatccccacaactaggaccatttttaaacttggttttctcactcacactgtccataggtctaagcttcagtcttctcaacaggaacctctactggggtttcaactgactcagctggtttgttctcttcctctgtggttgctggtggtgctgctgctgctgattctgtttagtagtttctttaggctcctctgcttcttcttt

SEQ ID NO: 30063 - DNA, 442 bp, Glycine max
  Clone ID: jC-gmst02400033f11d1
ccaggaaaagaaatggttgtttcaaccaaaccaaatgggtaacaattcacattttttttacaacaaaacgggataaaaaaaaaggaattttacatatttggctagccttcatgcttttatctcaacctttcaaggaagggaaaccccaaaaccaagattcataaaaggaatggttaagggtaggaaaatgaaagttcctcaaccacttggggggttttttggggggttcgtataaatagtaatttccctgggccatctttcatactccattgggataactaaaaagcctttcctgtgtccgattgatgggccaaattcataatactttgccttcgcaatccacatttgttggaaggggctgagggaggccaaaatagagcctccaatccagacactgttcttcctgtttgggggggctaccaccttaattttcatgctaccc

SEQ ID NO: 30064 - DNA, 506 bp, Glycine max
  Clone ID: jC-gmst02400033g01d1
aaaaagcaagttatatcagttgtatacattgaggaaagtattgggtttatatagttcgtaattacgggcttgtcataatgtgtatggaccagcccatcagcacaggtgcataatatacaatggtcactattgctttaatccgtgatcttgactgttggatttcataacctattacacaactgattgatagcatgggctaaacaaactgcagcatataaatatggcaccattttctttccgtgagtaatgtagctggtactgggtttatcaacaagaacaacattaacctcacatagctccatctttgcttgaactctgctccatgtcagtctgatcttgccatggccacttcagattagaagatgaggagcactgctgtggaactgaaaatgaatatgagcttgtactggcacactgcttcttacatgatgaaaaatcagctggggagcaaatgacttggtcaatgcttgacatgccagtatctttgttatgattctgagagttat

SEQ ID NO: 30065 - DNA, 489 bp, Glycine max
  Clone ID: jC-gmst02400033g06d1
atatgaatggattctccccttactgattggacaatttatgttacactatccaatacatcatcatgaattgacattcaactctaattaatccactctacaatggcacaatccataatttttgtcccattattatatacatcaatcaaatgaatgcattacacaaccaaccacacttatgtcccataataggcttccttaaagccaaagcaatgaacaattcaaagaaccatccaaagctcaaaagaagcatttgctttgcatcaatcaccacgctatgtgttggcttctggatctggagattggaaaatacgttgagccaaccattgaaagggtctcaagagttgagcccttttcttgcgccagaaccaaatggcagcattgtagttttcattgcgaatcttctgagtggctgctctccaatcatacttcttcatctccaaacgtgcagcttctcccatggtttctctcaactctttgtcatccaaaagc

SEQ ID NO: 30066 - DNA, 359 bp, Glycine max
  unsure (1)..(359): unsure at all n locations
  Clone ID: jC-gmst02400033g07d1
atcttctaaattttacattntaatttatacgggggataatggggggctatagatttttgcaaagggcaaaataatcatcaaaaaagcgagaacctgttatccgccggttaacacacatactataaaacgtgcgacatgatcctagctgggaagataatttcggccaaaaaaaacaacctatttttgttaaccaaccaacatgcagcccataggggtgtcccctgaaccaaaaaaaccatagcacaccccattggatgataggcaccccacaatataaaggctaagtcaaagagtgaacataaatgcaagcctgagactaaaactagatggggggaggggactcgcattagcacttacat

SEQ ID NO: 30067 - DNA, 471 bp, Glycine max
  Clone ID: jC-gmst02400033g09d1
atatggacaaatgtatttttgtagtgtacaagtgactcagcttgggcccctcagaaataaacaaatctcataggatgatgcaagaatgccacaaaaataagagaaagagagaagaaagaggcttcttacctcaatctttcactgtaaccaaaaagaaaagaaatgacgaaactagtggccctaattctgtctgtctaaactagtgctattttacctggcactggaatctttttgggaactctccagctttgcaagccagggctatgctctcacaaaatacaagtggacagggtgggtttacctcactagcctacacacacatatactcatgatcctccttttcccacaaaaggtaatgatggacacaacccaccaaaaatttgggcttacttggacttggacaaaagaaacaaagaacagagaatgggggactctagctttcttgtccaccattggatggtcccctctcca

SEQ ID NO: 30068 - DNA, 597 bp, Glycine max
  Clone ID: jC-gmst02400033g11d1
aagggggaattctttctcatagagtttgagcaagcacaggggcaaggactagaaaatcataatggttctttttgaagtctgctggttattcaatcatatatccttttgacaaccttttgattgtcacagaagccctatcttatctatgatgattagtcagcagtccaactctgctcaacaatctcacgtactcttctgttgtattcacgcttgttttcactgaacatccgagcagcttcagaatttgctggtgaatttgggtttggatcacacagcaatgactggattgaggtaagaattgcagctacgtcataaatagggctccactgattctgtaaaatgtccaagcatatactgccatccgcataaatgttaggatgaaacattcgagaaacaaaacgcacagtaggtggtttattaggataatcctctgtaaactgaagtgtcaacttaaacgtacctccatcccaaggggtgtcatctggtccaaagataacagcattccaaagcataatattattgtcttggggagccccactgatgccagcaggaggatcttggggcaatctttaaaaaccctcataagctctttcttgc

SEQ ID NO: 30069 - DNA, 439 bp, Glycine max
  Clone ID: jC-gmst02400033g12d1
gtggagaggctagtttaagacgacgagtcaaggaaactaacaatcacagtgacataaatggatgtccgatttcaattgctgcaatgcatttacaagctctttgttcccccattataaaactatacccggtttcttaaaataaaattgaagacaacattttgatttactatatagttgtaactgatcaacaagttttgaaggaaccatttaatttattaagcaaagcaacaaaaagggaatagaagtgacaaagcaacttgtatcgtatggtagttataggtcatcgggaacaacaagaaaagtaggtttgattttgcttagatgttgcatcaccattgttgacgaggctgaccctggtgacagataactttgccttgtatgtttcggagttgagaaccttcctgactacgttggtgtatatctctcgaattaccatctt

SEQ ID NO: 30070 - DNA, 602 bp, Glycine max
  unsure (1)..(602): unsure at all n locations
  Clone ID: jC-gmst02400033h01d1
ctgtaacaaatgtcataattgttctaccatagaagggaaacgaggaagaaattgggaatttctaaacacgacacaagaaatttgtgattttacatattatatacataacacccaccatgacgggaaatcatcccctgggaacagccataacaaaaaccatcacgttgacagaatagactaaacacagtagaatgaaactggaactacatgtcttacaacaacatatagacgaggggccaaaacaccataacctgttcactccaaatcaggtcaaacttgattctggatagtttttttcaagaattccctttcactttatactacgatagtctttcgcatgaatctcctgagtaaagcatgctcgttactcatcttcgtgcttgattgaaacttggggggcacctatccaggtccatttggagcaacagaataccattctgcttttaaatatttcacaaccttttcatctaattcttctttatttctccacttctacttctaggaacagaaccatccttcccagaatgcactcctaaagcatgagcaaacattctctttgcagctcctaagngctcnctttttatgtagnctttacttacact

SEQ ID NO: 30071 - DNA, 545 bp, Glycine max
  Clone ID: jC-gmst02400033h03d1
attaaccgtatttttctttttttttttttgggtttttttgggttttttttattttttttttccttttttttcccccaaaaggggcaatttttcccccccaaaaaatcaaaagaaaaaaaacccccttggggtttccgaccccttaaaaaggaaggggtttgggggctaaaaaaaaacccaccccccatttttttccgggggaaaaaaaaaaagggggcggccccctcccaaaaaaaaaaggggccctaaaaaaaaaaattccccccggtttaaaaccccaaaggcccccgttttttaccccccaaaaaaaaaaaccccctttttttataaaaaccggggccccccccccccccccctttttagggggtccccccctaaaaaaaaacttcccacccaaaaaacctattttccttcccaaccgggaggggaaacccccttggggcccaccccacaattgggggagcggttttaaaaaaaaaccaaaaacctctggggccccccaaaaaaaaaagggttttttaaaaaacctaaggaaaaaccccccc

SEQ ID NO: 30072 - DNA, 507 bp, Glycine max
  Clone ID: jC-gmst02400033h07d1
atcacaaattaaatccacttggacttcatcagagatattactatcccctggttgatcattcagcttcccaaatcaaattacctcaataaaattaatttagtccaagctaccaaaaaggactaaccaaaaataagaacactaatttacatagaaagctacagctactgctaccaataatagtacagaaggaactatcgtagttcatcgccaactttggatgatagtgccgacagaagctgttcctgcgtgtaaaacttgtttcccatgttcaccgtggcttgttggatcatcaaatcattcaccacagacacgctggcgtgatgcacttccaagtcaagatctttcaatgctgccatcaacctggctgcagggtggttcttcttgctgcattggattcttaccattgcatcccaaccaatgatcttcacctctaactccaaatcagcgagcttgcttgttgtcttctttggttctacgctattagatggaggcggtcctggtggtggt

SEQ ID NO: 30073 - DNA, 546 bp, Glycine max
  Clone ID: jC-gmst02400033h08d1
gtaatcaaatgatgtttaaagtttagtttaaataatctagtacggggacaggttaaataaatcaatccttttacaagttaaaatcaagacatatttttcaacatttggagaaaatagatgagagaattggtttacttctaaattttcctttcctataacttgttgaaaagttcatccaaattcagcctgactttatctgacaagttgcacacaaaagatggtgattacaggaaaatctttggtaaacctgtttccatggaatatatctttcaggaagacatggataaaactacacaactttgtcatgctatttcgaatactttgttcatgatacgggtgtttcacccttctcatcctccaataactttaactccctacgccaatcttctaattttgctagcttttccaactgctctggcttcagatcttgctctgcacttttctgctccaatgcttctgtaagtcgaatcttctttttgagagcacgaattcttttatcaatatcttgagcttggggcgaatcttgcacagcgagccgatttacct

SEQ ID NO: 30074 - DNA, 263 bp, Glycine max
  Clone ID: jC-gmst02400034a01d2
aaaaagggaacatttttttttttttaaccccagcggggtccccccctttttttgaacatttgttctcccaccccccagggggggggggaaggacccaaaaaaatggggggtaaatttaccggtttttttttttttttttcccctttttattttaaaaaaacaccctgggattggggtcccctttcccctttttgggcccccccccattttccgggtttaaacttgggggcttcaaccttttggaaaaacaactttgggttttg

SEQ ID NO: 30075 - DNA, 61 bp, Glycine max
  Clone ID: jC-gmst02400034a03d2
aaaaggggccttttggctccatatgggacaacaaccaaaacccttttgggttttttttttg

SEQ ID NO: 30076 - DNA, 416 bp, Glycine max
  Clone ID: jC-gmst02400034a04d2
agcaaaaaaagaagacccataatcattagaattcgctctaaatttaccaagaagctccttttgaacagaagaaaagaaaggtgaatactcttactacccccgtccacattttttagtttggtctatttattcacacaataatcaaccgaaggtggaacctgctgaaatatgaacaagacatgccccatccctgaacctactacctttaaggcccatctgggttatggacatgttctttcaggccaaagcaaaaaaaaaaaggggcttttcattcacattttatttgactaatcaaataacatcagatggcactggcgagccgtttctggagcaacttctaccacttacgttaggtacgggctcatttttgcagtgcccactacatttgaattttgattcacaagtttggcatttca

SEQ ID NO: 30077 - DNA, 381 bp, Glycine max
  Clone ID: jC-gmst02400034a06d2
gacagcaaaaaataactctgatgttttaccataatcaagaaattcatacattgtatgttgcttgctcccaacgagtactcaaattaggagggtttaaaaaatggtgcgatcgacggcaatgaataaaaacggcactttgatttgtaataaccagttcagttacatctgaaacagaatgctctaatgacattataacttgtaaattgttaatatggatggtaatattctgctctacaattcaagggctgcaaaggttctttaaatcctcctccttagcataccaatttggtattattttggaaacatgaggattaagatccttgtaggagttcctaattgttccttttgcaacgcctgtggcatgtgatatatctctgaaag

SEQ ID NO: 30078 - DNA, 332 bp, Glycine max
  Clone ID: jC-gmst02400034a09d2
ctcgccgaaaagaaccgacaacaatagggcaggcaccagaataaaacacaaggcccggtaagaagaacaaacaaaataaaaaaaaccaccaccaaaaagaggaaaaaacagaaaaaaaaacaaaaacacgcagtgtcgaaagagaaaagaagggggagctgcccacaacagaaaaaaacagagataaggctggcagaaacaacggagcagcggagtaaaaaaaaaagggacaacacgcatgggggtgccatgggggcacacaagggtgagccccttgctgagggcccctccaaaaactttaacaaaaaaagaagaggggggacagaagaaaa

SEQ ID NO: 30079 - DNA, 269 bp, Glycine max
  Clone ID: jC-gmst02400034b02d2
caaactctaaacatatttcttttatgcaaatatatataatcagaagagcaattacaagatgatagtagtttcacgataatgcaaataataattatggaaatacttttgttacataaaaatcacgagttgataacaacgtgcttagaattaatggtgatgatatgattgttacgttattaattattatgatcctgttattaatagcatacttattattcttgatacgcgaaaggggacacttgcacatctattgtgcattgaagagtagt

SEQ ID NO: 30080 - DNA, 419 bp, Glycine max
  Clone ID: jC-gmst02400034b03d2
gatactgatttgatgtttgttgaatcacagttcaatcataggactgccatttactaaaaacgaacaatgtcctctgagaacaagtaatatgaagtttacatccatcattatgcaaatttgattcccattccaaccagaaattcacctctacgatgaattttacaccatagtatatttcgcgctacccataaaatgcaggggcaaaaacagaaaaagaaaatagatcatattcatcattatcagatactttgaatggaataaacccaatttaattatctttattatgggagcctatttattaatctttttcatcaaataaatctaaagctaatgatgttcaaagccaagcagggttcttaaaggatgtaacaacaaccttcacttgcaagatggtttttgagaccggatttcaacttttt

SEQ ID NO: 30081 - DNA, 374 bp, Glycine max
  Clone ID: jC-gmst02400034b05d2
ggggggctcacaaagcatagcccaatttgtttcatctttgggacatgggctacatgatatttttattacagggtggttaaaaaagaccccctaaattttttatcccaatttacataaaacccaatccatacccttttttgttttgaaggatccaaagcttatgcaaatcccttcctgatctgctatttggctacatcaactaactgatgggcgaggcaatcttttggcaatttcctgggaaaagcaacatttcaatgcttaagcctaatggaatggccaacaggggggataaaattcataatgatttttcaaaaaggggggatgttgagaatagatgaactcctctttgcttaagggcattcacaacaattaga

SEQ ID NO: 30082 - DNA, 528 bp, Glycine max
  Clone ID: jC-gmst02400034b06d2
ggataacttgatattattttattacatacatgcatagatagcctgctctcaaataagtcggcaggaacaaagatagagagattcaacgatcttcaaatttcacatttgccagaaatatataacagaaaagaggggtatgggatatgagttaagttttgatcacattcaactacactatcccaaaccgttactcttaagactttgaacttcacttgtactctaggatcatgttgttctcaggagctaatccaacacaagccctcaggatgttttccagcatagctcgctgctttgacaacgcattcaccactggtgtacccggtggaaccagaggggccttggtcaggtaactaaggatggtcgcaactgggtggaatgagtggaattttccctcattttcagctttaaactcgattcgagtgctgagctcagcaagaaagaccaagtccaagataataggagcagcttacagtgaattctcacatgtgttgggcaacacattggggttctttccacccatgaatatct

SEQ ID NO: 30083 - DNA, 507 bp, Glycine max
  Clone ID: jC-gmst02400034b07d2
ataccaaaatatattcgaattatagaagagaaaggaaacatcaaaagccaagatatatggcaaagtaatataatctatacacaaattaacaatgagtagtgtccactccaaactcatttcactctcatttgaaggccaaagtagttgaaatatcttgtctacttgttgctttctttattaagaattttttgaaagattcaagaatggaccggccaagaatctcagccaaggaatgctcaatttgtggcagaagatggtgagccagagggcttaaaagcagcttgttcagcacaggagagaacttcattaggccctgcctcttctctgccaacacccaagagatcaagataataaagatagtgtgaaatgatagttgatcatggcctcattatctgaatcctgaccacaagtttgatccccatagagcaagttttattgggggaccaaaatccgggtaccccttttggacaaagtgtcattttttggagggttttccagttggccaac

SEQ ID NO: 30084 - DNA, 419 bp, Glycine max
  Clone ID: jC-gmst02400034b08d2
gggcgaaggaaacacatgggttaataacaaaagttctcctctcccaaaattatataactggttcgggtaaacccccctgggggaaaaaatctttacttttacccccaaaagccccctgccagaatgggtcctttattgagacccaaccctagccctcccaggggggttcccccttgtatttctccccgcatttttctttttaaaggtaaaccttttttggttggtgggggggaccaccaccttccatgaaaggtgggttaccatgcccccattagtcaagccctttttgtcgtcaagatttttttctttaagagtaaccccggggcctcctcaggggcttatgggccttttaaaaatgggccgttggccccaaattttgctcttgacaaataacaaaccctttttcctggaatatttgg

SEQ ID NO: 30085 - DNA, 532 bp, Glycine max
  Clone ID: jC-gmst02400034b09d2
agtatgaacaacatttctattcatataatcaaataggcgacacctgcaaatagggcacccacaaaaaatatatcttacaagattccaaagataataaatcctcaatttcctccaccattacaattacaaaaggaggagctgagttccaaattacatgaaagttacagactctcgatgaaactcacatgaaagtttcaatctaaaataccccatcatataaacctaacaagagagaagaacaagactttttgcttgcctttttctttctccttggtgtgtcccttttttttattcttcttcaaaaaggataaaactaagaagaaagaaaattcccaccttctctcaattatacatgacaccttaaattaactcgtgaacaacggtatatacatataatacaataagattgaaattaagattagctcctcagtcccaaaaatctcctctgctcttagaacttttgtgattctttaatccccttttcttttctttttcatggtttaaaattgaattaagcaacagcagatatgct

SEQ ID NO: 30086 - DNA, 544 bp, Glycine max
  Clone ID: jC-gmst02400034c01d2
atgaaagaaaggaaggatgacttttattaaattccatgtagaaaatagtacattgtggactagtttaaattgactggttgtaacgacccattatggttttttatgattacttctgtgtttaattaattaataatttaataattcactaaacgtttttttcctgcaatgaattactttttttgtttgattaaaatgtatgttaaaaaatattattttatatattttttggcatttgaaagacaaaaaaagctggttaaaaaggtgagataattggtccgaccagcaccatattttgcacttgatcacttgatcacttgattatgatcacttattgaagtagactagcatagtacagcatcagcgaggaacaatggtgggaatgacatcactgacaagatcacttcctgaaacatatgaggacatgtgttgctcctcccttgtcacatttgatgctgatgttgatgcatatgatgggggtgctatgttaccagaactgtctaagctaacaatatctgatataagagtttcagggttagggcaacat

SEQ ID NO: 30087 - DNA, 528 bp, Glycine max
  Clone ID: jC-gmst02400034c03d2
atcaatcaatggaattagactccttttgatggtttggtgggtgttgtagttcctctttcacgaaccattacgggaaggccaaaactaaaagtggcagtgagccccggagagaagcgagggttcccaaaagacaagggtgccagcaactcgatgtggaacttcctcagtaacgaaactgccacactcttcatctccatcagagccactttcttccctacacacaccctcaaccccgtttgaaaaaccgggtactcgaacggattcatgggttgaaacaccccatccttcagccacctttgtggccgaaactccaaacaatcacaaccccatatcttctccaacctccccatcgggtaggggtggttagtaaccctagttccactctccacttttgtcccatcgggtaacccatcgtccttcaagcaaaactctgagtcaaactgaatcggtggaaaaagcctcatgctttcgtgtgtcgcaacttgcaaatagtgccattgcttaagctctttcaagcttgtgagatcc

SEQ ID NO: 30088 - DNA, 450 bp, Glycine max
  Clone ID: jC-gmst02400034c04d2
gtctgtctattagatgatatatatggcaaggtgagatgtttgtctttttacaattacattcagagaaatggataaagcaatcatgtccttttatacaaaactagatacaacgaaagaagacaccattttaaacagaggcatcattaaagaggaatcaagcgaagacaaataacacagcttgacattaacataggctactaatcaaattagacaagacaaataacatagctagagtctaatcaagtggccaaatagtcccacaactcatagcattgttcatgactccattgctgatgttgttgaaagtcatatccaagtttccaagtgctgatgaattctgttcaccaactgttacaccattgtatgaggcatcattaccatggacggtgatggttggcgaaacatgcgccatgccgcgaagattaatcgtgttcagttgcggggggtgtg

SEQ ID NO: 30089 - DNA, 425 bp, Glycine max
  Clone ID: jC-gmst02400034c05d2
aaaaaaaaaaaatgcctttatttttcattgcaacattgttagagtaaaacaacagtcatatatgtacaacacatttgattttttaatattgacaatatgctatcgttccatctgttaaaaaagaccactgaaaagaggatgcacaccgaccatgtgcaccgttcaatttgagaaatcgatcactgaaaattgagttgaaaatgaccattgaaaagaggttgcatttcgaccacatgtaatgttcaatttgagaaatcaacagctgaaaactgagttgcatatccactaggggccacgcggaagatcaacgtttttttcttcaacaaggaattcctctgggccattgctaagataactgagagcagacattcggttgagacaggtgaagaccaaaatatgcaatccaatggtttaaaagaatgcga

SEQ ID NO: 30090 - DNA, 531 bp, Glycine max
  Clone ID: jC-gmst02400034c06d2
ggaatacttatatgcattaaagggtcataatgctatctgcagttgtgtccatatcatatcaaggcactcaaattacattggcaaaaaaggtagatctgtagcacacatcctgttataaattacaaagcgagattgtcttcatcacgaaggtgaggtatagcaaacagatcttagcactctcatattccattaagagtgacaacaactcttcgtgaggtaggatgatcccgatgctcgcagagccatataccctgccatgtccccatgttaagcttgccatttgtaatcggtatcgtgagtgtacaaccaaacatcgatgatttaatatgagctggcatgtcatctggcccctctagagtatgcttccatggcgcagatgacccctcgggaactatccgattgaggaaggtttcggtatcctcgcgaacatctgagtcataattctcattgatggtaagagaagcactggtgtgctgcaagaagagatgagctatgccacaccttgaagccggagaggtcttgctcaatttc

SEQ ID NO: 30091 - DNA, 283 bp, Glycine max
  Clone ID: jC-gmst02400034c07d2
aaaaagaatatgtaagctaaattggcatttaaaaagtcaaaaatagtaatagcaaagcaaaaaaaaaaaaagaaagatgtaaaaatactatagctgccataaaatgctagctaggatttgtggcagaccaccgcggtgcatgacaaatcactgtctatgctccacaaattgaactcgtcgagccatttctgaattgaattcagctccatctcacttgaccaatataccaacttcttatcccgaagagaagtttcactaccagagccaatctttgtggcaaaag

SEQ ID NO: 30092 - DNA, 292 bp, Glycine max
  Clone ID: jC-gmst02400034c09d2
atctggcaaatagaaagagggcacattagttatttattgaaacagggaaatgtcaggaacaaccttggatttctttgacatggaaaaatcctggatttcaacttacaagcatattcttttgaaacgaaattccatccggtaccactttaatggtaaaaaggttgggcacctaagtttcctttagaaaatatgagagggtcacacttcatcaaatttattttgaagcaaaaaggctttcatagtggcctttgaaaaaggcaaaaactgggtttttagggggaaagcccttttt

SEQ ID NO: 30093 - DNA, 487 bp, Glycine max
  Clone ID: jC-gmst02400034d03d2
caacaaaattgttcaggcaatccttaatgatcaaatactcaattgtatacatacattatataccaaaatatattcaaattatacaagagaaagaaaacatcaaaagccaaaatatatggcaaagtaatataatctatacacaaattaacaatgagtgtccactccaaactcgtttcactctcatttgaaggccaaagtaattgaagtatcttgtctacttgttgcctcctttattaagaattttttgcaggattcaagaatggaacggccaagaatttcagccaagcaaggcaaggctcaatttgtggcagaagatggtgagccagggggcttaaaagcagcttgttcagcacatgagagtacttcattaggtcctgcctcttctctgccaacacctatgagatcaaggtaataaagatagtgtgaaatgatgttgttcatggcctcattatctgatccctggccacaagttttggtccccatagag

SEQ ID NO: 30094 - DNA, 564 bp, Glycine max
  Clone ID: jC-gmst02400034d04d2
gagagaaagctttttgctcattttctttcaaatacagattacatgaaaaataacaagtgaacgctacactgcataccttggacaataagtgaacttacctagcaaagaccagcacaaaacataaataaaaaaataagcgaagtaaaagtgaagtataaaacgctgacattccacgtttctggaaataagacaagaaaagaaactcagaaaaatttgacttcggcgataaacaagcggaagaatcacagaatctgagcagctgtgttcaatttttcagccaagctaagctgcgttcttgtgatactagataaatacagcaaaagcaagtgatcctgcaaactgtcattcacaagcttatcaaaaactgatggggacaatttgggaagggaacctacagcttctgatataaatcttccgattttgttgtctggtgccactcgttcttccacaacatggtcaacatatttgtagatgtcatcaatcaagactagcagatgttgcattgatgcttccatcccttctaaatctgagggatttttgtcaactgcagttgccttcagcata

SEQ ID NO: 30095 - DNA, 476 bp, Glycine max
  unsure (1)..(476): unsure at all n locations
  Clone ID: jC-gmst02400034d07d2
gcgacagaagctaaagcatgttatttattgtcaacatccagcagtacaaaataagacctagcataagcatgcacaaaccaagacttagtaactgtattctcaggggaccctagtcatgaaagaagaggccccagtaagccaaggcctaaagggtttaagttggaacaagcatttcgaaatgcttgcgaaaaaaatgggtcataaaggaacaagccaaagttccctggaaaacaaccaatcaccaaactgccaccaatccacccttgatagaaatatcagccaaaatgtatgctgaatgtgacctgtacaattctatctccttccctgatttagccagttntatttggttctagtttctaacatgattaagccagaatatcacatcttcacaacttctccactagcaactccattgtgctgctgccaattgaattgcagttttgaagattcaatcccagcaagggtctggcccaatt

SEQ ID NO: 30096 - DNA, 174 bp, Glycine max
  Clone ID: jC-gmst02400034d09d2
gggtcttctttaggtagagaccaaaggcaaaaccttgtgtgagagtaagccaaagggccgaaactcctccgcgtcagagaaccaaaagggggaagagaccccggggaaaaaaagggggggggacggggaacctactcaccagtgtggtcccaattttgaaaaaacgtttcccac
